United States Patent Application Publication US 2018/0126003 A1 - sequence listing, part 179

SEQ ID NO: 317968 - DNA, 1992 bp, Artificial Sequence
  derived and/or modified sequence
atgcggcggcggcagcagggcgccgccggcggcaacttccccgtgggggggtcctttcccgaagatgttagcccacatcaagacagtggatatgccccttccccaaggtatcttagaagattcagggagatgaagccccgcgttctacagcggtggtctaggcaaatcctcaggggccttcatttcctgcacagccgtgtgccccccattctccacagagatctgaagtgtgacaatgtgtttatcaccggacctactgggtccgttaaaatcggggatctaggcctggcaacactgaagagagcttcgtttgcaaaatcagttatcggtacccctgagttcatggcccccgaaatgtacgaggagaagtacgatgaagctgtggacgtctacgctttcggaatgtgcatgctcgagatggctacgagcgaatacccatacagcgagtgccagaacgcggcccagatctataggaaagtcaccagcgggcgcaaaccaaattcttttcacaaagtcaagattcccgaagtgaaggaaataattgaaggatgcatccggacagacaaaaacgaacgtttcaccattcaggacttgctcgcccacgccttctttcgggaggaacggggggtccatgttgaacttgccgaggaagacgacggagaaaagcccggcttgaagttgtggctgcggatggaagatgcccgccgcgggggcaggcctcgtgataatcaggccatcgagttcttgttccagctgggtcgggatgcagccgaggaagtggcacaggaaatggtggccttgggactggtatgtgaggctgactatcagccggtggctagggccgtgcgagaacgcgtggctgcaattcaaagaaaacgtgagaaactgagaaaagcacgtgagctcgaggccctcccgcccgaacccggcccccctccggctactgttcccatggcgccaggacctccatcagtgttccctccagagcccgaagagcctgaagcagatcaacaccaacctttcttgtttcgacacgcgtcatacagtagtaccacgtccgactgtgaaacagatggttacctgtcatcaagcgggttcttggacgcctcagacccagccctgcagcccccgggcggagtgcccagttccctggctgagagtcatttatgcttgccctccgcctttgccctgtccattccccggtcaggtccaggctcggactttagcccaggcgactcctatgcctctgatgcagcctccgggctcagcgacgtgggggagggtatgggccagatgagaagacctcccggccgcaacttgcgtcgtaggccaaggtctcgcctcagggtgaccagcgtatccgaccagaacgaccgggttgttgaatgccagctgcagacacacaattctaagatggtgacatttcgtttcgatttggatggagacagccctgaagaaatcgccgctgcgatggtatacaatgagttcattctcccatcggaacgtgatggtttcctgcgaaggatcagggagatcatacaaagagtagaaaccctgctcaaacgagacacaggtcccatggaggccgcagaagatacgctctcaccacaagaggaaccagcacctctgcctgctctgcctgtgcccctccccgacccatctaacgaagagcttcagtccagcacctctcttgagcaccgcagttggacggcattctccacatcctcttcctcccccggtacacctctttcccccggaaatccgtttagtcctgggactcccatctcccccggcccaattgctcttcagagggagagcaggagcttttctttgcagcgcgcccagattcagcgcaccgtgcttgaggctggtcaacgccccggtaagctgtggctgagggcaacggttcaattgcgagtatgggggctggaactgaggagaaaagagatgatggggaggaaccccaagctcggcgctgcacccaatccatag

SEQ ID NO: 317969 - DNA, 1992 bp, Artificial Sequence
  derived and/or modified sequence
atgagacgacgacaacagggcgcagctgggggtaacttccctgtgggaggctcctttcccgaggacgtgtcaccacaccaagattctggttatgctcccagtcctcgatatctcagaagatttcgtgaaatgaagccaagggtgctccagcgctggtctagacagattctgagagggctgcatttcttgcacagtcgagtaccccctatccttcatcgcgatctgaaatgtgacaatgtttttatcaccggcccaaccggcagtgtgaaaatcggcgacttgggcttagccaccttgaagcgtgccagctttgcaaagagcgtcatcggaacaccagagtttatggcgcctgagatgtacgaggaaaagtatgacgaggcagtggacgtctacgccttcggaatgtgtatgctggaaatggctactagcgaatacccctattccgaatgccaaaacgccgctcagatctaccgtaaggtaactagcggacgaaagcctaacagctttcataaggtaaaaattccggaggtcaaagagattatcgaggggtgtatcaggaccgataaaaatgaacgctttacaatacaggacttgctcgctcacgcattttttcgagaggagaggggtgtgcacgtcgagcttgcggaggaggacgatggcgaaaaaccgggtttgaagctgtggctgcgaatggaagacgcccgtcgagggggacgtccaagagacaatcaggctatagagttcttgtttcagcttgggcgagatgcagccgaggaggtcgctcaggaaatggtggctctgggcctcgtctgcgaagcggattaccaacccgtagccagagccgtaagagaacgtgtggcagcaattcagaggaaacgggaaaaattgagaaaagcccgagagctcgaggctctgccccctgagcccggtcctcctcccgctacggtgcccatggccccaggtccacctagcgtattcccaccggaacctgaggaacccgaggccgaccagcaccaaccatttttgttccgacacgcttcatatagctccaccacttccgactgtgagacggatgggtatttatcaagctccgggttcctagacgcatctgatccagccttgcagccccctggtggcgttccctccagcttggcggagtcccatctctgtctcccaagcgccttcgctctctccatcccacgctccggacctggcagtgatttttcccctggggacagctatgcgtctgacgctgcatcaggattgagcgatgttggcgaaggcatgggccagatgagacgaccgcctgggcgtaaccttcggaggcggccaagatccagacttagggtcacatctgtatcggaccagaacgaccgggtagttgagtgccagttacagacccacaacagcaaaatggtcacatttcgattcgacctggatggagactctccagaagagatcgccgctgccatggtgtataatgagttcattttgccctcagagcgcgacggcttcctgagaagaatccgggaaatcattcagcgcgtagagactctcctcaagagagacactggtcctatggaagccgcagaagatactctgagcccccaggaagaacccgctccgctcccggctctgcccgtgcccctgccagacccttccaatgaggaactgcagtcctccacatcacttgagcatcggagttggacagcattttcaacatccagcagctcccccggaacacctctatccccagggaatcccttttcacccggtacccccatatcgcccggaccaatagcgctgcaacgagagtcccggtctttcagtctacaaagggctcaaattcagcgcactgtgttggaagcaggtcagcggccagggaaactctggttaagggccactgtgcagcttagggtctgggggttggagctccgcagaaaggagatgatgggcagaaatcctaaactgggagctgcacctaacccctag

SEQ ID NO: 317970 - DNA, 2213 bp, Artificial Sequence
  derived and/or modified sequence
cattcaagatgcaacacaaaagtatttcctctccgaagctctccctcatgcttggggcagttagtcatcccttcctgcgctcccacagcaccttggccgaggccctatctatcaatttacttcccaacccgtttggtaacgtcatgtctatccaccatgccccctgactcagtttctccctggggccgggcagacataggctaggagaatgctggcagaagatgcggaggcggcagcagggtgcggcaggggggaacttcccagtggggggctccttcccggaggacgtgtccccccaccaggactctggctatgcgccctcccccaggtacctgaggcggttccgggagatgaagccgcgggtccttcagcgctggagccgccaaatcctgcggggacttcatttcctacactcccgggttcctcccatcctgcaccgggatctcaagtgcgacaatgtctttatcacgggacctactggctctgtcaaaatcggggacctgggcctggccacgctcaagcgcgcctcctttgccaagagtgtcatcgggaccccggaattcatggcccccgagatgtacgaggaaaagtacgatgaggccgtggacgtgtacgcgttcggcatgtgcatgctggagatggccacctctgagtacccgtactccgagtgccagaatgccgcgcaaatctaccgcaaggtcacttcgggcagaaagccgaacagcttccacaaggtgaagatacccgaggtgaaggagatcattgaaggctgcatccgcacggataagaacgagaggttcaccatccaggacctcctggcccacgccttcttccgcgaggagcgcggtgtgcacgtggaactagcggaggaggacgacggcgagaagccgggcctcaagctctggctgcgcatggaggacgcgcggcgcggggggcgcccacgggacaaccaggccatcgagttcctgttccagctgggccgggacgcggccgaggaggtggcacaggagatggtggctctgggcttggtctgtgaagccgattaccagccagtggcccgtgcagtacgtgaacgggttgctgccatccagcgaaagcgtgagaagctgcgtaaagcaagggaattggaggcactcccaccagagccaggacctccaccagcaactgtgcccatggcccccggtccccccagtgtcttcccccctgagcctgaggagccagaggcagaccagcaccagcccttccttttccgccacgccagctactcatctaccacttcggattgcgagactgatggctacctcagctcctccggcttcctggatgcctcagaccctgcccttcagccccctgggggggtgccatccagcctggctgagtcccatctctgcctgccctcggcttttgccctatccattccacgttctggccctggaagtgacttttcccccggggacagctatgcctcagatgcagcttcaggccttagcgatgtgggagaagggatgggacaaatgaggagacccccagggaggaatctccggcgcagaccccgatcccggctgcgggtcactagtgtctcagaccagaatgacagagtggttgagtgccagctacagacccataacagcaagatggtgaccttccgatttgatctggatggggacagcccggaagagattgcagctgccatggtatataacgagttcattctgccttcggagcgagatggatttctcagacggattcgggagattatccagcgagtggagaccctgttgaagagagacactggccccatggaggctgctgaagacaccctaagcccccaggaggagccagcaccattacctgccctgcccgtccccctcccagacccatccaatgaagagctccagagcagcacctccctggagcacaggagctggacagccttctccacctcctcatcttctcctggaactcctttgtctcctggaaacccattttcccctggaacccccatttccccaggtcccatcgccctacagagggaaagccgcagcttctcacttcagagagctcagatacagaggacagtgctggaggcgggccagagaccagggaagctctggctgagagcgaccgtgcagctgagggtctgggggctggagttgaggaggaaggagatgatgggaaggaaccccaagttgggggcagcccccaacccctga

SEQ ID NO: 317971 - protein, 249 aa, Artificial Sequence
  derived and/or modified sequence
MAATAAVSPSDYLQPAASTTQDSQPSPLALLAATCSKIGPPAVEAAVTPPAPPQPTPRKLVPIKPAPLPLSPGKNSFGILSSKGNILQIQGSQLSASYPGGQLVFAIQNPTMINKGTRSNANIQYQAVPQIQASNSQTIQVQPNLTNQIQIIPGTNQAIITPSPSSHKPVPIKPAPIQKSSTTTTPVQSGANVVKLTGGGGNVTLTLPVNNLVNASDTGAPTQLLTASCQTGMLNSTRMFLFLAFINVL

SEQ ID NO: 317972 - DNA, 750 bp, Artificial Sequence
  derived and/or modified sequence
atggccgctaccgccgccgtgagcccctccgactaccttcagccagctgcaagtacgacacaggactctcagccaagcccccttgcccttctcgctgccacgtgtagcaaaataggcccccccgccgtggaagctgccgtaacgccacctgctcccccccagcccaccccgcgcaaactggttcccatcaagcccgcccctcttcctctcagccctgggaagaactccttcggaatactcagttcaaaggggaatatccttcagatccagggatcacagttatccgcttcatatcccggtggacagcttgtgttcgctattcagaatcccactatgattaacaaggggactagatccaacgccaatattcagtaccaggccgtgccacagatccaggccagtaactcacagacaattcaagtgcagccaaatcttacaaaccaaattcagattatccccggaacgaatcaggctattattacgccttcacccagtagccataagcctgtccccattaagcctgcacccattcagaagtcctcgacaaccacaaccccagtgcagtcaggtgccaacgtggtgaagctcaccgggggcgggggaaacgttaccctgacactcccagttaataacttggtgaacgctagcgatacgggcgctcctacgcaactactgacagcttcttgccaaacggggatgctgaactctacgaggatgttcctgtttctggcattcatcaacgtcctttag

SEQ ID NO: 317973 - DNA, 750 bp, Artificial Sequence
  derived and/or modified sequence
atggccgccacagctgctgtgagccccagcgactacctgcagcctgctgccagcaccacccaggacagccagcccagccccctggccctgctggccgccacctgcagcaagattggccccccagctgtggaggccgctgtgaccccaccagccccaccccagcccacccccaggaagctggtgcccatcaagccagcccccctgcccctgagccctgggaagaacagctttggcatcctgagcagcaaaggaaacatcctgcagatccagggcagccagctgagcgccagctacccaggcggccagctggtgtttgccatccagaaccccaccatgatcaacaagggcaccaggagcaatgccaacatccagtaccaggccgtgccccagatccaggccagcaacagccagaccatccaggtgcagcccaacctgaccaaccagatccagatcatccctggcaccaaccaggccatcatcacccccagccccagcagccacaagcctgtgcccatcaagccagcccccatccagaagagcagcaccaccaccacccctgtgcagagcggggccaacgtggtgaagctgactggaggcggcggcaatgtgaccctgaccctgcctgtgaacaacctggtgaatgccagtgacaccggggcccccacccagctgctgacagccagctgccagacaggcatgctgaacagcaccaggatgttcctgttcctggccttcatcaacgtgctgtag

SEQ ID NO: 317974 - DNA, 750 bp, Artificial Sequence
  derived and/or modified sequence
atggccgccaccgccgccgtgagccccagcgactacctgcagcccgcagcaagcactacacaagacagtcagccgtcacctctggctctgctggctgccacctgcagcaagatcggtcccccagcagtcgaagctgccgtgacccccccagctccgccccaaccaacaccgcgaaagttagtgcctatcaagccggcacctcttccgctgagccctggaaagaatagcttcgggatcctttcatccaaggggaatattctccagatacagggctcccaactcagcgcctcatacccaggtggccagctggtgtttgctattcagaaccctaccatgatcaataaggggacacgcagcaatgccaacattcagtaccaggccgtgcctcagatccaggctagcaactctcagacaattcaggtgcagcctaatctgaccaatcagatccagatcatccctggaaccaaccaggctatcatcacacccagcccctcgagtcataagccggtgcccattaagcccgctcctatccagaaaagtagcacaacaactacccctgttcagtcaggggcaaatgtggtaaagctaacaggcggcggagggaacgtgacactgaccctccctgtcaataacttggtgaacgcctcagacacaggcgcccccacacagctcctgaccgcatcctgccaaaccggaatgcttaacagcacaaggatgttccttttcctcgcatttattaatgtcctgtag

SEQ ID NO: 317975 - DNA, 750 bp, Artificial Sequence
  derived and/or modified sequence
atggcagctacagctgcagtctcgcccagcgactatctgcaacccgcagctagcactacgcaggactcccagccctctccactggcattgttagcggctacttgttctaagatagggcctcccgcagtggaagcagccgtgacccctcccgctcctccccagccgactcctcgaaaacttgtgccaatcaagccagctcccctccccctgtcgccaggcaagaattcttttgggatcttgtcttctaagggaaatatattacaaatccaggggagtcaactcagcgcctcataccccggagggcagcttgttttcgcaatccagaatcccactatgatcaataagggcacccgtagcaacgccaatattcaataccaggcggtgccacagattcaggcgtccaactctcaaacgatccaggtgcagcccaatctcactaatcaaatccaaatcataccgggtacgaaccaagccattattactcctagcccgtcatcgcataagccagtacctattaagcctgcaccaatccaaaaatcctcaactacaaccacgccagtacagagtggagccaacgtcgtgaagctgactgggggaggagggaatgtcactttgacacttcccgtaaataaccttgttaatgcatctgacaccggagctcctacccagctgcttacagccagttgtcagaccggcatgcttaattcaacgcgtatgttcctgttcctcgcctttatcaatgtcctctag

SEQ ID NO: 317976 - DNA, 750 bp, Artificial Sequence
  derived and/or modified sequence
atggccgccaccgccgccgtgagccccagcgactacctgcagcccgccgccagcaccacccaggacagccagcccagccccctggccctgctggccgccacctgcagcaagatcggcccccccgccgtggaggccgccgtgaccccccccgcccccccccagcccacccccagaaagctggtgcccatcaagcccgcccccctgcccctgagccccggcaagaacagcttcggcatcctgagcagcaagggcaacatcctgcagatccagggcagccagctgagcgccagctaccccggcggccagctggtgttcgccatccagaaccccaccatgatcaacaagggcaccagaagcaacgccaacatccagtaccaggccgtgccccagatccaggccagcaacagccagaccatccaggtgcagcccaacctgaccaaccagatccagatcatccccggcaccaaccaggccatcatcacccccagccccagcagccacaagcccgtgcccatcaagcccgcccccatccagaagagcagcaccaccaccacccccgtgcagagcggcgccaacgtggtgaagctgaccggcggcggcggcaacgtgaccctgaccctgcccgtgaacaacctggtgaacgccagcgacaccggcgcccccacccagctgctgaccgccagctgccagaccggcatgctgaacagcaccagaatgttcctgttcctggccttcatcaacgtgctgtag

SEQ ID NO: 317977 - protein, 342 aa, Artificial Sequence
  derived and/or modified sequence
MCTKTKEECEKHYMKHFINNPLFASTLLNLKQAEEAKTADTAIPFHSTDDPPRPTFDSLLSRDMAGYMPARADFIEEFDNYAEWDLRDIDFVEDDSDILHALKMAVVDIYHSRLKERQRRKKIIRDHGLINLRKFQLMERRYPKEVQDLYETMRRFARIVGPVEHDKFIESHALEFELRREIKRLQEYRTAGITNFCSARTYDHLKKTREEERLKRTMLSEVLQYIQDSSACQQWLRRQADIDSGLSPSIPMASNSGRRSAPPLNLTGLPGTEKLNEKEKELCQMVRLVPGAYLEYKSALLNECNKQGGLRLAQARALIKIDVNKTRKIYDFLIREGYITKG

SEQ ID NO: 317978 - DNA, 1029 bp, Artificial Sequence
  derived and/or modified sequence
atgtgcaccaagaccaaagaggaatgtgagaagcactacatgaagcattttattaataatccgctttttgccagcacattgctcaatctcaagcaagctgaagaggcgaagaccgctgatacagctataccgtttcatagcactgacgatcctcccaggcctacattcgattctcttctttcacgagatatggccggctatatgcccgcccgggctgacttcatcgaagagtttgacaactacgcagaatgggatctcagagacatcgattttgtggaggatgactccgatattctgcacgccctgaagatggccgtggttgatatctatcactcaaggctcaaggaacgccagcggagaaaaaagatcatccgggatcatggactaataaacctacggaaattccagctgatggaaaggagatatcccaaagaagtccaggatctctacgagaccatgaggaggttcgccagaatcgtcgggccagttgaacatgacaaatttattgagagccatgctcttgaattcgagctccggagggaaattaaacgactgcaggaatatagaacagctggaatcaccaacttctgctccgctaggacctacgaccacttgaagaagactcgggaggaggaacgcctgaagaggactatgcttagtgaagtgctgcagtatattcaggattcctctgcatgtcagcaatggctacgccggcaagcggatattgactccggactgagcccatccatccccatggcttcaaacagcgggcggcgtagtgctccaccgctcaacctgaccggcctgcctggcacagagaagttgaatgagaaagagaaggagctgtgtcagatggttcgattggttcctggcgcatacctcgagtataagtcagcacttctgaatgaatgcaataaacaaggggggctgaggctggctcaagcccgtgccctgattaaaatcgacgtaaataaaacacggaaaatatatgattttcttatcagagaggggtacataacaaaaggctag

SEQ ID NO: 317979 - DNA, 1029 bp, Artificial Sequence
  derived and/or modified sequence
atgtgcaccaagaccaaggaggagtgtgagaagcactacatgaagcacttcatcaacaaccccctgtttgccagcaccctgctgaacctgaagcaggccgaggaggccaagacagctgacacagccatccccttccacagcacagatgatcctccccggcccacctttgacagcctgctgagccgggacatggccggctacatgcctgcccgggctgacttcatcgaggagtttgacaactatgcagagtgggacctgcgggacatcgactttgtggaggatgacagcgacatcctgcacgccctgaagatggctgtggtggacatctaccacagccggctgaaggagcggcagaggaggaagaagatcatccgggaccacggcctcatcaacctgaggaagttccagctgatggagcggcgctaccccaaggaggtgcaggacctgtatgagaccatgagaagatttgccagaattgtgggccctgtggagcatgacaagttcatcgagagccacgccctggagtttgagctgcggcgggagatcaagaggctgcaggagtacagaacagctggcatcaccaacttctgcagcgcccggacctatgaccacctgaagaagacccgggaggaggagcggctgaagaggaccatgctgtctgaggtgctgcagtacatccaggacagcagcgcctgccagcagtggctgcggcggcaggccgacatcgacagcggcctgagccccagcatccccatggccagcaacagcggccgccgcagcgccccacccctgaacctgaccggcctgcccggcacagagaagctgaatgagaaggagaaggagctgtgccagatggtgcggctggtgcctggggcctacctggagtacaagagcgccctgctgaatgaatgcaacaagcagggcggcctgcggctggcccaggcccgggccctgatcaagattgatgtgaacaagaccaggaagatctatgacttcctgatccgggagggctacatcaccaagggctag

SEQ ID NO: 317980 - DNA, 1029 bp, Artificial Sequence
  derived and/or modified sequence
atgtgcaccaagaccaaggaggagtgcgagaagcactacatgaagcactttatcaataatccactgttcgctagcacgctgctcaacctgaaacaagccgaggaagccaaaactgcagacacagcaatcccgttccactccaccgacgaccctccgagaccgacattcgactctctgctctctagagacatggctggctatatgccagcccgcgcagactttatcgaagaattcgacaattacgctgagtgggacctgagggatatcgatttcgtggaagacgattctgacatcctccacgctctgaaaatggcggtggtggacatctaccacagcagactgaaggagcgacagaggaggaagaaaataataagggatcacgggcttataaaccttcgtaagttccagctcatggaaaggagatatccaaaggaggtgcaggatctctatgagacgatgcgcaggttcgcgaggattgtgggacctgtagagcacgataaatttattgagtcccacgcactggaattcgaattgagaagagaaatcaagagactgcaagaatatagaacagccggtatcacaaacttttgtagcgcaaggacgtatgaccacctgaagaagactagagaggaggagagactaaaacgaaccatgttgtccgaggtgctgcagtatatacaggattctagcgcatgccaacagtggttaagacggcaggccgacattgactccggcctgtctcccagcatccctatggctagtaactccggccggaggagcgctcctcccctcaatctcacggggctgccggggaccgagaagctgaatgagaaggagaaggagctctgccagatggtcaggctcgtgcccggcgcatatctcgaatacaagtctgcactacttaatgaatgcaacaaacagggaggcctccgacttgctcaggcccgggctttaatcaaaatcgacgtgaacaagacacgcaaaatttacgatttcctgattagggagggatacattaccaaaggatag

SEQ ID NO: 317981 - DNA, 1029 bp, Artificial Sequence
  derived and/or modified sequence
atgtgcaccaaaactaaggaagaatgcgaaaagcactacatgaaacacttcataaataaccctctgtttgctagcaccctcctaaatctgaagcaggcagaggaggccaaaaccgccgacacagcaatcccctttcatagtaccgatgacccacccaggcccacctttgattccctactgtcccgagacatggccggatatatgccggcacgtgcggactttattgaggaatttgataactacgccgaatgggacctacgcgatatagattttgtagaggatgactcagacatcctccatgccctgaagatggctgtggtcgacatataccattcacgacttaaggagcgacagaggcggaagaaaatcatccgcgatcacggtttaattaatctcagaaagttccagctcatggaacgtcgctacccaaaggaggtgcaggatctctatgagaccatgaggcgcttcgccagaatcgtcggaccagtggaacacgacaagtttatcgagtctcatgccctggagttcgagcttcgaagagaaattaagcgattgcaggaatatcgtactgccggaattaccaacttctgtagcgccagaacttacgaccatctgaagaagacacgcgaggaggagaggctgaaacgcaccatgctcagcgaagtgctccagtacattcaagattccagtgcctgccagcaatggctaagacggcaggccgacatcgactcaggcctcagtccaagtattcccatggcgagtaatagcggccgacgctctgccccacccctgaatctcacaggactccccggaaccgaaaaacttaatgagaaggagaaagagctgtgtcagatggttaggctcgtgcccggagcttatcttgagtataaaagtgcgcttctgaacgagtgtaacaagcagggtggactgcgtctcgcgcaggccagagcacttatcaaaatcgacgtgaacaaaactagaaaaatctacgacttcttgatcagggaagggtatatcaccaagggttag

SEQ ID NO: 317982 - DNA, 1029 bp, Artificial Sequence
  derived and/or modified sequence
atgtgcaccaagaccaaggaggagtgcgagaagcactacatgaagcacttcatcaacaaccccctgttcgccagcaccctgctgaacctgaagcaggccgaggaggccaagaccgccgacaccgccatccccttccacagcaccgacgacccccccagacccaccttcgacagcctgctgagcagagacatggccggctacatgcccgccagagccgacttcatcgaggagttcgacaactacgccgagtgggacctgagagacatcgacttcgtggaggacgacagcgacatcctgcacgccctgaagatggccgtggtggacatctaccacagcagactgaaggagagacagagaagaaagaagatcatcagagaccacggcctgatcaacctgagaaagttccagctgatggagagaagataccccaaggaggtgcaggacctgtacgagaccatgagaagattcgccagaatcgtgggccccgtggagcacgacaagttcatcgagagccacgccctggagttcgagctgagaagagagatcaagagactgcaggagtacagaaccgccggcatcaccaacttctgcagcgccagaacctacgaccacctgaagaagaccagagaggaggagagactgaagagaaccatgctgagcgaggtgctgcagtacatccaggacagcagcgcctgccagcagtggctgagaagacaggccgacatcgacagcggcctgagccccagcatccccatggccagcaacagcggcagaagaagcgccccccccctgaacctgaccggcctgcccggcaccgagaagctgaacgagaaggagaaggagctgtgccagatggtgagactggtgcccggcgcctacctggagtacaagagcgccctgctgaacgagtgcaacaagcagggcggcctgagactggcccaggccagagccctgatcaagatcgacgtgaacaagaccagaaagatctacgacttcctgatcagagagggctacatcaccaagggctag

SEQ ID NO: 317983 - protein, 712 aa, Artificial Sequence
  derived and/or modified sequence
MREPALAASAMAYHPFHAPRPADFPMSAFLAAAQPSFFPALALPPGALAKPLPDPGLAGAAAAAAAAAAAAEAGLHVSALGPHPPAAHLRSLKSLEPEDEVEDDPKVTLEAKELWDQFHKLGTEMVITKSGRRMFPPFKVRVSGLDKKAKYILLMDIVAADDCRYKFHNSRWMVAGKADPEMPKRMYIHPDSPATGEQWMAKPVAFHKLKLTNNISDKHGFTILNSMHKYQPRFHIVRANDILKLPYSTFRTYVFPETDFIAVTAYQNDKITQLKIDNNPFAKGFRDTGNGRREKRKQLTLPSLRLYEEHCKPERDGAESDASSCDPPPAREPPTSPGAAPSPLRLHRARAEEKSCAADSDPEPERLSEERAGAPLGRSPAPDSASPTRLTEPERARERRSPERGKEPAESGGDGPFGLRSLEKERAEARRKDEGRKEAAEGKEQGLAPLVVQTDSASPLGAGHLPGLAFSSHLHGQQFFGPLGAGQPLFLHPGQFTMGPGAFSAMGMGHLLASVAGGGNGGGGGPGTAAGLDAGGLGPAASAASTAAPFPFHLSQHMLASQGIPMPTFGGLFPYPYTYMAAAAAAASALPATSAAAAAAAAAGSLSRSPFLGSARPRLRFSPYQIPVTIPPSTSLLTTGLASEGSKAAGGNSREPSPLPELALRKVGAPSRGALSPSGSAKEAANELQSIQRLVSGLESQRALSPGRESPK

SEQ ID NO: 317984 - protein, 326 aa, Artificial Sequence
  derived and/or modified sequence
MSAFLAAAQPSFFPALALPPGALAKPLPDPGLAGAAAAAAAAAAAAEAGLHVSALGPHPPAAHLRSLKSLEPEDEVEDDPKVTLEAKELWDQFHKLGTEMVITKSGRRMFPPFKVRVSGLDKKAKYILLMDIVAADDCRYKFHNSRWMVAGKADPEMPKRMYIHPDSPATGEQWMAKPVAFHKLKLTNNISDKHGFTILNSMHKYQPRFHIVRANDILKLPYSTFRTYVFPETDFIAVTAYQNDKITQLKIDNNPFAKGFRDTGNGRREKRKQLTLPSLRLYEEHCKPERDGAESDASSCDPPPAREPPTSPGAAPSPLRLHRARG

SEQ ID NO: 317985 - DNA, 3396 bp, Artificial Sequence
  derived and/or modified sequence
cagagatcacgacaagatctaaccagtcgcgcgtggtccccggcgccggagcgggccagctcagcccggcccagcccggccccgcgcagagcccccgccgcccccgcgcacagagccgggtgccccttgcggtgcgccggacgggaagccccgaggagcagctgctgcgcccgccacccgggtcgtccgtccaccgcgcgcgccgccgcccgggccgggggtccgagccgcgcgcccccggccccggccccggcccccgggcgcctgggccggatgtcccgatgagagagccggcgctggcggccagcgccatggcttaccacccgttccacgcgccacggcccgccgacttccccatgtccgcctttctggcggcggcgcagccctccttcttcccggcactcgcgctgccgcccggcgcgctggccaagccgctgcccgacccgggcctggcgggggcggcggccgcggcggcggcggcggcagcagcggccgaggcggggctgcacgtctcggcactgggcccgcacccgcccgccgcgcatctgcgctccctcaagagcctggagcccgaggacgaggtggaggacgaccccaaggtgacgctggaggccaaggagctgtgggaccagttccacaagctaggcacggagatggtcatcaccaagtccgggaggcggatgttcccccccttcaaggtgcgagtcagcggcctggacaagaaggccaagtatatcctgctgatggacattgtagccgctgacgattgccgctataagttccacaactcgcgctggatggtggcgggcaaggccgaccctgagatgcccaaacgcatgtacatccacccagacagcccagccacgggggagcagtggatggctaagcctgtggccttccacaagctgaagctgaccaacaacatctctgacaagcacggcttcaccatcctaaactccatgcacaagtaccagccgcgcttccacatagtgcgagccaacgacatcctgaagctgccttacagcaccttccgcacctacgtgttcccggagaccgacttcatcgccgtcactgcctaccagaatgacaagatcacacagctgaagatcgacaacaacccgtttgccaagggcttccgggacaccgggaacggccggcgggagaaaaggaagcagctgacgctgccgtctctacgcttgtacgaggagcactgcaaacccgagcgcgatggcgcggagtcagacgcctcgtcgtgcgaccctccccccgcgcgggaaccacccacctccccgggcgcagcgcccagtccgctgcgcctgcaccgggcccgagctgaggagaagtcgtgcgccgcggacagcgacccggagcctgagcggttgagcgaggagcgtgcgggggcgccgctaggccgcagcccggctccagacagcgccagccccactcgcttgaccgaacccgagcgcgcccgggagcggcgtagtcccgagaggggcaaggagccggccgagagcggcggggacggcccgttcggcctgaggagcctggagaaggagcgcgccgaagctcggaggaaggacgaggggcgcaaggaggcggccgagggcaaggagcagggcctggcgccgctggtggtgcagacagacagtgcgtcccccctgggcgccggacacctgcccggcctggccttttccagccacttgcacgggcagcagttctttgggccgctgggagccggccagccgctcttcctgcaccctggacagttcaccatgggccctggcgccttctccgccatgggcatgggtcacctactggcctcggtggcaggcggcggcaacggcggaggtggcgggcctgggaccgccgcggggctggacgcaggcgggctgggtcccgcggccagcgcagcaagcaccgccgcgcccttcccgttccacctctcccagcacatgctggcatctcagggaattccaatgcccactttcggaggcctcttcccctacccctacacctacatggcagcagcagccgcagccgcctcggctttgcccgccactagtgctgcagctgccgccgccgcagccgccggctccctctcccggagccccttcctgggcagtgcccggccccgactgcgtttcagcccctatcagatcccggtcaccatcccgcctagcactagcctcctcaccaccgggctggcctctgagggctccaaggccgctggtggaaacagccgggagcctagccccctgcccgagctggctctccgcaaagtaggggccccatcccgcggtgccctgtcgcccagtggctcggccaaggaggcggccaatgaactgcagagcatccagagactggtgagtgggctggagagccagcgagccctctccccaggccgggagtcgcccaagtgaggggctgcccagctgctcccctgccacgcaggccacccgggctgcctgcccctgctgcttgggacgtgtacagcacagaatgagtatttatttaaataaaggagaaaagtgggctgcagcagccggaatagagcctcgtctggcaagtcggggcctgggacacttccctgggcctcaacaaggatcaggctgctggaaacacagtcacttgggagctgctgggctaggtccagatccgctccagcgtcaaggtggcatccgaaggtgtctctggtcttccagcgaggtgggagaggcctcatccagggcccagcggtccctgcagaagccagaaggtgcaggggccaggggtgggagcatcggagggagtcccagagccctggaccttgggcctagaccgcgtgataaaactgggttgagggatgctggaaccagttacgactgaagtcagtgtagacctgagctgggagggaacctgttagtctccccacctcttccctgaagagacaggcacccctcccagccgtggtcaacggagggagtggcacttctgccttgagtccccaggggaaaaaaaaaaaagatatttatgaaataaatggtaatttgtgtaaataagctttaaggttcccagaatatgcaaattggtattaatttattcaaaggtgtacattgctgtgtacatatatttagagattaactcatacatttaaagtttttttcattttacgtgagcatctatattgtacagggctgggggggcccttggctgcgggagaaggcccagagccctggaggagccaccaccccgccggcccctcgacccctcggcccctcggcccctccgcccgggtttggctcgcccggcccgcgggctccacctcaggttttcacttttcgctccggagcgagaacgaaacgacaaaaacgcaagaaaacaataaaacgctagaaagcgaaaaaaaaaaaaaaaaaa

SEQ ID NO: 317986 - DNA, 2139 bp, Artificial Sequence
  derived and/or modified sequence
atgagagagcccgccctggccgccagcgccatggcctaccaccccttccacgcccccagacccgccgacttccccatgagcgccttcctggccgccgcccagcccagcttcttccccgccctggccctgccccccggcgccctggccaagcccctgcccgaccccggcctggccggcgccgccgccgccgccgccgccgccgccgccgccgccgaggccggcctgcacgtgagcgccctgggcccccacccccccgccgcccacctgagaagcctgaagagcctggagcccgaggacgaggtggaggacgaccccaaggtgaccctggaggccaaggagctgtgggaccagttccacaagctgggcaccgagatggtgatcaccaagagcggcagaagaatgttcccccccttcaaggtgagagtgagcggcctggacaagaaggccaagtacatcctgctgatggacatcgtggccgccgacgactgcagatacaagttccacaacagcagatggatggtggccggcaaggccgaccccgagatgcccaagagaatgtacatccaccccgacagccccgccaccggcgagcagtggatggccaagcccgtggccttccacaagctgaagctgaccaacaacatcagcgacaagcacggcttcaccatcctgaacagcatgcacaagtaccagcccagattccacatcgtgagagccaacgacatcctgaagctgccctacagcaccttcagaacctacgtgttccccgagaccgacttcatcgccgtgaccgcctaccagaacgacaagatcacccagctgaagatcgacaacaaccccttcgccaagggcttcagagacaccggcaacggcagaagagagaagagaaagcagctgaccctgcccagcctgagactgtacgaggagcactgcaagcccgagagagacggcgccgagagcgacgccagcagctgcgaccccccccccgccagagagccccccaccagccccggcgccgcccccagccccctgagactgcacagagccagagccgaggagaagagctgcgccgccgacagcgaccccgagcccgagagactgagcgaggagagagccggcgcccccctgggcagaagccccgcccccgacagcgccagccccaccagactgaccgagcccgagagagccagagagagaagaagccccgagagaggcaaggagcccgccgagagcggcggcgacggccccttcggcctgagaagcctggagaaggagagagccgaggccagaagaaaggacgagggcagaaaggaggccgccgagggcaaggagcagggcctggcccccctggtggtgcagaccgacagcgccagccccctgggcgccggccacctgcccggcctggccttcagcagccacctgcacggccagcagttcttcggccccctgggcgccggccagcccctgttcctgcaccccggccagttcaccatgggccccggcgccttcagcgccatgggcatgggccacctgctggccagcgtggccggcggcggcaacggcggcggcggcggccccggcaccgccgccggcctggacgccggcggcctgggccccgccgccagcgccgccagcaccgccgcccccttccccttccacctgagccagcacatgctggccagccagggcatccccatgcccaccttcggcggcctgttcccctacccctacacctacatggccgccgccgccgccgccgccagcgccctgcccgccaccagcgccgccgccgccgccgccgccgccgccggcagcctgagcagaagccccttcctgggcagcgccagacccagactgagattcagcccctaccagatccccgtgaccatcccccccagcaccagcctgctgaccaccggcctggccagcgagggcagcaaggccgccggcggcaacagcagagagcccagccccctgcccgagctggccctgagaaaggtgggcgcccccagcagaggcgccctgagccccagcggcagcgccaaggaggccgccaacgagctgcagagcatccagagactggtgagcggcctggagagccagagagccctgagccccggcagagagagccccaagtag

SEQ ID NO: 317987 - DNA, 981 bp, Artificial Sequence
  derived and/or modified sequence
atgagcgccttcctggccgccgcccagcccagcttcttccccgccctggccctgccccccggcgccctggccaagcccctgcccgaccccggcctggccggcgccgccgccgccgccgccgccgccgccgccgccgccgaggccggcctgcacgtgagcgccctgggcccccacccccccgccgcccacctgagaagcctgaagagcctggagcccgaggacgaggtggaggacgaccccaaggtgaccctggaggccaaggagctgtgggaccagttccacaagctgggcaccgagatggtgatcaccaagagcggcagaagaatgttcccccccttcaaggtgagagtgagcggcctggacaagaaggccaagtacatcctgctgatggacatcgtggccgccgacgactgcagatacaagttccacaacagcagatggatggtggccggcaaggccgaccccgagatgcccaagagaatgtacatccaccccgacagccccgccaccggcgagcagtggatggccaagcccgtggccttccacaagctgaagctgaccaacaacatcagcgacaagcacggcttcaccatcctgaacagcatgcacaagtaccagcccagattccacatcgtgagagccaacgacatcctgaagctgccctacagcaccttcagaacctacgtgttccccgagaccgacttcatcgccgtgaccgcctaccagaacgacaagatcacccagctgaagatcgacaacaaccccttcgccaagggcttcagagacaccggcaacggcagaagagagaagagaaagcagctgaccctgcccagcctgagactgtacgaggagcactgcaagcccgagagagacggcgccgagagcgacgccagcagctgcgaccccccccccgccagagagccccccaccagccccggcgccgcccccagccccctgagactgcacagagccagaggctag

SEQ ID NO: 317988 - DNA, 2139 bp, Artificial Sequence
  derived and/or modified sequence
atgcgagaacccgcccttgccgcctctgctatggcataccacccattccacgctccgcggccagccgactttcctatgagcgcctttctggcagcagcccagccatcattcttccccgccctggcactgccacctggggctctggcaaagcctttgcctgatccggggctggccggagctgccgctgctgccgccgccgcagccgctgccgccgaggccgggctccacgtttcagcactgggcccacatcctcccgcagcacacctgaggagtctgaaaagtttggagccggaagacgaagtggaggatgatcccaaagtgacactggaagctaaggagctgtgggatcaatttcacaagctgggaacagaaatggtgattacaaaatctggaagacggatgttccccccattcaaagttagagtttcaggactagacaagaaagcaaagtatatcctgctaatggacatcgttgcagccgatgactgtcgctataaattccataactctcggtggatggtcgccggtaaggccgatcccgaaatgccgaaacgcatgtatattcaccctgatagtccggctacaggagagcagtggatggccaagcccgtggctttccacaaactgaaactcaccaataacatctccgacaaacatggatttaccatccttaattccatgcacaagtatcagcctagattccatattgtgcgggctaacgacatcctgaagttaccctatagcactttccggacatacgtgtttcctgagactgacttcatcgcagttaccgcctaccaaaacgacaagattacccagctgaagatcgacaataatccatttgctaagggcttccgggacactggcaacgggcgccgcgaaaaacgtaaacagcttacactgccttccttaaggctttatgaagaacattgcaagcctgagcgggacggggccgaatcagatgccagcagttgcgatccaccgcccgctcgggagccacccacatccccaggcgccgcgcccagtccactgagattacaccgcgctagagccgaagaaaagtcttgcgcagcggatagtgatcccgagcccgagcgactctcagaagagagggccggagcacccctggggaggtctcctgcccccgactcagcctcgcctacacggctgacagaaccagaaagagcgagagagaggcgttcaccagaaaggggaaaggagccagccgaatccggcggtgacggacccttcgggcttcggagcctggagaaggaacgagcagaagctcgccgaaaagacgaaggtcggaaagaagctgccgaggggaaagagcaaggattggcacctctggtcgtgcagacggacagcgcctcacctttgggagccggtcacttgcccggactcgctttctcaagccacttgcacggccagcaatttttcgggccgttgggggcaggtcagcccctgttcctgcatcccggtcagttcacaatgggaccgggcgccttctcagccatgggaatggggcacctgttagccagcgtggctggcggagggaacggagggggcggaggaccaggaactgccgctggactcgacgctggaggcctggggccagcggccagcgccgcatccacagctgcccccttcccatttcacctcagtcagcacatgctggctagtcaggggatccctatgccaacttttggtggactgtttccctatccttatacatatatggccgcagctgcagctgccgcctccgcactgccagccaccagcgcagcagctgctgcggctgcagcggctggatccctctcccgcagcccgtttttaggctcagctcgcccccgccttcggtttagcccatatcagatcccggtgactattcctcctagcaccagtttgttgaccacaggtctcgccagtgagggtagtaaagctgctggaggcaacagccgggagccctcccctctgccagaactggctctgagaaaagtgggggcaccgtctaggggggctcttagcccatcaggcagtgcaaaggaggccgccaacgagctgcagtccatccagagattagtgagtggcttagagagccaacgagccctgtcgcccggcagagaatcgccaaagtag

SEQ ID NO: 317989 - DNA, 981 bp, Artificial Sequence
  derived and/or modified sequence
atgagcgcttttttagcagccgcccaaccatcattttttccggctcttgctctgccccctggggctctggcaaagccattaccagaccctggtctggccggtgccgcagctgctgcggcagcggccgccgcagccgcggaggctggtctccacgtctccgccctcggaccacacccacccgccgctcacctccggagccttaaatcacttgaacctgaggatgaagtggaggacgaccctaaggttacactagaagccaaagagctctgggaccaatttcacaagttgggcactgagatggtcatcacaaaatctggtcggcgcatgttccccccctttaaggtgagggtgagcggactcgacaaaaaagctaaatatatcctgctgatggacatcgttgcggcagatgattgccgttacaaattccataactcccgctggatggtggcgggtaaggccgatcccgagatgcccaaacggatgtacatacacccagattcgccggctacaggagagcaatggatggccaaacctgtggccttccacaaacttaaactgactaacaacatctccgacaagcacgggtttacaattctgaactccatgcataagtaccagccccgctttcacattgtgcgggccaacgatatcctcaaactgccatactcaaccttcagaacttacgtctttccagagactgacttcattgctgtgacagcctatcagaatgacaagattacccagctgaagattgacaacaatccttttgccaagggctttagggacaccgggaacggaaggcgggagaagagaaagcaactgacactgccttcacttagactgtatgaagaacattgcaagcccgagagggacggcgcagagagcgatgcctcctcttgcgaccctccccccgctagggagccacctacctctccaggtgccgctccaagtccactgcgactccaccgcgccagaggttag

SEQ ID NO: 317990 - DNA, 2139 bp, Artificial Sequence
  derived and/or modified sequence
atgagggagcccgccctggccgccagcgccatggcctaccaccccttccacgcccccaggcctgctgacttccccatgtctgccttcctggccgccgcccagcccagcttcttccctgccctggccctgcccccaggggccctggccaagcccctgcctgaccccggcctggccggggctgctgctgctgctgctgctgctgctgctgctgctgaggccggcctgcacgtgtctgccctgggcccccaccccccagctgcccacctgcggagcctgaagagcctggagccagaagatgaggtggaggatgaccccaaggtgaccctggaggccaaggagctgtgggaccagttccacaagctgggcacagagatggtgatcaccaagagcggccgcaggatgttcccccccttcaaggtgcgggtgtctggcctggacaagaaggccaagtacatcctgctgatggacatcgtggccgcagatgactgccgctacaagttccacaacagccgctggatggtggccggcaaggctgaccctgagatgcccaagaggatgtacatccacccagacagccctgccactggagagcagtggatggccaagcctgtggccttccacaagctgaagctgaccaacaacatcagtgacaagcacggcttcaccatcctgaacagcatgcacaagtaccagccccgcttccacatcgtgcgggccaatgacatcctgaagctgccctacagcaccttccgcacctacgtgtttcctgagacagacttcatcgctgtgacagcctaccagaatgacaagatcacccagctgaagattgacaacaacccctttgccaagggcttccgggacacaggaaatggccggcgggagaagaggaagcagctgaccctgcccagcctgcggctgtatgaggagcactgcaagccagagagagatggagctgagagtgatgccagcagctgtgaccccccaccagcccgggagccccccaccagccctggagctgcccccagccccctgcggctgcaccgggcccgggcagaggagaagagctgtgccgctgacagcgaccctgagcctgagcggctgtctgaggagcgggccggggcccccctgggccgcagccctgccccagacagcgccagccccacccggctgacagagcctgagcgggcccgggagaggaggagccctgagcggggcaaggagcctgctgagagcggaggagatggccccttcggcctgcggagcctggagaaggagagagctgaggcccggaggaaggatgagggcaggaaggaggccgctgagggcaaggagcagggcctggcccccctggtggtgcagacagacagcgccagccccctgggcgccggccacctgcccggcctggccttcagcagccacctgcacggccagcagttcttcggccccctgggcgccggccagcccctcttcctgcaccctggccagttcaccatgggccctggggccttcagcgccatgggcatgggccacctgctggcctctgtggccggcggcggcaatggaggcggcggcggccctggaacagctgctggcctggatgctgggggcctgggccctgctgccagcgctgccagcacagctgcccccttccccttccacctgagccagcacatgctggccagccagggcatccccatgcccacctttggaggcctcttcccctacccctacacctacatggctgctgctgctgctgctgccagcgccctgcctgccaccagcgctgctgctgctgctgctgctgctgctggcagcctgagccgcagccccttcctgggcagcgcccggccccggctgcgcttcagcccctaccagatccctgtgaccatcccccccagcaccagcctgctgaccaccggcctggccagcgagggcagcaaggctgctgggggcaacagccgggagcccagccccctgcctgagctggccctgaggaaggtgggcgcccccagcagaggagccctgagccccagcggcagcgccaaggaggccgccaatgagctgcagagcatccagaggctggtgtctggcctggagagccagagggccctgagccctggccgggagagccccaagtag

SEQ ID NO: 317991 - DNA, 981 bp, Artificial Sequence
  derived and/or modified sequence
atgtctgccttcctggccgccgcccagcccagcttcttccctgccctggccctgcccccaggggccctggccaagcccctgcctgaccccggcctggccggggctgctgctgctgctgctgctgctgctgctgctgctgaggccggcctgcacgtgtctgccctgggcccccaccccccagctgcccacctgcggagcctgaagagcctggagccagaagatgaggtggaggatgaccccaaggtgaccctggaggccaaggagctgtgggaccagttccacaagctgggcacagagatggtgatcaccaagtctggaagaaggatgtttcctcccttcaaggtgcgggtgtctggcctggacaagaaggccaagtacatcctgctgatggacatcgtggccgcagatgactgccgctacaagttccacaacagccgctggatggtggccggcaaggctgaccctgagatgcccaagaggatgtacatccacccagacagccctgccaccggggagcagtggatggccaagcctgtggccttccacaagctgaagctgaccaacaacatcagtgacaagcacggcttcaccatcctgaacagcatgcacaagtaccagccccgcttccacatcgtgcgggccaatgacatcctgaagctgccctacagcaccttccgcacctacgtgtttcctgagacagacttcatcgctgtgacagcctaccagaatgacaagatcacccagctgaagattgacaacaacccctttgccaagggcttccgggacacaggaaatggaagaagagagaagaggaagcagctgaccctgcccagcctgcggctgtatgaggagcactgcaagccagagagagatggagctgagagtgatgccagcagctgtgaccccccaccagcccgggagccccccaccagccctggggccgcccccagccccctgcggctgcaccgggcccggggctag

SEQ ID NO: 317992 - DNA, 2139 bp, Artificial Sequence
  derived and/or modified sequence
atgcgggagcccgccctggccgccagcgccatggcctaccacccctttcacgctcccaggccggcggacttccctatgagtgccttcctggctgctgcacagcctagcttcttccccgctctagcactgccacccggggctcttgcaaaacctctgcccgatcccggccttgccggtgccgctgctgcagctgctgccgccgccgccgcagccgaagccggcctacacgtgagtgccctagggccccaccctcctgccgcacacttacgaagccttaagagcttggagccagaggacgaggtcgaggacgacccaaaagtcacgctcgaagctaaggagttgtgggatcaattccataagctgggtacagagatggtaatcacgaaaagcggaagacgtatgtttcctcctttcaaagttcgagtgtccggcctggataaaaaagcgaagtatatcttgcttatggatatcgtggccgcagatgattgccggtacaaattccataattctagatggatggttgctggaaaagcggaccccgaaatgcccaagaggatgtatatacatcccgactctcctgctaccggagagcagtggatggccaaacctgtggcttttcacaagcttaaactgaccaataatatcagtgacaagcacggattcaccattctcaactcgatgcacaagtaccaacccaggtttcatatagttcgcgcaaacgatatcctcaaactgccctactcaacatttagaacttacgtgttccctgagacagacttcatcgcggttaccgcctaccagaatgataagatcacgcagctcaagatcgacaataatccgttcgccaagggattccgggatactgggaatggccgcagggagaagcgcaaacagcttacacttcccagccttcgcttatacgaagaacattgcaagccagaaagggatggagccgagagcgatgcctcgtcttgtgaccctcccccggccagagaacccccaacaagtcctggtgccgcccctagccctctccgattgcaccgtgcacgggcagaggagaagtcttgtgccgccgacagcgacccagaaccagaaaggctctccgaagagcgagcaggcgcgccactgggacgcagtccagcgcctgattctgcctcgccaactagactgaccgagccagagagagctcgggagaggaggtctcccgaaagagggaaggagccagcagagagtggaggggatggaccattcggtttgcgatcccttgagaaagagcgtgctgaggctcgccggaaagacgaagggaggaaggaagctgctgaaggaaaggagcagggcctggccccgctggttgttcagactgacagtgctagccccctgggagctgggcacctgcctgggctggcattctcgtctcacttgcatggccagcagttcttcggacccttgggggcaggtcagccgctattcctgcaccctggccagtttactatggggcccggcgccttctctgctatgggaatgggtcacctgttggcttccgtggctggaggcgggaacggtggcgggggtggaccaggcaccgccgccgggctggatgctggggggctgggaccagcagcctctgctgcaagtacagctgcccccttccccttccatctctctcagcatatgctggcttcccagggtattcccatgcctacattcgggggcttgttcccatatccctacacgtacatggcagcagcagccgcggctgcttccgccttgcccgcaacttcagctgccgccgcagccgcagcggccgcaggctcgctgagccggtctccatttcttggctcagcccgccctcgcctacgattttctccatatcagatccctgtgaccatcccccccagcacatctctgctcaccactggcctggctagtgagggctccaaagctgctggcggcaactcccgagaaccgtcacctcttccagaactggccctacggaaagtaggcgccccatcccggggggcactcagcccttctggtagtgcgaaagaggccgccaatgagcttcagagcatacagcgactagtctctggcttggagagccagcgcgctctcagcccaggccgagaatcaccaaaatag

SEQ ID NO: 317993 - DNA, 981 bp, Artificial Sequence
  derived and/or modified sequence
atgagcgccttcctggccgccgcccagcccagcttcttccccgccctcgccctcccccctggggctctggccaagccactacctgatcctgggctcgctggggcagctgccgcagctgctgccgctgccgcagcagccgaggcagggctgcacgtctctgctttaggaccgcatccacctgctgcccatctgagaagcctgaagagtctggagccagaggacgaggtcgaagatgacccaaaagtcacactggaagcaaaggagctctgggaccagtttcacaaattgggcaccgagatggtgataacaaagtccggcaggaggatgtttccaccgtttaaggtgcgtgtgtcgggcttggacaagaaagccaaatacatcctgctaatggacatcgtagcagccgacgactgtcgctacaaatttcataattcacgctggatggtcgcggggaaggccgatccagaaatgccgaagaggatgtatatccatcctgattctcccgctacaggagagcagtggatggctaagcctgtcgcttttcataagctgaaactgacgaataacatcagtgacaagcacgggtttactatcctcaacagcatgcacaaataccagcctaggttccacatcgtgcgcgcaaatgacatcctcaagttgccctattctaccttccgcacctacgttttccccgaaaccgatttcattgccgtgaccgcttatcagaacgacaaaataacacagttaaaaatcgataacaacccttttgccaagggatttcgtgataccggcaatggtcgccgggaaaaacgaaagcagctaacgttacccagtctgaggctgtatgaagagcattgtaagccagaaagagacggggctgagtctgacgcctcgtcttgcgatccaccacctgcccgggagccgcccactagcccaggtgctgcacctagtcctctcagattgcaccgggccaggggatag

SEQ ID NO: 317994 - DNA, 2139 bp, Artificial Sequence
  derived and/or modified sequence
atgcgggagcccgcattggcagcatctgcaatggcttatcacccctttcatgctcccaggccggcagactttcccatgagcgccttcctcgcagcagcccaaccctctttcttccctgctctcgctctgccacctggggcattggccaagccgcttcccgacccgggacttgccggagccgcagcggctgctgcagcggcagcagccgcagccgaggcaggattacacgtcagtgctctcggcccacaccccccagctgctcatctgcgttccctgaaatcgctggaaccggaagacgaggtagaggacgatcctaaggtaacactcgaagccaaggagctgtgggaccagttccataagctcggcacggagatggtgataacaaaatcaggacggagaatgtttcctcctttcaaggtcagagtgtcagggctggacaaaaaagcgaaatacatcttgctgatggacattgtcgcggcagacgactgccgctacaaatttcacaactccaggtggatggtggcaggcaaagctgaccctgagatgcccaagcgcatgtatattcaccccgactctcctgccaccggagaacagtggatggcaaagcctgttgcttttcacaaactcaagctgaccaataatatcagcgacaaacacggcttcactattctcaacagcatgcacaagtaccaacccagattccacatcgtgcgtgccaacgatatcctgaagctgccatactctactttccgaacatatgttttcccggagacagactttatagccgtgaccgcctatcagaacgataagatcacacagctgaagattgacaataatcccttcgccaagggatttcgggatacaggtaatgggagacgggagaagcggaagcagctgactctgccgtctctcagactgtatgaagaacactgcaaaccagagagggatggagccgagtcagacgcttcgagctgcgatccgcctcccgcaagagagcccccaacttcacctggagccgcaccctcacccttgcgcttacaccgtgcacgggcagaagagaaaagctgcgcggctgattcagatcccgagccagagcgcctttcagaagagcgagcgggagcacctttagggagatcccccgcaccagactccgcatcccccacaaggcttaccgagcccgagcgggctagggagcgccgatcccccgaacgcggaaaggaaccagccgagtccgggggtgacggaccttttggactgcgcagtctggaaaaagaacgagccgaggccaggcgaaaagatgaaggtcggaaagaggcagcagaaggtaaggaacaaggcctggctcctttagtggtccagacagacagcgcttcaccactcggggcagggcatttacccggtcttgccttctccagccatctgcacggccagcagtttttcggtcccctgggcgctggccagccactgtttctgcatcccggacagttcactatgggccctggcgcattctctgccatgggcatggggcacctgctggcgtctgtggcagggggaggcaatggcggaggtggcggacctggaaccgctgcaggtcttgacgcaggcggactggggccagctgccagtgcagcttctacagccgctccctttccttttcacctgtcccagcacatgctggcgtcccagggtatccccatgcctacgtttggtggtctatttccttatccctatacttacatggcagccgctgctgctgctgcatctgcgctgccagctacctctgcggcagccgctgccgctgcagcagccggttctctttcgagaagtcccttcttggggtccgcgagacctcggcttagattttcaccttatcagatcccagtcactattcctccgtcaacttctttactgaccactgggttggcatccgaggggtccaaggcagccggtggcaactcccgggagccatctcctcttcctgagctggcccttaggaaagtcggcgcacccagcaggggtgctctgagccccagcggatcagccaaggaggccgctaatgaactccagtctatacagagactcgtatccggcttagaatcgcagcgcgcattgagcccaggacgggagtcccctaaatag

SEQ ID NO: 317995 - DNA, 981 bp, Artificial Sequence
  derived and/or modified sequence
atgagcgcctttcttgctgccgctcaaccctcctttttccccgctctagcgctccctcccggagctctggctaagcccctaccagaccctggactggctggagccgctgcagccgctgccgcagctgctgcggctgccgaggctggcctgcatgtctctgctctcggccctcaccctcccgctgcccacctccgctcactcaaaagcctagaaccagaagatgaggtcgaagacgaccctaaggttaccctggaagctaaggagctctgggaccaattccacaagctcggcacggagatggtgattaccaagtcaggaagaagaatgttccctccttttaaagtgcgcgtgtcggggctggataagaaagccaaatatatacttctcatggacatagtggcagctgatgactgcagatacaagtttcacaattccaggtggatggtagctggcaaggcagatccagaaatgccaaagcggatgtacattcacccagattccccggctactggggaacaatggatggctaaacctgtagcatttcataagctgaaactgaccaataatatctcagataagcacggtttcacgattctgaactcaatgcacaagtaccagcccaggtttcacattgtgcgtgccaatgatatcctgaagctaccttatagcacctttcggacgtatgtgtttccagagactgacttcatcgcggtgaccgcttatcagaatgataagattacccagttgaagatagataacaaccccttcgccaaaggcttccgagacaccggtaacgggcgaagggagaaacgaaaacaactgacgctccctagtctcagactgtatgaggagcattgcaagcctgaacgcgatggtgctgaatcagatgcctcctcctgcgacccgccacccgcaagggagccgccaacatctcctggggctgcgccatctccactaagactccaccgcgcaagaggttag

SEQ ID NO: 317996 - DNA, 3339 bp, Artificial Sequence
  derived and/or modified sequence
cagagatcacgacaagatctaaccagtcgcgcgtggtccccggcgccggagcgggccagctcagcccggcccagcccggccccgcgcagagcccccgccgcccccgcgcacagagccgggtgccccttgcggtgcgccggacgggaagccccgaggagcagctgctgcgcccgccacccgggtcgtccgtccaccgcgcgcgccgccgcccgggccgggggtccgagccgcgcgcccccggccccggccccggcccccgggcgcctgggccggatgtcccgatgagagagccggcgctggcggccagcgccatggcttaccacccgttccacgcgccacggcccgccgacttccccatgtccgcctttctggcggcggcgcagccctccttcttcccggcactcgcgctgccgcccggcgcgctggccaagccgctgcccgacccgggcctggcgggggcggcggccgcggcggcggcggcggcagcagcggccgaggcggggctgcacgtctcggcactgggcccgcacccgcccgccgcgcatctgcgctccctcaagagcctggagcccgaggacgaggtggaggacgaccccaaggtgacgctggaggccaaggagctgtgggaccagttccacaagctaggcacggagatggtcatcaccaagtccgggaggcggatgttcccccccttcaaggtgcgagtcagcggcctggacaagaaggccaagtatatcctgctgatggacattgtagccgctgacgattgccgctataagttccacaactcgcgctggatggtggcgggcaaggccgaccctgagatgcccaaacgcatgtacatccacccagacagcccagccacgggggagcagtggatggctaagcctgtggccttccacaagctgaagctgaccaacaacatctctgacaagcacggcttcaccatcctaaactccatgcacaagtaccagccgcgcttccacatagtgcgagccaacgacatcctgaagctgccttacagcaccttccgcacctacgtgttcccggagaccgacttcatcgccgtcactgcctaccagaatgacaagatcacacagctgaagatcgacaacaacccgtttgccaagggcttccgggacaccgggaacggccggcgggagaaaaggaagcagctgacgctgccgtctctacgcttgtacgaggagcactgcaaacccgagcgcgatggcgcggagtcagacgcctcgtcgtgcgaccctccccccgcgcgggaaccacccacctccccgggcgcagcgcccagtccgctgcgcctgcaccgggcccgagctgaggagaagtcgtgcgccgcggacagcgacccggagcctgagcggttgagcgaggagcgtgcgggggcgccgctaggccgcagcccggctccagacagcgccagccccactcgcttgaccgaacccgagcgcgcccgggagcggcgtagtcccgagaggggcaaggagccggccgagagcggcggggacggcccgttcggcctgaggagcctggagaaggagcgcgccgaagctcggaggaaggacgaggggcgcaaggaggcggccgagggcaaggagcagggcctggcgccgctggtggtgcagacagacagtgcgtcccccctgggcgccggacacctgcccggcctggccttttccagccacttgcacgggcagcagttctttgggccgctgggagccggccagccgctcttcctgcaccctggacagttcaccatgggccctggcgccttctccgccatgggcatgggtcacctactggcctcggtggcaggcggcggcaacggcggaggtggcgggcctgggaccgccgcggggctggacgcaggcgggctgggtcccgcggccagcgcagcaagcaccgccgcgcccttcccgttccacctctcccagcacatgctggcatctcagggaattccaatgcccactttcggaggcctcttcccctacccctacacctacatggcagcagcagccgcagccgcctcggctttgcccgccactagtgctgcagctgccgccgccgcagccgccggctccctctcccggagccccttcctgggcagtgcccggccccgactgcgtttcagcccctatcagatcccggtcaccatcccgcctagcactagcctcctcaccaccgggctggcctctgagggctccaaggccgctggtggaaacagccgggagcctagccccctgcccgagctggctctccgcaaagtaggggccccatcccgcggtgccctgtcgcccagtggctcggccaaggaggcggccaatgaactgcagagcatccagagactggtgagtgggctggagagccagcgagccctctccccaggccgggagtcgcccaagtgaggggctgcccagctgctcccctgccacgcaggccacccgggctgcctgcccctgctgcttgggacgtgtacagcacagaatgagtatttatttaaataaaggagaaaagtgggctgcagcagccggaatagagcctcgtctggcaagtcggggcctgggacacttccctgggcctcaacaaggatcaggctgctggaaacacagtcacttgggagctgctgggctaggtccagatccgctccagcgtcaaggtggcatccgaaggtgtctctggtcttccagcgaggtgggagaggcctcatccagggcccagcggtccctgcagaagccagaaggtgcaggggccaggggtgggagcatcggagggagtcccagagccctggaccttgggcctagaccgcgtgataaaactgggttgagggatgctggaaccagttacgactgaagtcagtgtagacctgagctgggagggaacctgttagtctccccacctcttccctgaagagacaggcacccctcccagccgtggtcaacggagggagtggcacttctgccttgagtccccaggggaaaaaaaaaaaagatatttatgaaataaatggtaatttgtgtaaataagctttaaggttcccagaatatgcaaattggtattaatttattcaaaggtgtacattgctgtgtacatatatttagagattaactcatacatttaaagtttttttcattttacgtgagcatctatattgtacagggctgggggggcccttggctgcgggagaaggcccagagccctggaggagccaccaccccgccggcccctcgacccctcggcccctcggcccctccgcccgggtttggctcgcccggcccgcgggctccacctcaggttttcacttttcgctccggagcgagaacgaaa

SEQ ID NO: 317997 - DNA, 1421 bp, Artificial Sequence
  derived and/or modified sequence
cagagatcacgacaagatctaaccagtcgcgcgtggtccccggcgccggagcgggccagctcagcccggcccagcccggccccgcgcagagcccccgccgcccccgcgcacagagccgggtgccccttgcggtgcgccggacgggaagccccgaggagcagctgctgcgcccgccacccgggtcgtccgtccaccgcgcgcgccgccgcccgggccgggggtccgagccgcgcgcccccggccccggccccggcccccgggcgcctgggccggatgtcccgatgagagagccggcgctggcggccagcgccatggcttaccacccgttccacgcgccacggcccgccgacttccccatgtccgcctttctggcggcggcgcagccctccttcttcccggcactcgcgctgccgcccggcgcgctggccaagccgctgcccgacccgggcctggcgggggcggcggccgcggcggcggcggcggcagcagcggccgaggcggggctgcacgtctcggcactgggcccgcacccgcccgccgcgcatctgcgctccctcaagagcctggagcccgaggacgaggtggaggacgaccccaaggtgacgctggaggccaaggagctgtgggaccagttccacaagctaggcacggagatggtcatcaccaagtccgggaggcggatgttcccccccttcaaggtgcgagtcagcggcctggacaagaaggccaagtatatcctgctgatggacattgtagccgctgacgattgccgctataagttccacaactcgcgctggatggtggcgggcaaggccgaccctgagatgcccaaacgcatgtacatccacccagacagcccagccacgggggagcagtggatggctaagcctgtggccttccacaagctgaagctgaccaacaacatctctgacaagcacggcttcaccatcctaaactccatgcacaagtaccagccgcgcttccacatagtgcgagccaacgacatcctgaagctgccttacagcaccttccgcacctacgtgttcccggagaccgacttcatcgccgtcactgcctaccagaatgacaagatcacacagctgaagatcgacaacaacccgtttgccaagggcttccgggacaccgggaacggccggcgggagaaaaggaagcagctgacgctgccgtctctacgcttgtacgaggagcactgcaaacccgagcgcgatggcgcggagtcagacgcctcgtcgtgcgaccctccccccgcgcgggaaccacccacctccccgggcgcagcgcccagtccgctgcgcctgcaccgggcccgaggtgagggtcggaccggaggagggacagggaggtggggggggtcctcaggtcgctgggctggtcttttgctgagccacccgctaacctga

SEQ ID NO: 317998 - DNA, 1820 bp, Artificial Sequence
  derived and/or modified sequence
ggggagtaacaggtgtctggaggctgaagggtggaggggttcctggatttggggtttgcttgtgaaactcccctccaccctcctctctcgcacccacccaccccctcacccccttctttttccgtccttggaaaatggtgtccaagctcacgtcgctccagcaagaactcctgagcgccctgctgagctccggggtcaccaaggaggtgctggttcaggccttggaggagttgctgccatccccgaacttcggggtgaagctggagacgctgcccctgtcccctggcagcggggccgagcccgacaccaagccggtcttccatactctcaccaacggccacgccaagggccgcttgtccggcgacgagggctccgaggacggcgacgactatgacacacctcccatcctcaaggagctgcaggcgctcaacaccgaggaggcggcggagcagcgggcggaggtggaccggatgctcagtgaggacccttggagggctgctaaaatgatcaagggttacatgcagcaacacaacatcccccagagggaggtggtcgatgtcaccggcctgaaccagtcgcacctctcccagcatctcaacaagggcacccctatgaagacccagaagcgtgccgctctgtacacctggtacgtcagaaagcaacgagagatcctccgacaattcaaccagacagtccagagttctggaaatatgacagacaaaagcagtcaggatcagctgctgtttctctttccagagttcagtcaacagagccatgggcctgggcagtccgatgatgcctgctctgagcccaccaacaagaagatgcgccgcaaccggttcaaatgggggcccgcgtcccagcaaatcttgtaccaggcctacgatcggcaaaagaaccccagcaaggaagagagagaggccttagtggaggaatgcaacagggcagaatgtttgcagcgaggggtgtccccctccaaagcccacggcctgggctccaacttggtcactgaggtccgtgtctacaactggtttgcaaaccgcaggaaggaggaggcattccggcaaaagctggccatggacgcctatagctccaaccagactcacagcctgaaccctctgctctcccacggctccccccaccaccagcccagctcctctcctccaaacaagctgtcaggagtgcgctacagccagcagggaaacaatgagatcacttcctcctcaacaatcagtcaccatggcaacagcgccatggtgaccagccagtcggttttacagcaagtctccccagccagcctggacccaggccacaatctcctctcacctgatggtaaaatggatctcagtctcaggaggaggtttgcccccagtcagcaccttgacgaatatccacagcctctcccaccataatccccagcaatctcaaaacctcatcatgacacccctctctggagtcatggcaattgcacaaagcctcaacacctcccaagcacagagtgtccctgtcatcaacagtgtggccggcagcctggcagccctgcagcccgtccagttctcccagcagctgcacagccctcaccagcagcccctcatgcagcagagcccaggcagccacatggcccagcagcccttcatggcagctgtgactcagctgcagaactcacacatgtcctctacaagcctggtgatgcccacacaccacttacttcgtgcgcaacaacaaggaccctgttttccacaccatcaccctctgggcagctgtcatggaaaagcccagtgacctgaccggcacctgcgagaggtccctgcttacctgac

SEQ ID NO: 317999 - DNA, 1278 bp, Artificial Sequence
  derived and/or modified sequence
atggtgagcaagctgaccagcctgcagcaggagctgctgagcgccctgctgagcagcggcgtgaccaaggaggtgctggtgcaggccctggaggagctgctgcccagccccaacttcggcgtgaagctggagaccctgcccctgagccccggcagcggcgccgagcccgacaccaagcccgtgttccacaccctgaccaacggccacgccaagggcagactgagcggcgacgagggcagcgaggacggcgacgactacgacaccccccccatcctgaaggagctgcaggccctgaacaccgaggaggccgccgagcagagagccgaggtggacagaatgctgagcgaggacccctggagagccgccaagatgatcaagggctacatgcagcagcacaacatcccccagagagaggtggtggacgtgaccggcctgaaccagagccacctgagccagcacctgaacaagggcacccccatgaagacccagaagagagccgccctgtacacctggtacgtgagaaagcagagagagatcctgagacagttcaaccagaccgtgcagagcagcggcaacatgaccgacaagagcagccaggaccagctgctgttcctgttccccgagttcagccagcagagccacggccccggccagagcgacgacgcctgcagcgagcccaccaacaagaagatgagaagaaacagattcaagtggggccccgccagccagcagatcctgtaccaggcctacgacagacagaagaaccccagcaaggaggagagagaggccctggtggaggagtgcaacagagccgagtgcctgcagagaggcgtgagccccagcaaggcccacggcctgggcagcaacctggtgaccgaggtgagagtgtacaactggttcgccaacagaagaaaggaggaggccttcagacagaagctggccatggacgcctacagcagcaaccagacccacagcctgaaccccctgctgagccacggcagcccccaccaccagcccagcagcagcccccccaacaagctgagcggcgtgagatacagccagcagggcaacaacgagatcaccagcagcagcaccatcagccaccacggcaacagcgccatggtgaccagccagagcgtgctgcagcaggtgagccccgccagcctggaccccggccacaacctgctgagccccgacggcaagatggacctgagcctgagaagaagattcgcccccagccagcacctggacgagtacccccagcccctgcccccctag

SEQ ID NO: 318000 - DNA, 1278 bp, Artificial Sequence
  derived and/or modified sequence
atggtctccaaacttacatcgctacagcaggagttactttcagcattgctgagcagtggggtaacaaaagaggtgttggtgcaggccttagaagagttattaccatccccaaatttcggggtaaaattagagactctccccttgtctcccgggtccggcgccgagcccgatacaaagccggtctttcataccctcacgaacggccatgccaaggggcggctgagtggcgacgagggaagcgaagatggagatgattatgatacacctcctattttgaaggaattgcaagcgctgaatacagaggaggccgccgaacaacgggcggaagttgatcgcatgttgagcgaggatccctggagagcagccaaaatgataaaaggatatatgcagcagcataacatccctcagagagaagtcgtagatgttactggtctgaaccagagccacctgagccagcatcttaataagggtacccctatgaagacacagaagagggctgccctgtacacatggtacgtcagaaagcagagggagattttgcgccaattcaatcagaccgtgcagagcagcggaaacatgactgacaagagttcccaagaccagctcctttttttgtttcccgaattctctcaacagtctcacggtcccgggcagagtgatgatgcatgcagtgaacccactaataaaaagatgcgtaggaacagattcaagtggggcccagcatctcagcagatcctgtatcaggcatatgatagacagaagaacccttcaaaagaagaacgtgaggccttggtcgaggagtgtaatcgcgccgagtgtctccaaagaggggtgagcccttcaaaggcccacggtcttgggtccaacctcgtcacagaggtaagagtgtacaactggttcgcaaaccgacgtaaggaggaggcctttcgccagaagctcgcaatggacgcatactcaagcaaccagacccattcgctgaatcctctgctgagccatggctctcctcaccatcagcctagcagttcgccgcctaataagttatctggagtgaggtactcgcagcagggcaataatgagattaccagtagctcgacaatttcccatcacggcaattccgcaatggtgaccagtcagagtgtcctgcagcaggtcagcccagccagcctcgatccaggccacaatcttctcagccctgacggaaagatggatctgtctttgaggcggaggtttgctccatcccagcatctcgatgagtacccgcaacccctgccaccgtag

SEQ ID NO: 318001 - DNA, 1278 bp, Artificial Sequence
  derived and/or modified sequence
atggtgtccaagctgaccagcctgcagcaggagctgctgagcgccctgctgagcagtggagtgaccaaggaggtgctggtgcaggccctggaggagctgctgcccagccccaactttggagtgaagctggagaccctgcccctgagccctggcagcggggctgagccagacaccaagcctgtgttccacaccctgaccaatggacatgccaagggccgcctgtctggagatgagggctctgaagatggagatgattatgacaccccacccatcctgaaggagctgcaggccctgaacacagaggaggccgctgagcagagagctgaggtggacaggatgctgtctgaggacccctggagggctgccaagatgatcaagggctacatgcagcagcacaacatcccccagcgggaggtggtggatgtgacaggcctgaaccagagccacctgagccagcacctgaacaagggcacccccatgaagacccagaagagagctgccctgtacacctggtacgtgaggaagcagcgggagatcctgcggcagttcaaccagacagtgcagagcagcggcaacatgacagacaagagcagccaggaccagctgctcttcctgtttcctgagttcagccagcagagccacggccctggccagagtgatgatgcctgcagcgagcccaccaacaagaagatgagaagaaaccgcttcaagtggggccctgccagccagcagatcctgtaccaggcctatgaccggcagaagaaccccagcaaggaggagcgggaggccctggtggaggagtgcaacagagctgagtgcctgcagaggggcgtgagccccagcaaggcccacggcctgggcagcaacctggtgacagaggtgcgggtgtacaactggtttgccaacagaaggaaggaggaggccttccggcagaagctggccatggatgcctacagcagcaaccagacccacagcctgaaccccctgctgagccacggcagcccccaccaccagcccagcagcagcccccccaacaagctgagcggcgtgcgctacagccagcagggcaacaatgagatcaccagcagcagcaccatcagccaccacggcaacagcgccatggtgaccagccagagcgtgctgcagcaggtgtccccagccagcctggaccccggccacaacctgctgagcccagatggcaagatggacctgagcctgcggaggagatttgcccccagccagcacctggatgagtacccccagcccctgcccccatag

SEQ ID NO: 318002 - DNA, 1278 bp, Artificial Sequence
  derived and/or modified sequence
atggtgagcaagctgaccagcctgcagcaggagctgctgagcgccttgctctcatcaggggtgaccaaagaggtcctcgtgcaggcccttgaggaactcctcccaagccctaatttcggggttaaactggaaaccctacctcttagccccggttccggagctgagcccgacactaagcccgtgttccacacactgactaacggccatgccaaggggagattatccggggacgaagggtcggaagacggggacgactacgatactcctcctatcctgaaggagcttcaggctctgaatactgaggaagcagccgagcagagggcagaggtggatcgaatgctgagtgaagacccttggagggccgctaagatgataaaagggtatatgcaacagcataacatccctcagcgggaagtcgtcgacgtaaccggcttaaaccagtcccatctgagtcagcatttgaataaaggtacacctatgaagactcagaagcgcgccgccctgtacacgtggtacgtgaggaagcagagagagatcttacgccagttcaatcaaaccgtccaatcgagcgggaacatgacagacaagtccagccaggaccaactcctgttcttgtttccagagttcagccagcagtcgcatgggcctggccagtccgacgacgcctgctcggaacctacgaataagaagatgcgtcgcaatcggtttaagtgggggcccgcctcacagcagattctgtatcaggcctatgatagacagaaaaatccttcgaaggaagaaagggaggctctggtagaggaatgtaacagggctgagtgcttacagcgcggtgtgagcccgtcaaaagcacacggcctcggatcaaacctggtgacagaggtcagggtctacaactggttcgccaacagacggaaggaagaggcctttagacagaagctggctatggatgcctactcatccaatcagacccattcccttaaccccctcctcagccacggcagcccgcatcaccagccaagctcctcacctcccaacaaactgtcaggcgtccggtatagccagcagggtaataacgaaattacttcatccagtacgatctcccaccacgggaacagtgcaatggtgacttcacaatccgtcctgcagcaggtctcacccgcttctcttgacccagggcataatttgctatcgcccgatggaaagatggacttgagcctgcgaaggcggtttgcaccttcccagcacttagacgagtaccctcaacctctgcccccctag

SEQ ID NO: 318003 - DNA, 1278 bp, Artificial Sequence
  derived and/or modified sequence
atggtgagtaaattaactagtcttcaacaagagttactgtccgcactcctgtcgtcaggagtgaccaaagaggtactagtccaggccctggaggagttgcttccgtcccctaacttcggggtgaagcttgaaactctcccactgtcccccggttccggcgcagaaccggatactaaacctgttttccacactctgacaaatggccacgccaagggcaggctttcaggcgatgaagggtccgaggatggcgacgattatgacaccccacccatcttaaaggagcttcaggcccttaataccgaagaggccgcagagcagagagctgaagttgacaggatgctgagcgaggatccttggagggcagccaaaatgatcaagggctacatgcagcagcacaacattccccagcgcgaagtagtggacgtcacagggctcaaccaaagtcatctcagccaacacctgaacaaagggacccccatgaagacgcaaaagagagccgcactttatacttggtacgttaggaagcaaagggagattttaagacaattcaaccagacagtgcaatcctccggcaatatgaccgataaatcgtctcaagatcagcttcttttcctattccccgagtttagccagcagtctcatggccctggccaaagcgatgatgcgtgttccgaaccaactaacaagaagatgcgtcgcaaccggttcaaatggggacctgcttcccaacagatactgtatcaagcctacgacaggcagaaaaaccctagtaaagaagagcgagaggctttagtagaagagtgcaatagggcagaatgcctccaaaggggtgtgtcgccctctaaggcccatgggcttggaagcaatttggtgactgaagtccgcgtctataattggttcgctaaccgccgtaaagaggaggccttccggcaaaaactggccatggatgcttacagctctaatcaaacccacagcctcaacccgctgctgtcccacggttctccccatcaccagccctcgtcaagccctcccaataaactcagtggtgtgcgctacagtcagcaggggaacaacgagatcacctcctccagcaccatttctcatcacggcaattcagccatggtaacatcccaatcagttctgcagcaggtgagccccgcttcactggacccgggacacaacctcctatcacctgatggtaagatggatttgtctctccggagaagattcgcccctagccaacacctcgacgagtacccccagcctcttccaccatag

SEQ ID NO: 318004 - DNA, 1846 bp, Artificial Sequence
  derived and/or modified sequence
ggccttcctctcccgcttccgcctggcgtaggagctgaggcatggccttgttctccagctgagaggacgatcgtccttataggagaggccgagtctccgagggcaatttcagaggtctggtgcgagggaagcagagactttcaaggaacaaggaaatgcatactatgccaagaaagattacaatgaagcttataattattatacaaaagccatagatatgtgtcctaaaaatgctagctattatggtaatcgagcagccaccttgatgatgcttggaaggttccgggaagctcttggagatgcacaacagtcagtgaggttggatgacagttttgtccggggacatctacgagagggcaagtgccacctctctctggggaatgccatggcagcatgtcgcagcttccagagagccctagaactggatcataaaaatgctcaggcacaacaagagttcaagaatgctaatgcagtcatggaatatgagaaaatagcagaaacagattttgagaagcgagattttcggaaggttgttttctgcatggaccgtgccctagaatttgcccctgcctgccatcgcttcaaaatcctcaaggcagaatgtttagcaatgctgggtcgttatccagaagcacagtctgtggctagtgacattctacgaatggattccaccaatgcagatgctctgtatgtacgaggtctttgcctttattacgaagattgtattgagaaggcagttcagtttttcgtacaggctctcaggatggctcctgaccacgagaaggcctgcattgcctgcagaaatgccaaagcactcaaagcaaagaaagaagatgggaataaagcatttaaggaaggaaattacaaactagcatatgaactgtacacagaagccctggggatagaccccaacaatataaaaacaaatgctaaactctactgtaatcggggtacggttaattccaagcttaggaaactagatgatgcaatagaagactgcacaaatgcagtgaagcttgatgacacttacataaaagcctacttgagaagagctcagtgttacatggacacagaacagtatgaagaagcagtacgagactatgaaaaagtataccagacagagaaaacaaaagaacacaaacagctcctaaaaaatgcgcagctggaactgaagaagagtaagaggaaagattactacaagattctaggagtggacaagaatgcctctgaggacgagatcaagaaagcttatcggaaacgggccttgatgcaccatccagatcggcatagtggagccagtgctgaggttcagaaggaggaggagaagaagttcaaggaagttggagaggcctttactatcctctctgatcccaagaaaaagactcgctatgacagtggacaggacctagatgaggagggcatgaatatgggtgattttgatccaaacaatatcttcaaggcattctttggcggtcctggcggcttcagctttgaagcatctggtccagggaatttcttttttcaatttggctaatgaagggcaaccacccagaacccagaaaatgcagattcactcagtttaatcttgaatgtggaaacagttcacctcctcccttcatcacgtctccgtgtgcttagagcagtttcgttttctcagttggatgccctgtgtctctgtgagtggggtggagcaaagggaaccaatgccgaagaccgagggcaggggagggaggcgggggtggacagggaggcagcttgtgaatttttgttttactgtttaactttattaaaaaagaaaaaaaaaagagaataaaatgttttgacccttcctggccctttgctctgg

SEQ ID NO: 318005 - DNA, 1468 bp, Artificial Sequence
  derived and/or modified sequence
aagatggcggctgccgcggagtgcgatgtggtaatggcggcgaccgagccggagctgctcgacgaccaagaggcgaagagatatgtgtcctaaaaatgctagctattatggtaatcgagcagccaccttgatgatgcttggaaggttccgggaagctcttggagatgcacaacagtcagtgaggttggatgacagttttgtccggggacatctacgagagggcaagtgccacctctctctggggaatgccatggcagcatgtcgcagcttccagagagccctagaactggatcataaaaatgctcaggcacaacaagagttcaagaatgctaatgcagtcatggaatatgagaaaatagcagaaacagattttgagaagcgagattttcggaaggttgttttctgcatggaccgtgccctagaatttgcccctgcctgccatcgcttcaaaatcctcaaggcagaatgtttagcaatgctgggtcgttatccagaagcacagtctgtggctagtgacattctacgaatggattccaccaatgcagatgctctgtatgtacgaggtctttgcctttattacgaagattgtattgagaaggcagttcagtttttcgtacaggctctcaggatggctcctgaccacgagaaggcctgcattgcctgcagaaatgccaaagcactcaaagcaaagaaagaagatgggaataaagcatttaaggaaggaaattacaaactagcatatgaactgtacacagaagccctggggatagaccccaacaatataaaaacaaatgctaaactctactgtaatcggggtacggttaattccaagcttaggaaactagatgatgcaatagaagactgcacaaatgcagtgaagcttgatgacacttacataaaagcctacttgagaagagctcagtgttacatggacacagaacagtatgaagaagcagtacgagactatgaaaaagtataccagacagagaaaacaaaagaacacaaacagctcctaaaaaatgcgcagctggaactgaagaagagtaagaggaaagattactacaagattctaggagtggacaagaatgcctctgaggacgagatcaagaaagcttatcggaaacgggccttgatgcaccatccagatcggcatagtggagccagtgctgaggttcagaaggaggaggagaagaagttcaaggaagttggagaggcctttactatcctctctgatcccaagaaaaagactcgctatgacagtggacaggacctagatgaggagggcatgaatatgggtgattttgatccaaacaatatcttcaaggcattctttggcggtcctggcggcttcagctttgaagcatctggtccagggaatttcttttttcaatttggctaatgaagggcaaccacccagaacccagaaaatgcagattcactcagtttaatcttgaatgtggaaacagtt

SEQ ID NO: 318006 - protein, 351 aa, Artificial Sequence
  derived and/or modified sequence
MKGRAVSFDPLACQGLNASPGSLTSPLRRIRSLTGREVLTPFPGLGTAAAPAQGGAHLKPHSLVLPITALPPPPLALRGRQATSKLPPFLSSPFPPSLCPWVPDPGFKETAFLYAVSSAALTHTLARACSAGRMERCTCDDSPGLESRQAWQWGVCGDNLKYSTKFLSNFLGSKRGNKDLRARADAHNTHVGIKAVKSGLRTTCKCHGVSGSCAVRTCWKQLSPFRETGQVLKLRYDSAVKVSSATNEALGRLELWAPARQGSLTKGLAPRSGDLVYMEDSPSFCRPSKYSPGTAGRVCSREASCSSLCCGRGYDTQSRLVAFSCHCQVQWCCYVECQQCVQEELVYTCKH

SEQ ID NO: 318007 - DNA, 1056 bp, Artificial Sequence
  derived and/or modified sequence
atgaaaggaagggccgttagctttgatcccctagcttgccaggggcttaatgcctcacccggatccctgacctctccattgagaagaatccgcagcctcaccggacgcgaggtacttacgcccttcccgggtctgggaaccgccgcagctccggcacaaggaggagcccaccttaaaccccattccctggtactgccaatcaccgccctgccgcctccacctttggccttacgaggccgtcaggcaacctctaagctgcccccatttctttctagcccattcccaccatccctgtgcccctgggtgcccgatcctggcttcaaggagactgcgttcctgtacgctgtgagctccgccgctcttactcacactctggccagagcctgcagcgccggtcgtatggagcgatgcacttgcgacgactcacccggtcttgagagccggcaagcatggcaatggggagtttgcggcgacaatttaaagtactcaacaaaattcctctcaaactttcttggatcaaaaaggggcaacaaagatcttcgggctcgggcagatgctcacaacacacatgtggggatcaaggccgtgaaaagcgggctaagaactacttgcaagtgccatggggtgagcgggtcttgcgcagtcagaacatgctggaaacagttgtccccattcagagaaactggtcaggttttgaagctaagatacgattcggctgtcaaggtgtcctcagccacgaatgaagcactgggaaggctcgagctgtgggcccctgcacgtcagggcagcctgacgaaaggtctggcccctagaagtggggatcttgtgtatatggaagactctccgagcttttgcaggccaagcaagtattcaccgggaacagcaggcagggtttgtagtcgagaagcctcctgtagttccctgtgctgtggaagaggctacgatactcagtcacgcctggtggcattcagctgccactgccaagtccagtggtgttgctacgtggaatgtcagcaatgcgtgcaagaggagttggtttatacatgcaaacattag

SEQ ID NO: 318008 - DNA, 1056 bp, Artificial Sequence
  derived and/or modified sequence
atgaagggaagagcagtttcttttgatccacttgcctgtcagggactcaacgcatccccgggaagcctcacaagcccattgcgcagaattcggtccctgactggccgcgaagtgctgacacctttcccaggactcggcactgctgccgcacccgcccagggaggagcacatttgaagcctcacagcctcgttttgccgatcacagccctgccacctcccccactcgccttacgagggcgtcaagcgaccagtaaacttccaccttttctgagcagtccgttccccccttctttgtgtccctgggtgccagaccccggattcaaagagactgctttcctttacgccgtgagctcggcggcacttactcacactctggcccgcgcgtgcagtgccggcagaatggaacgctgtacatgtgatgactcccccgggcttgagtccaggcaggcatggcaatggggagtgtgtggcgacaacctgaagtattccaccaaattcttgtctaatttcctggggagcaagcgagggaataaggacctgagagcccgagccgacgcacacaacacccacgtcgggattaaggcagtgaaatctgggctacgcacaacctgcaagtgccacggcgtaagtgggagttgtgctgttagaacttgttggaaacagttgtctccgtttcgcgagaccggccaggtactcaagctacggtacgacagtgccgttaaggtttcatccgccactaatgaggctctgggacggctcgaactgtgggcacccgctagacaaggaagcttgacaaagggccttgccccacgcagcggggacctggtgtacatggaagactcaccgtccttctgcaggccttccaaatactcacccggcaccgctggcagagtatgttccagggaagcctcatgcagttcactgtgttgtgggcggggatatgatacccaatctagactagttgcattttcctgccactgccaggttcagtggtgttgctacgttgagtgccagcaatgcgtccaggaagagttggtctacacttgtaaacactag

SEQ ID NO: 318009 - DNA, 1056 bp, Artificial Sequence
  derived and/or modified sequence
atgaaaggcagggctgtgtcctttgacccccttgcctgccagggcctaaacgcttctccaggatccctgacttctccgctccgtcgtattaggtcactgaccggacgggaagttttgactcctttcccaggactaggcaccgcggctgcccctgctcagggtggcgcacatctcaaaccccacagtctggtgctcccaattactgctttacctccccctccactggccctcagaggccgccaggctacatccaagctcccacctttcctgtcctccccattccctcccagcctgtgtccctgggtgcctgaccctggtttcaaggagacggctttcttgtacgctgtgagcagcgccgcgctgacacatacattagcccgcgcctgctctgccggacggatggagcgatgtacttgtgatgactcgccaggactcgaaagcaggcaggcttggcagtggggggtatgcggcgataacctgaaatatagtaccaaatttcttagcaatttcctcggtagtaaaagagggaacaaagatctgagagctagagccgacgcacataacacccatgttggaatcaaggccgtgaagagcggacttcgaaccacctgtaaatgtcacggcgtatccggctcttgcgccgtccgtacctgctggaagcagcttagtccgtttagggaaaccggtcaagtgctgaaactccgttacgatagtgccgtcaaggtcagttctgccacaaatgaagctctgggacgcctagaactgtgggcaccagcgcggcaaggttcactaaccaaggggctggcccctcgctccggcgatctggtgtacatggaagactctccctctttttgtagaccttcaaaatattcccctggaacagctgggagagtttgctctagggaagcctcatgcagttcactgtgttgtgggcggggatatgatacccaatctagactagttgcattttcctgccactgccaggttcagtggtgttgctacgttgagtgccagcaatgcgtccaggaagagttggtctacacttgtaaacactag

SEQ ID NO: 318010 - DNA, 1056 bp, Artificial Sequence
  derived and/or modified sequence
atgaagggcagagccgtgagcttcgaccccctggcctgccagggcctgaacgccagccccggcagcctgaccagccccctgagaagaatcagaagcctgaccggcagagaggtgctgacccccttccccggcctgggcaccgccgccgcccccgcccagggcggcgcccacctgaagccccacagcctggtgctgcccatcaccgccctgccccccccccccctggccctgagaggcagacaggccaccagcaagctgccccccttcctgagcagccccttcccccccagcctgtgcccctgggtgcccgaccccggcttcaaggagaccgccttcctgtacgccgtgagcagcgccgccctgacccacaccctggccagagcctgcagcgccggcagaatggagagatgcacctgcgacgacagccccggcctggagagcagacaggcctggcagtggggcgtgtgcggcgacaacctgaagtacagcaccaagttcctgagcaacttcctgggcagcaagagaggcaacaaggacctgagagccagagccgacgcccacaacacccacgtgggcatcaaggccgtgaagagcggcctgagaaccacctgcaagtgccacggcgtgagcggcagctgcgccgtgagaacctgctggaagcagctgagccccttcagagagaccggccaggtgctgaagctgagatacgacagcgccgtgaaggtgagcagcgccaccaacgaggccctgggcagactggagctgtgggcccccgccagacagggcagcctgaccaagggcctggcccccagaagcggcgacctggtgtacatggaggacagccccagcttctgcagacccagcaagtacagccccggcaccgccggcagagtgtgcagcagagaggccagctgcagcagcctgtgctgcggcagaggctacgacacccagagcagactggtggccttcagctgccactgccaggtgcagtggtgctgctacgtggagtgccagcagtgcgtgcaggaggagctggtgtacacctgcaagcactag

SEQ ID NO: 318011 - DNA, 1056 bp, Artificial Sequence
  derived and/or modified sequence
atgaagggaagggcagtttcttttgaccctctcgcatgccagggactgaacgcttctcccggctcactcacgagccctttaaggaggatcaggagtctgacaggccgggaagtcttgacaccattcccgggactggggaccgcagccgccccagcacaaggaggtgcccacctaaaaccccatagcctagtccttccaattacagctttgccccccccacctttggcattacgagggagacaggcaactagcaaactgcctccttttttgtcttcccctttccctccaagcctttgtccttgggtgccagatcccgggtttaaggagactgcatttctgtacgctgtttctagtgccgctctaacccataccctggcccgcgcttgctcagccgggcgcatggaacgttgtacctgcgatgattccccaggactcgagtctcggcaagcttggcaatggggcgtttgtggggataatctaaaatattctacaaaatttttaagcaatttcctggggtctaagcgaggcaacaaggatcttcgagcccgtgcagatgctcacaacacgcatgtgggtataaaagccgtgaaaagcgggctgcgaacgacttgtaagtgtcacggcgtgtcaggttcctgcgctgtcagaacatgctggaagcagctgagcccattccgcgaaaccgggcaagtgctgaaacttcgatatgacagcgcagttaaagttagtagcgcaacgaacgaggctcttggccggctcgaactctgggccccagccagacagggctccttgaccaagggactggctcccaggagcggagacctagtgtatatggaagattccccgtctttttgcaggccgtccaaatactcccccggtaccgccggcagagtgtgtagccgcgaggccagttgttcctccctttgttgtggacggggatacgacacacagagccgcctcgtggcctttagctgtcactgtcaggtgcagtggtgctgttacgttgaatgtcagcagtgcgtgcaagaggagctggtctacacctgcaagcactag

SEQ ID NO: 318012 - DNA, 1056 bp, Artificial Sequence
  derived and/or modified sequence
atgaagggccgggctgtgtcctttgaccccctggcctgccagggcctgaatgccagccctggcagcctgaccagccccctgcggcgcatccgcagcctgaccggccgggaggtgctgacccccttccctggcctgggcacagctgctgccccagcccagggcggggcccacctgaagccccacagcctggtgctgcccatcacagccctgcccccaccacccctggccctgcggggccggcaggccaccagcaagctgccccccttcctgagcagccccttcccccccagcctgtgcccctgggtgcctgaccccggcttcaaggagacagccttcctgtatgctgtgagcagcgctgccctgacccacaccctggcccgggcctgcagcgctggccgcatggagcgctgcacctgtgatgacagccctggcctggagagccggcaggcctggcagtggggcgtgtgtggggacaacctgaagtacagcaccaagttcctgagcaacttcctgggcagcaagaggggcaacaaggacctgcgggcccgggcagatgcccacaacacccacgtgggcatcaaggctgtgaagagcggcctgcggaccacctgcaagtgccacggcgtgtctggcagctgtgctgtgaggacctgctggaagcagctgagccccttccgggagaccggccaggtgctgaagctgcgctatgacagcgctgtgaaggtgagcagcgccaccaatgaggccctgggccgcctggagctgtgggccccagcccggcagggcagcctgaccaagggcctggcccccaggtctggggacctggtgtacatggaggacagccccagcttctgccggcccagcaagtacagccctggaacagctggccgggtgtgcagccgggaggccagctgcagcagcctgtgctgcggccggggctatgacacccagagccggctggtggccttcagctgccactgccaggtgcagtggtgctgctacgtggagtgccagcagtgtgtgcaggaggagctggtgtacacctgcaagcactag

SEQ ID NO: 318013 - DNA, 4978 bp, Artificial Sequence
  derived and/or modified sequence
agctgagctccctgggtgatggctccttccacaagttctaacgtcccactgaaagcaagctgcaatttctgttgcttcttgtatcaattgcatgaaaggacgggcagtttcttttgatcctctggcatgccaaggcctgaatgccagtcctgggagccttaccagccctctaagaagaatcagaagcctgaccgggcgggaagtcctgacgcccttcccaggattgggcactgcggcagccccggcacagggcggggcccacctgaagccacattctcttgtcctgcccatcacagcgctgccaccaccgcctctggccctcagagggcggcaggcaacctctaagcttcctcctttcctctcttccccctttcctccctccctatgcccctgggtgcccgatccaggcttcaaagagacagctttcctgtacgcggtgtcctctgccgccctcacccacaccctggcccgggcctgcagcgctgggcgcatggagcgctgcacctgtgatgactctccggggctggagagccggcaggcctggcagtggggcgtgtgcggtgacaacctcaagtacagcaccaagtttctgagcaacttcctggggtccaagagaggaaacaaggacctgcgggcacgggcagacgcccacaatacccacgtgggcatcaaggctgtgaagagtggcctcaggaccacgtgtaagtgccatggcgtatcaggctcctgtgccgtgcgcacctgctggaagcagctctccccgttccgtgagacgggccaggtgctgaaactgcgctatgactcggctgtcaaggtgtccagtgccaccaatgaggccttgggccgcctagagctgtgggcccctgccaggcagggcagcctcaccaaaggcctggccccaaggtctggggacctggtgtacatggaggactcacccagcttctgccggcccagcaagtactcacctggcacagcaggtagggtgtgctcccgggaggccagctgcagcagcctgtgctgcgggcggggctatgacacccagagccgcctggtggccttctcctgccactgccaggtgcagtggtgctgctacgtggagtgccagcaatgtgtgcaggaggagcttgtgtacacctgcaagcactaggcctactgcccagcaagccagtctggcactgccaggacctcctgtggcacccttcaagctgcccagccggccctctgggcagactgtcatcacatgcatgcataaaccggcatgtgtgccaatgcacacgagtgtgccactcaccaccattccttggccagccttttgcctccctcgatactcaacaaagagaagcaaagcctcctcccttaacccaagcatccccaaccttgttgaggacttggagaggagggcagagtgagaaagacatggagggaaataagggagaccaagagcacagcaggactgaaattttggacgggagagaggggctattccatcttgcttcctgggatgaatggcttggagccagcatgttcttgggaggtgaactgctgggctaggaatgccaaggcaggcagtgccagctggaagtgaaggcgggagcctggctgagatgggtcaatcgggtcctgtggccctgctcaggtgcagtgggctccaggtgtcacacacctccaccactcccctggttttgctgtgccagagatggggagaaagcacaggtggtagaagccatccgttcagagaaaggagagctttctgtgcttgagtggacccgagtgagatctgtgccctggagccctgtgtccttgatttggcttttcaaatatgcctccgctgaggcctcattcttgtctcgagagctgggttatgcacactcacccagccgtgctcaaaactaccaccagtgcaggtaagacaggtgggagaactagccaccaaggcgggactcagtgcacctgaggttgaacagggagacaacggcccctccctgtgttccctgctggccaaaggaatcttcactcccagcgcagaggaggagggcaacagcttcctggtgcctggcagtgacgtggcgagctcagtttctcagctggctcttgagtgagctttggtgacttcctgtggctggggcctgcctggtctgtgacacccccataccagctgagttcacaatactgaagaacagctggctcacgagctatgacttgaagttacatttctattcttgtggctgctcatctagttaaggcttttgccctggctggggttataggtgcttgagtccttgctaagcctggctcctgggtagcctccttcagttcctaatggcctctcacttggccctcactttggctcttacttgaggaggagacgtgactttgataatttcctcagatcctgtggacattttcagcagcacctgccaaggccctctgtgaaaggaggagagactggtacctccacacaggcacacatggatgcacagcccctggaccaggctgggggttcctgttgcacatgcctctcttgttcaggatgaagaccttgcaggggtccccttgctggaggcattgtacttccccagagtggggcccgatgccacccaggaggaagtgacttctttcgggaagcccttggccactttgctggccctgccacgcccatctgtcagcttcctttctccctaaacctagagttgctgacccttcaccaacacaggaaatttcagaatcagctgaatgctcagaaacctcgcctgtgccagctccaggacaaaggcccgctgactgtgccctggccaactccctgagacctccaagggcgaggaggagctgcccagtctccagtggatcagggcagtctgctggatgctggaaggatttttgactgcagaggcccggctgagaagccaaactgacctgagcccctctcgttaaaatgacattgctgacccaagcacctggcccacaccttggcagcaggagaaaaatggggagagggctggttttctcctttcttccacttccccacagcatggagattttctctgccttcccaatccatcttgctcctccgagaccccaactctgcctccacccaggctcagtgctgggcgtaaggcagcagggacctcactggcagagcagggggcctgggagcaacgtggaggccagagcaccctgatccaccaacatgccacctgcattctgacttcatggctggcagtgccagggtcgtgggagggcaaagggcaggctctaaggcatctaggcagtggctggctgctaacatggacaccccaagtcaatggcacagtgcaggttctgagggctccttggcttgtggggtcttctctgtctgtctctctccctctcttcttccttgctctcatccctttcttttccagttacccctgaagacccacctcggccctcttggggcccctggggactagagtgaccactgacccctcattctacagctttaagggaaatgctcacagggtatttttgtctacctcaaatatatagtttttagagcaaaggagaataatttatatagctaagatatatgagaaagtatttatattatttatatagttgctatatttcacagacagcacaggtggggtttgtgtattttcccggaaaccctctgtctggggagatacagcctgacctgaccgggtcccccactgagcaggaggccgggtcgctgggaaggaggacaaacctgtattccatgactgggtctgtctcggagctggtaagcacatgtccgctctgtgatgagccctggtgggctccatccagaccctccttgtgatgtttttgtagattttctgcccttctgggtccaggcccccttcttctgctctggcaaaagtgtcttactcataatgataatgacaacgagaattcccacacctggcatttgtaaagcactttgctatttagaaacaaaaacttttacccctttcatctcacttgatttctccgttatctctgtgaggtaggtggggccacattactgtggccattttatagatgaggtccagagatggagagctgtgctcaaagtcacacctaagagacttgttcaatgaatatttactgaacatctccatagaccaggcactacgggctgacctgctctgagcccaggagccccaaagcctggataccactgtgagcccaagaactcagggaagcagttccttcccaggctgtgatcccagccttttggatctggatggcatgttggcacttcccccaagtggagtcccatgtctcaggggctttggctgcctgagaaggctggagagaccaggaacccatggaggccactccaaggggtccttctgcccacactgcccaagaagcttgggctacaccactgggcccctcccaacctacagatgaattttgattgctctcatttgtgttttgcttgtaaaaatgaattgttttccactggatttctggctgcttttgcaaaagtcagctgcgctggcagactgggcctgcatgtcctcctgcaggcagctagagtgagggagtctaatggacaggatgccccaagtgcccccgttgctcatggatgcccctgcctgcctctcatgagcacatagtcctgtcccctggtctagataagcccagctttcctggtacccttcatcacctggcagacagacagccccatgccaaccctggacattacttgcttttgaacctttcctttctcaacaaccatgaacttcaaatgctttctgtctcaggacactttagaataacaatggaagccatcacttattgagcaccccttatgtccatttattcaaccaatgattatttagggatctcttattgagcaccaggcagcatcctgggtgcttggtgcagcaaggaacaggaccaagtctctgcctcatggggctgacatcctagtgggtgagaaagacaataaaccaataaatgacatgcc

SEQ ID NO: 318014 - DNA, 1056 bp, Artificial Sequence
  derived and/or modified sequence
atgaagggccgggccgtgagcttcgaccccctggcctgccagggccttaacgcatctccaggtagccttacgagccccctgaggagaattaggagtctgactggccgtgaagtgctcacccctttccccgggctgggcacggccgctgctcctgcacaaggcggcgcacacctgaagccccatagcctcgtgcttccaattacagcgctccctccacccccactggccttgcgtggaagacaggccacgtccaaactgccccctttcctgtcatcaccctttccccctagtctgtgtccctgggtacccgatccagggtttaaggagaccgcttttctgtatgcggtgagtagtgctgcgttaacccacaccctcgcccgggcttgctctgccgggagaatggaacgatgtacatgcgacgacagtcctggcctcgaaagtagacaggcctggcagtggggagtctgtggcgacaatttaaaatatagcacgaaatttttaagcaacttcttggggagcaaacggggcaataaggatctgagggcgcgtgcagacgcgcataacacgcacgtcgggatcaaggctgtgaagtcaggacttagaaccacctgtaagtgccatggggtcagcgggagttgcgcagtcagaacatgctggaagcagttatccccattccgagaaactggccaggtgctgaagttgaggtatgacagcgcggttaaagtaagtagcgccacgaacgaggcccttgggcgtttagagctgtgggctccggctcgccaggggtcactgaccaagggactcgcgccacgttccggggatctcgtttacatggaggactcaccgagcttctgccggcctagcaaatattcccctggtaccgctggaagagtctgtagcagggaagcttcttgcagctccctttgttgtggccgagggtacgacactcagtcacggctcgtcgcttttagttgccattgccaggttcagtggtgttgctacgtcgagtgccaacagtgcgtgcaagaagagttggtctatacctgtaaacattag

SEQ ID NO: 318015 - RNA, 1056 nt, Artificial Sequence
  derived and/or modified sequence
augaagggaagagcaguuucuuuugauccacuugccugucagggacucaacgcauccccgggaagccucacaagcccauugcgcagaauucggucccugacuggccgcgaagugcugacaccuuucccaggacucggcacugcugccgcacccgcccagggaggagcacauuugaagccucacagccucguuuugccgaucacagcccugccaccucccccacucgccuuacgagggcgucaagcgaccaguaaacuuccaccuuuucugagcaguccguuccccccuucuuugugucccugggugccagaccccggauucaaagagacugcuuuccuuuacgccgugagcucggcggcacuuacucacacucuggcccgcgcgugcagugccggcagaauggaacgcuguacaugugaugacucccccgggcuugaguccaggcaggcauggcaauggggaguguguggcgacaaccugaaguauuccaccaaauucuugucuaauuuccuggggagcaagcgagggaauaaggaccugagagcccgagccgacgcacacaacacccacgucgggauuaaggcagugaaaucugggcuacgcacaaccugcaagugccacggcguaagugggaguugugcuguuagaacuuguuggaaacaguugucuccguuucgcgagaccggccagguacucaagcuacgguacgacagugccguuaagguuucauccgccacuaaugaggcucugggacggcucgaacugugggcacccgcuagacaaggaagcuugacaaagggccuugccccacgcagcggggaccugguguacauggaagacucaccguccuucugcaggccuuccaaauacucacccggcaccgcuggcagaguauguuccagggaagccucaugcaguucacuguguugugggcggggauaugauacccaaucuagacuaguugcauuuuccugccacugccagguucagugguguugcuacguugagugccagcaaugcguccaggaagaguuggucuacacuuguaaacacuag

SEQ ID NO: 318016 - RNA, 1056 nt, Artificial Sequence
  derived and/or modified sequence
augaaaggcagggcuguguccuuugacccccuugccugccagggccuaaacgcuucuccaggaucccugacuucuccgcuccgucguauuaggucacugaccggacgggaaguuuugacuccuuucccaggacuaggcaccgcggcugccccugcucaggguggcgcacaucucaaaccccacagucuggugcucccaauuacugcuuuaccucccccuccacuggcccucagaggccgccaggcuacauccaagcucccaccuuuccuguccuccccauucccucccagccugugucccugggugccugacccugguuucaaggagacggcuuucuuguacgcugugagcagcgccgcgcugacacauacauuagcccgcgccugcucugccggacggauggagcgauguacuugugaugacucgccaggacucgaaagcaggcaggcuuggcagugggggguaugcggcgauaaccugaaauauaguaccaaauuucuuagcaauuuccucgguaguaaaagagggaacaaagaucugagagcuagagccgacgcacauaacacccauguuggaaucaaggccgugaagagcggacuucgaaccaccuguaaaugucacggcguauccggcucuugcgccguccguaccugcuggaagcagcuuaguccguuuagggaaaccggucaagugcugaaacuccguuacgauagugccgucaaggucaguucugccacaaaugaagcucugggacgccuagaacugugggcaccagcgcggcaagguucacuaaccaaggggcuggccccucgcuccggcgaucugguguacauggaagacucucccucuuuuuguagaccuucaaaauauuccccuggaacagcugggagaguuugcucuagggaagccucaugcaguucacuguguugugggcggggauaugauacccaaucuagacuaguugcauuuuccugccacugccagguucagugguguugcuacguugagugccagcaaugcguccaggaagaguuggucuacacuuguaaacacuag

SEQ ID NO: 318017 - DNA, 429 bp, Artificial Sequence
  derived and/or modified sequence
ttttttttttatttttatcaacccacatctttattcttccctcactcacctccattccccatgaaaaaaaggaacttttggcccaaagtgcatcaaaattatgattatgagaagtggcaagaaaaagatgtctttcttatagatgttcttttctgaagactctgacagagccaggattcatgttcttctggcctctgacctgcaaaatgctgtaggtgtggccaggtctctaggagatagcacagagaccagagcaagggacatcccacgctagttatctggggatggaaggatgccctaacaggaaatgtaaaggcacacaatgtattcttcttttgggctcctcatggttttcctaatcctctacccctataagatcagatttttggtatcaggatggtggggtgacattttgttttatagtataaa

SEQ ID NO: 318018 - DNA, 1994 bp, Artificial Sequence
  derived and/or modified sequence
aggacagacggcagtggctcctgagagctggctggggccattttggcccctcgcctgtggccttctgcagacttggcctgggaggggatggggcagctgcgccatgtgcaccacccttttcctgctcagcaccctggccatgctctggcgccgccgatttgccaaccgagtccaaccagagcccagcgacgtggatggggcagctaggggcagcagcttggatgcggaccctcagtcctcaggcagggagaaagaacctctgaagtaagccctcacctctgcaggtggggctcaggcccagagactgggatcagctggctcaggcagctcaggtcctggttcgtcccctagcccaggaggatgctgtgggagctgcagcagcggcaagagggagaatggggggaagcagcactagagaagttcccagagctcatcctgtcactggctgctctgctgaaattatcaataagaaatgccagttggatctgtgacatgtctgcctgcagctggatgggagcaacggacagcttgtcctccgaatgtgttttctgtatgtgtgcaagcgcgtgtgttccaaacgggcagtagcgtgtgggaaggaaaaagcctgacacttgtttttatcaatttgctgatgctcagtcccggcggctgcctcctttgcccccagctgctctgccatttctctcttttcaatcctgcatgatcctgagcagagataaaagcagatttccgcttctgctcccagatccaggagcagaccctgcaggcagctgctcctgatgtctcacagctattagtcttcaaaaaccccccgtgcctctgtgcacacgcgtctctcctccccagccagcccccctcccagcccagcggcgatgtctctgcctggctggcccgtgcccttgacttccaggcagtagaagatggagttctctagacagcagcacttcagccgccactctgcctctgaagggaaggaagggaaagggtgagggatgccgcagagcagagggaaccgctggggaggcgctcagggtgggggaggaggtgcaccccgctggggagggcctgctggtacctcggggagcctggctggggtgtgtgcgaaggcagttctgtgggagcctctcaaagtagggcaggcaggaggcagggggaaagtcacactagggaaggagcctgcagaggcaaagccagagcgccagcctgacccaggccgtgagcccgtgatcgcctgtctcagctcctgtcagcctgtctctctctttggaggcatcggccttcctggtgacaggcctgtcaggctgagggccagagggcactgttcccgggacccagtctgtgttccccgatcctatctgcatttattctctatttgccatgttcctgtcacctcatccttgctgccatttccgagttgctcatctccttccactggtctgaggaattgtcaggccaaggtcatggagctggctcacggcccagacgcacttccccagggcagcgcccctccacgccactgttccgagaacctgcgcaggaggtggtggctgctccagggatccatccagaggaagggcgggaaaaagagaggaaggggctgctggcggccagcggggctgtggctgcctgggcttggaggttgcctgggcagctggggtgccatgtgggccgggtgggggggctgtctcccccagggagcaggctggctttggtgggagcagattgtgtttacaccttccccgcacacccagcccacgctcgcctcttattcccggggcctctcccacccctgggctctctgcgcagtctgcacatttgcagctcctgctgcagaaagttacctctctcagcctagagctccccacagaaggctcctgggacccgggtgccccttccttggcccactggctcccatcacagggcttagtgtgaagctcagggcaagggtggacctttaaatgggggaattaaatcctgactatgacactgtc

SEQ ID NO: 318019 - protein, 137 aa, Artificial Sequence
  derived and/or modified sequence
MACSLQKLFAVEEEFEDEDFLSAVEDAENRFTGSLPVNAGRLRPVSSRPQETVQAQSSRLLLLHPTAPSEALGLPDLDLCLPASSTPSADSRPSCIGAAPLRPVSTSNCLNSSHSATPLGSLSATLPCSSTSASPSC

SEQ ID NO: 318020 - protein, 521 aa, Artificial Sequence
  derived and/or modified sequence
MACSLQKLFAVEEEFEDEDFLSAVEDAENRFTGSLPVNAGRLRPVSSRPQETVQAQSSRLLLLHPTAPSEALGLPDLDLCLPASSTPSADSRPSCIGAAPLRPVSTSSSWIGNQRRVTVTEVLRETARPQSSALHPLLTFESQQQQVGGFEGPEQDEFDKVLASMELEEPGMELECGVSSEAIPILPAQQREGSVLAKKARVVDLSGSCQKGPVPAIHKAGIMSAQDESLDPVIQCRTPRPPLRPGAVGHLPVPTALTVPTQQLHWEVCPQRSPVQALQPLQAARGTIQSSPQNRFPCQPFQSPSSWLSGKAHLPRPRTPNSSCSTPSRTSSGLFPRIPLQPQAPVSSIGSPVGTPKGPQGALQTPIVTNHLVQLVTAASRTPQQPTHPSTRAKTRRFPGPAGILPHQAALKQLPRNKVPNMAVMIKSLTRSTMDASVVFKDPTGEMQGTVHRLLLETCQNELKPGSVLLLKQIGVFSPSLRNHYLNVTPNNLVHIYSPDSGDGSFLKPSQPFPKMTWMDS

SEQ ID NO: 318021 - DNA, 2388 bp, Artificial Sequence
  derived and/or modified sequence
cctttaagaaggcggagacgccccagtggcggcgtcttcgaatgcggcctaaggcgcctgccgccagtctcctggcgactttccctatatcgcagagactcatccctctgaccccagcccggaagcactgtccctcggagtccgagacttccacctgggtcgtgtccaaggccccggcgactccccggactcggggtgccgggccaacctccccgccgaggcccacccgccgtcgctatggcgtgcagtttgcagaagctgtttgctgtggaagaggagtttgaagatgaggatttcttgtctgctgtggaggatgcagagaaccggtttactggctcactgcctgtgaatgctgggcgcctgagacctgtctcttctaggccacaggagactgtgcaggcacagtcctccaggctgctgctgttacaccccactgctccctcagaggctttgggcctgccagacttggacctctgcctccctgcctccagcacgcccagtgctgacagccgtccatcatgcataggagcagctcccctaaggcctgtctctacttccagcagctggattggcaatcagagaagagtgacagtgacagaagtgctcagagagacagcaagacctcagtcctcagccttacaccccctactcacctttgagagccaacagcagcaagttggtggctttgaggggcctgaacaagacgaatttgataaagtcctggcaagcatggagttggaggagcctggcatggagctggaatgtggagtcagcagtgaggccataccaatcctgcctgcccagcagcgggagggttcagtattggctaaaaaagcccgggtagttgatctgagtggatcttgccagaaggggcctgtgcctgccatccacaaagcgggtatcatgtccgcccaggatgagtctctagatcctgtcatccaatgtaggactccacgaccccccttgagacctggtgctgtgggtcaccttcctgttccaactgccttaacagttcccactcagcaactccactgggaagtctgtccgcaacgctcccctgttcaagcacttcagcctctccaagctgctagagggaccattcagagcagccctcaaaatcgtttcccttgtcagccattccagtctccaagttcctggttaagtggcaaagctcatttacccagacctcgaactcccaactcaagctgttctactccctcaaggactagctctggattatttcctcggatacccttacaaccgcaagctccagtgtcttccattgggtctcctgttggtaccccaaaaggtccccagggagctctgcagacacccatagtcaccaaccacctggtgcagctagtcactgctgccagccggacaccccagcagcccacccatccctccacccgagccaaaactcgccgtttccctggcccagctgggatcctgcctcaccaggcagccctgaagcagcttcctaggaacaaggtccccaacatggcggtgatgatcaagtccctgactcggagcacaatggacgccagtgtggttttcaaggaccccacgggagagatgcaggggacggtgcacaggttgctgctggagacgtgccagaatgagctgaagcctggctcagtgctgctgctgaagcagattggagtgttttctccttcacttcgaaatcactacctcaacgtgacacccaacaacctggtccatatttacagcccggattctggggatgggagcttcctcaagccatctcagcccttccccaagatgacctggatggactcctgagtgagcttcctgaagacttcttctgtgggaccagtagttgagactgccccaacgcaggacaacccaccatgagcaggcagctctgggcatgtgtctggtcacatccaagggggagaagaaggccagcatgattggagagtggacacagccggggggcttctgtggttgctcccaccctgggtgttttccctgagagccccctcatctctgcgctgccctcactttgggccttcctttgccgttggcaccagaatccggccggagactggctctccagccaacaagaaaggcctgtcaccctcgccttgggtgtccctctcctgcctcagcttaattttagaggatattgggcctggttttcttgtcccttcataccctagtccctggacagctgaggagatgaaaggagccacaccacaacaatggcggcctgcccctccacacaggggagaagcacgctcaggcttcctctgctttgtctcttcagacctgtggttgctctgctcatccatgcccaaggttcccaggtgcaggacagaggtgtggcctattgtaccttgttctgaaataaagcatctcctgctt

SEQ ID NO: 318022 - DNA, 651 bp, Artificial Sequence
  derived and/or modified sequence
cctttaagaaggcggagacgccccagtggcggcgtcttcgaatgcggcctaaggcgcctgccgccagtctcctggcgactttccctatatcgcagagactcatccctctgaccccagcccggaagcactgtccctcggagtccgagacttccacctgggtcgtgtccaaggccccggcgactccccggactcggggtgccgggccaacctccccgccgaggcccacccgccgtcgctatggcgtgcagtttgcagaagctgtttgctgtggaagaggagtttgaagatgaggatttcttgtctgctgtggaggatgcagagaaccggtttactggctcactgcctgtgaatgctgggcgcctgagacctgtctcttctaggccacaggagactgtgcaggcacagtcctccaggctgctgctgttacaccccactgctccctcagaggctttgggcctgccagacttggacctctgcctccctgcctccagcacgcccagtgctgacagccgtccatcatgcataggagcagctcccctaaggcctgtctctacttccaactgccttaacagttcccactcagcaactccactgggaagtctgtccgcaacgctcccctgttcaagcacttcagcctctccaagctgctag

SEQ ID NO: 318023 - DNA, 1566 bp, Artificial Sequence
  derived and/or modified sequence
atggcctgcagcctgcagaagctgttcgccgtggaggaggagttcgaggacgaggacttcctgagcgccgtggaggacgccgagaacagattcaccggcagcctgcccgtgaacgccggcagactgagacccgtgagcagcagaccccaggagaccgtgcaggcccagagcagcagactgctgctgctgcaccccaccgcccccagcgaggccctgggcctgcccgacctggacctgtgcctgcccgccagcagcacccccagcgccgacagcagacccagctgcatcggcgccgcccccctgagacccgtgagcaccagcagcagctggatcggcaaccagagaagagtgaccgtgaccgaggtgctgagagagaccgccagaccccagagcagcgccctgcaccccctgctgaccttcgagagccagcagcagcaggtgggcggcttcgagggccccgagcaggacgagttcgacaaggtgctggccagcatggagctggaggagcccggcatggagctggagtgcggcgtgagcagcgaggccatccccatcctgcccgcccagcagagagagggcagcgtgctggccaagaaggccagagtggtggacctgagcggcagctgccagaagggccccgtgcccgccatccacaaggccggcatcatgagcgcccaggacgagagcctggaccccgtgatccagtgcagaacccccagaccccccctgagacccggcgccgtgggccacctgcccgtgcccaccgccctgaccgtgcccacccagcagctgcactgggaggtgtgcccccagagaagccccgtgcaggccctgcagcccctgcaggccgccagaggcaccatccagagcagcccccagaacagattcccctgccagcccttccagagccccagcagctggctgagcggcaaggcccacctgcccagacccagaacccccaacagcagctgcagcacccccagcagaaccagcagcggcctgttccccagaatccccctgcagccccaggcccccgtgagcagcatcggcagccccgtgggcacccccaagggcccccagggcgccctgcagacccccatcgtgaccaaccacctggtgcagctggtgaccgccgccagcagaaccccccagcagcccacccaccccagcaccagagccaagaccagaagattccccggccccgccggcatcctgccccaccaggccgccctgaagcagctgcccagaaacaaggtgcccaacatggccgtgatgatcaagagcctgaccagaagcaccatggacgccagcgtggtgttcaaggaccccaccggcgagatgcagggcaccgtgcacagactgctgctggagacctgccagaacgagctgaagcccggcagcgtgctgctgctgaagcagatcggcgtgttcagccccagcctgagaaaccactacctgaacgtgacccccaacaacctggtgcacatctacagccccgacagcggcgacggcagcttcctgaagcccagccagcccttccccaagatgacctggatggacagctag

SEQ ID NO: 318024 - DNA, 414 bp, Artificial Sequence
  derived and/or modified sequence
atggcctgcagcctgcagaagctgttcgccgtggaggaggagttcgaggacgaggacttcctgagcgccgtggaggacgccgagaacagattcaccggcagcctgcccgtgaacgccggcagactgagacccgtgagcagcagaccccaggagaccgtgcaggcccagagcagcagactgctgctgctgcaccccaccgcccccagcgaggccctgggcctgcccgacctggacctgtgcctgcccgccagcagcacccccagcgccgacagcagacccagctgcatcggcgccgcccccctgagacccgtgagcaccagcaactgcctgaacagcagccacagcgccacccccctgggcagcctgagcgccaccctgccctgcagcagcaccagcgccagccccagctgctag

SEQ ID NO: 318025 - DNA, 1566 bp, Artificial Sequence
  derived and/or modified sequence
atggcctgtagtctgcagaaactgtttgcagtcgaagaagaatttgaggacgaggactttttgagtgctgtggaagacgcggaaaatcgcttcacggggtcactgcctgtcaatgctgggcgattgagacctgtgtcctctcggcctcaggagaccgtgcaggcgcaatcttcaagactactcttgctccatcccacggcgccatccgaagccttgggcctgcccgacctcgacctctgcctgcctgcaagttccactcctagtgccgactcccgaccctcttgtattggggcagcacccctcaggcccgtgagtacgtcttcatcatggattgggaatcaacgcagggtgacagttacagaagttctgagggagactgcgcggccacaaagcagcgccctgcaccccctgctgacctttgaaagccagcagcagcaagtgggtggcttcgaaggcccagaacaggatgaatttgataaggtcctggcaagtatggagctggaggaacccggcatggagctcgagtgcggagtttcatcagaagcaattcccatcctccctgctcaacagagggagggcagtgtgttggcaaagaaagctcgggtggtggatttgagtggatcctgtcaaaaaggccctgtacccgccatccacaaagctggtattatgtccgcccaagacgagagccttgacccggtcatacaatgccggaccccccgcccacccctacggcctggtgcggtcgggcatctgcccgtgccgaccgcccttacagtaccaacccaacagttgcactgggaggtgtgcccccaacgctctccagtgcaggccctgcagcctctgcaggccgctagagggaccatccagtcttctccacaaaaccgctttccttgccagccctttcagtcacccagtagctggctctccggaaaggcccacctgccaagaccaaggactccgaacagctcttgctctaccccttccagaacctccagcggcttgttcccaagaatcccactccagcctcaggctcctgtgtccagtatcggcagccccgtgggaaccccaaaaggcccgcaaggagcactgcagaccccaattgtgactaatcatctggtgcaactcgtgaccgctgcttccaggacaccacaacagcccactcacccatctaccagagctaagacccgacgtttcccaggccccgccggcattttgcctcatcaggccgccctaaagcagctccctcggaacaaggtgccgaatatggccgtgatgataaagtccctcaccagaagcaccatggacgcatcagtcgtgtttaaggatcctactggcgaaatgcaaggcactgtgcatcggctactgctggagacttgtcagaacgagctgaaacccggttctgtcctactcctaaaacagatcggggttttctccccatctcttcggaaccattatctcaacgtgacacccaataatctggtccacatctactccccagatagtggcgacggatcatttctcaagccgagccaacctttccctaagatgacttggatggattcctag

SEQ ID NO: 318026 - DNA, 414 bp, Artificial Sequence
  derived and/or modified sequence
atggcatgttccctccagaagctctttgccgtggaggaagagtttgaggatgaggattttctgtctgccgtcgaagatgcggaaaatcgattcacaggttccctgcctgtcaacgccgggagactccgtccagtttcaagcaggccccaggaaacagtgcaagcccaaagctcgcggctgcttctgctgcacccaacagctccatctgaagctctggggttacctgatctggatctgtgcctgccggccagcagtacacccagcgctgactccagaccttcatgtattggcgctgcacccctcaggcccgtgagcaccagtaattgcctcaactcgagccacagtgccacccctctcggctccctttccgctaccctgccatgttcaagcacttctgctagcccctcctgctag

SEQ ID NO: 318027 - DNA, 1566 bp, Artificial Sequence
  derived and/or modified sequence
atggcctgcagcctgcagaagctgtttgctgtggaggaggagtttgaagatgaggacttcctgtctgctgtggaggatgctgagaaccgcttcaccggcagcctgcctgtgaatgccggccgcctgcggcctgtgagcagccggccccaggagaccgtgcaggcccagagcagccggctgctgctgctgcaccccacagcccccagcgaggccctgggcctgcctgacctggacctgtgcctgcctgccagcagcacccccagcgctgacagccggcccagctgcatcggggccgcccccctgcggcctgtgtccaccagcagctcctggattggcaaccagaggagagtgacagtgacagaggtgctgcgggagacagcccggccccagagcagcgccctgcaccccctgctgacctttgagagccagcagcagcaggtgggcggctttgagggccctgagcaggatgaatttgacaaggtgctggcctccatggagctggaggagcccggcatggagctggagtgtggggtgagcagcgaggccatccccatcctgcctgcccagcagcgggagggctctgtgctggccaagaaggcccgggtggtggacctgagcggcagctgccagaagggccctgtgcctgccatccacaaggccggcatcatgtctgcccaggatgagagcctggaccccgtcatccagtgcaggacccccaggcctcccctgcggcctggagctgtgggccacctgcctgtgcccacagccctgactgtgcccacccagcagctgcactgggaggtgtgcccccagaggagccctgtgcaggccctgcagcccctgcaggccgcccggggcaccatccagagcagcccccagaaccgcttcccctgccagcccttccagagccccagctcctggctgagcggcaaggcccacctgccccggcccaggacccccaacagcagctgcagcacccccagcaggaccagcagcggcctcttcccccgcatccccctgcagccccaggcccctgtgagcagcatcggcagccctgtgggcacccccaagggcccccagggcgccctgcagacccccatcgtgaccaaccacctggtgcagctggtgacagctgccagcaggaccccccagcagcccacccaccccagcacccgggccaagacccggcgcttccctggccctgctggcatcctgccccaccaggccgccctgaagcagctgcccaggaacaaggtgcccaacatggctgtgatgatcaagagcctgaccaggagcaccatggatgcctctgtggtgttcaaggaccccaccggggagatgcagggcaccgtgcaccggctgctgctggagacctgccagaatgagctgaagccaggctctgtgctgctgctgaagcagatcggggtcttcagccccagcctgaggaaccactacctgaatgtgacccccaacaacctggtgcacatctacagcccagattctggagatggcagcttcctgaagcccagccagcccttccccaagatgacctggatggacagctag

SEQ ID NO: 318028 - DNA, 414 bp, Artificial Sequence
  derived and/or modified sequence
atggcctgcagcctgcagaagctgtttgctgtggaggaggagtttgaagatgaggacttcctgtctgctgtggaggatgctgagaaccgcttcaccggcagcctgcctgtgaatgccggccgcctgcggcctgtgagcagccggccccaggagaccgtgcaggcccagagcagccggctgctgctgctgcaccccacagcccccagcgaggccctgggcctgcctgacctggacctgtgcctgcctgccagcagcacccccagcgctgacagccggcccagctgcatcggggccgcccccctgcggcctgtgtccaccagcaactgcctgaacagcagccacagcgccacccccctgggcagcctgagcgccaccctgccctgcagcagcaccagcgccagccccagctgctag

SEQ ID NO: 318029 - DNA, 1566 bp, Artificial Sequence
  derived and/or modified sequence
atggcctgcagcctgcagaagctgttcgccgtggaggaggagttcgaagacgaagatttcctgtcagcagtcgaggatgcagagaacagattcacgggttctctgcccgtcaacgcaggacgtctccgtcctgtgtcaagccggccccaggaaaccgtgcaggcccaatccagtagactgctgttgcttcaccctacggcgccaagcgaagcgctgggcctccctgacctcgacctctgtctcccagcctccagcaccccctctgccgatagtagaccttcatgtattggagctgctccgcttcggcccgtcagcacctccagctcttggatcggaaaccaacggcgagttactgtgaccgaggttctcagggaaaccgccaggcctcagtcctctgcactgcaccccctgctgacatttgagtctcagcagcagcaggtgggcgggtttgagggtccagagcaagatgagttcgataaagtactcgcatctatggagctcgaggaaccagggatggagctggaatgtggggtctcctccgaggccattcctattctccccgcccaacagcgggaaggatctgtactggccaagaaggccagggtggtagacctgagtgggtcatgccagaaaggccctgtcccggctatccacaaagctggtattatgtcagcacaggacgagtccctcgaccctgtcattcagtgcaggacgccacgaccgcctctgagacctggggctgtggggcatcttccagtacccacagctttgaccgttcctacgcagcagctgcactgggaggtttgtcctcaacggtcaccagtacaagctttgcagcctctccaggccgcccgtggaactatccagtctagtccacagaacaggttcccctgtcagccttttcagtcacccagctcatggcttagcggcaaagcccatctgcctcgtccccgaactcctaactccagctgttcaaccccatctaggacctcatcagggctctttcccagaatacctctgcaaccacaagcccccgtgtcttctattggcagccctgtgggaactccgaaaggcccccagggggcccttcaaacgccaattgtgaccaatcacctcgtgcagttggttaccgccgctagtcggacaccgcagcagccaacccacccctcaacgcgtgccaaaactcggagatttcccggccctgctggcattctcccgcatcaggctgctcttaagcagcttccccgcaataaggtacccaatatggctgtgatgattaagtctctcacaagatcaactatggatgcatctgtagtgttcaaggatcctacaggagagatgcagggcactgtgcatcggttgctgttggaaacctgccagaatgaattgaaacctggaagtgttcttctgttgaagcaaattggtgtgtttagcccctcactgagaaaccattatctcaatgtgacgcccaacaatctggttcacatctactcgcctgattctggagatggtagcttcctcaagccatcccagcccttcccgaaaatgacatggatggattcatag

SEQ ID NO: 318030 - DNA, 414 bp, Artificial Sequence
  derived and/or modified sequence
atggcctgcagcctgcagaagctgttcgccgtggaggaggagttcgaggatgaagactttctctctgcagtcgaagatgctgagaatcggtttacggggagtctgcccgtgaacgccgggaggctaaggccagtgtcaagccgcccccaggagacagtgcaggcacagtcctcgaggcttttgctgcttcatccaacagcccctagtgaggcacttggattgcctgatctggatctctgcctaccagcctcctccaccccctctgccgattcgaggccttcatgcattggggctgctcccctgcgccccgtgagcacctccaactgccttaactcatcccattccgctactccactgggctcactgtcagccacactgccttgctcctcaacctcagcctccccatcctgttag

SEQ ID NO: 318031 - DNA, 1566 bp, Artificial Sequence
  derived and/or modified sequence
atggcctgtagcctgcaaaaattgttcgcagtggaggaggaattcgaggacgaagatttcctgtctgctgtcgaagatgccgaaaataggtttacgggatcgcttcctgtaaacgccggtcgcctcaggcctgtctcgtctagaccacaggagaccgtccaagcacagtcaagcaggcttctgttgctccatccaaccgcccctagtgaggcgctggggctccctgacctggacctttgcctacctgcgtcttcgacacctagtgctgactctaggccttcctgtatcggagctgctcctctgcgtccggtgtccactagcagctcttggatcggcaaccaacgcagggtcactgtgaccgaggtgcttagggagaccgcaaggcctcaaagctccgcccttcatccactcttaaccttcgaaagccaacagcagcaagttggcggtttcgagggacccgaacaggacgaattcgataaagtgctggcaagcatggagttggaagagccgggtatggagttggaatgtggggtgtccagtgaagcaataccaatactccccgctcagcagcgggagggatcagtgctggcgaagaaagccagagtggtcgatctgagcgggtcgtgccaaaagggcccagtgcccgctattcacaaagctggtatcatgagcgcccaggacgagtcattggatcctgtaatccagtgccgtaccccgaggccccctctgcgaccgggagccgttgggcacctgccagtgccaacggcattgaccgtgcccacacagcaattacattgggaggtctgtcctcaaagaagtccggttcaagcgctgcaacctctccaggctgccagaggcaccatccagtcatcccctcaaaatcgctttccatgtcagccattccagtcaccaagctcttggctgagtgggaaggcgcacttgccgcgaccaaggacgcccaactcctcttgtagcacaccttcgcggacctccagtggcctcttcccccgtatccctctgcagccccaggccccagtgtcgtccattggtagtccagtgggcacccctaaaggccctcaaggcgcacttcagacccctatcgtgaccaaccacctggtgcaacttgttacagctgcctcccgcaccccgcaacagcccacccacccaagcaccagagccaaaacacgccgatttccgggaccagcaggcatcttacctcatcaggccgctctaaagcagctacccaggaataaagtccccaatatggctgtcatgatcaagagcttaacccggtccaccatggatgcttcggtcgtattcaaggatccaacaggcgagatgcaaggaacagtgcaccgcctgttactcgaaacttgccagaacgaattaaaaccaggatctgtcttactgctaaaacaaataggagtcttttctccctctctgcggaaccattacctcaatgtgaccccaaataacctagtgcatatttatagcccagacagcggagacggcagcttcctgaaaccaagccagccctttcccaaaatgacttggatggactcatag

SEQ ID NO: 318032 - DNA, 414 bp, Artificial Sequence
  derived and/or modified sequence
atggcttgctcattacaaaagctattcgcagtcgaagaggagtttgaggatgaggacttcctatccgccgtggaagacgccgagaaccggtttacgggctccctacccgttaacgccggtcgactgaggcctgtatcttcacgccctcaagaaactgttcaggcacagagcagcaggctgctgttgctacatccgaccgctccctctgaggccctcggactgccagacctggacctctgccttcccgcttcttcaactccaagcgccgactcccgcccttcttgtatcggagcggctcccctccgccctgtgtcaacttctaattgtctgaactcaagccacagtgccaccccgttaggcagcctttcagccaccctaccatgcagtagcacaagtgcttccccctcgtgttag

SEQ ID NO: 318033 - DNA, 909 bp, Artificial Sequence
  derived and/or modified sequence
atggaactccggtcctaccagtgggaagttattatgcccgctctcgaaggcaagaatattattatctggctacccaccggagccggaaagactcgtgccgctgcttatgtcgctaaacggcacctcgaaaccgtggacggcgccaaggtcgtggtgctggttaatcgggtgcacctcgtcacgcagcacggggaagagttcaggcggatgctggacggccgatggactgtgaccactctgagcggcgacatggggcctcgggcgggttttggtcatttagcacgctgccacgatcttttaatttgcacagccgaacttctccagatggcacttactagcccggaagaggaggaacacgtcgaactcactgtcttctcattgatagttgtagatgagtgccatcacacacacaaggacacggtgtataatgtaatcatgtctcagtatctcgaattgaagctgcagcgggcccagcccctcccccaggttctcgggctgaccgccagcccgggcactggaggagcctccaagttagatggtgcaattaaccacgtcctccagctctgtgctaatctcgatacgtggtgcatcatgtccccccagaattgttgtccacaactgcaggagcacagtcagcagccttgcaagcagtataatctttgtcaccgccggtctcaggatccctttggagaccttctcaagaaactgatggaccaaatacacgaccatttggagatgcccgagttaagccggaagttcggtactcaaatgtatgagcaacaagtggtgaaactgtcggaggcagctgcgctggcgggtcttcaggaacagagagtgtatgcattgcatctgcgacgatataacgacgcccttctcatccatgacaccgtcagagcagtggatgcttag

SEQ ID NO: 318034 - DNA, 471 bp, Artificial Sequence
  derived and/or modified sequence
atggaactgcgatcctaccagtgggaggtgatcatgcccgcactggagggcaaaaatattattatctggctcccaactggagcagggaaaacgagggccgcagcttacgtggccaaaagacacctggaaactgttgacggggctaaagtggttgtcttggtgaatagagtgcatctggtgacccaacatggagaagaatttaggagaatgcttgatgggcggtggacggttacgacattgtcaggagacatggggcccagagcaggcttcggccacctcgcgcgctgccatgacttgctcatatgtaccgccgaactgctccagatggcgctgacatcccccgaggaagaagaacatgttgagctgaccgtctttagccttattgtggttgacgagtgccaccacacacacaaagataccgtgtacaatgtcattatgtcccagtatctggagttgaagttgcagcggtag

SEQ ID NO: 318035 - DNA, 909 bp, Artificial Sequence
  derived and/or modified sequence
atggagctgcggagctaccagtgggaggtgatcatgcctgccctggagggcaagaacatcatcatctggctgcccaccggggccggcaagaccagggctgctgcctacgtggccaagaggcacctggagaccgtggatggagccaaggtggtggtgctggtgaacagagtgcacctggtgacccagcacggggaggagttccggaggatgctggatggccgctggacagtgaccaccctgagcggggacatgggcccccgggccggcttcggccacctggcccgctgccacgacctgctgatctgcacagctgagctgctgcagatggccctgaccagccctgaggaggaggagcacgtggagctgactgtgttcagcctcatcgtggtggatgagtgccaccacacccacaaggacacagtgtacaacgtcatcatgagccagtacctggagctgaagctgcagagggcccagcccctgccccaggtgctgggcctgacagccagccctggcaccggcggggccagcaagctggatggagccatcaaccacgtgctgcagctgtgtgccaacctggacacctggtgcatcatgagcccccagaactgctgcccccagctgcaggagcacagccagcagccctgcaagcagtacaacctgtgccacagaagaagccaggacccctttggagacctgctgaagaagctgatggaccagatccatgaccacctggagatgcctgagctgagcaggaagtttggcacccagatgtatgagcagcaggtggtgaagctgtctgaggccgccgccctggccggcctgcaggagcagagggtgtatgccctgcacctgcggcgctacaatgatgccctgctgattcatgacacagtgcgggctgtggatgcctag

SEQ ID NO: 318036 - DNA, 471 bp, Artificial Sequence
  derived and/or modified sequence
atggagctgcggagctaccagtgggaggtgatcatgcctgccctggagggcaagaacatcatcatctggctgcccaccggggccggcaagaccagggctgctgcctacgtggccaagaggcacctggagaccgtggatggagccaaggtggtggtgctggtgaacagagtgcacctggtgacccagcacggggaggagttccggaggatgctggatggccgctggacagtgaccaccctgagcggggacatgggcccccgggccggcttcggccacctggcccgctgccacgacctgctgatctgcacagctgagctgctgcagatggccctgaccagccctgaggaggaggagcacgtggagctgactgtgttcagcctcatcgtggtggatgagtgccaccacacccacaaggacacagtgtacaacgtcatcatgagccagtacctggagctgaagctgcagaggtag

SEQ ID NO: 318037 - DNA, 909 bp, Artificial Sequence
  derived and/or modified sequence
atggagctgcggagctaccagtgggaggtgatcatgcccgccctggaagggaaaaatatcattatttggctgccgaccggagccggtaagacacgggcggccgcttacgtcgcaaagcgacatctggaaactgtcgacggcgctaaggtcgtcgtgctggttaaccgcgtgcatctggtcacccaacacggggaggagttcagacggatgcttgacggacgttggaccgtgaccaccctgagcggcgacatgggtcccagggccgggttcggtcacctcgcgagatgccatgatctgctaatctgcactgcagagctgcttcaaatggcactgacttcgcccgaagaggaagagcacgtggaactgactgtgttttctttgatcgtggttgacgaatgccatcacacacataaggataccgtatacaacgtcatcatgtcgcagtatttggaactgaagctccaacgagctcagcctctaccgcaggtcctggggctaacagcaagccccggaaccggcggtgccagtaaactggatggcgccatcaaccacgtactacaactttgtgccaacctggatacatggtgtatcatgtcgcctcagaattgttgtccacagcttcaagagcacagccagcagccttgtaagcagtacaatctttgtcaccgtagatcgcaggaccctttcggagaccttctgaaaaagctgatggaccaaatccacgatcatttagagatgccagaactgagccggaaattcgggacacagatgtacgaacagcaggttgtgaagctgtctgaggcagcggccctggccggactgcaggaacagagagtgtatgcactgcatctaaggcggtataatgatgctttgttaattcatgatacggtccgggcagtggacgcctag

SEQ ID NO: 318038 - DNA, 471 bp, Artificial Sequence
  derived and/or modified sequence
atggagctgcggagctaccagtgggaggtgatcatgcccgccctggaaggtaagaatattattatctggctacctactggagccggaaagacccgcgccgccgcctatgtggccaagagacacctggagaccgtggacggggctaaggtggtcgtgctggttaaccgtgtgcacctagtaacccagcatggagaggaattccgacgaatgctggacggccgttggacagtcactacactttctggcgatatgggcccccgcgccggattcggtcatctggcaagatgccatgatctgcttatttgtacagccgaacttctgcagatggctttgacctctccagaagaagaagaacacgttgagctcactgtattctccctgatcgtcgtagacgagtgccatcatactcataaagatactgtttacaacgtgattatgtcacagtacctggagctgaaactccagagatag

SEQ ID NO: 318039 - DNA, 909 bp, Artificial Sequence
  derived and/or modified sequence
atggagctgcgttcctatcagtgggaggtgatcatgcccgcactggagggaaagaacattattatctggctgcctaccggcgcaggaaaaacgcgtgccgcagcatatgtcgcaaagcgccatctggagaccgtggacggagccaaggtcgtggtgctggtgaaccgtgtgcatctcgtgactcagcacggggaggagttccgccgaatgttggacgggaggtggaccgtcacaaccctcagcggcgatatgggcccacgggcaggcttcggccacctggccaggtgtcatgacttattgatttgcaccgccgagctgcttcagatggccctgacctcgcctgaagaggaagaacatgtcgaattaacagtgttttccttgatcgtagtggacgagtgccaccacacccacaaagacactgtgtataacgtgatcatgtcccagtatcttgagctgaaactgcagcgagcgcagcctctcccccaggtgttggggctaacggccagtcctgggacaggtggggcaagcaaactggacggagctattaatcacgtactacagctgtgtgcaaatctggatacttggtgcatcatgtcccctcagaattgctgcccacaactgcaagagcattctcagcagccatgcaagcaatacaacctctgccacaggcgaagccaggacccctttggggacttacttaagaagcttatggatcaaatccatgaccacctggagatgcctgaactctctcgcaaatttggcacccagatgtatgagcagcaggtggttaaactgtcggaggccgcagccttggctggcctgcaggaacagagagtctacgctctgcatcttagacgttataacgacgccttactgatccacgacaccgttcgtgcagtggatgcatag

SEQ ID NO: 318040 - DNA, 471 bp, Artificial Sequence
  derived and/or modified sequence
atggaattgagatcctaccagtgggaagtgattatgcctgcactggaggggaaaaatattatcatctggcttcctacaggagccggaaagacccgagccgcagcttatgtggccaagcggcacttagaaaccgtcgatggagcaaaggtagtggtgctcgtgaaccgagtgcatctcgtaacgcagcacggcgaagagtttcgacgaatgctagacggaaggtggaccgtcacaaccctcagcggtgacatgggtccgagggcaggatttggtcatctagccaggtgccacgatctgctgatctgcacagcggagctactgcaaatggccctaacatcccccgaggaggaagagcacgttgaactgacagtgttcagcctgatagtcgtagacgagtgccatcacacccataaggatactgtctacaatgtgattatgagccagtatctagagctaaaactgcaaagatag

SEQ ID NO: 318041 - DNA, 909 bp, Artificial Sequence
  derived and/or modified sequence
atggagctgagaagctaccagtgggaggtgatcatgcccgccctggagggcaagaacatcatcatctggctgcccaccggcgccggcaagaccagagccgccgcctacgtggccaagagacacctggagaccgtggacggcgccaaggtggtggtgctggtgaacagagtgcacctggtgacccagcacggcgaggagttcagaagaatgctggacggcagatggaccgtgaccaccctgagcggcgacatgggccccagagccggcttcggccacctggccagatgccacgacctgctgatctgcaccgccgagctgctgcagatggccctgaccagccccgaggaggaggagcacgtggagctgaccgtgttcagcctgatcgtggtggacgagtgccaccacacccacaaggacaccgtgtacaacgtgatcatgagccagtacctggagctgaagctgcagagagcccagcccctgccccaggtgctgggcctgaccgccagccccggcaccggcggcgccagcaagctggacggcgccatcaaccacgtgctgcagctgtgcgccaacctggacacctggtgcatcatgagcccccagaactgctgcccccagctgcaggagcacagccagcagccctgcaagcagtacaacctgtgccacagaagaagccaggaccccttcggcgacctgctgaagaagctgatggaccagatccacgaccacctggagatgcccgagctgagcagaaagttcggcacccagatgtacgagcagcaggtggtgaagctgagcgaggccgccgccctggccggcctgcaggagcagagagtgtacgccctgcacctgagaagatacaacgacgccctgctgatccacgacaccgtgagagccgtggacgcctag

SEQ ID NO: 318042 - DNA, 471 bp, Artificial Sequence
  derived and/or modified sequence
atggagctgagaagctaccagtgggaggtgatcatgcccgccctggagggcaagaacatcatcatctggctgcccaccggcgccggcaagaccagagccgccgcctacgtggccaagagacacctggagaccgtggacggcgccaaggtggtggtgctggtgaacagagtgcacctggtgacccagcacggcgaggagttcagaagaatgctggacggcagatggaccgtgaccaccctgagcggcgacatgggccccagagccggcttcggccacctggccagatgccacgacctgctgatctgcaccgccgagctgctgcagatggccctgaccagccccgaggaggaggagcacgtggagctgaccgtgttcagcctgatcgtggtggacgagtgccaccacacccacaaggacaccgtgtacaacgtgatcatgagccagtacctggagctgaagctgcagagatag

SEQ ID NO: 318043 - DNA, 1072 bp, Artificial Sequence
  derived and/or modified sequence
tctcttggttctttttcctggggcggggatgggagattcctaagtcggctcagctggctccttccctcagtttcagtttccatcttgggtctctgagctgagcagagtggcaccaggctgagttaagtgggactgccctgggcagacctacctactagagcagaatggagcttcggtcctaccaatgggaggtgatcatgcctgccctggagggcaagaatatcatcatctggctgcccacgggtgccgggaagacccgggcggctgcttatgtggccaagcggcacctagagactgtggatggagccaaggtggttgtattggtcaacagggtgcacctggtgacccagcatggtgaagagttcaggcgcatgctggatggacgctggaccgtgacaaccctgagtggggacatgggaccacgtgctggctttggccacctggcccggtgccatgacctgctcatctgcacagcagagcttctgcagatggcactgaccagccccgaggaggaggagcacgtggagctcactgtcttctccctgatcgtggtggatgagtgccaccacacgcacaaggacaccgtctacaacgtcatcatgagccagtacctagaacttaaactccagagggcacagccgctaccccaggtgctgggtctcacagcctccccaggcactggcggggcctccaaactcgatggggccatcaaccacgtcctgcagctctgtgccaacttggacacgtggtgcatcatgtcaccccagaactgctgcccccagctgcaggagcacagccaacagccttgcaaacagtacaacctctgccacaggcgcagccaggatccgtttggggacttgctgaagaagctcatggaccaaatccatgaccacctggagatgcctgagttgagccggaaatttgggacgcaaatgtatgagcagcaggtggtgaagctgagtgaggctgcggctttggctgggcttcaggagcaacgggtgtatgcgcttcacctgaggcgctacaatgacgcgctgctcatccatgacaccgtccgcgccgtggatgcctt

SEQ ID NO: 318044 - DNA, 730 bp, Artificial Sequence
  derived and/or modified sequence
gctctggccaggagttgggatgagtggagggcccagtgggtctgagtcccctgccattcccagaatggagctgtggccctaccaatgggaggtgatcatgcctgccagggcgctggcgcagcagcagtacttaaccggagtttgtactcacggcagttggcgatgacttttcagtttccatcttgggtctctgagctgagcagagtggcaccaggctgagttaagtgggactgccctgggcagacctacctactagagcagaatggagcttcggtcctaccaatgggaggtgatcatgcctgccctggagggcaagaatatcatcatctggctgcccacgggtgccgggaagacccgggcggctgcttatgtggccaagcggcacctagagactgtggatggagccaaggtggttgtattggtcaacagggtgcacctggtgacccagcatggtgaagagttcaggcgcatgctggatggacgctggaccgtgacaaccctgagtggggacatgggaccacgtgctggctttggccacctggcccggtgccatgacctgctcatctgcacagcagagcttctgcagatggcactgaccagccccgaggaggaggagcacgtggagctcactgtcttctccctgatcgtggtggatgagtgccaccacacgcacaaggacaccgtctacaacgtcatcatgagccagtacctagaacttaaactccagagg

SEQ ID NO: 318045 - DNA, 678 bp, Artificial Sequence
  derived and/or modified sequence
atggtggccagagtgggcctgctgctgagagccctgcagctgctgctgtggggccacctggacgcccagcccgccgagagaggcggccaggagctgagaaaggaggccgaggccttcctggagaagtacggctacctgaacgagcaggtgcccaaggcccccaccagcaccagattcagcgacgccatcagagccttccagtgggtgagccagctgcccgtgagcggcgtgctggacagagccaccctgagacagatgaccagacccagatgcggcgtgaccgacaccaacagctacgccgcctgggccgagagaatcagcgacctgttcgccagacacagaaccaagatgagaagaaagaagagattcgccaagcagggcaacaagtggtacaagcagcacctgagctacagactggtgaactggcccgagcacctgagaagcagacagttcggcgccccctgcgccccccccagcagctgcggcgccaccagccagagatggagcagcggcagaccccagccccaggcccccctgaccagcggcagccccagcagcaagggcaccaccaccatgggctgggccatgcccctgatggcccagggcgccccctggagaacccccagctgccccgccgccgccaagagaaccagcaccaagatgagcgccggcccctag

SEQ ID NO: 318046 - DNA, 678 bp, Artificial Sequence
  derived and/or modified sequence
atggttgcccgcgtaggcctgctgcttcgcgctctccagttattgttgtggggccatctggacgcccagcctgctgagagagggggccaggagctgaggaaggaagcagaggcgttcctcgaaaaatacggatacctcaatgaacaggtccctaaagcccccaccagtactcgcttctctgacgccatccgagctttccagtgggtgagccagttgcctgtttcaggagtcctggacagggctactttacgacagatgacccgaccccgatgcggcgtgacggatacgaattcatatgccgcttgggcggaacgtatttcagatctctttgcaagacatcggacgaagatgcgtaggaagaagaggttcgccaagcagggtaataagtggtataagcaacatctttcctatcgactggttaattggcccgaacacctaaggagcagacaatttggggctccatgcgcacccccctcatcctgtggcgcaacttctcagcgctggtcaagcgggcggcctcagcctcaggcacccctgacgtccggcagtccctcttctaaagggacaaccacgatggggtgggcgatgccactgatggcccaaggagccccatggcggacccctagttgccccgctgccgcgaaaaggacttcaacaaaaatgtcggctgggccttag

SEQ ID NO: 318047 - DNA, 678 bp, Artificial Sequence
  derived and/or modified sequence
atggtggcccgggtgggcctgctgctgcgggccctgcagctgctgctgtggggccacctggatgcccagcctgctgagcggggcggccaggagctgaggaaggaggccgaggccttcctggagaagtatggctacctgaatgagcaggtgcccaaggcccccaccagcacccgcttcagtgatgccatccgggccttccagtgggtgtcccagctgcctgtgtctggagtgctggaccgggccaccctgcggcagatgacccggccccgctgtggggtgacagacaccaacagctatgctgcctgggccgagcgcatcagtgacctgtttgcccggcacaggaccaagatgaggaggaagaagagatttgccaagcagggcaacaagtggtacaagcagcacctgagctaccgcctggtgaactggccagagcacctgcggagccggcagtttggagccccctgtgccccacccagcagctgtggggccaccagccagcgctggagcagcggccggccccagccccaggcccccctgaccagcggcagccccagcagcaagggcaccaccaccatgggctgggccatgcccctgatggcccagggcgccccctggaggacccccagctgcccagctgctgccaagaggaccagcaccaagatgtctgctggcccctag

SEQ ID NO: 318048 - DNA, 678 bp, Artificial Sequence
  derived and/or modified sequence
atggtggcccgggtgggcctgctgctgcgggccctgcagctgctgctctggggccatctggacgcccagccagcagagcggggcggccaggaactgcgcaaggaggccgaagcattcctggagaaatacggatatttgaacgagcaggtgccaaaagccccgacttcaactaggttttcagatgcaattagggcctttcagtgggtgagccagcttccggtttcgggtgtgctggatcgtgctaccctgcggcagatgactcgaccgcggtgcggcgtgacggatacaaacagctatgctgcctgggctgaaagaatcagcgatctgttcgctaggcaccggactaagatgcgtcggaagaaacggttcgccaaacaagggaacaagtggtacaaacagcacctgagctataggctggtgaactggccagagcacctgcggtctcgccagttcggggcgccatgtgcccccccgagcagttgtggcgccaccagtcaaagatggtcctccggccgaccacagccccaagccccgctcacttctggatcgccttcctccaaggggaccacaacaatgggatgggcgatgcctctgatggcgcagggagccccctggagaacaccctcgtgccccgccgcggccaagaggacatccacaaaaatgagtgccggaccgtag

SEQ ID NO: 318049 - DNA, 678 bp, Artificial Sequence
  derived and/or modified sequence
atggtagccagagtgggcctactgctgagagccctgcagttgctcctctggggacatctggatgcacaaccagccgagagaggcggacaagaactacgtaaagaagcggaggcctttttggaaaagtacggatacctcaatgagcaggtcccgaaggcccctacctcaacaaggttcagtgatgctatcagggctttccagtgggtgtcccagcttcctgtgtcaggggtgctggaccgtgccactttgcggcagatgaccagaccccgatgtggcgtgacagatactaactcttacgctgcctgggctgagcgtatctcggatctgttcgcacgacatagaactaaaatgagacgcaaaaagcgttttgccaagcaggggaacaagtggtataagcagcacctgtcttatcggctagtcaattggcctgagcatctccggagccgccagtttggagcaccatgtgcacctcccagcagttgtggcgctacttcccagcgctggagtagcggcaggccccaaccacaggccccactcaccagtgggtcaccctctagcaaggggaccaccaccatgggctgggctatgcccctgatggctcagggtgcaccctggcggactcccagttgtcctgcggctgctaagcgaacgtcaacgaaaatgagcgccggtccttag

SEQ ID NO: 318050 - DNA, 678 bp, Artificial Sequence
  derived and/or modified sequence
atggtcgccagggtcggcctcctcttaagagcactgcaacttttactctggggccacttggatgctcagccagctgagcgaggaggccaggagctccgcaaggaagccgaggcctttcttgagaagtatggatacttgaacgaacaggttcctaaggctcccacaagcactagattctcagatgcaatacgcgcctttcaatgggtctcacaactccccgtgagcggagttctggatagagccaccctgcggcagatgacacggccgcgatgtggagttactgacaccaatagctatgccgcttgggctgagcgcatctccgatctgtttgctcgtcacaggactaaaatgcgacgtaagaaaagatttgccaagcaaggcaataaatggtacaagcagcacttatcctataggcttgtcaactggcccgaacatctaaggtcccgccagttcggcgcgccctgtgcacctcctagctcatgtggcgcaacctcccagcgctggtcatccggacgcccacagccacaagcccccctgacttccggctccccctcttctaaaggtactacaaccatgggctgggctatgcctttgatggctcagggagctccctggcggactccaagctgcccagctgcagcaaagaggacaagtaccaagatgtctgctggcccgtag

SEQ ID NO: 318051 - DNA, 678 bp, Artificial Sequence
  derived and/or modified sequence
atggttgctagagtgggacttttactgagggcccttcaactgctcctgtggggtcatttagacgctcagcccgcagagaggggaggacaagagttgagaaaggaggctgaggcttttctggaaaagtacgggtacttaaacgagcaagtccctaaggcaccaacctcaactagattctccgacgcgatcagagcattccagtgggtgtctcaactaccggtgtccggtgttctagacagagcgacactccgacagatgacaagacctaggtgcggagtaacagataccaatagctatgctgcttgggctgagcgcatctccgatctgtttgctcgtcacaggactaaaatgcgacgtaagaaaagatttgccaagcaaggcaataaatggtacaagcagcacttatcctataggcttgtcaactggcccgaacatctaaggtcccgccagttcggcgcgccctgtgcacctcctagctcatgtggcgcaacctcccagcgctggtcatccggacgcccacagccacaagcccccctgacttccggctccccctcttctaaaggtactacaaccatgggctgggctatgcctttgatggctcaaggagctccttggcgcaccccttcctgcccagctgccgcaaaaagaacatcaactaaaatgagtgccggaccgtag

SEQ ID NO: 318052 - RNA, 678 nt, Artificial Sequence
  derived and/or modified sequence
auggucgccagggucggccuccucuuaagagcacugcaacuuuuacucuggggccacuuggaugcucagccagcugagcgaggaggccaggagcuccgcaaggaagccgaggccuuucuugagaaguauggauacuugaacgaacagguuccuaaggcucccacaagcacuagauucucagaugcaauacgcgccuuucaaugggucucacaacuccccgugagcggaguucuggauagagccacccugcggcagaugacacggccgcgauguggaguuacugacaccaauagcuaugccgcuugggcugagcgcaucuccgaucuguuugcucgucacaggacuaaaaugcgacguaagaaaagauuugccaagcaaggcaauaaaugguacaagcagcacuuauccuauaggcuugucaacuggcccgaacaucuaaggucccgccaguucggcgcgcccugugcaccuccuagcucauguggcgcaaccucccagcgcuggucauccggacgcccacagccacaagccccccugacuuccggcucccccucuucuaaagguacuacaaccaugggcugggcuaugccuuugauggcucagggagcucccuggcggacuccaagcugcccagcugcagcaaagaggacaaguaccaagaugucugcuggcccguag

SEQ ID NO: 318053 - RNA, 678 nt, Artificial Sequence
  derived and/or modified sequence
augguugcuagagugggacuuuuacugagggcccuucaacugcuccuguggggucauuuagacgcucagcccgcagagaggggaggacaagaguugagaaaggaggcugaggcuuuucuggaaaaguacggguacuuaaacgagcaagucccuaaggcaccaaccucaacuagauucuccgacgcgaucagagcauuccagugggugucucaacuaccgguguccgguguucuagacagagcgacacuccgacagaugacaagaccuaggugcggaguaacagauaccaauagcuaugcugcuugggcugagcgcaucuccgaucuguuugcucgucacaggacuaaaaugcgacguaagaaaagauuugccaagcaaggcaauaaaugguacaagcagcacuuauccuauaggcuugucaacuggcccgaacaucuaaggucccgccaguucggcgcgcccugugcaccuccuagcucauguggcgcaaccucccagcgcuggucauccggacgcccacagccacaagccccccugacuuccggcucccccucuucuaaagguacuacaaccaugggcugggcuaugccuuugauggcucaaggagcuccuuggcgcaccccuuccugcccagcugccgcaaaaagaacaucaacuaaaaugagugccggaccguag

SEQ ID NO: 318054 - DNA, 360 bp, Artificial Sequence
  derived and/or modified sequence
atggcgcgacccggtatggagcggtggagggacaggttagcactggttaccggagccagcggcggaatcggcgctgcagtggcaagggccttggtccagcagggtttgaaggtggttggatgtgccaggactgtcgggaacatcgaagagctggccgctgaatgtaagtccgctggataccctggcaccctgatcccttaccgctgtgatttgtctaacgaggaggacattctgtccatgttttccgccatcagaagccagcacagcggagtagatatctgcatcaataatgccggattggctagacctgacacactattgagcggttctacaagtggatggaaggacatgtttaattag

SEQ ID NO: 318055 - DNA, 360 bp, Artificial Sequence
  derived and/or modified sequence
atggcaaggcctggaatggaaagatggagggatagactggcacttgtcacaggggctagtgggggcattggggccgccgtggccagggcgctggtgcaacagggccttaaagttgtcggatgtgcccggacagtgggtaatatcgaagaactggcagctgaatgcaaatctgcagggtacccaggcactttgataccttatcggtgtgacttatcaaacgaggaggacattctatccatgttcagtgcaattcgctcccagcacagcggtgtggacatatgcatcaacaacgccgggttagctagaccagacactctacttagcggctccacttctggatggaaagacatgttcaactag

SEQ ID NO: 318056 - DNA, 360 bp, Artificial Sequence
  derived and/or modified sequence
atggcgaggcctggtatggagagatggcgagataggctggctttggtgacaggagcttctgggggcatcggcgccgcagtcgccagggcgctcgttcaacaaggcctgaaagtggtgggatgcgctcgtactgtggggaacattgaggagctggcagcagagtgtaagtcggctggctatccgggaaccctgataccatacagatgcgacttgagtaacgaagaggacatcctctccatgttttcagctatcaggtcacaacattcaggggtggacatttgtataaataatgctggactggctagaccagacactctacttagcggctccacttctggatggaaagacatgttcaactag

SEQ ID NO: 318057 - DNA, 360 bp, Artificial Sequence
  derived and/or modified sequence
atggccagacccggcatggagagatggagagacagactggccctggtgaccggcgccagcggcggcatcggcgccgccgtggccagagccctggtgcagcagggcctgaaggtggtgggctgcgccagaaccgtgggcaacatcgaggagctggccgccgagtgcaagagcgccggctaccccggcaccctgatcccctacagatgcgacctgagcaacgaggaggacatcctgagcatgttcagcgccatcagaagccagcacagcggcgtggacatctgcatcaacaacgccggcctggccagacccgacaccctgctgagcggcagcaccagcggctggaaggacatgttcaactag

SEQ ID NO: 318058 - DNA, 360 bp, Artificial Sequence
  derived and/or modified sequence
atggcacggcctgggatggaacgctggagagatcgtctcgctctggtaacaggggcaagcgggggcatcggtgcagccgtcgctcgggcccttgtccagcaagggctgaaagtggttggctgtgcaagaacagtgggcaatattgaggagctggctgccgaatgcaagagtgcaggctatcccggaactctcattccgtataggtgcgatctgtccaacgaggaggatatattgagcatgtttagcgcaataagatcccagcattcaggcgtcgatatttgcattaataatgccggacttgccagaccggatacgctgctaagtggatcaacatccggctggaaggatatgtttaattag

SEQ ID NO: 318059 - DNA, 360 bp, Artificial Sequence
  derived and/or modified sequence
atggcccggcccggcatggagcgctggagggaccggctggccctggtgactggagccagcggcggcattggagctgctgtggcccgggccctggtgcagcagggcctgaaggtggtgggctgtgccaggacagtgggcaacatcgaggagctggccgctgagtgcaagtctgctggctacccaggcaccctcatcccctaccgctgtgacctgagcaatgaggaggacatcctgtccatgttcagcgccatccgcagccagcacagcggcgtggacatctgcatcaacaatgccggcctggcccggccagacaccctgctgagcggcagcaccagcggctggaaggacatgttcaactag

SEQ ID NO: 318060 - DNA, 360 bp, Artificial Sequence
  derived and/or modified sequence
atggcccggcccggcatggagcggtggcgggaccggctggccctggttactggtgctagcggaggaataggagccgccgtggctcgggccctcgttcagcagggtctgaaagtggtaggctgcgcccggacagtgggcaatatcgaggaactggcagcagagtgcaagtctgcaggctatcccggcactctgatcccatacagatgcgacctgtcaaatgaggaggatatccttagtatgttttcagcaatccggagtcagcactctggcgtggacatttgtattaataatgcaggcttagccaggccggacacgcttctttccggctctacaagcggatggaaagatatgttcaactag

SEQ ID NO: 318061 - DNA, 638 bp, Artificial Sequence
  derived and/or modified sequence
gcaggtcggcggcggcggcaggagagcggccgggcgtcagctcctcgacccccgtgtcgggctagtccagcgaggcggacgggcggcgtgggcccatggccaggcccggcatggagcggtggcgcgaccggctggcgctggtgacgggggcctcggggggcatcggcgcggccgtggcccgggccctggtccagcagggactgaaggtggtgggctgcgcccgcactgtgggcaacatcgaggagctggctgctgaatgtaagagtgcaggctaccccgggactttgatcccctacagatgtgacctatcaaatgaagaggacatcctctccatgttctcagctatccgttctcagcacagcggtgtagacatctgcatcaacaatgctggcttggcccggcctgacaccctgctctcaggcagcaccagtggttggaaggacatgttcaattagacttagcacctcacagatgcttgggcctggaaatgaagccatgaaaatgaagccctcagccttcttggagatcagagccatggtcctcacccacagcacatgggtctctaaacctggacctcaactcgcccatctgtaaaatgagggacttacattaaattcctacagctcctttcagcttga

SEQ ID NO: 318062 - RNA, 360 nt, Artificial Sequence
  derived and/or modified sequence
auggcaaggccuggaauggaaagauggagggauagacuggcacuugucacaggggcuagugggggcauuggggccgccguggccagggcgcuggugcaacagggccuuaaaguugucggaugugcccggacaguggguaauaucgaagaacuggcagcugaaugcaaaucugcaggguacccaggcacuuugauaccuuaucggugugacuuaucaaacgaggaggacauucuauccauguucagugcaauucgcucccagcacagcgguguggacauaugcaucaacaacgccggguuagcuagaccagacacucuacuuagcggcuccacuucuggauggaaagacauguucaacuag

SEQ ID NO: 318063 - RNA, 360 nt, Artificial Sequence
  derived and/or modified sequence
auggcgaggccugguauggagagauggcgagauaggcuggcuuuggugacaggagcuucugggggcaucggcgccgcagucgccagggcgcucguucaacaaggccugaaaguggugggaugcgcucguacuguggggaacauugaggagcuggcagcagaguguaagucggcuggcuauccgggaacccugauaccauacagaugcgacuugaguaacgaagaggacauccucuccauguuuucagcuaucaggucacaacauucagggguggacauuuguauaaauaaugcuggacuggcuagaccagacacucuacuuagcggcuccacuucuggauggaaagacauguucaacuag

SEQ ID NO: 318064 - DNA, 96 bp, Artificial Sequence
  derived and/or modified sequence
gctagttcaacatatgcaaatcaataaacgtaatccatcacataaacagaaccaatgacaaaaaccacgattatctcaatagatgcagaaaaggcc

SEQ ID NO: 318065 - protein, 462 aa, Artificial Sequence
  derived and/or modified sequence
MAASSAARSPFCQQWSSSGTCVRFFLLKWPQVTILVLQGRLDEARQMLSKEADASPASAGICRIMGDLMRTMPILSPGNTQTLTELELKWQHWHEECERYLQDSTFATSPHLESLLKIMLGDEAALLEQKELLSNWYHFLVTRLLYSNPTVKPIDLHYYAQSSLDLFLGGESSPEPLDNILLAAFEFDIHQVIKECSIALSNWWFVAHLTDLLDHCKLLQSHNLYFGSNMREFLLLEYASGLFAHPSLWQLGVDYFDYCPELGRVSLELHIERIPLNTEQKALKVLRICEQRQMTEQVRSICKILAMKAVRNNRLGSALSWSIRAKDAAFATLVSDRFLRDYCERGCFSDLDLIDNLGPAMMLSDRLTFLGKYREFHRMYGEKRFADAASLLLSLMTSRIAPRSFWMTLLTDALPLLEQKQVKVAAAVVFFACQSLLELSCIAVADVRVSSFVVLPVRVYSP

SEQ ID NO: 318066 - DNA, 1389 bp, Artificial Sequence
  derived and/or modified sequence
atggccgctagctcagctgccaggagtcctttctgccagcagtggtcaagttccggtacttgcgtgcgcttctttctgcttaagtggccccaggtgactatattggttcttcaggggcggttagatgaggctaggcaaatgttatctaaagaagccgatgcatcaccagccagcgccggcatttgccgaatcatgggggatctgatgcggacaatgccgattctgagtcccggaaacactcagaccctgactgagttggagctgaagtggcagcactggcatgaagagtgcgaaagatatctgcaggatagcacattcgccacatctccacacctcgaaagtctcctcaaaattatgcttggggatgaggctgccctgttggagcagaaggaacttttgtcaaattggtatcacttcttagtcaccaggctcttgtattctaatccaactgtcaaaccaattgacttgcactattatgcacagagcagcctcgatctcttcttgggaggcgaaagctctccagaacccctggataacattcttctcgcagcgttcgagttcgatattcaccaggtaatcaaagaatgttctattgcgttaagcaactggtggttcgtggctcatctaacagatctcttggatcattgcaaacttctccagtcacataatctttatttcggaagtaatatgcgcgaatttctgcttcttgagtacgccagcgggttattcgcacaccccagcttgtggcaactcggcgttgactactttgactattgtcctgaactaggccgggtcagcttagaacttcacatcgagcgcattccgttgaatacggaacagaaggccctcaaggtgctgagaatctgcgagcaacggcaaatgacagagcaggtccgctccatctgtaaaatcctggcgatgaaggctgtgcggaacaaccggctgggctctgctctgtcctggtcaatccgcgctaaggacgccgcgttcgcgacgttagtgtccgataggttcctgagagactattgtgagcgcggctgcttctccgatctggacctgatcgataatctcggaccggcgatgatgctgagtgacagactgactttcctcggcaagtacagggaattccacaggatgtacggcgaaaaacgattcgcagatgcagcaagcctcctcttatcactgatgacgagccggatagctccccgttccttctggatgactctattgactgatgctcttccgcttctggagcagaaacaggttaaagttgcagcggccgtggtattttttgcttgtcagtcgctgttggagctgagctgtatagctgtcgctgacgttcgcgtctccagcttcgtggtgcttccggtgcgtgtgtatagtccttag

SEQ ID NO: 318067 - DNA, 1389 bp, Artificial Sequence
  derived and/or modified sequence
atggccgccagcagcgctgcccggagccccttctgccagcagtggagcagcagcggcacctgtgtgcgcttcttcctgctgaagtggccccaggtgaccatcctggtgctgcagggccgcctggatgaggcccggcagatgctgagcaaggaggctgatgccagccctgccagcgctggcatctgccgcatcatgggagacctgatgaggaccatgcccatcctgagccctggcaacacccagaccctgacagagctggagctgaagtggcagcactggcatgaggagtgtgagcgctacctgcaggacagcacctttgccaccagcccccacctggagagcctgctgaagatcatgctgggagatgaggccgccctgctggagcagaaggagctgctgagcaactggtaccacttcctggtgacccggctgctgtacagcaaccccaccgtgaagcccatcgacctgcactactatgcccagagcagcctggacctcttcctgggcggggagagcagccctgagcccctggacaacatcctgctggccgcctttgaatttgacatccaccaggtgatcaaggaatgttccatcgccctgagcaactggtggtttgtggcccacctgacagacctgctggaccactgcaagctgctgcagagccacaacctgtacttcggcagcaacatgagggagttcctgctgctggagtatgccagcggcctgtttgcccaccccagcctgtggcagctgggcgtggactactttgactactgcccagagctgggccgggtgtccctggagctgcacatcgagcgcatccccctgaacacagagcagaaggccctgaaggtgctgcgcatctgtgagcagaggcagatgacagagcaggtgcgcagcatctgcaagatcctggccatgaaggctgtgaggaacaaccggctgggcagcgccctgtcctggagcatccgggccaaggatgctgcctttgccaccctggtgtctgaccgcttcctgcgggactactgtgagcggggctgcttcagtgacctggacctgattgacaacctgggccctgccatgatgctgagtgaccggctgaccttcctgggcaagtaccgggagttccacaggatgtacggggagaagagatttgctgatgctgccagcctgctgctgagcctgatgaccagccgcatcgcccccaggagcttctggatgaccctgctgacagatgccctgcccctgctggagcagaagcaggtgaaggtggccgctgctgtggtgttctttgcctgccagagcctgctggagctgagctgcatcgctgtggctgatgtgcgggtgtcctcctttgtggtgctgcctgtgcgggtgtacagcccctag

SEQ ID NO: 318068 - DNA, 1389 bp, Artificial Sequence
  derived and/or modified sequence
atggccgccagcagcgccgcccggagccccttctgccagcagtggtcttcaagcgggacatgtgtccgctttttcctgcttaagtggcctcaggtgactatcctggtgctccaggggagactcgacgaagcgcgacaaatgttatccaaggaagcagatgccagtcccgcttccgcagggatctgtcgcatcatgggagacttgatgagaaccatgcctatcctgtctccagggaacacacagacactgactgaactggagctgaaatggcagcattggcatgaagaatgtgagcggtatctgcaggatagtacctttgcgacatctccacatttagagtcactcttgaagattatgctgggggatgaagccgccttgctggagcaaaaagagctgttgtccaactggtaccattttctcgttacacgcctgctgtacagcaatccaacggttaaacctattgacttacactactatgcccagagcagtctggacctgttcctaggcggggaatccagcccagaaccattggataacattctgctggcagctttcgagttcgacattcaccaagtgatcaaagaatgcagtattgctttgagtaactggtggtttgttgcccacttaaccgacttgctcgaccactgtaaactgttacagtcccacaatctctatttcgggagcaacatgcgcgaatttctgctgctggaatacgcatctggcctttttgcgcacccatctctgtggcagcttggagtcgattattttgattactgcccagaactcggccgggtgagcttagagctgcacattgaacgaatccctctgaacaccgaacagaaggccctcaaagtcttacgcatttgtgaacagcgccagatgactgaacaggtgagatccatatgtaagattctggccatgaaagccgtcagaaataacagactgggatccgccctttcctggagtatcagagcaaaagacgctgccttcgcgactctggtgtccgaccgcttcctgagagactattgcgagcgcggctgcttctctgacctggatttaatcgacaaccttggccccgccatgatgctctcagatcgcctgacgtttttaggcaagtatagggaattccacaggatgtatggcgagaagcggtttgccgacgccgcttctctgctgctgtccctgatgacatctcggattgcccctcgatcattctggatgactctacttactgacgccctgcctcttcttgaacagaaacaggtcaaggtggctgcagctgtcgtcttctttgcctgccagagtttgcttgaattgtcatgtatagctgtggcggacgtgagagtttctagcttcgtggtgctgcccgtcagggtgtatagcccatag

SEQ ID NO: 318069 - DNA, 1389 bp, Artificial Sequence
  derived and/or modified sequence
atggccgcttcctccgctgcaaggagccccttctgtcaacagtggtccagcagcggcacctgcgtgagattctttttgctcaaatggccccaggtcaccatcctggttctgcagggccgtctcgacgaagcccgacagatgctgtcaaaggaggccgacgcttcccctgctagcgctggcatctgtcggataatgggcgacctgatgcgcaccatgcccattctttcacctggtaatacacagactcttaccgaactcgagctcaagtggcagcattggcacgaggaatgcgagcgctaccttcaggattctacttttgctaccagcccacatctggagagcttgctgaagatcatgttaggtgacgaagccgcactactcgaacagaaggaactgctgtcgaattggtaccatttcctggtgaccaggctgctgtacagtaatccgaccgtaaagcctattgatctgcactattacgcgcagtcctccctagatttattcttaggcggtgaatcctctccggagccattggacaatatcctcttagccgcatttgagtttgatatccatcaggtgataaaagagtgttctattgccctgtctaactggtggtttgtagctcatctgactgatttactagatcactgtaaacttctacaatctcacaatctgtatttcggatcaaacatgagagaatttttgctgttagaatatgcttccggcctgtttgctcatcccagcctctggcagctgggcgtggattactttgactattgtccagaattgggccgtgtgtcgctggagctgcacattgaacgtattcctctgaacaccgaacagaaggctctcaaggttctgcgcatctgcgaacagagacagatgactgagcaagtccgaagcatctgtaaaatactggccatgaaagcggttcgcaacaacaggctcggtagcgcactgagttggtcgatacgggcaaaagacgctgctttcgccaccctcgtgagtgaccgatttcttcgtgactattgtgagcgcggatgtttctcggacctagatctcattgataacttaggccctgccatgatgctatcagatcgcctcacctttctgggtaagtatcgcgagtttcaccgcatgtatggcgaaaagcgcttcgcagacgccgcatctttattgctatccctgatgacctctaggattgctccccgttctttctggatgacccttcttaccgacgccctcccactcctcgaacagaaacaggttaaggtcgcggctgcagtcgtgttttttgcttgtcagtctctgctggagctttcctgcatcgctgtggctgacgtgagggtgtcaagtttcgtagtgttgccagtgagagtgtactctccctag

SEQ ID NO: 318070 - DNA, 1389 bp, Artificial Sequence
  derived and/or modified sequence
atggccgccagcagcgccgccagaagccccttctgccagcagtggagcagcagcggcacctgcgtgagattcttcctgctgaagtggccccaggtgaccatcctggtgctgcagggcagactggacgaggccagacagatgctgagcaaggaggccgacgccagccccgccagcgccggcatctgcagaatcatgggcgacctgatgagaaccatgcccatcctgagccccggcaacacccagaccctgaccgagctggagctgaagtggcagcactggcacgaggagtgcgagagatacctgcaggacagcaccttcgccaccagcccccacctggagagcctgctgaagatcatgctgggcgacgaggccgccctgctggagcagaaggagctgctgagcaactggtaccacttcctggtgaccagactgctgtacagcaaccccaccgtgaagcccatcgacctgcactactacgcccagagcagcctggacctgttcctgggcggcgagagcagccccgagcccctggacaacatcctgctggccgccttcgagttcgacatccaccaggtgatcaaggagtgcagcatcgccctgagcaactggtggttcgtggcccacctgaccgacctgctggaccactgcaagctgctgcagagccacaacctgtacttcggcagcaacatgagagagttcctgctgctggagtacgccagcggcctgttcgcccaccccagcctgtggcagctgggcgtggactacttcgactactgccccgagctgggcagagtgagcctggagctgcacatcgagagaatccccctgaacaccgagcagaaggccctgaaggtgctgagaatctgcgagcagagacagatgaccgagcaggtgagaagcatctgcaagatcctggccatgaaggccgtgagaaacaacagactgggcagcgccctgagctggagcatcagagccaaggacgccgccttcgccaccctggtgagcgacagattcctgagagactactgcgagagaggctgcttcagcgacctggacctgatcgacaacctgggccccgccatgatgctgagcgacagactgaccttcctgggcaagtacagagagttccacagaatgtacggcgagaagagattcgccgacgccgccagcctgctgctgagcctgatgaccagcagaatcgcccccagaagcttctggatgaccctgctgaccgacgccctgcccctgctggagcagaagcaggtgaaggtggccgccgccgtggtgttcttcgcctgccagagcctgctggagctgagctgcatcgccgtggccgacgtgagagtgagcagcttcgtggtgctgcccgtgagagtgtacagcccctag

SEQ ID NO: 318071 - protein, 324 aa, Artificial Sequence
  derived and/or modified sequence
MVPSCPFIYIIRKDVDVYSQILRKLFNESHGIFLGLQRIDEELTGKSRKSQLVRVSKNYRSVIRACMEEMHQVAIAAKDPANGRQFSSQVSILSAMELIWNLCEILFIEVAPAGPLLLHLLDWVRLHVCEVDSLSADVLGSENPSKHDSFWNLVTILVLQGRLDEARQMLSKEADASPASAGICRIMGDLMRTMPILSPGNTQTLTELELKWQHWHEECERYLQDSTFATSPHLESLLKIMLGDEAALLEQKELLSNWYHFLVTRLLYSNPTVKPIDLHYYAQSSLDLFLGGESSPEPLDNILLAAFEFDIHQVIKECRDVHLK

SEQ ID NO: 318072 - DNA, 975 bp, Artificial Sequence
  derived and/or modified sequence
atggtccccagctgcccattcatctacatcatcaggaaggacgtcgatgtgtacagccagattctgcggaagctttttaacgagagtcatggaatttttctaggcctccagaggattgacgaggagttaacggggaaatcaagaaaaagccagctggtcagggtctcgaagaactaccgcagcgtgatccgcgcatgtatggaggaaatgcatcaagtcgcaatcgccgcaaaagaccccgcaaacggtcggcagtttagtagtcaggtcagcatattgtcagcaatggagctgatctggaatctttgcgagatcctgtttatagaagtggcacctgccggtcctctccttctacacctgctcgattgggtaaggctgcatgtatgcgaggtagattccctgagtgctgacgttctggggagcgagaatccttcaaagcacgattcattttggaacttagtgactatactcgtcctccagggcagattggacgaggccaggcagatgttgtccaaagaagcggacgcttctccggcctctgccgggatttgcaggatcatgggagatctgatgagaacaatgccgatcctcagtcccggtaatactcagaccctcacagaactcgagttaaaatggcagcactggcatgaggaatgtgaacgatatctgcaggactcaactttcgcaactagtccccatcttgagagcctgttgaaaatcatgctgggcgatgaagctgccctcttagagcaaaaagagcttctatccaactggtatcacttcttagttaccagactgctgtactcaaacccaactgtgaagcctatcgacctgcactactatgcccaatcaagcctggacctcttcctggggggcgagtcttctccggaaccactcgacaacatattgctggccgccttcgagtttgatatccatcaagttattaaagagtgtagagatgtgcacttaaagtag

SEQ ID NO: 318073 - DNA, 975 bp, Artificial Sequence
  derived and/or modified sequence
atggtgcccagctgccccttcatctacatcatcaggaaggatgtggatgtgtacagccagatcctgaggaagctgttcaatgaaagccacggcatcttcctgggcctgcagagaattgatgaggagctgaccgggaagagcaggaagagccagctggtgcgggtgtccaagaactacagaagtgtcatccgggcctgcatggaggagatgcaccaggtggccatcgccgccaaggaccctgccaacggccggcagttcagcagccaggtgtccatcctgagcgccatggagctgatctggaacctgtgtgagatcctcttcatcgaggtggccccagctggccccctgctgctgcacctgctggactgggtgcggctgcacgtgtgtgaggtggacagcctgtctgcagatgtgctgggcagcgagaaccccagcaagcatgacagcttctggaacctggtgaccatcctggtgctgcagggccgcctggatgaggcccggcagatgctgagcaaggaggctgatgccagccctgccagcgctggcatctgccgcatcatgggagacctgatgaggaccatgcccatcctgagccctggcaacacccagaccctgacagagctggagctgaagtggcagcactggcatgaggagtgtgagcgctacctgcaggacagcacctttgccaccagcccccacctggagagcctgctgaagatcatgctgggagatgaggccgccctgctggagcagaaggagctgctgagcaactggtaccacttcctggtgacccggctgctgtacagcaaccccaccgtgaagcccatcgacctgcactactatgcccagagcagcctggacctcttcctgggcggggagagcagccctgagcccctggacaacatcctgctggccgcctttgaatttgacatccaccaggtgatcaaggaatgtagagatgtgcacctgaagtag

SEQ ID NO: 318074 - DNA, 975 bp, Artificial Sequence
  derived and/or modified sequence
atggtgcccagctgccccttcatctacatcatccggaaggacgtggacgtctactctcagatcttaagaaaactctttaacgaatcccacgggatattcctgggactgcagcgcatagacgaagaattgactgggaaaagtcggaagtcccagctcgtgcgtgtgtcaaagaactaccggtccgtgattcgcgcctgcatggaggagatgcaccaagtggctattgccgcaaaggatcctgcaaacggacgacagttctccagccaggtgtccatactgtccgccatggagctcatctggaacctgtgtgaaatcctgttcatcgaggtcgcacctgccggaccccttctcttacaccttctggattgggtgcgtctgcacgtctgtgaagtggatagcctgagtgctgacgtgttaggatccgaaaatcctagtaaacacgactccttttggaatttggtgacgatacttgttcttcagggccgccttgatgaagccagacaaatgctgtccaaggaggccgacgcaagtccagcctctgcaggcatatgccggattatgggggatctgatgagaaccatgcccattctatcccccggcaatacgcaaaccctgactgaactcgagctcaagtggcagcattggcacgaggaatgcgaaagatacctacaggactctacctttgccactagcccccatcttgagagtctgctgaagattatgctgggagatgaagccgccctcctggagcagaaagagctgctgagcaactggtatcatttcttggtcaccaggctgctatattccaaccccacagtaaagccaatcgacctgcactattacgcacagtcctcccttgacctctttttgggtggagaaagttcaccagaacccctcgacaacatcctactggctgcctttgagttcgacatccatcaggtgatcaaagagtgccgcgatgtgcaccttaagtag

SEQ ID NO: 318075 - DNA, 1287 bp, Artificial Sequence
  derived and/or modified sequence
gagcgggaagcattggcgtccgagcgacttctaggagcctggggttcggcgctatggaggagctcgatggcgagccaacagtcactaaaaatcagagatggtgccaagttgcccctttatctatatcatccgtaaggatgtagatgtttactctcaaatcttgagaaaactcttcaatgaatcccatggaatctttctgggcctccagagaattgacgaagagttgactggaaaatccagaaaatctcaattggttcgagtgagtaaaaactaccgatcagtcatcagagcatgtatggaggaaatgcaccaggttgcaattgctgctaaagatccagccaatggccgccagttcagcagccaggtctccattttgtcagcaatggagctcatctggaacctgtgtgagattctttttattgaagtggccccagctggccctctcctcctccatctccttgactgggtccggctccatgtgtgcgaggtggacagtttgtcggcagatgttctgggcagtgagaatccaagcaaacatgacagcttctggaacttggtgaccatcttggtgctgcagggccggctggatgaggcccgacagatgctctccaaggaagccgatgccagccccgcctctgcaggcatatgccgaatcatgggggacctgatgaggacaatgcccattcttagtcccgggaacacccagacactgacagagctggagctgaagtggcagcactggcacgaggaatgtgagcggtacctccaggacagcacattcgccaccagccctcacctggagtctctcttgaagattatgctgggagacgaagctgccttgttagagcagaaggaacttctgagtaattggtatcatttcctagtgactcggctcttgtactccaatcccacagtaaaacccattgatctgcactactatgcccagtccagcctggacctgtttctgggaggtgagagcagcccagaacccctggacaacatcttgttggcagcctttgagtttgacatccatcaagtaatcaaagagtgcagggatgttcatttaaaataacatcgcgggaaactactttgacatttaaaatctagaaaaagccagcaagcctgtttcttggcacctaatggacaccttatgggatggcgtgttccaagagtctcactccagtgacgtgagctaccgaaccactgggcttcaggctgggtattattcagaatttccagccctctatccaaaagagggtgttctatgattgcactgaatctttagca

SEQ ID NO: 318076 - DNA, 975 bp, Artificial Sequence
  derived and/or modified sequence
atggtgccaagctgtccattcatttatatcatccggaaggacgtcgacgtttactctcaaatccttcgcaaactatttaacgaatctcatggcatctttttgggactgcaacgaatagatgaggagctgacagggaagagccgtaagagtcagctggtcagagtcagcaaaaattatcgctcggtcataagggcctgtatggaagaaatgcaccaagttgccattgccgctaaggaccccgctaatggacggcaattctctagccaagtgagcatattatctgcgatggaattgatctggaatctttgtgagatcctgtttatcgaggtggcccctgccggtcctctgctcctgcacctccttgattgggttcggctgcatgtgtgtgaggtggactccctgtcggcagacgtgctggggagtgagaacccctccaagcacgactccttttggaaccttgtcaccatcctcgtgctgcaaggcaggttggacgaagctaggcagatgctgtctaaagaagccgatgcttcccctgccagtgccggaatttgccgcattatgggagatttgatgcgtacaatgccaatcttgagtccaggcaacacccagacattgactgaactggagctcaagtggcagcattggcacgaggaatgtgagaggtacctgcaggattcgacgtttgccacttccccccaccttgaatcactcctcaagattatgcttggagatgaagccgctttgttggagcagaaggaattgctatccaactggtatcactttcttgtaacgcggcttctgtactcaaatcccacagtgaagccgattgatctccactactacgcccagagttccctggacctattcctcggaggggaaagctctccagaacccctagacaatattttgctggccgcttttgaattcgatatccaccaggtaatcaaggaatgcagggatgtacatctgaagtag

SEQ ID NO: 318077 - DNA, 975 bp, Artificial Sequence
  derived and/or modified sequence
atggtgcccagctgccccttcatctacatcatcagaaaggacgtggacgtgtacagccagatcctgagaaagctgttcaacgagagccacggcatcttcctgggcctgcagagaatcgacgaggagctgaccggcaagagcagaaagagccagctggtgagagtgagcaagaactacagaagcgtgatcagagcctgcatggaggagatgcaccaggtggccatcgccgccaaggaccccgccaacggcagacagttcagcagccaggtgagcatcctgagcgccatggagctgatctggaacctgtgcgagatcctgttcatcgaggtggcccccgccggccccctgctgctgcacctgctggactgggtgagactgcacgtgtgcgaggtggacagcctgagcgccgacgtgctgggcagcgagaaccccagcaagcacgacagcttctggaacctggtgaccatcctggtgctgcagggcagactggacgaggccagacagatgctgagcaaggaggccgacgccagccccgccagcgccggcatctgcagaatcatgggcgacctgatgagaaccatgcccatcctgagccccggcaacacccagaccctgaccgagctggagctgaagtggcagcactggcacgaggagtgcgagagatacctgcaggacagcaccttcgccaccagcccccacctggagagcctgctgaagatcatgctgggcgacgaggccgccctgctggagcagaaggagctgctgagcaactggtaccacttcctggtgaccagactgctgtacagcaaccccaccgtgaagcccatcgacctgcactactacgcccagagcagcctggacctgttcctgggcggcgagagcagccccgagcccctggacaacatcctgctggccgccttcgagttcgacatccaccaggtgatcaaggagtgcagagacgtgcacctgaagtag

SEQ ID NO: 318078 - protein, 531 aa, Artificial Sequence
  derived and/or modified sequence
MRRQSMTSATRDLHTALDGKATQGGKKDHQHVPIDIQTSKLLDWLVDRRHCSLKWQSLVLTIREKINAAIQDMPESEEIAQLLSGSYIHYFHCLRILDLLKGTEASTKNIFGRYSSQRMKDWQEIIALYEKDNTYLVELSSLLVRNVNYEIPSLKKQIAKCQQLQQEYSRKEEECQAGAAEMREQFYHSCKQYGITGENVRGELLALVKDLPSQLAEIGAAAQQSLGEAIDVYQASVGFVCESPTEQVLPMLRFVQKRGNSTVYEWRTGTEPSVVERPHLEELPEQVAEDAIDWGDFGVEAVSEGTDSGISAEAAGIDWGIFPESDSKDPGGDGIDWGDDAVALQITVLEAGTQAPEGVARGPDALTLLEYTETRNQFLDELMELEIFLAQRAVELSEEADVLSVSQFQLAPAILQGQTKEKMVTMVSVLEDLIGKLTSLQLQHLFMILASPRYVDRVTEFLQQKLKQSQLLALKKELMVQKQQEALEEQAALEPKLDLLLEKTKELQKLIEADISKRYSGRPVNLMGTSL

SEQ ID NO: 318079 - DNA, 1596 bp, Artificial Sequence
  derived and/or modified sequence
atgagacggcagtctatgactagtgcaactagagacctgcatactgctctggatggtaaggctactcagggcgggaaaaaggatcaccagcatgtacctattgacatccagacctcaaaactgctggattggttggtcgacaggagacactgctcactgaagtggcagagcttagtgctgacaatacgagaaaagattaatgctgccatccaggacatgccagagagcgaggagattgcccagctcttgtccgggagctatattcactattttcattgcttgcgcatcttagatcttttaaaaggcacagaagcaagtacaaaaaacatcttcggacgctattcatctcagaggatgaaagactggcaagagattattgcgctgtacgaaaaagataacacataccttgtggagctctctagcctcctggtgcggaatgtcaactatgaaatccctagtttgaaaaaacagatcgccaaatgtcaacagttgcagcaggagtactcaaggaaagaggaggaatgccaggccggggcggccgaaatgcgggagcagttttaccactcttgtaaacagtatggcattactggcgaaaatgtcagaggggaactcctcgccctggtgaaagaccttcctagccagctggccgagatcggtgctgctgcccagcagagccttggagaggcaatcgacgtgtatcaggcctcagtcggatttgtgtgtgagtcgcctaccgagcaagtgctgcctatgttgcgcttcgtacagaaaagaggaaattcaaccgtctacgaatggcggactggcaccgagcccagtgtggtcgagagacctcatctggaggaactccctgaacaagtggctgaagacgccatcgactggggtgacttcggggtggaagcagtgtcagagggaacggactctggcatttccgcagaagcagccggaattgactgggggatcttcccggagtcggacagtaaggatcctggtggggatggcattgactggggtgatgatgcagtcgccttgcaaattacagtcctggaagctggtacccaagctccagagggcgtggctcgcggccctgacgcactgacactactggaatacaccgagaccaggaaccagttcctggacgagctgatggagctcgaaattttcctggctcagagggccgtggagctgagcgaagaggccgatgtgctctccgtctctcaatttcagctggcacctgccattctgcaggggcagaccaaagaaaagatggtgaccatggtatcggtgctggaagatctgatcgggaagctcaccagcctccaattacagcatctcttcatgatactggcctctccgcggtacgtggaccgcgtgaccgagtttctacagcaaaaattaaagcaatcgcaactgttagcacttaaaaaagagctgatggtgcagaaacagcaggaggccctggaggagcaggctgctctggaacctaagttagatttactgttggagaagactaaagaactgcagaagctcattgaagcagatatctccaagaggtacagtgggcgaccagtcaacctgatgggcacttcactatag

SEQ ID NO: 318080 - DNA, 1596 bp, Artificial Sequence
  derived and/or modified sequence
atgaggcggcagagcatgaccagcgccacccgggacctgcacacagccctggatggcaaggccacccagggcggcaagaaggaccaccagcacgtgcccatcgacatccagaccagcaagctgctggactggctggtggaccggcggcactgcagcctgaagtggcagagcctggtgctgaccatccgggagaagatcaatgctgccatccaggacatgcctgagagcgaggagatcgcccagctgctgagcggcagctacatccactacttccactgcctgcgcatcctggacctgctgaagggcacagaggccagcaccaagaacatcttcggccgctacagcagccagaggatgaaggactggcaggagatcatcgccctgtatgagaaggacaacacctacctggtggagctgagcagcctgctggtgagaaatgtgaactatgagatccccagcctgaagaagcagatcgccaagtgccagcagctgcagcaggagtacagcaggaaggaggaggagtgccaggccggggctgctgagatgagggagcagttctaccacagctgcaagcagtatggcatcaccggggagaatgtgcggggggagctgctggccctggtgaaggacctgcccagccagctggccgagatcggggctgctgcccagcagagcctgggggaggccattgatgtgtaccaggcctctgtgggctttgtgtgtgagagccccacagagcaggtgctgcccatgctgcgctttgtgcagaagaggggcaacagcacagtgtatgagtggaggactggaacagagcccagcgtggtggagcggccccacctggaggagctgcctgagcaggtggctgaagatgccatcgactggggagactttggagtggaggccgtgtctgagggcacagacagcggcatctctgctgaggccgccggcatcgactggggcatcttccctgagagtgacagcaaggaccctggaggagatggcatcgactggggagatgatgctgtggccctgcagatcaccgtgctggaggccggcacccaggcccctgagggcgtggcccggggcccagatgccctgaccctgctggagtacacagagaccaggaaccagttcctggatgagctgatggagctggagatcttcctggcccagagagctgtggagctgtctgaggaggctgatgtgctgtctgtgtcccagttccagctggccccagccatcctgcagggccagaccaaggagaagatggtgaccatggtgtctgtgctggaggacctgattggcaagctgaccagcctgcagctgcagcacctgttcatgatcctggccagcccccgctacgtggacagagtgacagagttcctgcagcagaagctgaagcagagccagctgctggccctgaagaaggagctgatggtgcagaagcagcaggaggccctggaggagcaggccgccctggagcccaagctggacctgctgctggagaagaccaaggagctgcagaagctgattgaagctgacatcagcaagcgctacagcggccggcctgtgaacctgatgggcaccagcctgtag

SEQ ID NO: 318081 - DNA, 1596 bp, Artificial Sequence
  derived and/or modified sequence
atgcggcggcagagcatgaccagcgccacccgggacctgcacaccgccctggacggcaaggcaactcagggcggtaaaaaggaccaccagcatgtcccaatcgacattcaaaccagcaagctgctggactggctcgtcgaccgccgtcactgctcactgaaatggcagagtctggtcctcacgattagagaaaagatcaatgccgcaattcaggacatgcccgaaagtgaggagattgcccaacttcttagcggcagctatattcactacttccattgtttgaggatccttgatctgctaaaagggacggaagcctccacaaagaatatctttggaagatactcttcccagagaatgaaagactggcaagagattatcgccctctatgaaaaggataacacatatttggtggaactatcttcactgctggtgcgaaatgtcaactacgagattcccagtcttaaaaagcaaatcgctaaatgtcagcagctgcagcaggagtactctaggaaagaagaagaatgtcaggctggggctgcagaaatgcgagagcagttttaccatagctgcaagcaatacggcattaccggcgaaaacgtgcggggggagctgctggcgttggttaaagatctcccctcacagctcgctgaaatcggtgccgccgcccagcagagtctcggggaagccatagacgtgtatcaggcatcagtcggcttcgtctgcgaaagcccaaccgagcaggtattgcccatgctgcggttcgtccagaagcgtggaaattcaaccgtgtacgaatggcggactggcaccgagccttctgtggtggagcgcccccacttggaggagttaccggaacaggtggcagaagatgcaattgattggggggatttcggtgtcgaagcggtttccgaaggcacagacagcgggatcagcgctgaagcagcgggaatcgattggggaattttcccagagtccgactccaaggatccaggaggcgacggtatagattggggagacgacgcagtggcactgcagattacagtccttgaggcgggaactcaagctcctgagggggtcgctcgcggcccggacgccttaaccttgctggagtacacggaaacccggaatcaatttctggacgagctgatggagctcgaaatattcttggctcaacgagcagtagaactctccgaggaagccgacgtgctgagcgtctcacagtttcagctagctccggctatactccagggacaaacgaaggagaagatggtgaccatggtcagcgtgcttgaagatctgatcggtaaattaacatctttgcagcttcagcatctctttatgatcctggcaagcccccgttacgttgaccgagtcaccgagtttttgcagcaaaaattgaagcaatcacagcttcttgcactcaaaaaagagctgatggtgcagaagcaacaggaggccttggaggagcaggcagctctcgaaccgaagctggacctgctgctcgagaagaccaaggagttgcagaaactcattgaagctgatattagtaaacggtatagcggtagacccgtcaacctgatgggaacatccctatag

SEQ ID NO: 318082 - DNA, 1596 bp, Artificial Sequence
  derived and/or modified sequence
atgaggaggcaatcaatgaccagcgcaacgagggacctgcatactgcgttagacggaaaagctacccagggcggaaagaaggatcatcagcacgtaccaatcgacatccagacgtccaagctgctcgactggctcgtagaccgccgacattgtagcctcaagtggcagtcattagttttaaccatccgagaaaagataaatgcggcaatacaggacatgcccgagtccgaggagatcgctcagctgttgtccggttcctatatacactatttccactgcttaaggatcctggatctcctgaagggtaccgaggcttctacaaagaatatttttggtaggtatagcagccaacgcatgaaggattggcaagagatcattgctctgtatgagaaggataacacttatctcgtggagctgtctagcctgctcgtacgcaacgtcaactatgagattcctagcctaaagaagcagatcgctaagtgccaacaacttcagcaggagtattcaaggaaagaagaggagtgtcaggcaggcgcagctgagatgcgcgaacagttctatcactcttgcaaacaatatgggattaccggggaaaacgtgcggggagagctgcttgcgttggtcaaagacctgccgtcacagttggctgaaattggagctgcggctcaacaatccctcggcgaggcgatagacgtataccaggcctcagttggctttgtgtgtgagtctcccacggagcaggtgctgccaatgctcagatttgtccagaagagagggaattccactgtgtatgagtggcgaactggcacagagccctcggtcgtggaacggccacatttagaagaactcccagaacaagtcgccgaagacgcaattgactggggagatttcggagtcgaagccgtctcagagggaacagactcaggcatttcagcagaggcggcaggtatcgattggggcatctttcccgagtctgattctaaggatcccggtggagatggaatagattggggggatgacgctgttgcactgcagataaccgtgctcgaagccggtacgcaggcgcctgaaggtgtggcaagaggtcccgacgccctaactttgcttgaatacacagagacccggaaccagttcttggatgaacttatggaattagagatcttccttgcccagagggccgtcgaacttagtgaagaggcggacgtgctgtccgtgtctcagttccagctagcccctgccatactgcaaggacagaccaaggagaagatggttacaatggtcagcgtcctagaagaccttatcggcaagctgacaagccttcagctgcagcaccttttcatgatactggcctccccccgttacgttgatagggtcaccgaattcttgcagcagaaactcaaacagagccagctactggcattaaagaaagaattaatggttcaaaagcaacaggaggctcttgaagaacaggccgctcttgagcccaaacttgacctgttacttgaaaaaacaaaagaactgcagaaactgatagaggccgacattagcaaaaggtactccggtcggccagtgaacctgatgggcaccagcctctag

SEQ ID NO: 318083 - DNA, 1964 bp, Artificial Sequence
  derived and/or modified sequence
aatgtaggtgttctctttgggacgtctcaccgactctcttccttccccttccctgccctaatcgcccaacacgttgcaggtgctcaaccatgtctattagagaaactgaatgaggaggcaaagcatgacaagtgccacaagagacctgcacactgctctggatggtaaagcgacgcaaggagggaagaaggaccatcagcacgtgcccatcgacatccagaccagcaagctgctcgattggctggtggacagaaggcactgcagcctgaaatggcagagtctggtgctgacgatccgcgagaagatcaatgctgccatccaggacatgccagagagcgaagagatcgcccagctgctgtctgggtcctacattcactactttcactgcctaagaatcctggaccttctcaaaggcacagaggcctccacgaagaatatttttggccgatactcttcacagcggatgaaggattggcaggagattatagctctgtatgagaaggacaacacctacttagtggaactctctagcctcctggttcggaatgtcaactatgagatcccctcactgaagaagcagattgccaagtgccagcagctgcagcaagaatacagccgcaaggaggaggagtgccaggcaggggctgccgagatgcgggagcagttctaccactcctgcaagcagtatggcatcacgggcgaaaatgtccgaggagaactgctggccctggtgaaggacctgccgagtcagctggctgagattggggcagcggctcagcagtccctgggggaagccattgacgtgtaccaggcgtctgtggggtttgtgtgtgagagccccacagagcaggtgttgccaatgctgcggttcgtgcagaagcggggaaactcaacggtgtacgagtggaggacagggacagagccctctgtggtggaacgaccccacctcgaggagcttcctgagcaggtggcagaagatgcgattgactggggcgactttggggtagaggcagtgtctgaggggactgactctggcatctctgccgaggctgctggaatcgactggggcatcttcccggaatcagattcaaaggatcctggaggtgatgggatagactggggagacgatgctgttgctttgcagatcacagtgctggaagcaggaacccaggctccagaaggtgttgccaggggcccagatgccctgacactgcttgaatacactgagacccggaatcagttccttgatgagctcatggagcttgagatcttcttagcccagagagcagtggagttgagtgaggaggcagatgtcctgtctgtgagccagttccagctggctccagccatcctgcagggccagaccaaagagaagatggttaccatggtgtcagtgctggaggatctgattggcaagcttaccagtcttcagctgcaacacctgtttatgatcctggcctcaccaaggtatgtggaccgagtgactgaattcctccagcaaaagctgaagcagtcccagctgctggctttgaagaaagagctgatggtgcagaagcagcaggaggcacttgaggagcaggcggctctggagcctaagctggacctgctactggagaagaccaaggagctgcagaagctgattgaagctgacatctccaagaggtacagcgggcgccctgtgaacctgatgggaacctctctgtgacaccctccgtgttcttgcctgcccatcttctccgcttttgggatgaagatgatagccagggctgttgttttggggcccttcaaggcaaaagaccaggctgactggaagatggaaagccacaggaaggaagcggcacctgatggtgatcttggcactctccatgttctctacaagaagctgtggtgattggccctgtggtctatcaggcgaaaaccacagattctccttctagttagtatagcggacttaataaaagagg

SEQ ID NO: 318084 - DNA, 1596 bp, Artificial Sequence
  derived and/or modified sequence
atgagaagacagagcatgaccagcgccaccagagacctgcacaccgccctggacggcaaggccacccagggcggcaagaaggaccaccagcacgtgcccatcgacatccagaccagcaagctgctggactggctggtggacagaagacactgcagcctgaagtggcagagcctggtgctgaccatcagagagaagatcaacgccgccatccaggacatgcccgagagcgaggagatcgcccagctgctgagcggcagctacatccactacttccactgcctgagaatcctggacctgctgaagggcaccgaggccagcaccaagaacatcttcggcagatacagcagccagagaatgaaggactggcaggagatcatcgccctgtacgagaaggacaacacctacctggtggagctgagcagcctgctggtgagaaacgtgaactacgagatccccagcctgaagaagcagatcgccaagtgccagcagctgcagcaggagtacagcagaaaggaggaggagtgccaggccggcgccgccgagatgagagagcagttctaccacagctgcaagcagtacggcatcaccggcgagaacgtgagaggcgagctgctggccctggtgaaggacctgcccagccagctggccgagatcggcgccgccgcccagcagagcctgggcgaggccatcgacgtgtaccaggccagcgtgggcttcgtgtgcgagagccccaccgagcaggtgctgcccatgctgagattcgtgcagaagagaggcaacagcaccgtgtacgagtggagaaccggcaccgagcccagcgtggtggagagaccccacctggaggagctgcccgagcaggtggccgaggacgccatcgactggggcgacttcggcgtggaggccgtgagcgagggcaccgacagcggcatcagcgccgaggccgccggcatcgactggggcatcttccccgagagcgacagcaaggaccccggcggcgacggcatcgactggggcgacgacgccgtggccctgcagatcaccgtgctggaggccggcacccaggcccccgagggcgtggccagaggccccgacgccctgaccctgctggagtacaccgagaccagaaaccagttcctggacgagctgatggagctggagatcttcctggcccagagagccgtggagctgagcgaggaggccgacgtgctgagcgtgagccagttccagctggcccccgccatcctgcagggccagaccaaggagaagatggtgaccatggtgagcgtgctggaggacctgatcggcaagctgaccagcctgcagctgcagcacctgttcatgatcctggccagccccagatacgtggacagagtgaccgagttcctgcagcagaagctgaagcagagccagctgctggccctgaagaaggagctgatggtgcagaagcagcaggaggccctggaggagcaggccgccctggagcccaagctggacctgctgctggagaagaccaaggagctgcagaagctgatcgaggccgacatcagcaagagatacagcggcagacccgtgaacctgatgggcaccagcctgtag

SEQ ID NO: 318085 - protein, 175 aa, Artificial Sequence
  derived and/or modified sequence
MAVFRSGLLVLTTPLASLAPRLASILTSAARLVNHTLYVHLQPGMSLEGPAQPQSSPVQATFEVLDFITHLSPSPAHLSPESRPPARSRVDRFPDPGWKPVQPGQTAASALRHQLLQLLSATGLGAAILRLWDRRSARGAPGCPLTLHDQASFPRGRVSKAAGAWLLPWRCRWHV

SEQ ID NO: 318086 - DNA, 528 bp, Artificial Sequence
  derived and/or modified sequence
atggccgtgttccgctccgggctgttggtactcacaactcccctcgcatccctagcaccccggctggctagcattctaacctcagccgcgcgacttgttaaccatacactgtacgtgcacctgcagccgggaatgtctctggaaggtccagcgcaaccccagtcctctcccgtacaggcgacgttcgaggtcctggactttatcacccatctgtcgccaagtcccgcccatctctcccccgagtcgaggcctccagcccgtagtagggtagaccggttccccgacccaggatggaagcctgtgcagcctggacaaaccgcagcatctgctctgcggcaccaactcctgcaactgctttcagctactggactcggggccgctattctcagactgtgggatcgcagatcggcaagaggcgctcctggctgccccctgactctgcatgatcaggcaagcttcccccgggggcgagtaagtaaagctgcaggagcatggctcctcccctggagatgccgatggcatgtctag

SEQ ID NO: 318087 - DNA, 528 bp, Artificial Sequence
  derived and/or modified sequence
atggctgtgttccgcagcggcctgctggtgctgaccacccccctggccagcctggccccccggctggccagcatcctgaccagcgctgcccggctggtgaaccacaccctgtatgtgcacctgcagcccggcatgagcctggagggccctgcccagccccagagcagccctgtgcaggccacctttgaggtgctggacttcatcacccacctgagccccagccctgcccacctgagccctgagagccggcccccagcccggagccgggtggaccgcttcccagaccccggctggaagcctgtgcagcccggccagacagctgccagcgccctgcggcaccagctgctgcagctgctgagcgccaccggcctgggcgccgccatcctgcggctgtgggaccggcgcagcgcccggggggcccctggctgccccctgaccctgcatgaccaggccagcttcccccggggccgggtgtccaaggccgccggggcctggctgctgccctggcgctgccgctggcacgtgtag

SEQ ID NO: 318088 - DNA, 528 bp, Artificial Sequence
  derived and/or modified sequence
atggccgtgttccggagcggcctgctggtgctgaccacccccctggcatcactggcgccccgcttagcaagcatactgacatccgcagctagactcgtgaatcatactctctatgtgcatttgcagccaggcatgtcactggagggaccagcccagcctcagtcctcccctgtacaggccacctttgaagtcctggactttattacccatctttccccctcgccagctcacctgtctcccgagagtcgacctcccgcccgatcgcgggtggaccggttccccgacccgggctggaagcctgtgcagcccggacagaccgctgccagcgctctcagacatcaactgctgcaactgcttagcgcgaccggactgggcgcagccattttgaggttatgggatcgaaggtcagctcgaggggccccagggtgtcctctgactctccatgatcaggcttccttccctaggggcagagtctctaaagcggcaggtgcttggcttttgccttggcgctgtaggtggcacgtgtag

SEQ ID NO: 318089 - DNA, 528 bp, Artificial Sequence
  derived and/or modified sequence
atggccgtgttcagaagcggcctgctggtgctgaccacccccctggccagcctggcccccagactggccagcatcctgaccagcgccgccagactggtgaaccacaccctgtacgtgcacctgcagcccggcatgagcctggagggccccgcccagccccagagcagccccgtgcaggccaccttcgaggtgctggacttcatcacccacctgagccccagccccgcccacctgagccccgagagcagaccccccgccagaagcagagtggacagattccccgaccccggctggaagcccgtgcagcccggccagaccgccgccagcgccctgagacaccagctgctgcagctgctgagcgccaccggcctgggcgccgccatcctgagactgtgggacagaagaagcgccagaggcgcccccggctgccccctgaccctgcacgaccaggccagcttccccagaggcagagtgagcaaggccgccggcgcctggctgctgccctggagatgcagatggcacgtgtag

SEQ ID NO: 318090 - DNA, 2166 bp, Artificial Sequence
  derived and/or modified sequence
agtacagctccggccgccgcgccgcctggctttcgtattcgttgttctcggcgggctgtggggcctccgcgccgcggccgttagtcatgtcggattctggaagttacggtcagtctgggggtgagcagcaaagttattctacctatggaaatccaggcagccaaggctatggacaagcatcacaaagctattctggctatgggcaaacgactgattcctcttatggacagaactacagcggttactccagttatggacaaagttattcacagtcctatggtggttatgagaatcaaaagcagagctcatatagccagcaaccatataataaccagggacagcagcaaaacatggaatcatcaggaagccaaggtggaagagcaccttcctatgaccagccagactatggtcaacaagattcatatgaccagcagtcaggctatgatcaacatcaaggctcatatgatgagcagtcaaattatgatcagcagcatgattcctatagtcaaaaccagcagtcctatcattcacaaagggaaaactacagccaccacacacaagatgaccgtcgtgatgtgagtaggtatggagaagataatagaggatatggcgggtcacagggaggaggtagagggcgtgggggatatgacaaggatggaagaggtcctatgacaggatcaagtggtggtgaccgcggtggcttcaaaaattttggtggtcacagggattatggacccagaacagatgctgattcagaatctgataattcagataacaacacaatctttgtgcaaggacttggggagggtgtgtctacagatcaagttggggagttctttaaacaaataggaattatcaagacaaataagaagaccggaaaaccaatgataaatctttatacagacaaggacacaggaaagccaaagggggaggcaacagtgtcatttgatgaccctccttcagctaaggcagccattgactggtttgatggaaaagaattccatggcaacatcattaaagtgtcctttgccactagaagacctgaattcatgagaggaggtggaagtggaggtgggcggcgaggccgtggaggatatagaggtcgtggaggctttcaagggagaggtggagaccccaaaagtggggattgggtttgccctaatccgtcatgcggaaatatgaactttgctcgaaggaattcctgcaatcagtgcaatgagcctagaccagaggactctcgtccctcaggaggagatttccgggggagaggctacggtggagagaggggctacagaggtcgtgggggcagaggtggagaccgaggcggctatggtggagacagaagtgggggtggctatggtggagacagaagcagcggtggtggctacagcggagatagaagtgggggcggctatggtggagacagaagtgggggtggctatggtggggacagaggcggcggctatggtggggacagaggaggcggctatggaggagaccgaggaggtggctatggaggagatcgaggtggctatggaggagaccgaggtggaggctatggtggagaccgaggaggctatggaggagatcgaggaggttacggaggagatcgaggaggttatggaggagatcgaggaggctatggaggagacagaagccgggggggctatggaggagaccgtggtggtggcagtggctacggtggagaccgaagtggaggctatggaggagacaggagtggtggcggctatggaggagaccgaggtgggggctacggaggagaccgaggtggctatggaggcaaaatgggaggaagaaacgactacagaaatgatcagcgcaaccgaccatactgatgactgttttgaatgttcctttgtctctgacatgatccatagtgaaattgccagagttttgcctgctgctttcctcgtggcctcttcttgggtagtgaaattaagtgacatttggatttttatttgggtgggagggctgggacagtttttcttctagaaatgtctgttgagatttccccctttagtttccaaccttctccccaacccttggagctaaatgcgttgtaaaatattgccaaaatgaaaagtgttttgtaatactgcaataaaggctgcttgtttttgtggaaaaaaaaaaaaaaaaaaaaaa

SEQ ID NO: 318091 - DNA, 1779 bp, Artificial Sequence
  derived and/or modified sequence
atgagcgacagcggcagctacggccagagcggcggcgagcagcagagctacagcacctacggcaaccccggcagccagggctacggccaggccagccagagctacagcggctacggccagaccaccgacagcagctacggccagaactacagcggctacagcagctacggccagagccagagcggctacagccagagctacggcggctacgagaaccagaagcagagcagctacagccagcagccctacaacaaccagggccagcagcagaacatggagagcagcggcagccagggcggcagagcccccagctacgaccagcccgactacggccagcaggacagctacgaccagcagagcggctacgaccagcaccagggcagctacgacgagcagagcaactacgaccagcagcacgacagctacagccagaaccagcagagctaccacagccagagagagaactacagccaccacacccaggacgacagaagagacgtgagcagatacggcgaggacaacagaggctacggcggcagccagggcggcggcagaggcagaggcggctacgacaaggacggcagaggccccatgaccggcagcagcggcggcgacagaggcggcttcaagaacttcggcggccacagagactacggccccagaaccgacgccgacagcgagagcgacaacagcgacaacaacaccatcttcgtgcagggcctgggcgagggcgtgagcaccgaccaggtgggcgagttcttcaagcagatcggcatcatcaagaccaacaagaagaccggcaagcccatgatcaacctgtacaccgacaaggacaccggcaagcccaagggcgaggccaccgtgagcttcgacgacccccccagcgccaaggccgccatcgactggttcgacggcaaggagttccacggcaacatcatcaaggtgagcttcgccaccagaagacccgagttcatgagaggcggcggcagcggcggcggcagaagaggcagaggcggctacagaggcagaggcggcttccagggcagaggcggcgaccccaagagcggcgactgggtgtgccccaaccccagctgcggcaacatgaacttcgccagaagaaacagctgcaaccagtgcaacgagcccagacccgaggacagcagacccagcggcggcgacttcagaggcagaggctacggcggcgagagaggctacagaggcagaggcggcagaggcggcgacagaggcggctacggcggcgacagaagcggcggcggctacggcggcgacagaagcagcggcggcggctacagcggcgacagaagcggcggcggctacggcggcgacagaagcggcggcggctacggcggcgacagaggcggcggctacggcggcgacagaggcggcggctacggcggcgacagaggcggcggctacggcggcgacagaggcggctacggcggcgacagaggcggcggctacggcggcgacagaggcggctacggcggcgacagaggcggctacggcggcgacagaggcggctacggcggcgacagaggcggctacggcggcgacagaagcagaggcggctacggcggcgacagaggcggcggcagcggctacggcggcgacagaagcggcggctacggcggcgacagaagcggcggcggctacggcggcgacagaggcggcggctacggcggcgacagaggcggctacggcggcaagatgggcggcagaaacgactacagaaacgaccagagaaacagaccctactag

SEQ ID NO: 318092 - DNA, 1188 bp, Artificial Sequence
  derived and/or modified sequence
atgaccggcagcagcggcggcgacagaggcggcttcaagaacttcggcggccacagagactacggccccagaaccgacgccgacagcgagagcgacaacagcgacaacaacaccatcttcgtgcagggcctgggcgagggcgtgagcaccgaccaggtgggcgagttcttcaagcagatcggcatcatcaagaccaacaagaagaccggcaagcccatgatcaacctgtacaccgacaaggacaccggcaagcccaagggcgaggccaccgtgagcttcgacgacccccccagcgccaaggccgccatcgactggttcgacggcaaggagttccacggcaacatcatcaaggtgagcttcgccaccagaagacccgagttcatgagaggcggcggcagcggcggcggcagaagaggcagaggcggctacagaggcagaggcggcttccagggcagaggcggcgaccccaagagcggcgactgggtgtgccccaaccccagctgcggcaacatgaacttcgccagaagaaacagctgcaaccagtgcaacgagcccagacccgaggacagcagacccagcggcggcgacttcagaggcagaggctacggcggcgagagaggctacagaggcagaggcggcagaggcggcgacagaggcggctacggcggcgacagaagcggcggcggctacggcggcgacagaagcagcggcggcggctacagcggcgacagaagcggcggcggctacggcggcgacagaagcggcggcggctacggcggcgacagaggcggcggctacggcggcgacagaggcggcggctacggcggcgacagaggcggcggctacggcggcgacagaggcggctacggcggcgacagaggcggcggctacggcggcgacagaggcggctacggcggcgacagaggcggctacggcggcgacagaggcggctacggcggcgacagaggcggctacggcggcgacagaagcagaggcggctacggcggcgacagaggcggcggcagcggctacggcggcgacagaagcggcggctacggcggcgacagaagcggcggcggctacggcggcgacagaggcggcggctacggcggcgacagaggcggctacggcggcaagatgggcggcagaaacgactacagaaacgaccagagaaacagaccctactag

SEQ ID NO: 318093 - DNA, 1779 bp, Artificial Sequence
  derived and/or modified sequence
atgtcggattctgggtcgtatggacaaagcggaggagagcaacagagttatagcacttacgggaaccctggaagtcagggctatggccaggcttcccagtcatacagtggttacggacagaccaccgattcttcttacggccaaaactacagtgggtatagctcttatgggcagagccagtccggctatagtcagtcttacggcgggtatgagaaccaaaaacagtccagttactctcagcagccttacaacaatcaggggcagcagcagaacatggagtcaagtggcagtcagggtggacgggccccaagttacgatcagcccgactacgggcagcaagacagctacgatcagcagagcggctacgatcaacatcagggctcctatgatgagcaatccaactacgatcagcagcacgacagctattcccagaaccaacagtcctatcattctcagagagagaactatagccatcacacgcaagatgaccggcgggacgtcagtcgctacggagaggacaaccgggggtacggcggttctcaggggggcggacgggggcggggaggatacgacaaggacggaaggggccccatgaccggctcctccggcggcgacagaggcggattcaagaacttcggcgggcacagagactatggaccccggacagatgccgactccgagtccgataattctgacaataatacgatcttcgttcagggcctgggggagggagtatctactgaccaagtgggtgaattcttcaagcagatcggcattatcaagactaataagaagacaggaaaaccaatgattaacctctacactgataaggacacaggcaagcctaaaggcgaagctaccgttagcttcgatgacccaccatccgccaaagcagcaattgattggtttgacggaaaagaatttcacggtaacattattaaggtgtcttttgctacccgaagaccagagttcatgagaggaggcgggtcgggaggtggtcgtagagggaggggtgggtaccgcggcaggggagggtttcaggggagaggaggcgatccaaagagtggagactgggtctgcccaaacccctcttgcggaaacatgaatttcgcccgcagaaattcctgcaaccagtgcaacgaaccacgccccgaggacagtcggccaagcggtggagatttcagaggtcgcggttatggcggagagcgcggctaccgcggtcgcgggggacgagggggcgatcgaggtggatacggcggtgaccggtcgggcggaggatacggaggagatagatcctctggtggcggttatagtggagatcgcagtggtggcggctacggcggtgacagaagcggcggagggtacgggggagaccgcggcgggggctacggtggcgataggggcggtggatatggcggagaccgcgggggaggttacggaggagacagaggcggttacggtggtgatcggggcggcgggtacgggggcgacagaggtgggtacggcggggatagaggcgggtatgggggagatcgtggcgggtatgggggcgacaggggaggatatggaggcgaccgttcccgcggcggctatggtggagacaggggaggcggaagcgggtatggcggcgaccggtcaggcggttacggtggagaccgttcaggcgggggatatgggggggataggggcggcgggtacggaggcgacaggggcggctacggcggaaagatggggggtcggaacgactataggaatgaccaacggaaccgcccctattag

SEQ ID NO: 318094 - DNA, 1779 bp, Artificial Sequence
  derived and/or modified sequence
atgagcgactccgggagctacggccagtctggtggggagcaacagtcctattccacttacgggaaccccggaagtcagggatatgggcaagccagtcaatcttactcaggttacggtcaaaccaccgatagtagctacggacagaactacagtgggtattctagttacggacagtcccaatccggttactcccaatcatatggagggtacgagaatcaaaaacagtcttcatacagccagcagccctacaacaatcaggggcaacagcagaatatggaatcatctggatcccagggagggagagcgccgtcctatgatcaacccgactatggccagcaagattcctatgaccagcagtcaggatatgatcaacaccagggtagctatgacgagcaaagtaattacgaccaacaacatgacagctatagtcagaaccagcaatcatatcattcccagcgagagaactattctcatcacacccaagatgatcgccgagacgtaagtagatatggggaagataataggggctatgggggatctcagggcgggggaaggggccggggaggctacgacaaagacggccgcggacccatgaccggcagtagcggaggtgacaggggggggttcaagaatttcggcggccatcgggactacggccccagaactgacgctgactccgagagtgacaattctgataacaacaccatttttgtgcaaggcttgggcgaaggtgtgtctacggatcaggtgggcgagtttttcaaacagattggcatcatcaagacaaacaagaaaacgggaaagccgatgatcaatctttatactgacaaggatacagggaaaccgaagggcgaagcaacggtgagcttcgacgatccaccatcagccaaggccgctatcgactggttcgatggaaaagaatttcatggaaatattatcaaggtgtcttttgcaaccaggaggccagaattcatgagaggcggaggcagcgggggcggacgcagaggtcggggggggtataggggccgaggtggcttccaaggtagaggaggcgaccctaagagcggggattgggtctgtccaaacccttcttgcggcaacatgaatttcgctagacgtaactcatgtaaccagtgcaatgagcctaggcctgaggattcccgcccttctggcggcgactttagaggccgaggctatggcggcgaacgggggtatcgcggacgaggaggcaggggtggcgaccgcgggggctacgggggcgatcggtcaggcggggggtacggtggagacaggtcctcaggcgggggttacagcggagataggagcggcggaggctacggcggagacagatccggaggcggttatggcggggatagagggggtggctacggaggcgatcgaggaggtgggtacggtggagaccggggcggaggctatggcggggacagagggggctacggtggcgatcgaggaggcggatatggaggcgaccggggcgggtacggcggcgatcgcggcggctacgggggagaccgtggcggatatggaggtgataggggaggctacggaggcgaccgctctcggggcgggtatggaggagatcgcggcggaggaagcgggtacggaggtgaccgctccgggggctacggaggcgacagaagcggaggaggatacgggggtgataggggcggcggatacggaggtgacaggggcgggtacggaggcaaaatggggggtagaaacgactatcgcaacgatcagcgcaacagaccctattag

SEQ ID NO: 318095 - DNA, 1188 bp, Artificial Sequence
  derived and/or modified sequence
atgacaggatcctctggaggggatcggggtggcttcaagaacttcggaggccaccgcgactatggcccacgcactgatgcagattcagagtctgacaatagcgataataacacgatattcgtccaggggctcggcgagggcgtctctacagaccaagtcggagaatttttcaagcagataggtattataaaaacaaataaaaagacagggaagcctatgattaatctctatacagacaaagacacggggaagcccaagggcgaggctaccgtcagttttgatgatcctcctagtgctaaggcggctatcgattggttcgatggcaaagagttccacggaaacataattaaagtcagctttgctactcgtcggccagagtttatgcgtggcggcgggtcaggaggggggcgtcggggaagaggcggctatcggggtcgcggcggtttccaggggagaggcggcgacccaaagagtggcgattgggtctgccctaacccttcctgtggcaacatgaattttgctcgcaggaattcctgcaaccagtgcaatgaacctaggcctgaggacagcaggccctcaggcggggatttcagaggaaggggctacggcggggaacgcgggtatcgtgggcgcggcggacgggggggggaccgtgggggctatggcggtgatcgatctggcgggggctacgggggagacaggtcatcaggaggcggctattcgggcgataggagtggtggcggttatggcggcgaccgctccggcggaggatacggtggcgacagaggcggaggctacggtggagaccgagggggaggatatggcggcgatcggggtggggggtatggaggggaccgggggggatatgggggcgatagaggggggggatacgggggagaccggggcggctacggtggggacagagggggatatggcggcgaccgtgggggttacggaggagatcgcggagggtatggcggagacagatctagaggaggatatggaggggacaggggaggagggtcggggtacgggggcgacaggtccggcgggtacgggggcgacaggtctggcgggggctacgggggggatcgcgggggaggttacggtggtgatagaggcggctacggcggaaagatgggcgggcgcaatgactaccgaaatgatcagagaaaccggccctactag

SEQ ID NO: 318096 - DNA, 1779 bp, Artificial Sequence
  derived and/or modified sequence
atgtctgacagcggcagctatggccagagcggcggggagcagcagagctacagcacctacggcaaccctggcagccagggctacggccaggccagccagagctacagcggctacggccagaccacagacagcagctatggccagaactacagcggctacagcagctatggccagagccagagcggctacagccagagctatggaggctatgagaaccagaagcagagcagctacagccagcagccctacaacaaccagggccagcagcagaacatggagagcagcggcagccagggcggccgggcccccagctatgaccagcctgactatggccagcaggacagctatgaccagcagagcggctatgaccagcaccagggcagctatgatgagcagagcaactatgaccagcagcacgacagctacagccagaaccagcagagctaccacagccagcgggagaactacagccaccacacccaggatgacagaagagatgtgagccgctacggggaggacaacagaggctatggaggcagccagggcggcggccggggccggggcggctatgacaaggatggccggggccccatgacaggcagcagcggcggggacagaggaggcttcaagaactttggaggccaccgggactatggccccaggacagatgctgacagcgagagtgacaacagcgacaacaacaccatctttgtgcagggcctgggggagggcgtgtccacagaccaggtgggggagttcttcaagcagatcggcatcatcaagaccaacaagaagacaggcaagcccatgatcaacctgtacacagacaaggacaccgggaagcccaagggggaggccaccgtgtcctttgatgatcctccttctgccaaggccgccatcgactggtttgatggcaaggagttccacggcaacatcatcaaggtgtcctttgccacccggcggcctgagttcatgagaggaggcggcagcggcggcggccggcggggccggggcggctaccggggccggggcggcttccagggccggggcggggaccccaagagcggggactgggtgtgccccaaccccagctgtggcaacatgaactttgcccggaggaacagctgcaaccagtgcaatgagcccaggcctgaggacagccggcccagcggcggggacttccggggccggggctatggaggagagcggggctaccggggccggggcggccggggcggggaccggggcggctacggcggggacagaagtggcggcggctatggaggagacaggagcagcggcggcggctacagcggggacagaagtggcggcggctacggcggggacagaagtggcggcggctatggaggagaccggggcggcggctatggaggagaccggggcggcggctatggaggagaccggggcggcggctatggaggagaccggggcggctacggcggggacagaggaggcggctacggcggggacagaggaggctatggaggagaccggggcggctacggcggggacagaggaggctatggaggagaccggggcggctacggcggggacaggagcagaggaggctatggaggagaccggggcggcggcagcggctatggaggagacagaagtggcggctatggaggagacagaagtggcggcggctacggcggggacagaggaggcggctacggcggggacagaggaggctatggaggcaagatgggcggcagaaatgactacagaaatgaccagaggaaccggccctactag

SEQ ID NO: 318097 - DNA, 1188 bp, Artificial Sequence
  derived and/or modified sequence
atgacaggcagcagtggaggagaccggggcggcttcaagaactttggaggccaccgggactatggccccaggacagatgctgacagcgagagtgacaacagcgacaacaacaccatctttgtgcagggcctgggggagggcgtgtccacagaccaggtgggggagttcttcaagcagatcggcatcatcaagaccaacaagaagacaggcaagcccatgatcaacctgtacacagacaaggacaccgggaagcccaagggggaggccaccgtgtcctttgatgacccccccagcgccaaggccgccatcgactggtttgatggcaaggagttccacggcaacatcatcaaggtgtcctttgccaccaggaggcctgagttcatgaggggcggcggcagcggcggcggcagaagaggccggggcggctaccggggccggggcggcttccagggccggggcggggaccccaagagcggggactgggtgtgccccaaccccagctgtggcaacatgaactttgcccggaggaacagctgcaaccagtgcaatgagcccaggcctgaggacagccggcccagcggcggggacttccggggccggggctacggcggggagcggggctaccggggccggggcggccggggcggggacagaggaggctatggaggagacagaagtggcggcggctacggcggggacaggagcagcggcggcggctacagcggggacagaagtggcggcggctatggaggagacagaagtggcggcggctacggcggggacagaggaggcggctacggcggggacagaggaggcggctacggcggggacagaggaggcggctacggcggggacagaggaggctatggaggagaccggggcggcggctatggaggagaccggggcggctacggcggggacagaggaggctatggaggagaccggggcggctacggcggggacagaggaggctatggaggagacaggagccggggcggctacggcggggacagaggaggcggcagcggctacggcggggacagaagtggcggctacggcggggacagaagtggcggcggctatggaggagaccggggcggcggctatggaggagaccggggcggctacggcggcaagatgggcggcagaaatgactacagaaatgaccagaggaaccggccctactag

SEQ ID NO: 318098 - DNA, 1779 bp, Artificial Sequence
  derived and/or modified sequence
atgagcgacagcggcagctacggccagagcggcggcgagcagcagtcctatagcacttatggcaatcccggcagccagggctacggtcaggcaagccagtcttactccggctatggtcaaaccacggattcatcatacgggcagaattactctggctactcttcgtatggacagagccagagcggatactctcagagttacggaggctatgagaaccagaaacagtcctcctacagccaacagccttacaacaaccaagggcagcagcagaatatggaaagttctgggagtcagggtggtcgagcaccttcgtacgatcagcccgattacggtcagcaagatagctatgaccagcagagtgggtacgatcagcatcaaggctcctacgacgaacagtccaattatgatcaacaacatgattcgtacagtcagaatcagcagagctatcattcacaacgggagaactattcccatcacactcaggacgacaggagagacgttagcagatacggcgaagacaataggggctacggcgggtcccagggtggtggacggggcagggggggctatgacaaagacgggcggggtccaatgaccggaagcagcggcggggaccggggcggcttcaagaactttggcggacatagggactatggaccgaggaccgacgccgacagcgagtcagataactccgacaacaacaccatctttgttcaaggcctcggcgaaggagtcagcacggaccaggttggggaatttttcaagcagatcggcattataaaaacaaataaaaagacggggaaaccaatgataaacctctacacagataaggacactggtaagccaaagggtgaggccacagtctcttttgacgatcctccttcagcaaaagccgcaattgactggtttgacgggaaggagtttcacgggaatattattaaagtgtcattcgccacacggaggcccgagtttatgcgtggagggggtagtggtggcgggaggagggggagaggtgggtacagggggagaggtggctttcagggtcgaggaggggatccaaaatccggcgactgggtttgccccaacccctcgtgcggaaatatgaacttcgccagacgaaactcttgtaatcaatgcaacgaacctcgcccggaggattctcggccttcaggcggggactttcgaggtcggggttacggtggcgagagaggctatcggggaaggggcgggagggggggggaccggggtggctacggaggggacagatcaggaggaggatatggcggtgacaggtcttctggcggcggctattcaggagatcgctcaggaggcggatatgggggagaccgaagcggtggcggttatggcggcgaccggggcggcggatatggcggggaccggggaggaggctacggcggggaccgcggagggggatacggtggggatagaggcggttacggcggggaccgaggcggcggctacgggggtgaccgcgggggatacggcggcgatcgcggtggatacggaggtgacaggggaggttacggtggagaccgcgggggctacggtggagaccgcagcaggggtggctatggcggggatagaggaggcggtagtggttacggaggcgaccgatcagggggctacgggggtgatcgctcagggggaggatatgggggtgaccggggcggcgggtacggtggtgacaggggaggttacggagggaaaatgggcggtaggaacgactaccggaatgatcagagaaacagaccttactag

SEQ ID NO: 318099 - DNA, 1779 bp, Artificial Sequence
  derived and/or modified sequence
atgagcgacagcggcagctacggccagagcggcggcgagcagcagtcgtactctacttacgggaatcctgggagtcaagggtacgggcaagcctcacagagttactccggctacggacaaacaacggactcgagctacggccagaactacagcggttacagttcctatggtcagagtcaatctgggtactcacagtcatacggcggctatgaaaaccagaaacagtcttcctatagccagcagccttataacaaccagggacagcagcagaacatggagtcaagcgggtcacagggcggtcgggccccaagttacgaccagcctgactacgggcagcaggattcttatgatcagcagagcggttatgatcagcaccaggggagctatgacgagcagtccaattacgatcagcagcacgacagttattcgcagaaccagcaatcctatcactcacagagagagaattacagccatcacacgcaggatgaccgcagggacgtttcacgatacggtgaggataaccgcggatacggagggtctcaggggggtggtcgtggcagaggaggttacgacaaagacggccgcgggcccatgacaggatcaagcggcggggacagagggggctttaaaaattttggcggacatcgagactacggtccaagaaccgacgccgactccgagagcgataacagcgacaacaacactatttttgtgcaaggactcggagaaggggtctcaacggaccaagtgggtgagttcttcaagcagattggcataattaagaccaacaaaaagacaggaaagccaatgataaacctgtacactgataaagacacgggaaaacccaagggagaggccaccgtctcatttgacgatcccccatcagccaaagccgctatcgactggttcgatgggaaagagttccacggtaatattattaaggtatcttttgcaacacgcagacccgaattcatgcgaggaggcggaagcggcggaggcaggagaggccggggcggataccgcggtagggggggcttccaaggtcgaggcggagaccccaaatccggcgactgggtgtgtcccaaccctagttgcggcaatatgaactttgcacggcgcaattcttgcaaccaatgtaacgagcctcgcccagaggatagtcgtccctccggcggcgatttccgtgggcgcggatatggcggcgaacgcgggtataggggacggggcggcagaggtggcgatcggggcgggtatgggggggataggtctggagggggctacggaggtgacaggagtagtggaggcgggtactccggcgatcggtccgggggcggatatggtggggatcggtcggggggcggatatggcggtgatcgtggaggcggctatggaggcgacagggggggtgggtacggaggcgatcggggggggggttatggcggtgataggggtggatatggaggcgatagagggggggggtacggcggagaccgcggaggctatggcggggatcgggggggatacggcggagatcggggtggttatggaggcgaccggggcgggtatggtggcgacagaagccgcggcgggtatggaggagaccgcggcggaggttctggatatggaggcgatcgctcaggtgggtacgggggagatcggagcggcgggggctacggaggcgatcgcggagggggttacggtggcgaccggggagggtacggggggaagatggggggcagaaatgattacaggaacgatcagcggaacagaccttattag

SEQ ID NO: 318100 - DNA, 1188 bp, Artificial Sequence
  derived and/or modified sequence
atgaccggcagcagcggcggcgaccggggcggcttcaagaacttcgggggacatcgcgattacggaccgcggacagatgccgactccgaatcagacaacagcgataacaacacgatattcgtccagggattgggtgaaggcgtcagcacagaccaggttggagaattctttaagcagatcggaataattaagacgaacaagaaaaccggaaaacctatgatcaatctctatactgataaggatacaggaaagcctaagggggaggccacagtttccttcgatgaccctccctctgccaaggccgcaatcgactggttcgatggaaaagagttccacggcaacatcatcaaagtgagctttgccaccaggcgaccggagtttatgagaggaggcggtagcggcggggggaggagaggtcggggcggttacaggggacgcggaggcttccagggcagaggcggcgacccaaagagcggggattgggtgtgccccaatcctagttgtgggaacatgaattttgcaaggcggaattcttgtaatcagtgtaacgagcctcgcccagaagactctagaccctcaggcggcgacttcagggggcgagggtacggtggggaacgaggttaccgaggacggggggggcgagggggggacagagggggctatggcggggatcggtcaggcgggggatacggtggggaccggtcatccggaggcggctactcgggtgatagatcaggaggaggctacggaggggatagaagtggcggcggctacggcggcgaccgcgggggagggtacggaggcgatcgaggggggggctatgggggagacagggggggaggatatggaggtgatcgtgggggttatggaggcgaccgggggggcggttacggcggcgatagggggggttatggtggcgaccggggagggtacgggggagaccgcggtggatacggtggagatcgcggaggctacggcggcgaccgatctcgtggcggatacggaggcgatcgcggcgggggctcaggctatggcggcgacaggtcgggaggctatggaggtgatcggtcaggtggagggtatgggggcgaccgagggggagggtacggtggggatagaggcggctacggtgggaaaatgggagggaggaatgactataggaacgatcagagaaaccgaccatattag

SEQ ID NO: 318101 - DNA, 1779 bp, Artificial Sequence
  derived and/or modified sequence
atgtccgacagcggctcctatggtcagagtggaggtgaacagcaatcctactcaacctatggaaaccccggaagccaagggtatggacaagcctcacaatcatactctggatacggtcaaacgactgactcctcctatggccaaaactacagtgggtactctagttatggccagtctcaatccggatactcgcagagctacggtgggtacgagaaccagaaacagagctcttatagccagcagccttacaacaaccagggccagcagcaaaacatggaaagttccggaagccagggcggtcgggcaccctcatatgatcagcctgactacggtcaacaggattcatacgaccagcagtcaggttatgaccagcaccagggcagctacgacgagcagagcaattatgatcagcaacacgactcttatagtcagaatcaacaaagttaccattcgcagagagaaaactacagccatcatactcaggacgacaggcgggacgttagccggtacggagaagataacagaggttacgggggatcccaaggcggaggtaggggaaggggtggttacgataaggacgggaggggacctatgaccgggtcatcggggggtgatcggggtgggtttaaaaactttggaggacatagagactacggccctaggactgatgctgactccgaaagtgacaatagtgataataacacaatctttgtgcaagggcttggtgaaggcgtctccacagatcaggtgggggaatttttcaagcagattggtatcatcaagaccaacaagaaaactggaaaacctatgataaacctctacaccgacaaggacacaggtaagcctaaaggagaagcaacggtgagttttgacgatccgccttccgctaaggcagccatagactggttcgacgggaaggaattccacgggaacattataaaagtttcttttgccacccgcaggcctgagtttatgcgaggcggaggtagcggcggagggaggaggggacggggaggttatcgcggaagagggggattccagggacgcggtggagaccccaaatctggagactgggtctgccctaatccgtcttgtgggaacatgaattttgctcgcagaaatagctgcaaccagtgcaatgagcctcggccagaagacagtcggcctagcggaggggattttcgcggtcgtggctacgggggagaacgcggatacaggggtcgtggcggtagaggcggtgatagaggcggttacggaggggaccgtagcgggggaggttacggtggcgaccgcagcagcggagggggttattctggcgatcgctctggtggtgggtacggtggcgatcgctcaggaggcggatatggtggagatcggggagggggttatggcggagatagggggggtggctatgggggtgatagaggaggcggatacggtggcgacaggggcggatatggcggtgatcgtggcggaggttacggtggagaccggggagggtacggaggcgaccgtggagggtacggcggtgaccgagggggttacggaggagaccggggagggtatggaggcgataggtccagaggcggttacggtggtgaccggggagggggttctggttacggcggagataggtccggcggatacgggggtgataggtcaggtgggggttatggcggtgacagagggggaggctacgggggtgacagggggggatatggagggaagatgggaggcaggaatgattacagaaatgaccaacgaaaccgtccttactag

SEQ ID NO: 318102 - DNA, 1779 bp, Artificial Sequence
  derived and/or modified sequence
atgagtgactcaggatcctatggccagagcgggggtgagcagcagtcatactccacctacggtaatcctggttcccagggatacgggcaggccagtcagagttatagcggatatggacaaacgacagattcttcttatggccaaaattactccgggtacagctcatacggccagtcacagtctggatactcccagagttacgggggatatgaaaatcagaaacagagttcatatagtcaacagccatacaacaatcagggacagcagcagaatatggagtcttctggatcgcagggaggacgagctccatcttacgatcaaccagactatgggcagcaagattcttacgatcagcaaagtgggtacgaccaacaccagggttcctacgacgagcagtcaaattatgaccagcaacatgacagctactctcagaaccaacagagttatcattctcagagagagaattactcgcatcatacccaagacgaccgccgagacgtgtctagatacggcgaagacaaccgcggttacgggggaagtcagggcggaggtagaggaaggggcggttatgataaggacggtagggggccaatgaccgggtcctctggcggagacagaggtggctttaagaacttcgggggacaccgtgattacggccctagaacagacgctgatagtgaatcggataacagtgacaacaacacaatattcgtgcaaggcttgggtgaaggtgtgtctaccgatcaagttggggaattttttaagcagattgggatcatcaagacgaacaaaaagacaggcaaacccatgatcaacctgtacacagacaaagacaccggaaagcctaagggcgaagcaacggtgtccttcgacgacccccctagcgcaaaagctgccatcgattggttcgacggaaaggaattccacggcaacatcatcaaggtgtcttttgccacccggagaccagagtttatgcgcggagggggttctggaggcggacggcgtggcaggggcggataccgcggaagaggcggttttcagggacgcggtggtgacccgaaatcaggcgactgggtttgtccaaatccttcctgcggcaacatgaactttgcaagaagaaattcctgcaaccaatgtaacgaaccaaggccagaggattccaggcctagcggcggagatttcaggggccgtggctacggcggtgaacgaggctatcgaggccgagggggtcggggtggcgaccgaggagggtatggcggagacagatctggaggaggctacgggggagaccgatcaagcggcggaggctacagtggggaccgcagcggcggaggctacgggggtgaccgttctggcggtggttatggaggtgaccgcggaggcggatacggcggtgaccgaggaggcggttatggtggcgacaggggagggggatatgggggtgatcggggagggtacggcggagaccgcggtgggggttacgggggtgacagaggcggttacggaggcgatcgcggtgggtatggcggtgatcgcggtggatacggaggtgacaggggcggatatgggggagacagaagccggggaggctacggaggcgataggggtggaggcagcggctatggtggggataggtctggcggatatggaggcgatagatccgggggagggtatggaggggataggggcggtggatacgggggtgatcgaggagggtacggaggcaaaatggggggacgtaacgactatcgtaatgaccagcgaaaccgtccttattag

SEQ ID NO: 318103 - DNA, 1188 bp, Artificial Sequence
  derived and/or modified sequence
atgacaggcagttcaggcggagaccgcggtggatttaagaatttcgggggacaccgggattatgggcctcgaacagacgccgatagtgagtccgataactctgataacaatacaatttttgtccagggccttggcgagggcgtttccacagatcaagtgggcgaattctttaagcaaattggtataattaagaccaacaagaaaacaggcaagcctatgatcaacctatacacagacaaagacactggaaaaccaaagggtgaggccacggtgtcattcgacgaccctccctccgccaaggcagctatcgactggttcgacgggaaggagtttcacggaaacatcatcaaggtcagctttgcaacgcggcgacctgaattcatgcggggtggagggtccggtggtggtcgcagaggtagggggggttacaggggcaggggcggattccagggccgaggtggagaccctaaaagcggcgactgggtgtgtccgaatccatcttgtgggaacatgaattttgctagaagaaattcgtgtaaccagtgcaacgaaccaaggcctgaagattccaggccgtcaggcggtgatttcagaggcaggggctacggaggagaacgagggtacaggggcagaggcggacgaggtggcgaccgagggggttatggtggggatagatctggcggaggctatggcggtgaccgctcttcgggcggtggttactccggagatcgcagcggcggtggatacgggggagatcgcagcggtggaggatatggaggggaccgtgggggaggttatggaggggaccggggtgggggatacggaggcgaccggggtggcggatacgggggtgaccgagggggatacggaggagatcggggtgggggttatggaggcgatcgcggtggttatggaggcgataggggtggttatgggggagatagaggagggtacgggggagaccgtggcggatacgggggagatcgcagtcggggaggttatgggggagacagaggtggtgggtctggttacggcggagataggagcgggggatacggtggggatagatccggcggaggatatgggggagaccgtggcggtggatacgggggtgaccggggaggttatggtggcaaaatgggaggcagaaatgactatcggaatgatcaaagaaaccgaccctactag

SEQ ID NO: 318104 - DNA, 2191 bp, Artificial Sequence
  derived and/or modified sequence
agtccgcctcagcccgccgcgccgccctcagtacagctccggccgccgcgccgcctggctttcgtattcgttgttctcggcgggctgtggggcctccgcgccgcggccgttagtcatgtcggattctggaagttacggtcagtctgggggtgagcagcaaagttattctacctatggaaatccaggcagccaaggctatggacaagcatcacaaagctattctggctatgggcaaacgactgattcctcttatggacagaactacagcggttactccagttatggacaaagtcagtcaggttattcacagtcctatggtggttatgagaatcaaaagcagagctcatatagccagcaaccatataataaccagggacagcagcaaaacatggaatcatcaggaagccaaggtggaagagcaccttcctatgaccagccagactatggtcaacaagattcatatgaccagcagtcaggctatgatcaacatcaaggctcatatgatgagcagtcaaattatgatcagcagcatgattcctatagtcaaaaccagcagtcctatcattcacaaagggaaaactacagccaccacacacaagatgaccgtcgtgatgtgagtaggtatggagaagataatagaggatatggcgggtcacagggaggaggtagagggcgtgggggatatgacaaggatggaagaggtcctatgacaggatcaagtggtggtgaccgcggtggcttcaaaaattttggtggtcacagggattatggacccagaacagatgctgattcagaatctgataattcagataacaacacaatctttgtgcaaggacttggggagggtgtgtctacagatcaagttggggagttctttaaacaaataggaattatcaagacaaataagaagaccggaaaaccaatgataaatctttatacagacaaggacacaggaaagccaaagggggaggcaacagtgtcatttgatgaccctccttcagctaaggcagccattgactggtttgatggaaaagaattccatggcaacatcattaaagtgtcctttgccactagaagacctgaattcatgagaggaggtggaagtggaggtgggcggcgaggccgtggaggatatagaggtcgtggaggctttcaagggagaggtggagaccccaaaagtggggattgggtttgccctaatccgtcatgcggaaatatgaactttgctcgaaggaattcctgcaatcagtgcaatgagcctagaccagaggactctcgtccctcaggaggagatttccgggggagaggctacggtggagagaggggctacagaggtcgtgggggcagaggtggagaccgaggcggctatggtggagacagaagtgggggtggctatggtggagacagaagcagcggtggtggctacagcggagatagaagtgggggcggctatggtggagacagaagtgggggtggctatggtggggacagaggcggcggctatggtggggacagaggaggcggctatggaggagaccgaggaggtggctatggaggagatcgaggtggctatggaggagaccgaggtggaggctatggtggagaccgaggaggctatggaggagatcgaggaggttacggaggagatcgaggaggttatggaggagatcgaggaggctatggaggagacagaagccgggggggctatggaggagaccgtggtggtggcagtggctacggtggagaccgaagtggaggctatggaggagacaggagtggtggcggctatggaggagaccgaggtgggggctacggaggagaccgaggtggctatggaggcaaaatgggaggaagaaacgactacagaaatgatcagcgcaaccgaccatactgatgactgttttgaatgttcctttgtctctgacatgatccatagtgaaattgccagagttttgcctgctgctttcctcgtggcctcttcttgggtagtgaaattaagtgacatttggatttttatttgggtgggagggctgggacagtttttcttctagaaatgtctgttgagatttccccctttagtttccaaccttctccccaacccttggagctaaatgcgttgtaaaatattgccaaaatgaaaagtgttttgtaatactgcaataaaggctgcttgtttttgtggacttttgta

SEQ ID NO: 318105 - DNA, 2153 bp, Artificial Sequence
  derived and/or modified sequence
agtacagctccggccgccgcgccgcctggctttcgtattcgttgttctcggcgggctgtggggcctccgcgccgcggccgttagtcatgtcggattctggaagttacggtcagtctgggggtgagcagcaaagttattctacctatggaaatccaggcagccaaggctatggacaagcatcacaaagctattctggctatgggcaaacgactgattcctcttatggacagaactacagcggttactccagttatggacaaagtcagtcaggttattcacagtcctatggtggttatgagaatcaaaagcagagctcatatagccagcaaccatataataaccagggacagcagcaaaacatggaatcatcaggaagccaaggtggaagagcaccttcctatgaccagccagactatggtcaacaagattcatatgaccagcagtcaggctatgatcaacatcaaggctcatatgatgagcagtcaaattatgatcagcagcatgattcctatagtcaaaaccagcagtcctatcattcacaaagggaaaactacagccaccacacacaagatgaccgtcgtgatgtgagtaggtatggagaagataatagaggatatggcgggtcacagggaggaggtagagggcgtgggggatatgacaaggatggaagaggtcctatgacaggatcaagtggtggtgaccgcggtggcttcaaaaattttggtggtcacagggattatggacccagaacagatgctgattcagaatctgataattcagataacaacacaatctttgtgcaaggacttggggagggtgtgtctacagatcaagttggggagttctttaaacaaataggaattatcaagacaaataagaagaccggaaaaccaatgataaatctttatacagacaaggacacaggaaagccaaagggggaggcaacagtgtcatttgatgaccctccttcagctaaggcagccattgactggtttgatggaaaagaattccatggcaacatcattaaagtgtcctttgccactagaagacctgaattcatgagaggaggtggaagtggaggtgggcggcgaggccgtggaggatatagaggtcgtggaggctttcaagggagaggtggagaccccaaaagtggggattgggtttgccctaatccgtcatgcggaaatatgaactttgctcgaaggaattcctgcaatcagtgcaatgagcctagaccagaggactctcgtccctcaggaggagatttccgggggagaggctacggtggagagaggggctacagaggtcgtgggggcagaggtggagaccgaggcggctatggtggagacagaagtgggggtggctatggtggagacagaagcagcggtggtggctacagcggagatagaagtgggggcggctatggtggagacagaagtgggggtggctatggtggggacagaggcggcggctatggtggggacagaggaggcggctatggaggagaccgaggaggtggctatggaggagatcgaggtggctatggaggagaccgaggtggaggctatggtggagaccgaggaggctatggaggagatcgaggaggttacggaggagatcgaggaggttatggaggagatcgaggaggctatggaggagacagaagccgggggggctatggaggagaccgtggtggtggcagtggctacggtggagaccgaagtggaggctatggaggagacaggagtggtggcggctatggaggagaccgaggtgggggctacggaggagaccgaggtggctatggaggcaaaatgggaggaagaaacgactacagaaatgatcagcgcaaccgaccatactgatgactgttttgaatgttcctttgtctctgacatgatccatagtgaaattgccagagttttgcctgctgctttcctcgtggcctcttcttgggtagtgaaattaagtgacatttggatttttatttgggtgggagggctgggacagtttttcttctagaaatgtctgttgagatttccccctttagtttccaaccttctccccaacccttggagctaaatgcgttgtaaaatattgccaaaatgaaaagtgttttgtaatactgcaataaaggctgcttgtttttgtgg

SEQ ID NO: 318106 - DNA, 1879 bp, Artificial Sequence
  derived and/or modified sequence
agtacagctccggccgccgcgccgcctggctttcgtattcgttgttctcggcgggctgtggggcctccgcgccgcggccgttagtcatgtcggattctggaagttacggtcagtctgggggtgagcagcaaagttattctacctatggaaatccaggcagccaaggctatggacaagcatcacaaagctattctggctatgggcaaacgactgattcctcttatggacagaactacagcggttactccagttatggacaaagtcagtcaggttattcacagtcctatggtggttatgagaatcaaaagcagagctcatatagccagcaaccatataataaccagggacagcagcaaaacatggaatcatcaggaagccaaggtggaagagcaccttcctatgaccagccagactatgatcagcagcatgattcctatagtcaaaaccagcagtcctatcattcacaaagggaaaactacagccaccacacacaagatgaccgtcgtgatgtgagtaggtatggagaagataatagaggatatggcgggtcacagggaggaggtagagggcgtgggggatatgacaaggatggaagaggtcctatgacaggatcaagtggtggtgaccgcggtggcttcaaaaattttggtggtcacagggattatggacccagaacagatgctgattcagaatctgataattcagataacaacacaatctttgtgcaaggacttggggagggtgtgtctacagatcaagttggggagttctttaaacaaataggaattatcaagacaaataagaagaccggaaaaccaatgataaatctttatacagacaaggacacaggaaagccaaagggggaggcaacagtgtcatttgatgaccctccttcagctaaggcagccattgactggtttgatggaaaagaattccatggcaacatcattaaagtgtcctttgccactagaagacctgaattcatgagaggaggtggaagtggaggtgggcggcgaggccgtggaggatatagaggtcgtggaggctttcaagggagaggtggagaccccaaaagtggggattgggtttgccctaatccgtcatgcggaaatatgaactttgctcgaaggaattcctgcaatcagtgcaatgagcctagaccagaggactctcgtccctcaggaggagatttccgggggagaggctacggtggagagaggggctacagaggtcgtgggggcagaggtggagaccgaggcggctatggtggagacagaagtgggggtggctatggtggagacagaagcagcggtggtggctacagcggagatagaagtgggggcggctatggtggagacagaagtgggggtggctatggtggggacagaggcggcggctatggtggggacagaggaggcggctatggaggagaccgaggaggtggctatggaggagatcgaggtggctatggaggagaccgaggtggaggctatggtggagaccgaggaggctatggaggagatcgaggaggttacggaggagatcgaggaggttatggaggagatcgaggaggctatggaggagacagaagccgggggggctatggaggagaccgtggtggtggcagtggctacggtggagaccgaagtggaggctatggaggagacaggagtggtggcggctatggaggagaccgaggtgggggctacggaggagaccgaggtggctatggaggcaaaatgggaggaagaaacgactacagaaatgatcagcgcaaccgaccatactgatgactgttttgaatgttcctttgtctctgacatgatccatagtgaaattgccagagttttgcctgctgctttcctcgtggcctcttctt

SEQ ID NO: 318107 - protein, 593 aa, Artificial Sequence
  derived and/or modified sequence
MAIQFRSLFPLALPGMLALLGWWWFFSRKKGHVSSHDEQQVEAGAVQLRADPAIKEPLPVEDVCPKVVSTPPSVTEPPEKELSTVSKLPAEPPALLQTHPPCRRSESSGILPNTTDMRLRPGTRRDDSTKLELALTGGEAKSIPLECPLSSPKGVLFSSKSAEVCKQDSPFSRVPRKVQPGYPVVPAEKRSSGERARETGGAEGTGDAVLGEKVLEEALLSREHVLELENSKGPSLASLEGEEDKGKSSSSQVVGPVQEEEYVAEKLPSRFIESAHTELAKDDAAPAPPVADAKAQDRGVEGELGNEESLDRNEEGLDRNEEGLDRNEESLDRNEEGLDRNEEIKRAAFQIISQVISEATEQVLATTVGKVAGRVCQASQLQGQKEESCVPVHQKTVLGPDTAEPATAEAAVAPPDAGLPLPGLPAEGSPPPKTYVSCLKSLLSSPTKDSKPNISAHHISLASCLALTTPSEELPDRAGILVEDATCVTCMSDSSQSVPLVASPGHCSDSFSTSGLEDSCTETSSSPRDKAITPPLPESTVPFSNGVLKGELSDLGAEDGWTMDAEADHSGVAAPPPGKRGTLITRCPGFFEC

SEQ ID NO: 318108 - DNA, 1782 bp, Artificial Sequence
  derived and/or modified sequence
atggctatccaatttcggtcgcttttccctctggctctgcccggaatgctggcactgctggggtggtggtggtttttcagtcgaaagaaagggcatgttagctctcatgacgagcaacaggttgaggccggggctgtgcagttgagagccgatcctgcgattaaagaacctcttcccgtcgaggacgtctgtccaaaagtagtgtctacaccaccaagtgtgaccgagcccccagaaaaagaactctctacggttagtaagcttcccgcggagccaccggctctgctccagacccatcccccttgtcgcagatctgaatcctcaggaatcctgcctaacacaacagacatgcgcttacggccaggaacaagaagagacgactccactaagttggagctggctctcacgggaggcgaggctaaatcaatccctctcgaatgccctcttagttcccctaagggagttttgttttcgagtaaaagtgcagaggtatgcaaacaggatagcccatttagccgggttcctaggaaggtgcagccaggctacccagtggtgccagcagaaaagcgatcttcgggcgagagggcacgagaaaccgggggggctgaaggtacaggggatgcggtgctgggcgagaaagtgctggaggaagcccttctgtcacgcgagcacgtgctggagcttgagaatagtaagggtccatcattagcatctctggaaggcgaggaggacaaaggcaaatcaagttccagccaagtcgttggacctgtgcaggaggaagaatacgtggccgagaagttacccagccggtttatcgagtcagcccatactgagctggccaaggacgatgctgccccagccccgccggttgccgacgcaaaggcccaggatcgcggcgttgagggagagctgggcaatgaagagtcactggataggaatgaggaaggcctcgatagaaacgaagaaggcttggatcggaatgaggagagcctggatagaaacgaggagggactggatagaaacgaagaaatcaagagagccgcatttcagatcatttcccaggtaatcagtgaggcaacagagcaggtcctcgctaccactgtgggcaaggtggcaggtcgcgtttgccaggccagtcagttgcagggacagaaagaagagagctgtgtgccagtccaccagaagaccgtgctgggccccgatacagccgagccagctacggcggaagcagcagtcgcacctcctgatgcagggctgcctctgcctggtttgcccgccgagggttcacctcccccgaagacttacgtgagctgccttaaaagtttgttgtcatctccaaccaaggattctaagccaaacatcagtgctcatcacatctcgctggctagctgtttggcacttaccacaccttccgaggagctgccagaccgtgcgggtatcctggtagaggatgcaacatgtgtgacatgtatgtctgattcctctcagtctgttccgcttgtggcctcacccggacattgtagcgactcattctcaacaagtggactggaggactcttgcacggagaccagttccagtcccagagataaagccatcacgccacctttgcccgagtcaaccgttccctttagcaacggagtactgaaaggtgaactctccgatctcggggctgaagatgggtggaccatggatgctgaggcggatcatagcggcgtggcggcacccccccctggcaaacgggggacactaattacccgctgccctgggttttttgaatgttag

SEQ ID NO: 318109 - DNA, 1782 bp, Artificial Sequence
  derived and/or modified sequence
atggccatccagttccgcagcctcttccccctggccctgcccggcatgctggccctgctgggctggtggtggttcttcagcaggaagaagggccacgtgagcagccatgatgagcagcaggtggaggccggggctgtgcagctgcgggctgaccctgccatcaaggagcccctgcctgtggaggatgtgtgccccaaggtggtgtccaccccaccttctgtgacagagcccccagagaaggagctgagcacagtgtccaagctgcctgctgagcccccagccctgctgcagacccaccccccctgcagaagaagtgagagcagcggcatcctgcccaacaccacagacatgaggctgcggcccggcaccaggagagatgacagcaccaagctggagctggccctgaccggcggggaggccaagagcatccccctggagtgccccctgagcagccccaagggcgtgctcttcagcagcaagtctgctgaggtgtgcaagcaggacagccccttcagccgggtgcccaggaaggtgcagcccggctaccctgtggtgcctgctgagaagaggagcagcggggagcgggcccgggagactggaggagctgagggcactggagatgctgtgctgggggagaaggtgctggaggaggccctgctgagccgggagcacgtgctggagctggagaacagcaagggccccagcctggccagcctggagggggaggaggacaagggcaagagcagcagcagccaggtggtgggccctgtgcaggaggaggagtatgtggccgagaagctgcccagccgcttcatcgagagcgcccacacagagctggccaaggatgatgctgccccagcccctcctgtggctgatgccaaggcccaggacagaggagtggagggggagctgggcaatgaggagagcctggacagaaatgaggagggcctggacagaaatgaggagggcctggacagaaatgaggagagcctggacagaaatgaggagggcctggacagaaatgaggagatcaagagagctgccttccagatcatcagccaggtgatcagcgaggccacagagcaggtgctggccaccaccgtgggcaaggtggccggccgggtgtgccaggccagccagctgcagggccagaaggaggagagctgtgtgcctgtgcaccagaagacagtgctgggccctgacacagctgagcccgccacagctgaggccgctgtggcccccccagatgctggcctgcccctgcccggcctgcctgctgagggcagccccccacccaagacctacgtgtcctgcctgaagagcctgctgagcagccccaccaaggacagcaagcccaacatcagcgcccaccacatcagcctggccagctgcctggccctgaccaccccatctgaggagctgcctgaccgggccggcatcctggtggaggatgccacctgtgtgacctgcatgtctgacagcagccagagcgtgcccctggtggccagccctggccactgcagcgacagcttcagcaccagcggcctggaggacagctgcacagagaccagcagcagcccccgggacaaggccatcaccccacccctgcctgagagcacagtgcccttcagcaatggagtgctgaagggggagctgagtgacctgggcgcagaagatggctggaccatggatgctgaggccgaccacagcggcgtggccgcccctcctcctgggaagaggggcaccctcatcacccgctgccccggcttctttgagtgctag

SEQ ID NO: 318110 - DNA, 1782 bp, Artificial Sequence
  derived and/or modified sequence
atggccatccagttccggagcctgttccccctggccctgcccggcatgctggctttactaggctggtggtggttcttcagccgcaagaaagggcacgtctctagtcacgacgagcagcaagtggaagctggcgcagtgcaactgcgggcggatcctgcgatcaaggaacccctgccagtcgaggacgtgtgtcccaaggttgtgagcacaccaccttcggttactgagcccccagagaaagagctttccacagtgagcaagctacccgcagagcccccagcactgctgcagactcacccaccctgccgtcgttccgagtctagtggtattctcccaaacaccactgacatgagactgcgcccgggtacaagacgggatgactcgaccaaactcgaattggccttaaccggcggtgaagctaaaagcattccgctagagtgtcctttgtccagcccaaagggcgttcttttttcaagcaagagcgctgaggtctgtaaacaggacagccctttcagtcgggtccctagaaaggtgcagcccggctatccagtggtcccggccgagaaaaggtccagcggcgagcgggctagagaaactgggggcgccgaaggaaccggggatgcggtgctcggcgagaaggtgctggaggaggctctgctgtctcgggagcacgtgctggagctcgagaactcaaagggaccctcacttgcttcgctggaaggcgaagaggacaagggcaagagtagcagcagtcaggtcgtcggcccagttcaggaggaggagtacgtggccgagaagttaccctctaggttcatcgaatcagcccacaccgagctggccaaagacgatgccgcgccggcccctccagtcgctgatgccaaggcccaggacagaggggtggagggcgaattgggcaacgaagagtcactagacagaaacgaggaggggctggatcgcaatgaggagggcctcgaccggaatgaggaatcactggataggaatgaagaaggccttgaccgcaatgaggagatcaaacgagcagccttccagattatcagccaagtgatctctgaggctacggagcaggtactggccaccacggttggaaaggtcgccggaagagtgtgtcaggcaagccagttgcaggggcagaaggaggaatcctgtgtccctgttcaccagaaaacagtgcttggtccagatacggctgagccagctaccgccgaggccgctgtcgccccacccgacgcgggtctgcctcttcctgggcttcctgccgaggggagtcctccaccaaagacatatgtgagctgtctgaaatccctgctcagtagcccgactaaggattctaagccaaatatctctgctcatcatatcagtctggcgtcctgcttggcactgacgacgcctagtgaagagttgcccgacagagcgggtattttggttgaggacgccacctgtgtgacttgcatgtccgactcctctcagagcgtgccactggttgccagtcccggccactgctccgacagcttttcaaccagcggccttgaagatagctgtaccgaaacatcctcctcccctcgggataaagctataacacctccattgccagagtccacagttcccttctcaaatggagtccttaaaggcgagctgagcgaccttggtgcagaggacgggtggacaatggacgccgaagccgaccatagtggtgtggcggccccccccccgggtaagcgtggtacgctgattacacgttgccccgggttcttcgagtgctag

SEQ ID NO: 318111 - DNA, 1782 bp, Artificial Sequence
  derived and/or modified sequence
atggcaattcaattccgctcattgtttccattggcgttgcccggaatgctggcattgttgggttggtggtggttcttcagcaggaaaaagggacatgtgtcctcccacgatgagcagcaggtggaggccggagccgtccagctgcgagccgatcctgcaattaaggagccactgccagttgaagacgtgtgtcccaaagttgtcagcaccccaccttctgtgaccgagccaccagagaaggaactgtccaccgtttcgaagctccctgccgaaccgcctgccttgctgcagactcacccaccctgccgcagatcagaatcaagcggcattctgcccaatactacggatatgcgcctgaggcctggtacgagacgcgatgattctaccaaattggaattggcacttaccggtggggaagcgaaaagcattccgctggagtgccccctgagcagcccgaaaggcgtcctgttttctagcaaatccgccgaagtatgtaagcaggactcccccttcagtagagtcccgcgaaaagtacagccaggatatcctgtggtccctgccgagaaacgctcttctggagagagggcacgggaaactgggggagctgaaggcacaggcgacgccgttctgggtgagaaggtccttgaggaggctctgctgtctcgcgagcacgtcctggaactcgaaaacagtaagggcccttccctcgcctcacttgagggagaggaggacaagggtaagtcaagctcctcccaggtggtgggcccagttcaggaagaggagtatgtcgcggaaaagcttcccagcaggttcattgaatctgcgcatactgagctggccaaggatgacgcagccccagcccctcctgtggccgacgccaaggcccaggaccggggagtcgaaggagagttgggaaacgaagagtcgctcgaccggaatgaggaagggctcgatagaaatgaggaagggctggacaggaatgaagaatcacttgatcgtaatgaggaaggcctcgaccggaatgaggagatcaaacgggctgcgttccaaattattagccaggtaatatcagaagctacagagcaggttctcgcgaccacagttggcaaagtcgcaggcagagtttgccaggcatcccagttgcaggggcagaaggaagagagctgcgttcctgtgcatcagaaaactgtgctgggaccagacactgccgaaccagcgacagccgaagctgcagtggctcccccagatgccggactgcctctccctgggttgcctgctgagggctccccccctcctaagacctacgtgagttgcttaaaatccctattatcaagcccgacaaaagacagcaaacccaacattagcgctcatcacatctctttggcttcctgcttagctttaacgacaccctcagaagaacttccggaccgggctggcattctcgttgaggatgctacttgtgtgacttgtatgtccgatagttcccagtctgtgccattggttgcttccccaggacactgttctgactccttcagcacctctggcctggaggattcctgcacagagactagctcttcgccacgagacaaagccatcaccccacccctccccgagtctactgtgccatttagtaacggcgtgctaaaaggtgagttgtcagatttgggggctgaagacggctggacaatggatgccgaggcagatcattccggggttgcagcaccccctccgggaaagagagggaccctgatcaccagatgccccggtttttttgagtgctag

SEQ ID NO: 318112 - DNA, 2013 bp, Artificial Sequence
  derived and/or modified sequence
aagggcgaggggcggggcctgcgtcgcgctgcgggcacgtcgccgcgcgtcttcagtatttaatgtctctgtgttccacccgcctgggctagcacgtgggggagctgcggaagcgcggcgctgcgggccgggccgcggggcacagccgggggccggcggcggcgcgcggactccgcatcccgcaccccgatggtagccgaggagctggtgtaattacttcaagcctccaggatggcaatccagttccgttcgctcttccccttggcattgcctgggatgctggcgctcctcggctggtggtggtttttctctcgtaaaaaaggccatgtcagcagccatgatgagcagcaggtggaggctggtgctgtgcagctgagggctgaccctgccatcaaggaacctctccccgtggaagacgtctgtcccaaagtagtgtccacaccccccagtgtcacagagcctccagaaaaggaactgtccaccgtgagcaagctgcctgcagagcccccagcattgctccagacacacccaccttgccgaagatcagagtcctcgggcattcttcctaacaccacagacatgagattgcgaccaggaacacgcagagatgacagtacaaagctggagctagccctgacaggtggtgaagccaaatcgattcctctagagtgccccctttcatccccaaagggtgtactattctccagcaaatcagctgaggtgtgtaagcaagattcccccttcagcagggtgccaaggaaggtccagccaggctaccccgtagtccccgcagagaagcgtagctctggggagagggcaagagagacaggtggggccgaagggactggtgatgccgtgttgggggaaaaggtgcttgaagaagctctgttgtctcgggagcatgtcttggaattggagaacagcaagggccccagcctggcctctttagagggggaagaagataaggggaagagcagctcatcccaggtggtggggccagtgcaggaggaagagtatgtagcagagaagttgccaagtaggttcatcgagtcggctcacacagagctggcaaaggacgatgcggcgccagcacccccagtcgcagacgccaaagcccaggatagaggtgtcgagggagaactgggcaatgaggagagcttggatagaaatgaggagggcttggatagaaatgaggagggcttggatagaaatgaggagagcttggatagaaatgaggagggcttggatagaaatgaggagattaagcgggctgccttccagataatctcccaagtgatctcagaagcaaccgaacaggtgctggccaccacggttggcaaggttgcaggtcgtgtgtgtcaggccagtcagctccaagggcagaaggaagagagctgtgtcccagttcaccagaaaactgtcttgggcccagacactgcggagcctgccacagcagaggcagctgttgccccgccggatgctggcctccccttgccaggcctaccagcagagggctcaccaccaccaaagacctacgtgagctgcctgaagagccttctgtccagccccaccaaggacagtaagccaaatatctctgcacaccacatctccctggcctcctgcctggcactgaccacccccagtgaagagttgccggaccgggcaggcatcctggtggaagatgccacctgtgtcacctgcatgtcagacagcagccaaagtgtccctttggtggcttctccaggacactgctcagattctttcagcacttcagggcttgaagactcttgcacagagaccagctcgagccccagggacaaggccatcaccccgccactgccagaaagtactgtgcccttcagcaatggggtgctgaagggggagttgtcagacttgggggctgaggatggatggaccatggatgcggaagcagatcattcaggagttgcagctccacccccgggaaagcggggcactttgataacgaggtgtcctgggtttttcgagtgctga

SEQ ID NO: 318113 - DNA, 1782 bp, Artificial Sequence
  derived and/or modified sequence
atggccatccagttcagaagcctgttccccctggccctgcccggcatgctggccctgctgggctggtggtggttcttcagcagaaagaagggccacgtgagcagccacgacgagcagcaggtggaggccggcgccgtgcagctgagagccgaccccgccatcaaggagcccctgcccgtggaggacgtgtgccccaaggtggtgagcaccccccccagcgtgaccgagccccccgagaaggagctgagcaccgtgagcaagctgcccgccgagccccccgccctgctgcagacccaccccccctgcagaagaagcgagagcagcggcatcctgcccaacaccaccgacatgagactgagacccggcaccagaagagacgacagcaccaagctggagctggccctgaccggcggcgaggccaagagcatccccctggagtgccccctgagcagccccaagggcgtgctgttcagcagcaagagcgccgaggtgtgcaagcaggacagccccttcagcagagtgcccagaaaggtgcagcccggctaccccgtggtgcccgccgagaagagaagcagcggcgagagagccagagagaccggcggcgccgagggcaccggcgacgccgtgctgggcgagaaggtgctggaggaggccctgctgagcagagagcacgtgctggagctggagaacagcaagggccccagcctggccagcctggagggcgaggaggacaagggcaagagcagcagcagccaggtggtgggccccgtgcaggaggaggagtacgtggccgagaagctgcccagcagattcatcgagagcgcccacaccgagctggccaaggacgacgccgcccccgccccccccgtggccgacgccaaggcccaggacagaggcgtggagggcgagctgggcaacgaggagagcctggacagaaacgaggagggcctggacagaaacgaggagggcctggacagaaacgaggagagcctggacagaaacgaggagggcctggacagaaacgaggagatcaagagagccgccttccagatcatcagccaggtgatcagcgaggccaccgagcaggtgctggccaccaccgtgggcaaggtggccggcagagtgtgccaggccagccagctgcagggccagaaggaggagagctgcgtgcccgtgcaccagaagaccgtgctgggccccgacaccgccgagcccgccaccgccgaggccgccgtggccccccccgacgccggcctgcccctgcccggcctgcccgccgagggcagccccccccccaagacctacgtgagctgcctgaagagcctgctgagcagccccaccaaggacagcaagcccaacatcagcgcccaccacatcagcctggccagctgcctggccctgaccacccccagcgaggagctgcccgacagagccggcatcctggtggaggacgccacctgcgtgacctgcatgagcgacagcagccagagcgtgcccctggtggccagccccggccactgcagcgacagcttcagcaccagcggcctggaggacagctgcaccgagaccagcagcagccccagagacaaggccatcaccccccccctgcccgagagcaccgtgcccttcagcaacggcgtgctgaagggcgagctgagcgacctgggcgccgaggacggctggaccatggacgccgaggccgaccacagcggcgtggccgcccccccccccggcaagagaggcaccctgatcaccagatgccccggcttcttcgagtgctag

SEQ ID NO: 318114 - protein, 843 aa, Artificial Sequence
  derived and/or modified sequence
MSSAMLVTCLPDPSSSFREDAPRPPVPGEEGETPPCQPGVGKGQVTKPMPVSSNTRRNEDGLGEPEGRASPDSPLTRWTKSLHSLLGDQDGAYLFRTFLEREKCVDTLDFWFACNGFRQMNLKDTKTLRVAKAIYKRYIENNSIVSKQLKPATKTYIRDGIKKQQIDSIMFDQAQTEIQSVMEENAYQMFLTSDIYLEYVRSGGENTAYMSNGGLGSLKVVCGYLPTLNEEEEWTCADFKCKLSPTVVGLSSKTLRATASVRSTETVDSGYRSFKRSDPVNPYHIGSGYVFAPATSANDSEISSDALTDDSMSMTDSSVDGIPPYRVGSKKQLQREMHRSVKANGQVSLPHFPRTHRLPKEMTPVEPATFAAELISRLEKLKLELESRHSLEERLQQIREDEEREGSELTLNSREGAPTQHPLSLLPSGSYEEDPQTILDDHLSRVLKTPGCQSPGVGRYSPRSRSPDHHHHHHSQYHSLLPPGGKLPPAAASPGACPLLGGKGFVTKQTTKHVHHHYIHHHAVPKTKEEIEAEATQRVHCFCPGGSEYYCYSKCKSHSKAPETMPSEQFGGSRGSTLPKRNGKGTEPGLALPAREGGAPGGAGALQLPREEGDRSQDVWQWMLESERQSKPKPHSAQSTKKAYPLESARSSPGERASRHHLWGGNSGHPRTTPRAHLFTQDPAMPPLTPPNTLAQLEEACRRLAEVSKPPKQRCCVASQQRDRNHSATVQTGATPFSNPSLAPEDHKEPKKLAGVHALQASELVVTYFFCGEEIPYRRMLKAQSLTLGHFKEQLSKKGNYRYYFKKASDEFACGAVFEEIWEDETVLPMYEGRILGKVERID

SEQ ID NO: 318115 - DNA, 2532 bp, Artificial Sequence
  derived and/or modified sequence
atgtcctcagctatgctcgtgacatgtcttccagacccttcgtcttcctttagagaagatgccccaaggcctccggttcccggcgaggaaggcgaaacacccccctgccaaccaggggtcggaaaaggtcaagtgaccaagccaatgcctgtatctagcaatacccggcggaatgaggacggactgggtgagccagaaggacgggccagtcccgacagcccccttactcgctggaccaaatctctccactcactgctgggagatcaggacggcgcttacctgttccggacattcctggagcgcgagaagtgcgtcgatacattggatttctggtttgcctgtaatggatttcgtcagatgaacctcaaagatacgaagacccttagggtcgcgaaggcaatatacaagagatatattgaaaacaatagtattgttagtaaacaactaaaacccgctacaaaaacctacatccgtgatggcattaaaaagcagcagatcgactcaatcatgtttgaccaggcccagacagaaatccagagcgttatggaggaaaatgcataccagatgttcctaacgtccgacatttatttggagtacgtgcgctcaggaggtgaaaataccgcatacatgagcaatggaggcttgggaagcctgaaagttgtgtgtggatacctgcctactctcaatgaggaagaggagtggacttgtgctgactttaagtgcaaactgtccccaaccgtcgtcggtctgtcttctaaaactctccgcgctaccgcttcggtgcggtcgacagaaactgtcgactccggttacaggagctttaagcggtccgacccggtaaacccctaccacattgggtccggatatgtgtttgcccccgccacaagtgctaacgactccgaaatctcttctgatgctcttactgatgactcaatgtccatgaccgacagtagcgtcgatggtatccctccttatcgggtcggatccaagaaacagcttcagcgggagatgcatcggtcagtgaaagcgaatgggcaggtatcactgcctcacttccccagaactcacaggcttcccaaggagatgaccccagtcgagccagccacatttgcagcagaactcattagcagactggagaaactcaaactggaactcgagagccggcactctctcgaggagcgcctccagcagattcgcgaggatgaagaacgggagggcagtgagctcaccctcaacagccgggagggtgctcctacgcagcaccccctctccctcctcccatccggctcctacgaagaggacccccagacgatactggatgatcatctctcaagagtactcaaaaccccaggatgtcaatctccaggcgtcggcagatattcaccacgctcccgatcaccagatcaccaccaccaccaccatagtcagtaccactccctcctgcccccaggagggaagctcccgccggctgccgcatcacctggagcctgtcctctcttgggtggcaaaggttttgtcaccaaacaaactaccaaacatgttcatcatcattacatccatcaccatgctgtgccaaaaacaaaagaggagatcgaagccgaagccacgcagcgggtgcactgcttttgtcccgggggctccgagtattattgctactccaagtgcaagtcgcattcaaaggcacctgaaactatgcccagcgaacagtttggtggttctagagggtcaaccctgcccaaaaggaatggcaaggggaccgagcccgggctcgctctgcctgcccgcgaagggggcgcaccgggcggagccggagccctgcaactgccccgcgaagagggcgatcgctctcaagacgtgtggcaatggatgctggaaagtgaacggcagagtaagcccaagccccacagcgcccagagtaccaaaaaagcatacccccttgagtccgcccgcagcagtcctggggagagagcatcccgccatcatctctggggtggaaattctggccatccgcggaccaccccaagagcgcatctattcactcaagatccagccatgccacccctcacgccgccaaacacactagcacagttggaagaggcctgtcgccggctagccgaggtgagtaaacccccgaagcagcgctgttgcgtggccagtcagcagagagatcggaatcactccgccaccgttcagacaggggcaaccccatttagtaacccttctctggctcccgaggatcacaaagagcctaaaaaactcgctggtgtgcacgcactgcaggcatcagagctggttgttacctattttttttgcggcgaggagataccctataggcgcatgctgaaagctcagtccttgaccctagggcattttaaggaacagctgtccaaaaaaggtaactaccgctactatttcaagaaggcaagcgatgaattcgcctgcggagccgtctttgaagagatttgggaagacgagacggtgctgccaatgtatgagggccgcatactgggcaaggtcgaaagaatcgactag

SEQ ID NO: 318116 - DNA, 2532 bp, Artificial Sequence
  derived and/or modified sequence
atgagcagcgccatgctggtgacctgcctgcctgaccccagcagcagcttcagagaagatgccccccggccccctgtgcctggagaggagggggagaccccaccctgccagcccggggtgggcaagggccaggtgaccaagcccatgcctgtgagcagcaacaccaggagaaatgaagatggcctgggggagcctgagggccgggccagcccagacagccccctgacccgctggaccaagagcctgcacagcctgctgggggaccaggatggagcctacctgttccgcaccttcctggagcgggagaagtgtgtggacaccctggacttctggtttgcctgcaatggcttccggcagatgaacctgaaggacaccaagaccctgcgggtggccaaggccatctacaagcgctacatcgagaacaacagcatcgtgtccaagcagctgaagccagccaccaagacctacatcagagatggcatcaagaagcagcagattgacagcatcatgtttgaccaggcccagacagagatccagagcgtgatggaggagaatgcctaccagatgttcctgaccagtgacatctacctggagtatgtgcgctctggaggagaaaatacagcctacatgagcaatggaggcctgggcagcctgaaggtggtgtgtggctacctgcccaccctgaatgaggaggaggagtggacctgtgccgacttcaagtgcaagctgagccccaccgtggtgggcctgagcagcaagaccctgcgggccacagcctctgtgcgcagcacagagaccgtggacagcggctaccgctccttcaagagaagtgaccctgtgaacccctaccacatcggcagcggctacgtgtttgccccagccaccagcgccaatgacagcgagatcagcagtgatgccctgacagatgacagcatgtccatgacagacagctctgtggatggcatccccccctacagagtgggcagcaagaagcagctgcagcgggagatgcacaggtctgtgaaggccaacggccaggtgtccctgccccacttccccaggacccaccggctgcccaaggagatgacccctgtggagcccgccacctttgctgctgagctgatcagccggctggagaagctgaagctggagctggagagccgccacagcctggaggagcggctgcagcagatccgggaggatgaggagcgggagggcagcgagctgaccctgaacagccgggagggcgcccccacccagcaccccctgagcctgctgcccagcggcagctatgaggaggacccccagaccatcctggatgaccacctgagccgggtgctgaagaccccaggctgccagagccctggggtgggccgctacagccccaggagccgcagcccagaccaccaccaccaccaccacagccagtaccacagcctgctgcccccaggcggcaagctgcccccagctgctgccagccctggggcctgccccctgctgggcggcaaaggatttgtgaccaagcagaccaccaagcacgtgcaccaccactacatccaccaccacgctgtgcccaagaccaaggaggagattgaagctgaggccacccagagggtgcactgcttctgccctgggggcagcgagtactactgctacagcaagtgcaagagccacagcaaggcccctgagaccatgcccagcgagcagtttggaggcagccggggcagcaccctgcccaagagaaatggcaagggcacagagcccggcctggccctgcctgcccgggagggcggggcccctgggggcgctggggccctgcagctgccccgggaggagggggacaggagccaggatgtgtggcagtggatgctggagagcgagcggcagagcaagcccaagccccacagcgcccagagcaccaagaaggcctaccccctggagagcgcccggagcagccctggagagcgggccagccgccaccacctgtggggcggcaacagcggccaccccaggaccaccccccgggcccacctgttcacccaggaccctgccatgccacccctgaccccacccaacaccctggcccagctggaggaggcctgccggcggctggccgaggtgtccaagccacccaagcagcgctgctgcgtggccagccagcagagggacaggaaccacagcgccaccgtgcagacaggagccacccccttcagcaaccccagcctggcccctgaggaccacaaggagcccaagaagctggccggcgtgcacgccctgcaggccagcgagctggtggtgacctacttcttctgtggggaggagatcccctacagaaggatgctgaaggcccagagcctgaccctgggccacttcaaggagcagctgagcaagaagggcaactaccgctactacttcaagaaggccagtgatgaatttgcctgtggggctgtgtttgaggagatctgggaggatgagaccgtgctgcccatgtatgagggccgcatcctgggcaaggtggagagaattgattag

SEQ ID NO: 318117 - DNA, 2532 bp, Artificial Sequence
  derived and/or modified sequence
atgagcagcgccatgctggtgacctgcctgcccgaccccagcagcagctttagggaggatgctccgaggccgccagttccaggagaagagggcgagaccccgccgtgccagccgggcgtgggcaaagggcaggtgacaaagcccatgcctgtgtcttccaacacgagaaggaacgaggatggcctgggagagccggagggcagagcctcccctgactcccccttaacaagatggaccaagtctctgcattcactattgggagaccaggatggagcctaccttttccgaacatttctggagagggaaaagtgtgtggacactcttgacttctggtttgcttgtaacggctttcgtcagatgaatctcaaagatactaagaccctgcgagtggcaaaagccatttacaaacggtatatagagaataatagcatcgtgtcaaagcagctgaaaccggcaactaagacatacatccgagacgggattaagaagcagcaaatagattctattatgtttgatcaagctcagactgagattcagagcgttatggaggagaatgcttatcagatgttcctgacctccgacatttatttggagtacgtccgatctggaggcgaaaacacagcatacatgtctaatggaggtctggggagtctcaaagtggtctgcggttacctccctacactaaacgaagaagaggagtggacctgtgcagactttaaatgtaaactgtcgccgaccgtcgttgggttgtcttcaaaaaccttgcgtgctaccgcaagcgtgcgaagtacagaaactgtcgactctggatatcgttctttcaagcgatccgatcccgtcaacccttaccatatcggctctggttatgtgttcgcccccgccacctccgccaacgactcagagattagctccgacgcccttaccgacgatagtatgtcgatgaccgactctagcgtggacggcatccctccctatcgcgttgggagcaagaagcagctacagagggaaatgcatagatcagtgaaagctaacggacaggtgtcgctgcctcacttcccgcgcacacacaggttgcccaaagaaatgacccccgtggaaccagctacttttgccgcagagctgatcagccgtctggagaaactgaaactggagctagaatctagacactctctggaggaacgcctgcagcagatcagggaggatgaggaaagggagggcagtgaactgactttaaattcccgcgagggcgctcctacccagcaccccctctctctgctgccatcagggtcatacgaggaggaccctcagaccatcctcgatgaccatctatccagggtgttgaagaccccagggtgtcaatctccgggggtgggccggtactccccgagatccagaagccctgaccatcatcatcatcaccactcgcagtaccactctttactaccccctggcgggaaactgccacccgccgccgcctccccaggagcttgtccactcttaggcggaaaaggatttgttaccaagcaaactactaagcatgtgcaccaccactacattcatcatcatgctgtgccaaaaacgaaagaggagatcgaagccgaggcaacacaaagggtccactgtttttgcccgggaggctcggagtactactgctactccaagtgcaagtcgcacagcaaagccccagaaaccatgcctagcgagcagttcggaggctcacggggctcaacactcccaaagaggaacggaaaggggacggagccgggtttggctctgccagctagggaaggcggggcccctgggggcgccggcgccctccagctcccgcgagaagagggcgataggtcccaagacgtgtggcagtggatgctggagtctgagcgacagagtaaacctaaaccacacagtgcccagtctacaaagaaagcttatccattagaatctgccagatcaagcccaggagagcgagcttcaagacatcacctgtgggggggaaattccgggcacccccgtactactccaagagcacatctgttcactcaggaccccgcaatgccacctcttaccccacctaatacattagctcagcttgaagaggcttgtcgcagactcgctgaggtttctaagccaccaaaacagcgatgttgcgttgcttctcaacagcgggacaggaatcattcagcgaccgtccaaacaggggccactcccttttctaaccccagcctggctcctgaggatcacaaggagcccaaaaaacttgccggagtgcacgcactgcaagctagcgaactggtcgtgacctacttcttttgcggcgaagaaatcccttacagaagaatgctgaaagcacaatcgctgactctcgggcattttaaggaacagttatcaaagaagggtaactatcgctattatttcaagaaggcaagcgacgagttcgcctgcggggctgtcttcgaagagatctgggaagacgagactgtcttgcccatgtatgagggcaggattttgggtaaagtggagcggattgactag

SEQ ID NO: 318118 - DNA, 2532 bp, Artificial Sequence
  derived and/or modified sequence
atgagtagtgcgatgttggtgacctgtttacctgacccaagctcctcctttagagaggacgctccaaggcctcccgtgccaggcgaggagggcgaaaccccaccttgccaacctggtgtgggcaaggggcaagttacgaagcctatgcccgtgtctagcaatacgagaagaaatgaagatgggttgggtgaaccggagggcagagccagccccgattcgccactgacacgctggaccaaatcactgcacagcttactcggagatcaagatggtgcttacctgtttagaacctttttggagagggaaaagtgcgtggacactctggatttttggttcgcatgcaacggtttcaggcagatgaacttgaaggacaccaagactctgcgagttgcaaaagctatctacaagaggtacatagaaaataactcgatcgtgtccaagcagctgaagcctgccaccaaaacatatatcagggatggcatcaagaagcaacagatcgattcgattatgtttgaccaggcgcagacagagatacaaagtgttatggaggaaaatgcctaccaaatgtttttgacctcagacatttaccttgagtacgtccgaagcggaggggagaacacagcctacatgagtaacgggggactaggtagcctgaaagtggtgtgtgggtacctgcctacccttaatgaggaagaggagtggacctgcgcagactttaagtgtaagctgtcaccgactgtcgtgggcttgagcagcaaaactcttagggcaaccgcctccgtgcggagtaccgaaaccgtcgactctgggtatcggtcttttaaacgatcagaccccgtgaacccttaccatatcggttccgggtacgtgttcgccccagccacgtccgctaatgattccgaaatctcctctgatgccctgacggatgatagcatgtccatgaccgattcaagcgtcgatgggataccgccatatagagtcggtagcaaaaagcagctgcagcgagaaatgcatcgatctgtgaaggcaaatgggcaagtgtctctcccgcactttccgaggacccacaggcttcctaaggaaatgacacccgtggagcctgcaacgttcgcagctgagttaatctctagattggaaaagcttaagttagagctggaatcgcgtcactccctggaggagcgtttacagcagataagggaagacgaagagcgcgaggggtctgaactgaccttgaattcccgcgaaggtgccccaacacagcatcccttgtccttgcttccctctgggtcatacgaggaggatccccagaccattctcgatgaccatctctctagagtgctgaaaactcctggctgtcagagtccaggcgtcgggcgttattcaccacgatcacggtctcctgatcatcatcatcatcaccacagccagtaccacagtctcctgccacccggtggaaaactgcccccagccgctgcctctcccggtgcctgtcccctcctgggcggaaagggatttgtgacgaaacagaccacgaagcacgtccatcaccattacatacaccaccacgcagtccccaagacgaaagaggaaattgaagccgaagctacacaaagagtccattgtttctgcccaggtggctccgagtattactgttattccaagtgcaagagccatagcaaagccccagaaactatgccaagtgagcagtttggcggatctaggggctcaaccctccccaagaggaatggtaaaggaaccgagcctggcttagcactccccgcaagagagggcggagctcccggaggagccggtgcgctgcaattgccacgggaggagggcgacagatctcaggatgtgtggcagtggatgttggaatcagaacggcagagcaagccaaaacctcattccgcccaatcgaccaagaaggcgtaccccctcgagtcggcacggagtagtcctggagaacgagcatctaggcaccacctctgggggggaaactccggccaccccaggactacgccaagggcccacctcttcacacaggatcctgctatgcccccactcacaccacccaacacactcgcccaactcgaggaggcatgccgcaggctggcagaagtgtctaagccacctaagcagaggtgctgtgtcgcctctcagcaacgcgataggaatcatagcgctaccgtgcagacaggcgctaccccgttctctaacccaagcctggcacctgaagatcacaaagagccaaagaagctagctggcgttcatgccctgcaggctagtgagctggtcgtaacctatttcttttgcggagaggagataccataccggcgaatgctcaaggcgcagtccctcacactggggcactttaaagagcagctgtctaaaaagggaaactaccgttactattttaagaaggccagtgatgaatttgcctgtggggctgtcttcgaggaaatctgggaggatgaaactgtgctgccaatgtacgaaggccgaattctcggcaaggtcgagcgaatcgactag

SEQ ID NO: 318119 - DNA, 4255 bp, Artificial Sequence
  derived and/or modified sequence
cggctgtgattggcgcggcgggatcactggctccgcgagcctggcccgggggagtcggctggagccggctgcgctttgataaggtcctggcaactcagtaacagcccgagagccgggaaataaaaataacccctcagagcgatggatttcggggccgcccggcggccgaggcgcccgccgaaggccctgctgtaaaagagaggaggttcagatgagcccctgctgacttgagagagacagagagaccacgccgattgctgagaggaactggaagaagaaaaattcccagactcagtgggaagagctccctcaccatgagtagcgctatgttggtgacttgcctcccggaccccagcagcagcttccgtgaggatgccccgcggcccccagtgccaggggaagaaggggagaccccaccgtgtcagccaggggtgggcaagggccaggtcaccaaacccatgcctgtctcttccaacaccaggcggaacgaagatgggttgggggagccggaggggcgggcatctccggattcccctctgacccggtggaccaagtccttacactccttattgggcgatcaagacggtgcttacctgttccgaactttcctggagagggagaaatgcgtggataccttagacttctggtttgcctgcaatggattcaggcagatgaacctgaaggataccaaaactttacgagtagccaaagcgatctacaaaaggtacattgagaacaacagcattgtctccaagcagctgaagcctgccaccaagacctacataagagatggcatcaagaagcagcagattgattccatcatgtttgaccaggcgcagaccgagatccagtcggtgatggaggaaaatgcctaccagatgtttttgacttctgatatatacctcgaatatgtgaggagtgggggagaaaacacagcttacatgagtaatgggggactcgggagcctaaaggtcgtgtgtggctatctccccaccttgaatgaagaagaggagtggacttgtgccgacttcaagtgcaaactttcgccaaccgtggttggcttgtccagcaaaactctgagggccacggcgagtgtgaggtccacggaaactgttgacagtggatacaggtccttcaagaggagcgatcctgttaatccttatcacataggttctggctatgtctttgcaccagccaccagcgccaacgacagtgagatatccagtgatgcgctgacggatgattccatgtccatgacggacagcagtgtagatggaattcctccttatcgtgtgggcagtaagaaacagctccagagagaaatgcatcgcagtgtgaaggccaatggccaagtgtctctacctcatttcccgagaacccaccgcctgcccaaggagatgacccccgtggaacccgccacctttgcagctgagctgatctcgaggctggaaaagctgaagctggagttggagagccgccacagcctggaggagcgcctgcagcagatccgagaggatgaagagagagagggctccgagctcacactcaattcgcgggagggggcgcccacgcagcaccccctctccctactgccctccggcagctacgaggaagacccgcagacgatactggacgatcacctgtccagggtcctcaagacccctggctgccagtctccaggcgtaggccgctatagcccccgctcccgctccccggaccaccaccaccaccaccattcgcagtaccactccctgctcccgcccggtggcaagctgcctcccgcggccgcctcgccgggcgcctgccccctcctcgggggcaaaggctttgtgaccaagcagacgacgaagcatgtccaccaccactacatccaccaccatgccgtccccaagaccaaggaggagatcgaggcggaggccacgcagcgggtgcactgcttctgccctgggggcagcgagtattactgctactcgaaatgcaaaagccactccaaggctccggaaaccatgcccagcgagcagtttggcggcagcagaggcagtaccttgcccaaacgcaatgggaaaggcacggagccgggcctggccctgcccgccagggaaggaggggcccccggcggagctggggccctgcagcttccccgggaggaaggagacaggtcgcaggatgtctggcagtggatgctggagagtgagcggcagagcaagcccaagccccatagtgcccaaagcacaaaaaaggcctaccccttggagtctgcccgctcgtctccaggcgaacgagccagccggcaccatctgtgggggggcaacagcgggcacccccgcaccaccccccgtgcccacctgttcacccaggaccctgcgatgcctcccctgaccccacccaacacgctggctcagctggaggaggcctgtcgcaggctagctgaggtgtcgaagcccccaaagcagcggtgctgtgtggccagtcagcagagggacaggaatcattcggccactgttcagacgggagccacacccttctccaatccaagcctggctccagaagatcacaaagagccaaagaaactggcaggtgtccacgcgctccaggccagtgagttggttgtcacttactttttctgtggggaagaaattccataccggaggatgctgaaggctcagagcttgaccctgggccactttaaagagcagctcagcaaaaagggaaattataggtattacttcaaaaaagcaagcgatgagtttgcctgtggagcggtgtttgaggagatctgggaggatgagacggtgctcccgatgtatgaaggccggattctgggcaaagtggagcggatcgattgagccctggggtctggctttggtgaactgttggagcccgaagctcttgtgaactgtcttggctgtgagcaactgcgacaaaacattttgaaggaaaattaaaccaatgaagaagacaaagtctaaggaagaatcggccagtgggccttcgggagggcggggggaggttgattttcatgattcatgagctgggtactgactgagataagaaaagcctgaactatttattaaaaacatgaccactcttggctattgaagatgctgcctgtatttgagagactgccatacataatatatgacttcctagggatctgaaatccataaactaagagaaactgtgtatagcttacctgaacaggaatccttactgatatttatagaacagttgatttcccccatccccagtttatggatatgctgctttaaacttggaagggggagacaggaagttttaattgttctgactaaacttaggagttgagctaggagtgcgttcatggtttcttcactaacagaggaattatgctttgcactacgtccctccaagtgaagacagactgttttagacagactttttaaaatggtgccctaccattgacacatgcagaaattggtgcgttttgtttttttttttcctatgctgctctgttttgtcttaaaggtcttgagggttgaccatgttgcgtcatcatcaacattttgggggttgtgttggatgggatgatctgttgcagagggagaggcagggaaccctgctccttcgggccccaggttgatcctgtgactgaggctccccctcatgtagcctccccaggcccagggccctgaggcctgctagaatcactgccgctgtgctttcgtggaaatgacagttccttgttttttttgtttctgtttttgttttacattagtcattggaccacagccattcaggaactaccccctgccccacaaagaaatgaacagttgtagggagacccagcagcacctttcctccacacaccttcattttgatgttcgggtttttgtgttaagttaatctgtacattctgtttgccattgttacttgtactatacatctgtatatagtgtacggcaaaagagtattaatccactatctctagtgcttgactttaaatcagtacagtacctgtacctgcacggtcacccgctccgtgtgtcgccctatattgagggctcaagctttcccttgttttttgaaaggggtttatgtataaatatattttatgcctttttattacaagtcttgtactcaatgacttttgtcatgacattttgttctacttatactgtaaattatgcattataaagagttcatttaaggaaaattacttggtacaataattattgtaattaagagatgtagcctttattaaaattttatatttttc

SEQ ID NO: 318120 - DNA, 2532 bp, Artificial Sequence
  derived and/or modified sequence
atgagcagcgccatgctggtgacctgcctgcccgaccccagcagcagcttcagagaggacgcccccagaccccccgtgcccggcgaggagggcgagacccccccctgccagcccggcgtgggcaagggccaggtgaccaagcccatgcccgtgagcagcaacaccagaagaaacgaggacggcctgggcgagcccgagggcagagccagccccgacagccccctgaccagatggaccaagagcctgcacagcctgctgggcgaccaggacggcgcctacctgttcagaaccttcctggagagagagaagtgcgtggacaccctggacttctggttcgcctgcaacggcttcagacagatgaacctgaaggacaccaagaccctgagagtggccaaggccatctacaagagatacatcgagaacaacagcatcgtgagcaagcagctgaagcccgccaccaagacctacatcagagacggcatcaagaagcagcagatcgacagcatcatgttcgaccaggcccagaccgagatccagagcgtgatggaggagaacgcctaccagatgttcctgaccagcgacatctacctggagtacgtgagaagcggcggcgagaacaccgcctacatgagcaacggcggcctgggcagcctgaaggtggtgtgcggctacctgcccaccctgaacgaggaggaggagtggacctgcgccgacttcaagtgcaagctgagccccaccgtggtgggcctgagcagcaagaccctgagagccaccgccagcgtgagaagcaccgagaccgtggacagcggctacagaagcttcaagagaagcgaccccgtgaacccctaccacatcggcagcggctacgtgttcgcccccgccaccagcgccaacgacagcgagatcagcagcgacgccctgaccgacgacagcatgagcatgaccgacagcagcgtggacggcatccccccctacagagtgggcagcaagaagcagctgcagagagagatgcacagaagcgtgaaggccaacggccaggtgagcctgccccacttccccagaacccacagactgcccaaggagatgacccccgtggagcccgccaccttcgccgccgagctgatcagcagactggagaagctgaagctggagctggagagcagacacagcctggaggagagactgcagcagatcagagaggacgaggagagagagggcagcgagctgaccctgaacagcagagagggcgcccccacccagcaccccctgagcctgctgcccagcggcagctacgaggaggacccccagaccatcctggacgaccacctgagcagagtgctgaagacccccggctgccagagccccggcgtgggcagatacagccccagaagcagaagccccgaccaccaccaccaccaccacagccagtaccacagcctgctgccccccggcggcaagctgccccccgccgccgccagccccggcgcctgccccctgctgggcggcaagggcttcgtgaccaagcagaccaccaagcacgtgcaccaccactacatccaccaccacgccgtgcccaagaccaaggaggagatcgaggccgaggccacccagagagtgcactgcttctgccccggcggcagcgagtactactgctacagcaagtgcaagagccacagcaaggcccccgagaccatgcccagcgagcagttcggcggcagcagaggcagcaccctgcccaagagaaacggcaagggcaccgagcccggcctggccctgcccgccagagagggcggcgcccccggcggcgccggcgccctgcagctgcccagagaggagggcgacagaagccaggacgtgtggcagtggatgctggagagcgagagacagagcaagcccaagccccacagcgcccagagcaccaagaaggcctaccccctggagagcgccagaagcagccccggcgagagagccagcagacaccacctgtggggcggcaacagcggccaccccagaaccacccccagagcccacctgttcacccaggaccccgccatgccccccctgaccccccccaacaccctggcccagctggaggaggcctgcagaagactggccgaggtgagcaagccccccaagcagagatgctgcgtggccagccagcagagagacagaaaccacagcgccaccgtgcagaccggcgccacccccttcagcaaccccagcctggcccccgaggaccacaaggagcccaagaagctggccggcgtgcacgccctgcaggccagcgagctggtggtgacctacttcttctgcggcgaggagatcccctacagaagaatgctgaaggcccagagcctgaccctgggccacttcaaggagcagctgagcaagaagggcaactacagatactacttcaagaaggccagcgacgagttcgcctgcggcgccgtgttcgaggagatctgggaggacgagaccgtgctgcccatgtacgagggcagaatcctgggcaaggtggagagaatcgactag

SEQ ID NO: 318121 - protein, 778 aa, Artificial Sequence
  derived and/or modified sequence
MSSAMLVTCLPDPSSSFREDAPRPPVPGEEGETPPCQPGVGKGQVTKPMPVSSNTRRNEDGLGEPEGRASPDSPLTRWTKSLHSLLGDQDGAYLFRTFLEREKCVDTLDFWFACNGFRQMNLKDTKTLRVAKAIYKRYIENNSIVSKQLKPATKTYIRDGIKKQQIDSIMFDQAQTEIQSVMEENAYQMFLTSDIYLEYVRSGGENTAYMSNGGLGSLKVVCGYLPTLNEEEEWTCADFKCKLSPTVVGLSSKTLRATASVRSTETVDSGYRSFKRSDPVNPYHIGSGYVFAPATSANDSEISSDALTDDSMSMTDSSVDGIPPYRVGSKKQLQREMHRSVKANGQVSLPHFPRTHRLPKEMTPVEPATFAAELISRLEKLKLELESRHSLEERLQQIREDEEREGSELTLNSREGAPTQHPLSLLPSGSYEEDPQTILDDHLSRVLKTPGCQSPGVGRYSPRSRSPDHHHHHHSQYHSLLPPGGKLPPAAASPGACPLLGGKGFVTKQTTKHVHHHYIHHHAVPKTKEEIEAEATQRVHCFCPGGSEYYCYSKCKSHSKAPETMPSEQFGAQSTKKAYPLESARSSPGERASRHHLWGGNSGHPRTTPRAHLFTQDPAMPPLTPPNTLAQLEEACRRLAEVSKPPKQRCCVASQQRDRNHSATVQTGATPFSNPSLAPEDHKEPKKLAGVHALQASELVVTYFFCGEEIPYRRMLKAQSLTLGHFKEQLSKKGNYRYYFKKASDEFACGAVFEEIWEDETVLPMYEGRILGKVERID

SEQ ID NO: 318122 - protein, 160 aa, Artificial Sequence
  derived and/or modified sequence
MSSAMLVTCLPDPSSSFREDAPRPPVPGEEGETPPCQPGVGKGQVTKPMPVSSNTRRNEDGLGEPEGRASPDSPLTRWTKSLHSLLGDQDGAYLFRTFLEREKCVDTLDFWFACNGFRQMNLKDTKTLRVVNDFCHDILFYLYCKLCIIKSSFKENYLVQ

SEQ ID NO: 318123 - DNA, 2337 bp, Artificial Sequence
  derived and/or modified sequence
atgagctctgccatgctggtcacgtgcctgccagatccttccagtagcttcagggaagacgcccctcggccccccgtccctggagaggaaggtgaaacccctccctgtcagcctggagtgggtaaaggccaggtaacaaagcccatgcccgtgagcagtaataccagacgcaacgaggacgggttgggcgaacctgagggacgggcctcacctgacagccctctgactagatggacaaagagcctacatagcctactcggcgaccaggatggcgcgtacttgtttcggacattcctggagcgggaaaagtgtgtagacacgcttgatttctggtttgcctgcaacggctttagacagatgaacctgaaggatacaaagaccctgagagtggctaaggctatctataagagatacatagaaaataatagcatagttagtaaacaactgaaacctgctactaaaacttatatccgcgatggtatcaagaagcagcagatcgattcaataatgttcgaccaggcccagaccgaaatacagagcgtgatggaggaaaatgcataccagatgtttctgaccagcgacatttatctggagtacgtgcgatcaggcggcgaaaataccgcttatatgagtaatggcggattagggagcctgaaagtagtgtgcggttaccttcccaccctcaacgaggaggaagagtggacatgtgcagacttcaagtgtaaactctcacctaccgtagtcgggttgagcagtaaaacgttacgggccacagcaagtgtcagatcaactgaaactgttgactccggctaccggtcgttcaagcggtcagacccagtaaatccataccacattggatcagggtatgtgttcgctcccgcgacttccgctaatgatagcgaaatttcctctgatgctctgaccgatgactccatgagtatgaccgacagctctgtcgacggaattcctccatatcgggtgggcagtaagaaacaactccaacgcgagatgcacaggtctgtaaaggctaacggtcaggtttctctgccccattttccgcggacacatagactgcccaaagaaatgactccagtggaacctgccaccttcgccgctgagttaatttcacgtcttgaaaagttaaagctggaactcgagtctcgacacagtttggaggaaaggttacaacaaattcgggaggacgaagaaagagagggatccgaactcactttgaactcacgcgagggcgccccaacacagcatcccctgtcgctactgccaagcggctcatacgaggaagatccccagacgatactggatgaccatctatctcgggttctgaagactccaggttgtcagtctcccggggtcgggcgctatagcccaagatcaagatctcccgatcaccatcaccaccatcacagccaataccattctttactacccccagggggtaaattgcccccagcagccgcttctccaggcgcatgtcccttactggggggcaagggctttgttaccaagcagaccactaagcatgtccaccaccactatatacaccaccacgccgtgccaaagacaaaggaagagattgaggcggaggcaactcagcgagtgcactgcttctgcccgggcgggtccgagtattattgttattcaaagtgcaagtctcacagcaaagcccccgagaccatgccctccgaacaatttggtgcccagtcaacaaagaaggcctaccccctcgaaagcgccaggagtagtccaggagagcgcgcctcgcggcatcacctttggggcggcaacagcggacacccccggacaaccccccgggcccatctctttacccaggatcccgccatgcccccactgaccccccctaacacccttgcgcagctcgaggaagcatgtagacgactggccgaggtgagtaaaccgccaaagcagagatgctgcgttgcctcgcagcagcgggacaggaatcattcagccacagtgcagacaggagctacccccttttcaaatcccagcctcgcacctgaggatcacaaagagcccaaaaaactcgcaggcgtacacgcacttcaggctagcgaactcgtcgttacctactttttctgcggagaggagattccatatcggcgcatgcttaaagcacagagtctaaccttggggcactttaaggagcagctgagtaagaagggaaattaccggtattatttcaagaaagcgagcgatgagttcgcctgcggagccgtgtttgaagagatctgggaagatgagaccgtgctgcctatgtacgagggccgaatcttgggcaaagtcgagcgtatcgactag

SEQ ID NO: 318124 - DNA, 483 bp, Artificial Sequence
  derived and/or modified sequence
atgtcctccgcgatgctggtcacttgcctcccagacccctcttccagttttcgtgaagacgctcctcgccctcctgtgccaggcgaggagggagagacccccccgtgccaaccaggcgttggaaagggtcaggtcaccaaacccatgcctgtgtcgtctaacaccaggcgaaatgaggacggcctgggggaaccggaggggcgcgcatctcccgatagcccactcacacgttggacgaaatctctccacagccttcttggagatcaggatggagcttacctgtttcgtacttttcttgaacgtgagaaatgtgtcgacactctggacttctggttcgcttgtaacggattccggcagatgaatttaaaagataccaaaacgttgcgcgtggtcaacgatttctgccatgatattttgttctatctctattgtaagctgtgcatcatcaagagctccttcaaggaaaactacctggtgcagtag

SEQ ID NO: 318125 - DNA, 2337 bp, Artificial Sequence
  derived and/or modified sequence
atgagcagcgccatgctggtgacctgcctgcctgaccccagcagcagcttcagagaagatgccccccggccccctgtgcctggagaggagggggagaccccaccctgccagcccggggtgggcaagggccaggtgaccaagcccatgcctgtgagcagcaacaccaggagaaatgaagatggcctgggggagcctgagggccgggccagcccagacagccccctgacccgctggaccaagagcctgcacagcctgctgggggaccaggatggagcctacctgttccgcaccttcctggagcgggagaagtgtgtggacaccctggacttctggtttgcctgcaatggcttccggcagatgaacctgaaggacaccaagaccctgcgggtggccaaggccatctacaagcgctacatcgagaacaacagcatcgtgtccaagcagctgaagccagccaccaagacctacatcagagatggcatcaagaagcagcagattgacagcatcatgtttgaccaggcccagacagagatccagagcgtgatggaggagaatgcctaccagatgttcctgaccagtgacatctacctggagtatgtgcgctctggaggagaaaatacagcctacatgagcaatggaggcctgggcagcctgaaggtggtgtgtggctacctgcccaccctgaatgaggaggaggagtggacctgtgccgacttcaagtgcaagctgagccccaccgtggtgggcctgagcagcaagaccctgcgggccacagcctctgtgcgcagcacagagaccgtggacagcggctaccgctccttcaagagaagtgaccctgtgaacccctaccacatcggcagcggctacgtgtttgccccagccaccagcgccaatgacagcgagatcagcagtgatgccctgacagatgacagcatgtccatgacagacagctctgtggatggcatccccccctacagagtgggcagcaagaagcagctgcagcgggagatgcacaggtctgtgaaggccaacggccaggtgtccctgccccacttccccaggacccaccggctgcccaaggagatgacccctgtggagcccgccacctttgctgctgagctgatcagccggctggagaagctgaagctggagctggagagccgccacagcctggaggagcggctgcagcagatccgggaggatgaggagcgggagggcagcgagctgaccctgaacagccgggagggcgcccccacccagcaccccctgagcctgctgcccagcggcagctatgaggaggacccccagaccatcctggatgaccacctgagccgggtgctgaagaccccaggctgccagagccctggggtgggccgctacagccccaggagccgcagcccagaccaccaccaccaccaccacagccagtaccacagcctgctgcccccaggcggcaagctgcccccagctgctgccagccctggggcctgccccctgctgggcggcaaaggatttgtgaccaagcagaccaccaagcacgtgcaccaccactacatccaccaccacgctgtgcccaagaccaaggaggagattgaagctgaggccacccagagggtgcactgcttctgccctgggggcagcgagtactactgctacagcaagtgcaagagccacagcaaggcccctgagaccatgcccagcgagcagtttggagcccagagcaccaagaaggcctaccccctggagagcgcccggagcagccctggagagcgggccagccgccaccacctgtggggcggcaacagcggccaccccaggaccaccccccgggcccacctgttcacccaggaccctgccatgccacccctgaccccacccaacaccctggcccagctggaggaggcctgccggcggctggccgaggtgtccaagccacccaagcagcgctgctgcgtggccagccagcagagggacaggaaccacagcgccaccgtgcagacaggagccacccccttcagcaaccccagcctggcccctgaggaccacaaggagcccaagaagctggccggcgtgcacgccctgcaggccagcgagctggtggtgacctacttcttctgtggggaggagatcccctacagaaggatgctgaaggcccagagcctgaccctgggccacttcaaggagcagctgagcaagaagggcaactaccgctactacttcaagaaggccagtgatgaatttgcctgtggggctgtgtttgaggagatctgggaggatgaaacagtgctgcccatgtatgagggccgcatcctgggcaaggtggagagaattgattag

SEQ ID NO: 318126 - DNA, 483 bp, Artificial Sequence
  derived and/or modified sequence
atgagcagcgccatgctggtgacctgcctgcctgaccccagcagcagcttcagagaagatgccccccggccccctgtgcctggagaggagggggagaccccaccctgccagcccggggtgggcaagggccaggtgaccaagcccatgcctgtgagcagcaacaccaggagaaatgaagatggcctgggggagcctgagggccgggccagcccagacagccccctgacccgctggaccaagagcctgcacagcctgctgggggaccaggatggagcctacctgttccgcaccttcctggagcgggagaagtgtgtggacaccctggacttctggtttgcctgcaatggcttccggcagatgaacctgaaggacaccaagaccctgcgggtggtgaatgacttctgccacgacatcctcttctacctgtactgcaagctgtgcatcatcaagagcagcttcaaggagaactacctggtgcagtag

SEQ ID NO: 318127 - DNA, 2337 bp, Artificial Sequence
  derived and/or modified sequence
atgagcagcgccatgctggtgacctgcctgcccgaccccagcagctctttccgtgaggacgccccacggcccccagtccctggagaggagggtgaaactcccccctgtcagccgggcgtaggcaaggggcaagtcaccaagcccatgccggtaagctctaatactcgcagaaatgaggacgggctgggcgaacccgaaggcagggccagccccgattcacccctgacgaggtggacaaagagccttcattccctcttgggggaccaggacggagcctacttattcagaactttcttagaacgcgagaaatgtgtggatacactcgatttttggtttgcatgtaatgggttcaggcaaatgaacctcaaagataccaagacccttcgcgtcgcgaaggccatatacaagagatacatcgagaataatagcatcgtatctaagcagctgaaacctgcgaccaagacctacattagagatgggatcaaaaaacagcagattgacagtattatgttcgaccaggctcagaccgagattcaatcggtgatggaagaaaacgcgtaccagatgttcctgacctcggatatttacctggagtacgttagatctggcggagaaaatactgcctatatgagcaacggaggtttgggcagccttaaagtagtgtgtgggtacctcccaactctgaacgaagaagaagaatggacctgtgccgacttcaagtgtaagctttccccgaccgtggtgggcctcagctccaagactctaagagccacggctagcgtgcgctctacagaaaccgtggacagtggctaccgctcatttaagcgcagtgatcctgtcaatccgtatcacattgggtccgggtatgtttttgctccggcaacatcagccaatgatagcgagatctcaagcgatgcattaacagatgacagtatgtcaatgacagattccagcgttgacgggatccccccttatcgtgtgggctctaaaaagcaactgcagcgcgagatgcacagatctgtgaaggcaaacggtcaggtgagcttgcctcacttccctagaacacacagactgccaaaagaaatgaccccagtggagccagcgacttttgcagctgaactgattagcagactcgagaagctgaaactcgaattagagtcacgccactccctcgaagaaaggctgcagcagattcgagaggacgaagaaagggaggggagcgagctcaccctcaattcacgcgagggagcgcccacacagcaccccctgtcactgctcccatcaggcagctacgaggaagacccacagaccattctggatgatcatctctctagagtgctaaagacacccggctgccagagccctggggtgggccgctatagccctaggagtaggtctcctgaccatcaccaccaccatcattctcaatatcattcgctgctgccaccaggtggaaaactgccccccgctgctgctagtccgggagcgtgtccgctattgggaggaaagggatttgttaccaagcagactactaaacatgttcatcaccattacatacatcaccatgccgtgcccaaaaccaaagaggaaatcgaggctgaggcgactcagcgggttcattgcttttgtcctggcggatccgagtactactgctatagtaagtgcaaatcccacagtaaggcccctgagaccatgcccagcgaacagtttggggcacagagcacaaagaaggcctatcctctggaatccgctagatcttcaccgggtgaacgcgcttccaggcatcacctgtggggagggaatagcggccacccacgaactaccccccgggcccacctgtttacccaggatccggctatgcccccactcacacctccgaatacattggctcagctggaggaagcctgccggaggcttgccgaggtctcgaaacctccaaaacaacgctgctgcgtcgcctctcagcagcgagacagaaatcatagcgctaccgtacagactggagcaacaccattcagcaatccttcactcgccccagaggaccataaagagcccaaaaaactggcaggagttcatgccttgcaggcctcagaactggtggtcacatacttcttctgtggggaggagattccctatcgacgtatgctcaaggctcagtcattgaccctaggacactttaaagagcagctgtcaaaaaaaggaaattaccggtattattttaaaaaggcctcggacgagtttgcgtgcggcgccgttttcgaagagatctgggaagatgaaacagtgctgcccatgtacgaaggacggattctaggaaaggtggaaagaatcgactag

SEQ ID NO: 318128 - DNA, 483 bp, Artificial Sequence
  derived and/or modified sequence
atgagcagcgccatgctggtgacctgcctgcccgaccccagcagcagctttcgcgaagatgctcctaggccaccagtgcctggggaagaaggtgaaaccccaccttgccagccaggcgtgggaaaaggccaagtgactaaacccatgccagtgagctccaacaccagacggaacgaagacggattaggcgaaccagaggggagagccagtcctgatagtcccctgacccgctggaccaaaagtctacattccctgctaggagatcaggacggtgcttatttatttcgtacttttctggagcgcgagaaatgtgtcgacacactcgacttctggttcgcttgtaatggattcagacaaatgaacctcaaggatacaaagactttgcgcgtcgtgaacgacttctgccacgacatactcttctatttgtattgcaagctctgcatcataaagtctagttttaaggagaattacttggttcagtag

SEQ ID NO: 318129 - DNA, 2337 bp, Artificial Sequence
  derived and/or modified sequence
atgtcatcagccatgctggtaacctgcctgccagatccttcctcctccttccgcgaggacgcccctagaccacctgtgcccggtgaagagggggagacccccccatgccagccaggcgtgggcaaaggacaggtgacgaagcccatgccagtgagttccaatacaaggagaaatgaagacggactgggcgagcccgaaggcagagcaagtccggactcacccctgacgcgctggaccaagtccttgcattctctgctcggcgatcaggatggcgcttatctgttcaggacttttctggagagggaaaagtgcgtagatacgctcgacttttggtttgcctgcaacggattccggcagatgaacttgaaagatacgaagaccctgagagtcgccaaagcaatctacaagagatatatagagaacaacagcatcgtgtccaaacagttaaagccagcgacaaaaacttatatcagagacgggatcaaaaaacaacagatcgacagtatcatgtttgatcaagcacaaactgagatccaaagtgttatggaggaaaatgcttaccagatgttccttacctctgatatctatcttgagtatgtgaggagtgggggagaaaacactgcctatatgtcgaacggcggactcggctcactgaaagtggtctgcggctatcttcccacactgaatgaggaggaagagtggacctgcgctgattttaagtgtaagctgtcacccactgttgtcggcctttcatcaaagacattgagagctaccgctagcgtaaggtctaccgaaactgtcgacagcggctaccgttcctttaagcgctctgaccccgtgaatccctaccacattggatcaggctacgtgttcgccccagcaacaagtgccaatgatagcgaaatttctagcgacgcgctgactgatgacagtatgtctatgacggatagctctgtagacggcattcctccttaccgggtcggaagtaaaaagcaattgcaacgggaaatgcataggtccgtcaaggctaacgggcaggtgagtctgccacattttccccgaacgcaccgactgcctaaggagatgacacccgtggagccggctacatttgctgctgaactgatcagccgtctggagaagctgaagctggaactagagagcagacactctttagaggaacgattgcagcagattcgggaagacgaggaacgggaaggcagtgagctgacacttaactctagggagggtgcacccacccagcatcccctctcactcttaccctccggaagctatgaggaggacccgcagactatattggatgaccacctgtcgcgcgtactcaaaacgcccggatgccaatctcctggggtgggtcgatactcccctagatctcggtctccagatcaccatcatcaccatcactcccagtatcattctctgttgccacccggtgggaaacttccgcctgctgcggcaagtcccggtgcatgccctctgctcggcggtaaaggtttcgtgactaaacagacaacaaagcatgtgcaccaccactacattcatcatcacgccgtgcctaagacaaaagaggaaattgaagccgaagcaacccagagagtgcactgcttctgtcccggaggatctgagtactactgctacagcaaatgcaagtcacactcaaaagcgccagaaactatgccaagcgagcaatttggcgctcagagtaccaaaaaggcctatcctctggagtcagctagatcatcccctggcgaacgagcttctaggcatcacctgtggggaggaaatagcggacatcccaggactacccctcgggctcatctgttcactcaggacccggctatgccacccctgaccccgccaaatactttagctcagctggaggaggcatgccggaggctggctgaggtgtcaaagcccccaaagcaacgatgctgcgttgcatcccaacaaagggaccggaaccattccgccacagttcagacaggcgctacacccttcagtaaccccagtctggccccagaggaccataaagagcctaagaaactggcaggggtgcatgctctgcaggcctctgagctggttgtgacatacttcttctgcggggaggagattccgtacaggcgtatgttaaaggcacagagcctcacgctgggccactttaaggagcagttgtcaaagaaaggtaattacaggtactacttcaaaaaagcttcagacgagtttgcatgcggagctgtttttgaggagatctgggaggacgaaacggtcctgccaatgtatgaaggacgaatcttgggaaaagtcgagcgaattgactag

SEQ ID NO: 318130 - DNA, 483 bp, Artificial Sequence
  derived and/or modified sequence
atgagctctgccatgctcgttacttgcctcccagacccttcaagctcttttagagaggacgcacccaggcccccagtaccgggagaggagggggagacccccccatgccaaccgggagtggggaaggggcaagtaactaagccaatgccggtgagctcaaatacacgtagaaatgaagacggtttgggcgagccggagggaagggcctcccccgactccccgctaacgcgctggacaaagagcctgcatagcctacttggcgatcaggacggggcatacctgttcagaacgtttctggaacgggagaagtgtgttgataccttggatttctggtttgcttgtaacggttttcgtcagatgaatctgaaggatacaaaaacactcagagttgtgaacgatttctgtcacgacattctcttctacctttattgcaaactgtgtattatcaaatcttctttcaaggaaaactatctggttcagtag

SEQ ID NO: 318131 - DNA, 2426 bp, Artificial Sequence
  derived and/or modified sequence
ccacgccgattgctgagaggaactggaagaagaaaaattcccagactcagtgggaagagctccctcaccatgagtagcgctatgttggtgacttgcctcccggaccccagcagcagcttccgtgaggatgccccgcggcccccagtgccaggggaagaaggggagaccccaccgtgtcagccaggggtgggcaagggccaggtcaccaaacccatgcctgtctcttccaacaccaggcggaacgaagatgggttgggggagccggaggggcgggcatctccggattcccctctgacccggtggaccaagtccttacactccttattgggcgatcaagacggtgcttacctgttccgaactttcctggagagggagaaatgcgtggataccttagacttctggtttgcctgcaatggattcaggcagatgaacctgaaggataccaaaactttacgagtagccaaagcgatctacaaaaggtacattgagaacaacagcattgtctccaagcagctgaagcctgccaccaagacctacataagagatggcatcaagaagcagcagattgattccatcatgtttgaccaggcgcagaccgagatccagtcggtgatggaggaaaatgcctaccagatgtttttgacttctgatatatacctcgaatatgtgaggagtgggggagaaaacacagcttacatgagtaatgggggactcgggagcctaaaggtcgtgtgtggctatctccccaccttgaatgaagaagaggagtggacttgtgccgacttcaagtgcaaactttcgccaaccgtggttggcttgtccagcaaaactctgagggccacggcgagtgtgaggtccacggaaactgttgacagtggatacaggtccttcaagaggagcgatcctgttaatccttatcacataggttctggctatgtctttgcaccagccaccagcgccaacgacagtgagatatccagtgatgcgctgacggatgattccatgtccatgacggacagcagtgtagatggaattcctccttatcgtgtgggcagtaagaaacagctccagagagaaatgcatcgcagtgtgaaggccaatggccaagtgtctctacctcatttcccgagaacccaccgcctgcccaaggagatgacccccgtggaacccgccacctttgcagctgagctgatctcgaggctggaaaagctgaagctggagttggagagccgccacagcctggaggagcgcctgcagcagatccgagaggatgaagagagagagggctccgagctcacactcaattcgcgggagggggcgcccacgcagcaccccctctccctactgccctccggcagctacgaggaagacccgcagacgatactggacgatcacctgtccagggtcctcaagacccctggctgccagtctccaggcgtaggccgctatagcccccgctcccgctccccggaccaccaccaccaccaccattcgcagtaccactccctgctcccgcccggtggcaagctgcctcccgcggccgcctcgccgggcgcctgccccctcctcgggggcaaaggctttgtgaccaagcagacgacgaagcatgtccaccaccactacatccaccaccatgccgtccccaagaccaaggaggagatcgaggcggaggccacgcagcgggtgcactgcttctgccctgggggcagcgagtattactgctactcgaaatgcaaaagccactccaaggctccggaaaccatgcccagcgagcagtttggtgcccaaagcacaaaaaaggcctaccccttggagtctgcccgctcgtctccaggcgaacgagccagccggcaccatctgtgggggggcaacagcgggcacccccgcaccaccccccgtgcccacctgttcacccaggaccctgcgatgcctcccctgaccccacccaacacgctggctcagctggaggaggcctgtcgcaggctagctgaggtgtcgaagcccccaaagcagcggtgctgtgtggccagtcagcagagggacaggaatcattcggccactgttcagacgggagccacacccttctccaatccaagcctggctccagaagatcacaaagagccaaagaaactggcaggtgtccacgcgctccaggccagtgagttggttgtcacttactttttctgtggggaagaaattccataccggaggatgctgaaggctcagagcttgaccctgggccactttaaagagcagctcagcaaaaagggaaattataggtattacttcaaaaaagcaagcgatgagtttgcctgtggagcggtgtttgaggagatctgggaggatgagacggtgctcccgatgtatgaaggccggattctgggcaaagtggagcggatcgattgagccctggggtctggctttgg

SEQ ID NO: 318132 - DNA, 483 bp, Artificial Sequence
  derived and/or modified sequence
atgagtagcgctatgttggtgacttgcctcccggaccccagcagcagcttccgtgaggatgccccgcggcccccagtgccaggggaagaaggggagaccccaccgtgtcagccaggggtgggcaagggccaggtcaccaaacccatgcctgtctcttccaacaccaggcggaacgaagatgggttgggggagccggaggggcgggcatctccggattcccctctgacccggtggaccaagtccttacactccttattgggcgatcaagacggtgcttacctgttccgaactttcctggagagggagaaatgcgtggataccttagacttctggtttgcctgcaatggattcaggcagatgaacctgaaggataccaaaactttacgagtagtcaatgacttttgtcatgacattttgttctacttatactgtaaattatgcattataaagagttcatttaaggaaaattacttggtacaataa

SEQ ID NO: 318133 - DNA, 2337 bp, Artificial Sequence
  derived and/or modified sequence
atgagcagcgccatgctggtgacctgcctgcccgaccccagcagcagcttcagagaggacgcccccagaccccccgtgcccggcgaggagggcgagacccccccctgccagcccggcgtgggcaagggccaggtgaccaagcccatgcccgtgagcagcaacaccagaagaaacgaggacggcctgggcgagcccgagggcagagccagccccgacagccccctgaccagatggaccaagagcctgcacagcctgctgggcgaccaggacggcgcctacctgttcagaaccttcctggagagagagaagtgcgtggacaccctggacttctggttcgcctgcaacggcttcagacagatgaacctgaaggacaccaagaccctgagagtggccaaggccatctacaagagatacatcgagaacaacagcatcgtgagcaagcagctgaagcccgccaccaagacctacatcagagacggcatcaagaagcagcagatcgacagcatcatgttcgaccaggcccagaccgagatccagagcgtgatggaggagaacgcctaccagatgttcctgaccagcgacatctacctggagtacgtgagaagcggcggcgagaacaccgcctacatgagcaacggcggcctgggcagcctgaaggtggtgtgcggctacctgcccaccctgaacgaggaggaggagtggacctgcgccgacttcaagtgcaagctgagccccaccgtggtgggcctgagcagcaagaccctgagagccaccgccagcgtgagaagcaccgagaccgtggacagcggctacagaagcttcaagagaagcgaccccgtgaacccctaccacatcggcagcggctacgtgttcgcccccgccaccagcgccaacgacagcgagatcagcagcgacgccctgaccgacgacagcatgagcatgaccgacagcagcgtggacggcatccccccctacagagtgggcagcaagaagcagctgcagagagagatgcacagaagcgtgaaggccaacggccaggtgagcctgccccacttccccagaacccacagactgcccaaggagatgacccccgtggagcccgccaccttcgccgccgagctgatcagcagactggagaagctgaagctggagctggagagcagacacagcctggaggagagactgcagcagatcagagaggacgaggagagagagggcagcgagctgaccctgaacagcagagagggcgcccccacccagcaccccctgagcctgctgcccagcggcagctacgaggaggacccccagaccatcctggacgaccacctgagcagagtgctgaagacccccggctgccagagccccggcgtgggcagatacagccccagaagcagaagccccgaccaccaccaccaccaccacagccagtaccacagcctgctgccccccggcggcaagctgccccccgccgccgccagccccggcgcctgccccctgctgggcggcaagggcttcgtgaccaagcagaccaccaagcacgtgcaccaccactacatccaccaccacgccgtgcccaagaccaaggaggagatcgaggccgaggccacccagagagtgcactgcttctgccccggcggcagcgagtactactgctacagcaagtgcaagagccacagcaaggcccccgagaccatgcccagcgagcagttcggcgcccagagcaccaagaaggcctaccccctggagagcgccagaagcagccccggcgagagagccagcagacaccacctgtggggcggcaacagcggccaccccagaaccacccccagagcccacctgttcacccaggaccccgccatgccccccctgaccccccccaacaccctggcccagctggaggaggcctgcagaagactggccgaggtgagcaagccccccaagcagagatgctgcgtggccagccagcagagagacagaaaccacagcgccaccgtgcagaccggcgccacccccttcagcaaccccagcctggcccccgaggaccacaaggagcccaagaagctggccggcgtgcacgccctgcaggccagcgagctggtggtgacctacttcttctgcggcgaggagatcccctacagaagaatgctgaaggcccagagcctgaccctgggccacttcaaggagcagctgagcaagaagggcaactacagatactacttcaagaaggccagcgacgagttcgcctgcggcgccgtgttcgaggagatctgggaggacgagaccgtgctgcccatgtacgagggcagaatcctgggcaaggtggagagaatcgactag

SEQ ID NO: 318134 - DNA, 483 bp, Artificial Sequence
  derived and/or modified sequence
atgagcagcgccatgctggtgacctgcctgcccgaccccagcagcagcttcagagaggacgcccccagaccccccgtgcccggcgaggagggcgagacccccccctgccagcccggcgtgggcaagggccaggtgaccaagcccatgcccgtgagcagcaacaccagaagaaacgaggacggcctgggcgagcccgagggcagagccagccccgacagccccctgaccagatggaccaagagcctgcacagcctgctgggcgaccaggacggcgcctacctgttcagaaccttcctggagagagagaagtgcgtggacaccctggacttctggttcgcctgcaacggcttcagacagatgaacctgaaggacaccaagaccctgagagtggtgaacgacttctgccacgacatcctgttctacctgtactgcaagctgtgcatcatcaagagcagcttcaaggagaactacctggtgcagtag

SEQ ID NO: 318135 - DNA, 708 bp, Artificial Sequence
  derived and/or modified sequence
atggaggagggcgagagaagccccctgctgagccaggagaccgccggccagaagcccctgagcgtgcacagaccccccaccagcggctgcctgggccccgtgcccagagaggaccaggccgaggcctggggctgcagctgctgcccccccgagaccaagcaccaggccctgagcggcacccccaagaagggccccgcccccagcctgagccccggcagcagctgcgtgaagtacctgatcttcctgagcaacttccccttcagcctgctgggcctgctggccctggccatcggcctgtggggcctggccgtgaagggcagcctgggcagcgacctgggcggccccctgcccgccgaccccatgctgggcctggccctgggcggcctggtggtgagcgccgtgagcctggccggctacctgggcgccctgtgcgagaacacctgcctgctgagaggcttcagcggcggcatcctggccttcctggtgctggaggccgtggccggcgccctggtggtggccctgtggggccccctgcaggacagcctggagcacaccctgagagtggccatcgcccactaccaggacgaccccgacctgagattcctgctggaccaggtgcagctgggcctgagatgctgcggcgccgccagctaccaggactggcagcagaacctgtactgcctgagcagcccctgcagcagccagtag

SEQ ID NO: 318136 - DNA, 708 bp, Artificial Sequence
  derived and/or modified sequence
atggaagaaggagagagatcgcctttgctttcccaggaaacagccggccaaaagcctttatccgtgcatagaccgcccaccagcggttgtctggggcctgttcctcgtgaagatcaagcagaggcatgggggtgttcgtgctgtcctccagagacgaaacatcaggctctgtctgggactccaaagaagggacctgctccaagtctctccccaggcagtagctgtgtgaaatatctgatcttcctatccaacttcccattctctctactgggtctgctagcgctggctatcggcctgtggggcctggctgtaaaaggcagcttgggcagcgatctcggggggccgctccctgctgaccctatgctcgggctggccttaggcggcctggtcgtgagtgcggtcagtctggctggctacctcggagccctgtgcgaaaacacatgtctgttaagaggctttagcggcgggatcctggccttcctggtgctcgaagcagtcgctggcgccctggttgtagccctttggggcccgcttcaggattcgttggaacacactttaagagtggcaattgcccattaccaagacgacccggacctccggtttctactcgaccaagtgcagttgggcttgagatgctgcggggctgcttcctatcaagactggcaacagaatctgtattgcctttcaagcccatgtagcagccagtag

SEQ ID NO: 318137 - DNA, 708 bp, Artificial Sequence
  derived and/or modified sequence
atggaggagggggagaggagccccctgctgagccaggagacagctggccagaagcccctgtctgtgcacaggcctcccaccagcggctgcctgggccctgtgccccgggaggaccaggccgaggcctggggctgcagctgctgccccccagagaccaagcaccaggccctgagcggcacccccaagaagggccctgcccccagcctgagccctggcagcagctgtgtgaagtacctgatcttcctgagcaacttccccttcagcctgctgggcctgctggccctggccatcggcctgtggggcctggccgtgaagggcagcctgggcagtgacctgggcggccccctgcctgctgaccccatgctgggcctggccctgggcggcctggtggtgtctgctgtgtccctggccggctacctgggcgccctgtgtgagaacacctgcctgctgcggggcttcagcggcggcatcctggccttcctggtgctggaggccgtggccggggccctggtggtggccctgtggggccccctgcaggacagcctggagcacaccctgcgggtggccatcgcccactaccaggatgatcctgacctgcgcttcctgctggaccaggtgcagctgggcctgcgctgctgcggggccgccagctaccaggactggcagcagaacctgtactgcctgagcagcccctgcagcagccagtag

SEQ ID NO: 318138 - DNA, 708 bp, Artificial Sequence
  derived and/or modified sequence
atggaggagggcgagcggagccccctgctgagccaggagaccgccggccagaagccccttagcgtgcataggccgcccacatccggctgcctcggccctgtccctcgagaggaccaagcagaagcatggggatgctcctgctgtccacctgagactaaacaccaagccctgagtgggaccccaaaaaagggccctgcgcctagcttgtccccggggagttcctgtgtgaagtatctgatctttctctccaactttcccttcagcctcctaggcctgctcgcattagccattggactgtggggtctcgcggtgaagggctctttgggctctgatctgggcggtcccctgcccgctgaccccatgctgggactcgcattgggcggcctcgtggtgtcagccgtgtcactagcggggtacctgggcgctctgtgcgagaatacatgtcttttaagaggattctctggtggcatcctggccttcctggtgctggaagccgtggccggggccctggtcgtggcactctggggaccactgcaagattctctcgaacatacactgcgggtagctattgcccattatcaggacgatcctgacctccgatttctgttggaccaagtgcagttgggcctaaggtgctgcggagcggcatcttatcaggactggcaacagaatttatactgtttatcatccccttgctcaagtcagtag

SEQ ID NO: 318139 - DNA, 708 bp, Artificial Sequence
  derived and/or modified sequence
atggaggagggagaaagatcaccacttctgtcccaagagaccgcagggcagaagcccttaagcgtacaccgcccacctacctctgggtgcttagggccagtacccagagaagaccaagcagaggcctgggggtgttcttgctgtccacctgagaccaaacatcaggccctatctggaactcctaagaaaggaccagctccatcactgtctccagggtcatcatgtgtaaaataccttattttcctatctaatttcccattcagcctgctcggcttgttggccctcgccataggcctgtggggccttgccgttaaaggcagcctgggctccgatctcggtggacccttaccagctgatcctatgctgggtctggctctggggggactcgttgtcagtgccgtctcattagccggataccttggtgccctatgcgagaatacctgtctgcttcgagggttctccggcggtatcctggccttcctggttctggaggccgtggctggggctcttgtcgtggccttatggggtcccctccaggactccctagagcacactctccgcgtggctatcgcccattaccaggatgaccccgatctccgttttctgcttgatcaggtgcagctgggcctgaggtgttgcggcgctgcttcttaccaggattggcagcagaacctgtattgtctctccagtccctgctcttcccagtag

SEQ ID NO: 318140 - DNA, 1871 bp, Artificial Sequence
  derived and/or modified sequence
ccagcagcccagccacagaggagccagcgaacctctcccggcgcctgtgctgggggctttctgttccagcgtcaaggatggaggagggggagaggagccccttactgtcccaggaaactgcaggccagaagcccctctctgtgcacaggccacccacctcaggctgcctaggtccagtgcccagggaggaccaggcggaggcctggggctgcagctgctgtcccccggagaccaagcaccaggccttgagtggcacccccaagaaaggaccagccccttccctctccccagggagcagctgcgtcaagtatctgatcttcctctccaacttccccttctccctgctggggctgctggccctggccatcgggctctggggcctggctgtcaaggggtctctgggaagtgatctgggggggcccctgcccgcagaccccatgctggggctggcactgggagggctggtggtcagcgcagtgagcctggctggctacctgggcgccctctgtgagaacacctgcctgttacgtggcttctctgggggcatccttgccttcctggtgcttgaggccgtggcgggggccctggtggtggccctctggggcccgctgcaagacagcctggagcacaccctgcgtgtggccatcgcccactaccaggacgacccagacctgcgcttcctcctcgaccaagtccagctcgggctgaggtgctgcggagctgcctcctaccaggactggcagcagaacctgtactgcctctcaagcccttgctcttcccagtaagacctgtggaccattccagaagcctctgccagagttccatccaccctcccctgctccaactctaccttctcaatgagctcagcagcctctgcggagggaggtcctcttatcaatgcttgtctgttcccccttcaaccgtctcactaaatatcctcctgctagtcaacacagccaccacccctacctgcaagcgcagaggactgccgtgcacagggatacgttatagagagccaggtactttaactaactgcagctcccccggggtgcaggcctgcagccttcccgcctcctgctgcatcgacccccgcgaagatggagcctctgtcaacgaccagtgcggcttcggggtcctgcgcctggatgcggacgcagctcagagagtggtgtacctggagggctgcggcccgccgctccggcggtggctgcgcgcgaacctggctgcctcgggcggctacgcaatcgcggtggtgctgctgcagggcgcggagctcctgctggccgcccggctactcggggccctcgctgcccgcaggggggcggcgtacggccccggagcgcgcggggaggaccgcgctggcccccagagccccagccccggcgccccgcccgctgccaagcccgcccggggctgagcgcacgccccgaggtccgagaccgccacgcacagggatacagggggcgcctccgcccggctaaaaagcgcggcctgcgccgccgccgccgcctgatttcgctcgggcttcgggtgacttcgccgcaggacctacccagctcgctcacttcgctcgctccgcgtcccccatgccagcccccaacgcagggcgcccggcgaagccacgggactggcgggaggagcacgcggggccggaggaaatcctgaagctgaccctcacctccgagcccccactcccaccccagccgcacagttcccacctcctggcacctccctcccctggggccgccaccccttctgggctcgtgatggtggagctaaggtccaggcctctccctcccgagtgcatttttggggagatagtaaatgttttattcgggtgtatcattcatacagtaaagacaccaatcttc

SEQ ID NO: 318141 - protein, 353 aa, Artificial Sequence
  derived and/or modified sequence
LKMTKLEIQKALAEDATVYEYDSIYDEMQKKKEENNPKLLLGKDRKPKYIHNLLKAVEIRKKEQEKRMEKKIQREREMEKGEFDDKEAFVTSAYKKKLQERAEEEEREKRAAALEACLDVTKQKDLSGFYRHLLNQAVGEEEVPKCSFREARSGIKEEKSRGFSNEVSSKNRIPQEKCILQTDVKVEENPDADSDFDAKSSADDEIEETRVNCRREKVIETPENDFKHHRSQNHSRSPSEERGHSTRHHTKGSRTSRGHEKREDQHQQKQSRDQENHYTDRDYRKERDSHRHREASHRDSHWKRHEQEDKPRARDQRERSDRVWKREKDREKYSQREQERDRQQNDQNRPSEK

SEQ ID NO: 318142 - protein, 489 aa, Artificial Sequence
  derived and/or modified sequence
MLLCMNMTVFMMKCRKKEENNPKLLLGKDRKPKYIHNLLKAVEIRKKEQEKRMEKKIQREREMEKGEFDDKEAFVTSAYKKKLQERAEEEEREKRAAALEACLDVTKQKDLSGFYRHLLNQAVGEEEVPKCSFREARSGIKEEKSRGFSNEVSSKNRIPQEKCILQTDVKVEENPDADSDFDAKSSADDEIEETRVNCRREKVIETPENDFKHHRSQNHSRSPSEERGHSTRHHTKGSRTSRGHEKREDQHQQKQSRDQENHYTDRDYRKERDSHRHREASHRDSHWKRHEQEDKPRARDQRERSDRVWKREKDREKYSQREQERDRQQNDQNRPSEKGEKEEKSKAKEEHMKVRKERYENNDKYRDREKREVGVQSSERNQDRKESSPNSRAKDKFLDQERSNKMRNMAKDKERNQEKPSNSESSLGAKHRLTEEGQEKGKEQERPPEAVSKFAKRNNEETVMSARDRYLARQMARVNAKTYIEKEDD

SEQ ID NO: 318143 - DNA, 1785 bp, Artificial Sequence
  derived and/or modified sequence
gtcggccacgttcagcggacacgggagcaagatggcgattccgggcaggcaacctctgtgagtgaaagccttcagagggaagctgctaagaagcaggccatgaaacagaccaaactggaaatccagaaggcccttgcagaagatgctactgtgtatgaatatgacagtatttatgatgaaatgcagaaaaaaggaggaaaataatcccaaattgcttttggggaaagacagaaagcccaagtatattcacaacttgctaaaagcagttgagatcagaaaaaaggaacaggaaaaaagaatggaaaagaaaatacagagagaacgagaaatggaaaagggggagtttgatgataaagaagcatttgtgacatctgcatataagaaaaaactgcaagagagagctgaagaagaagaaagagaaaagagggctgctgcactggaagcatgtttggatgtaaccaagcagaaagatctcagtggattttataggcacctattaaatcaagcagttggtgaagaggaagtacctaaatgcagctttcgtgaagccagatctggtataaaggaagaaaaatcaaggggcttctccaatgaagtaagttcaaaaaacagaataccacaagagaaatgcattcttcaaactgatgtgaaagtagaggaaaacccagatgcagacagtgacttcgatgctaagagcagtgcggatgatgaaatagaagaaactagagtgaactgcagaagggaaaaggtcatagagacccctgagaatgacttcaagcaccacaggagtcaaaaccactctcggtcacctagtgaagaaagagggcacagtaccaggcaccacacgaaaggatcacgaacgtcgagaggacatgagaaaagggaagatcagcaccagcagaagcaatccagagaccaagagaaccattacactgaccgtgattaccggaaagaaagggattctcataggcacagagaggccagtcatagagattcccattggaagaggcatgaacaggaagataaaccaagggcgagggaccaaagagaaagaagtgacagagtatggaaaagggagaaagatagggagaaatattcccaaagagaacaagaaagagatagacaacaaaatgatcagaaccgacccagtgagaaaggagagaaggaagagaaaagcaaagcaaaggaagagcatatgaaagtaaggaaggaaagatatgaaaataatgataaatacagagatagagaaaaacgagaggtaggtgttcagtcttcagaaagaaatcaagacagaaaggaaagcagcccaaattctagggcaaaggataaatttcttgaccaagaaagatccaacaaaatgagaaacatggcaaaggacaaagaaagaaaccaagagaaaccctctaattctgaatcatcactgggagcaaaacacagactcacagaggaagggcaagagaagggtaaagaacaagagagaccacctgaggcagtgagcaagtttgcaaagcggaacaatgaagaaactgtaatgtcagctagagacaggtacttggccaggcagatggcgcgggttaatgcaaagacctatattgagaaagaagatgattgatggctaccccaagagaaagatttaaggaagcacagaaaactgtaattcctggaacctgctgcgtaaaaccataaaggagtgtgttaccagtagtttggagggcatttttaaatttattttcaaaattttaagttaaaagtcagtcttacagcttggatgtttggatgtggatg

SEQ ID NO: 318144 - protein, 257 aa, Artificial Sequence
  derived and/or modified sequence
MASKIGSRRWMLQLIMQLGSVLLTRCPFWGCFSQLMLYAERAEARRKPDIPVPYLYFDMGAAVLCASFMSFGVKRRWFALGAALQLAISTYAAYIGGYVHYGDWLKVRMYSRTVAIIGGFLVLASGAGELYRRKPRSRSLQSTGQVFLGIYLICVAYSLQHSKEDRLAYLNHLPGGELMIQLFFVLYGILALAFLSGYYVTLAAQILAVLLPPVMLLIDGNVAYWHNTRRVEFWNQMKLLGESVGIFGTAVILATDG

SEQ ID NO: 318145 - DNA, 774 bp, Artificial Sequence
  derived and/or modified sequence
atggccagcaagatcggcagcagaagatggatgctgcagctgatcatgcagctgggcagcgtgctgctgaccagatgccccttctggggctgcttcagccagctgatgctgtacgccgagagagccgaggccagaagaaagcccgacatccccgtgccctacctgtacttcgacatgggcgccgccgtgctgtgcgccagcttcatgagcttcggcgtgaagagaagatggttcgccctgggcgccgccctgcagctggccatcagcacctacgccgcctacatcggcggctacgtgcactacggcgactggctgaaggtgagaatgtacagcagaaccgtggccatcatcggcggcttcctggtgctggccagcggcgccggcgagctgtacagaagaaagcccagaagcagaagcctgcagagcaccggccaggtgttcctgggcatctacctgatctgcgtggcctacagcctgcagcacagcaaggaggacagactggcctacctgaaccacctgcccggcggcgagctgatgatccagctgttcttcgtgctgtacggcatcctggccctggccttcctgagcggctactacgtgaccctggccgcccagatcctggccgtgctgctgccccccgtgatgctgctgatcgacggcaacgtggcctactggcacaacaccagaagagtggagttctggaaccagatgaagctgctgggcgagagcgtgggcatcttcggcaccgccgtgatcctggccaccgacggctag

SEQ ID NO: 318146 - DNA, 774 bp, Artificial Sequence
  derived and/or modified sequence
atggcctctaaaatcggtagcagacgttggatgttgcagttgatcatgcagcttggcagtgtgcttctcacccgttgtcccttttggggctgcttcagccagctgatgctgtacgctgagagagccgaagctcgccggaagccggacattcccgttccctacttgtatttcgacatgggcgccgccgtgctgtgtgcctcttttatgtcgtttggcgtgaagcgcaggtggttcgccttgggcgctgccctccagctagccatatccacttacgcagcctacatagggggctacgtgcattacggggactggctaaaggtcagaatgtacagccgcacagttgccatcattgggggctttctggttcttgccagcggggctggcgaactataccgaagaaagccccggagtagaagtctccagagtacgggccaggtcttcttaggaatctatctgatttgtgttgcctactccctgcagcattcgaaagaagaccggctggcatacctcaatcatctccctggaggagaactcatgattcaactgttctttgtgctgtacggaattctcgctctagcttttctatccgggtactacgtgacccttgcagctcagattctcgctgtgctgctgccacctgtgatgcttttgatcgatggtaacgtcgcgtattggcacaacacccggagagtagagttctggaatcagatgaaattgttaggcgaaagcgtcgggatcttcggcactgccgtaattctggctacagacgggtag

SEQ ID NO: 318147 - DNA, 774 bp, Artificial Sequence
  derived and/or modified sequence
atggccagcaagattggcagccgccgctggatgctgcagctgatcatgcagctgggctctgtgctgctgacccgctgccccttctggggctgcttcagccagctgatgctgtatgcagagcgggcagaggcccggaggaagccagacatccctgtgccctacctgtactttgacatgggcgctgctgtgctgtgtgccagcttcatgagctttggagtgaagaggcgctggtttgccctgggcgccgccctgcagctggccatcagcacctacgccgcctacatcggcggctacgtgcactatggagactggctgaaggtgaggatgtacagcaggacagtggccatcattggaggcttcctggtgctggccagcggggccggggagctgtacagaaggaagcccaggagccgcagcctgcagagcacaggccaggtgttcctgggcatctacctgatctgtgtggcctacagcctgcagcacagcaaggaggaccggctggcctacctgaaccacctgcccggcggggagctgatgatccagctgttctttgtgctgtatggcatcctggccctggccttcctgagcggctactacgtgaccctggccgcccagatcctggccgtgctgctgccccctgtgatgctgctgattgatggaaatgtggcctactggcacaacaccaggagagtggagttctggaaccagatgaagctgctgggggagagcgtgggcatctttggaacagctgtgatcctggccacagatggatag

SEQ ID NO: 318148 - DNA, 774 bp, Artificial Sequence
  derived and/or modified sequence
atggccagcaagatcggcagccggcggtggatgctgcagctgatcatgcagttgggctcggttctgttaacgaggtgtccattctggggatgtttctctcagctgatgctttacgccgagcgggccgaagcccggcgtaagccagacattcccgtgccatacctgtactttgacatgggcgccgctgttctgtgcgcatcatttatgagcttcggagtgaagcgccgctggtttgccttgggtgcggcactacaattggctattagcacatacgcagcttacatcggcggctacgtgcattacggggattggctcaaggtacggatgtactcccggactgtggcaatcattggcggcttcctggtcttggccagcggagccggtgaattgtatcgtcggaagccccggagtcgatcactgcagagtaccggacaggtgtttctgggaatttatctcatatgtgttgcatattccctgcagcattccaaagaggataggctggcctatctcaatcatctgcctggaggggagctgatgatccagttgttttttgtgctgtatgggatactggcgttggccttcttaagcggatactacgtgacgctggccgcccaaatccttgccgtcttgctgcctcctgtcatgctgctgattgacggcaacgtcgcatactggcacaacacccgacgggtggagttctggaatcagatgaaactactaggcgagtcagtcggaatctttggaactgcagtcatcctggccacagatgggtag

SEQ ID NO: 318149 - DNA, 774 bp, Artificial Sequence
  derived and/or modified sequence
atggcttctaagatcgggagccggaggtggatgctgcagcttattatgcagcttggctctgtcttgcttactagatgtccgttctggggctgtttcagccagttgatgctatacgctgaaagagctgaggccagaaggaaacccgatatcccagtgccctatctctattttgacatgggagctgctgtgctgtgcgccagttttatgagcttcggtgtgaaacgacgctggttcgccctaggtgccgctctgcagcttgccatcagcacctatgcagcttatattggaggatacgtccactatggcgactggctaaaggtcagaatgtattcaagaaccgtggcaatcattggcggtttcttggtgctcgccagcggagccggagagctgtataggcgcaagcctaggagcaggtcccttcagtctacaggtcaggtttttctcggtatctacttgatttgcgtggcctacagtctccaacactctaaggaagatcgactggcatatctgaaccaccttcctggcggtgagctaatgattcagctcttttttgtactctatggaatactcgcattggcctttctttctggctactatgtcaccctggccgcacagatactcgctgtgctcctacctccagtgatgctgttaatcgacggtaatgtcgcttattggcacaatacccggagggtggagttctggaatcaaatgaaattactgggtgaaagtgtcgggattttcggcacggctgtcatcctggcaaccgacggatag

SEQ ID NO: 318150 - DNA, 1536 bp, Artificial Sequence
  derived and/or modified sequence
ccgcagcggactgccctttcccaagatggcgtcgaagataggttcgagacggtggatgttgcagctgatcatgcagttgggttcggtgctgctcacacgctgccccttttggggctgcttcagccagctcatgctgtacgctgagagggctgaggcacgccggaagcccgacatcccagtgccttacctgtatttcgacatgggggcagccgtgctgtgcgctagtttcatgtcctttggcgtgaagcggcgctggttcgcgctgggggccgcactccaattggccattagcacctacgccgcctacatcgggggctacgtccactacggggactggctgaaggtccgtatgtactcgcgcacagttgccatcatcggcggctttcttgtgttggccagcggtgctggggagctgtaccgccggaaacctcgcagccgctccctgcagtccaccggccaggtgttcctgggtatctacctcatctgtgtggcctactcactgcagcacagcaaggaggaccggctggcgtatctgaaccatctcccaggaggggagctgatgatccagctgttcttcgtgctgtatggcatcctggccctggcctttctgtcaggctactacgtgaccctcgctgcccagatcctggctgtactgctgccccctgtcatgctgctcattgatggcaatgttgcttactggcacaacacgcggcgtgttgagttctggaaccagatgaagctccttggagagagtgtgggcatcttcggaactgctgtcatcctggccactgatggctgagttttatggcaagaggctgagatgggcacagggagccactgagggtcaccctgccttcctccttgctggcccagctgctgtttatttatgctttttggtctgtttgtttgatcttttgcttttttaaaattgttttttgcagttaagaggcagctcatttgtccaaatttctgggctcagcgcttgggagggcaggagccctggcactaatgctgtacaggtttttttcctgttaggagagctgaggccagctgcccactgagtctcctgtccctgagaagggagtatggcagggctgggatgcggctactgagagtgggagagtgggagacagaggaaggaagatggagattggaagtgagcaaatgtgaaaaattcctctttgaacctggcagatgcagctaggctctgcagtgctgtttggagactgtgagagggagtgcgtgtgttgacacatgtggatcaggcccaggaagggcacaggggctgagcactacagaagtcacatgggttctcagggtatgccaggggcagaaacagtaccggctctctgtcactcaccttgagagtagagcagaccctgttctgctctgggctgtgaaggggtggagcaggcagtggccagctttgcccttcctgctgtctctgtttctagctccatggttggcctggtgggggtggagttccctcccaaacaccagaccacacagtcctccaaaaataaacattttatatag

SEQ ID NO: 318151 - DNA, 1041 bp, Artificial Sequence
  derived and/or modified sequence
gaaaaagaaaaagcgcttgacccggaagctgcgtgtcccatccccgcgcctgcttctctgactggggaagcccgacatcccagtgccttacctgtatttcgacatgggggcagccgtgctgtgcgctagtttcatgtcctttggcgtgaagcggcgctggttcgcgctgggggccgcactccaattggccattagcacctacgccgcctacatcgggggctacgtccactacggggactggctgaaggtccgtatgtactcgcgcacagttgccatcatcggcggctttcttgtgttggccagcggtgctggggagctgtaccgccggaaacctcgcagccgctccctgcagtccaccggccaggtgttcctgggtatctacctcatctgtgtggcctactcactgcagcacagcaaggaggaccggctggcgtatctgaaccatctcccaggaggggagctgatgatccagctgttcttcgtgctgtatggcatcctggccctggcctttctgtcaggctactacgtgaccctcgctgcccagatcctggctgtactgctgccccctgtcatgctgctcattgatggcaatgttgcttactggcacaacacgcggcgtgttgagttctggaaccagatgaagctccttggagagagtgtgggcatcttcggaactgctgtcatcctggccactgatggctgagttttatggcaagaggctgagatgggcacagggagccactgagggtcaccctgccttcctccttgctggcccagctgctgtttatttatgctttttggtctgtttgtttgatcttttgcttttttaaaattgttttttgcagttaagaggcagctcatttgtccaaatttctgggctcagcgcttgggagggcaggagccctggcactaatgctgtacaggtttttttcctgttaggagagctgaggccagctgcccactgagtctcctgtccctgagaagggagtatggcagggctgggatgcggctactgagagtgggagagtgggagacagagga

SEQ ID NO: 318152 - DNA, 1830 bp, Artificial Sequence
  derived and/or modified sequence
ccagactgcgccgaagcttcatgagacctctcctcgtctgtgcacggacgagtggccgactctggagcccaggctgttgcttcccagactggtggtgaatcctccatagtctgggacaaatatggccctgaaggctccatgagcagacgagaaggctggacttcgcaactgggtcaccttagatccggaactagagaatgacaccgttgtttccgggaggaaaaagaaaaagcgcttgacccggaagctgcgtgtcccatccccgcgcctgcttctctgactggggtgaggccgcagcggactgccctttcccaagatggcgtcgaagataggttcgagacggtggatgttgcagctgatcatgcagttgggttcggtgctgctcacacgctgccccttttggggctgcttcagccagctcatgctgtacgctgagagggctgaggcacgccggaagcccgacatcccagtgccttacctgtatttcgacatgggggcagccgtgctgtgcgctagtttcatgtcctttggcgtgaagcggcgctggttcgcgctgggggccgcactccaattggccattagcacctacgccgcctacatcgggggctacgtccactacggggactggctgaaggtccgtatgtactcgcgcacagttgccatcatcggcggctttcttgtgttggccagcggtgctggggagctgtaccgccggaaacctcgcagccgctccctgcagtccaccggccaggtgttcctgggtatctacctcatctgtgtggcctactcactgcagcacagcaaggaggaccggctggcgtatctgaaccatctcccaggaggggagctgatgatccagctgttcttcgtgctgtatggcatcctggccctggcctttctgtcaggctactacgtgaccctcgctgcccagatcctggctgtactgctgccccctgtcatgctgctcattgatggcaatgttgcttactggcacaacacgcggcgtgttgagttctggaaccagatgaagctccttggagagagtgtgggcatcttcggaactgctgtcatcctggccactgatggctgagttttatggcaagaggctgagatgggcacagggagccactgagggtcaccctgccttcctccttgctggcccagctgctgtttatttatgctttttggtctgtttgtttgatcttttgcttttttaaaattgttttttgcagttaagaggcagctcatttgtccaaatttctgggctcagcgcttgggagggcaggagccctggcactaatgctgtacaggtttttttcctgttaggagagctgaggccagctgcccactgagtctcctgtccctgagaagggagtatggcagggctgggatgcggctactgagagtgggagagtgggagacagaggaaggaagatggagattggaagtgagcaaatgtgaaaaattcctctttgaacctggcagatgcagctaggctctgcagtgctgtttggagactgtgagagggagtgcgtgtgttgacacatgtggatcaggcccaggaagggcacaggggctgagcactacagaagtcacatgggttctcagggtatgccaggggcagaaacagtaccggctctctgtcactcaccttgagagtagagcagaccctgttctgctctgggctgtgaaggggtggagcaggcagtggccagctttgcccttcctgctgtctctgtttctagctccatggttggcctggtgggggtggagttccctcccaaacaccagaccacacagtcctccaaaaataaacattttatatagaca

SEQ ID NO: 318153 - DNA, 774 bp, Artificial Sequence
  derived and/or modified sequence
atggcgtctaaaatcggttcccgaaggtggatgctgcaactgattatgcagctgggatcagtgctcttgaccagatgtcctttttggggctgtttttcccagcttatgctctatgccgaaagagctgaagccagaagaaaacctgatatacctgtgccatatctgtattttgatatgggcgctgccgtgctgtgtgcctcatttatgtccttcggggtgaaaaggcgttggttcgccctaggggcagcactgcaattggctatttccacgtatgccgcttacattgggggatatgtgcactacggggattggctgaaagtgcggatgtacagtcgcacagtggctatcatagggggattcctggtcctcgcttccggcgctggcgagctgtacagacgtaagccacggtctcggagcctccaaagtactggccaggtatttctgggcatctacctgatctgcgttgcatactcactccaacattcgaaggaagatcggctcgcatacttgaatcatctgccaggcggagagctgatgattcagttattctttgtgctctacggaatcttggccctggcattcttatctgggtactacgtgactctcgcagctcagatcctcgcagtgttgcttcccccagtgatgctcctcattgacggtaatgtcgcttactggcataatacccgcagggtagaattttggaatcagatgaagttgctgggcgagtcagtcgggatcttcggcaccgctgtgattctggcaacagatggatag

SEQ ID NO: 318154 - DNA, 774 bp, Artificial Sequence
  derived and/or modified sequence
atggctagcaagatcggcagtaggcgatggatgcttcagctcattatgcagctaggatccgtgctgctaacacgatgtccattttggggctgttttagtcagttgatgctgtacgcggagcgcgctgaagcaaggaggaagcctgatattcccgtgccttatctgtactttgacatgggagctgctgtgctctgcgcttcttttatgtccttcggcgtgaagaggcgttggttcgcacttggcgcggcactacagctcgctattagcacttatgccgcatatattggtgggtatgtgcactacggtgattggctcaaggtaaggatgtacagtcggacagtggcgataatcggcgggttcttagtcctcgcttccggcgccggcgagctctatcgccgcaagcccaggagtcggagccttcaatcaactggtcaagtatttcttggcatctacctgatctgcgtggcgtactcccttcagcactcaaaagaagatcgcctggcctacctgaatcacctgccaggaggagagctgatgatccagctcttttttgtgttgtatggaatcttggccctagctttcctgagcggctattacgtgacgcttgctgctcagattttagccgttctgctaccacctgttatgcttcttatagatggtaatgtggcatactggcacaatacccggcgggtggaattctggaatcagatgaagctgctcggggagtccgtgggcatcttcgggacggccgtgattctggccacagacggatag

SEQ ID NO: 318155 - DNA, 774 bp, Artificial Sequence
  derived and/or modified sequence
atggccagcaagatcggcagccggcggtggatgctgcagctgatcatgcagcttggatctgtgctcctaactaggtgccctttctggggttgtttttcacagctgatgttgtacgcggaaagagctgaggcacgcagaaaaccagatatacctgtgccctacttgtactttgacatgggagcagccgtgttgtgtgcctcctttatgtctttcggcgttaagagaaggtggtttgccctcggtgccgcgcttcagcttgccatttctacgtatgcagcctacatcgggggatatgtccactatggcgactggctgaaggtgagaatgtattcccgtaccgtggcaatcataggagggtttctggtccttgcttccggcgccggggaattatatcggcgcaagcctcggtctcgcagtttgcaatccaccggccaagtgtttctgggcatctatttgatttgtgtagcctacagcctacagcatagcaaggaggacagattggcttatttgaatcatctcccgggaggcgaactgatgatacagctgttttttgtgttgtatggaatactcgcactagcttttttgtccggttattacgtcaccctggccgcccagatcctcgcagtgctgcttccccccgtcatgttgctcatcgatggcaacgtggcatactggcacaatacaaggagggtggagttctggaaccagatgaagctgctgggtgagtcagttgggatctttggcacggccgtgatccttgctacagatggctag

SEQ ID NO: 318156 - protein, 199 aa, Artificial Sequence
  derived and/or modified sequence
MGAAVLCASFMSFGVKRRWFALGAALQLAISTYAAYIGGYVHYGDWLKVRMYSRTVAIIGGFLVLASGAGELYRRKPRSRSLQSTGQVFLGIYLICVAYSLQHSKEDRLAYLNHLPGGELMIQLFFVLYGILALAFLSGYYVTLAAQILAVLLPPVMLLIDGNVAYWHNTRRVEFWNQMKLLGESVGIFGTAVILATDG

SEQ ID NO: 318157 - DNA, 600 bp, Artificial Sequence
  derived and/or modified sequence
atgggcgccgccgtgctgtgcgccagcttcatgagcttcggcgtgaagagaagatggttcgccctgggcgccgccctgcagctggccatcagcacctacgccgcctacatcggcggctacgtgcactacggcgactggctgaaggtgagaatgtacagcagaaccgtggccatcatcggcggcttcctggtgctggccagcggcgccggcgagctgtacagaagaaagcccagaagcagaagcctgcagagcaccggccaggtgttcctgggcatctacctgatctgcgtggcctacagcctgcagcacagcaaggaggacagactggcctacctgaaccacctgcccggcggcgagctgatgatccagctgttcttcgtgctgtacggcatcctggccctggccttcctgagcggctactacgtgaccctggccgcccagatcctggccgtgctgctgccccccgtgatgctgctgatcgacggcaacgtggcctactggcacaacaccagaagagtggagttctggaaccagatgaagctgctgggcgagagcgtgggcatcttcggcaccgccgtgatcctggccaccgacggctag

SEQ ID NO: 318158 - DNA, 600 bp, Artificial Sequence
  derived and/or modified sequence
atgggcgccgctgtcctctgcgcgagcttcatgagcttcggcgtaaagcgacgctggtttgccctgggcgccgcactgcagctggctatttctacatatgccgcatacattggtggttacgtccactatggcgactggctgaaggtgaggatgtattcacgaaccgtagctattatcggcggattcctggtgctggcctctggtgctggcgaactgtatcgacgtaaacccaggagcaggtctttacagtcaaccgggcaggttttcctaggcatctacctcatttgtgttgcttatagtctgcagcactcaaaggaggaccgtctggcatacttgaaccacctgcctggcggagagttaatgattcaactgtttttcgtcctctacggaatactggcactggcattccttagcggctactacgtcacccttgctgcacagatattagccgttctgctgcctcctgtgatgctcctgatcgacgggaatgtggcttactggcacaacacacgccgcgtcgaattttggaaccagatgaaactgctgggggagtccgtgggcatattcggcaccgcagtcattctggcaaccgacggctag

SEQ ID NO: 318159 - DNA, 600 bp, Artificial Sequence
  derived and/or modified sequence
atgggcgctgctgtgctgtgtgccagcttcatgagctttggagtgaagaggcgctggtttgccctgggcgccgccctgcagctggccatcagcacctacgccgcctacatcggcggctacgtgcactatggagactggctgaaggtgaggatgtacagcaggacagtggccatcattggaggcttcctggtgctggccagcggggccggggagctgtacagaaggaagcccaggagccgcagcctgcagagcacaggccaggtgttcctgggcatctacctgatctgtgtggcctacagcctgcagcacagcaaggaggaccggctggcctacctgaaccacctgcccggcggggagctgatgatccagctgttctttgtgctgtatggcatcctggccctggccttcctgagcggctactacgtgaccctggccgcccagatcctggccgtgctgctgccccctgtgatgctgctgattgatggaaatgtggcctactggcacaacaccaggagagtggagttctggaaccagatgaagctgctgggggagagcgtgggcatctttggaacagctgtgatcctggccacagatggatag

SEQ ID NO: 318160 - DNA, 600 bp, Artificial Sequence
  derived and/or modified sequence
atgggcgccgccgtgctgtgcgccagcttcatgagcttcggcgtgaagcgtagatggtttgctcttggagctgctctgcaactggccattagcacctacgccgcctatattggtggatacgtccactatggagattggctgaaagtgcggatgtacagccgcacagttgcaattattgggggcttcctggtactggccagcggggcaggtgagctgtaccgccgcaaaccacgctccaggagtcttcaaagcaccggccaggttttcctcggtatttacctgatctgcgttgcatattcgcttcagcacagcaaagaggataggctagcttacctcaatcatctgcctggtggggagctaatgatacagttgttctttgtcctgtacggaatccttgctctggcgttcctgagcggctactatgttaccctcgctgcacagatcctggccgtgctgctaccccctgtcatgctgttaattgacggaaacgtggcctattggcacaatactcgcagggtcgaattttggaaccaaatgaaacttttaggggagagtgtaggtatttttggtaccgccgtgattcttgccaccgacggatag

SEQ ID NO: 318161 - DNA, 600 bp, Artificial Sequence
  derived and/or modified sequence
atgggggctgcggtattatgtgcgtctttcatgagctttggagtgaagcgcagatggtttgccctgggagcagcactccagttggccatcagtacttacgcggcatatattggcggatacgtccactatggagattggctgaaagtgcgcatgtattcaagaaccgtggccattatcggaggctttcttgtactggccagcggggcaggagagctttatcgcagaaagccacggagcagatcgcttcagtctaccggccaggtgtttctgggcatttacctaatctgtgtggcctactctcttcagcactcaaaagaggatcgcctggcatatctcaatcacctccccggaggagagcttatgatacagctgttctttgtcttatacgggatactggctctggcctttctgtccggatactacgtgactctggctgcgcaaatcctagctgtcttgttgcctcctgttatgctgttaattgatggcaacgtggcctactggcataacacccgcagggttgagttctggaatcagatgaagcttctgggcgagagcgtgggtatcttcggaactgctgtcatattggctacggatggctag

SEQ ID NO: 318162 - protein, 648 aa, Artificial Sequence
  derived and/or modified sequence
MVSLPPPQSDVTLPGPTRLEGERQGDLMQAPGLPGSPAPQSKHAGFSCSSFVSDGPPERTPSLPPHSPRIASPGPEQVQGHCPAGPGPGPFRLSPSDKYPGFGFEEAAASSPGRFLKGSHAPFHPYKRPFHEDVFPEAETTLALKGHSFKTPGPLEAFEEIPVDVAEAEAFLPGFSAEAWCNGLPYPSQEHGPQVLGSEVKVKPPVLESGAGMFCYQPPLQHMYCSSQPPFHQYSPGGGSYPIPYLGSSHYQYQRMAPQASTDGHQPLFPKPIYSYSILIFMALKNSKTGSLPVSEIYNFMTEHFPYFKTAPDGWKNSVRHNLSLNKCFEKVENKSGSSSRKGCLWALNPAKIDKMQEELQKWKRKDPIAVRKSMAKPEELDSLIGDKREKLGSPLLGCPPPGLSGSGPIRPLAPPAGLSPPLHSLHPAPGPIPGKNPLQDLLMGHTPSCYGQTYLHLSPGLAPPGPPQPLFPQPDGHLELRAQPGTPQDSPLPAHTPPSHSAKLLAEPSPARTMHDTLLPDGDLGTDLDAINPSLTDFDFQGNLWEQLKDDSLALDPLVLVTSSPTSSSMPPPQPPPHCFPPGPCLTETGSGAGDLAAPGSGGSGALGDLHLTTLYSAFMELEPTPPTAPAGPSVYLSPSSKPVALA

SEQ ID NO: 318163 - DNA, 3436 bp, Artificial Sequence
  derived and/or modified sequence
acggctttctttgaggccaggactgggtgatggtgtcgctacccccgccgcagtctgacgtcacgctgccgggccccaccagactggagggcgagcgccaaggggacctcatgcaggcaccgggcctcccaggctcccctgccccacagagtaagcatgccggcttcagctgctcgtcatttgtgtccgacggccctccagagaggacaccctcactgcccccacacagcccccgcattgcgtcaccagggcccgagcaagtccagggccactgcccagccggccccggccctgggcccttcaggctctcaccctcagacaagtatcctggctttggctttgaggaggccgcagcaagcagccctgggcgattcctcaagggcagccacgcgcccttccacccgtacaagcggcctttccatgaggacgtcttcccagaggccgagaccaccctggccctcaaaggacactcctttaagaccccagggccgctggaggccttcgaggagatcccagtggacgtggcggaggccgaggccttcctgcctggcttctcagcagaggcctggtgtaacgggctcccctaccccagccaggagcatggcccccaagtcctgggttcagaggtcaaagtcaagcccccagttctggagagtggtgctgggatgttctgctaccagcctcccttgcagcatatgtactgctcctcccagccccccttccaccagtactcgccaggtggtggcagctaccccataccctacctgggctcctcacactatcagtaccagcgaatggcaccccaggccagcaccgatgggcaccagcctctcttcccaaaacccatctattcctacagcatcctcatcttcatggcccttaagaacagtaaaactgggagccttcccgtcagcgagatctacaattttatgacggagcactttccttacttcaagacagcacccgatggctggaagaattctgtccggcacaacctatccctcaacaagtgcttcgagaaggtggagaacaaatcaggaagttcctcccgcaagggctgcctgtgggccctcaatccggccaagatcgacaagatgcaagaggagctgcaaaaatggaagaggaaagatcccattgctgtgcgcaaaagcatggccaagccagaagagctggacagcctcattggagacaagagagaaaagctgggctccccactcctgggctgtccgccccctgggctgtccggctcaggccccatccggcccctggcacccccagctggcctctccccaccactgcactcactccacccagctccaggccccattcctggcaagaaccccctgcaggacctacttatggggcacacaccctcctgctatgggcagacatacttgcacctctcaccaggcctggcccctcctggacccccgcagccattgttcccacagccggacgggcaccttgagctgcgggcccagccaggcaccccccaggactcgcctctgcctgcccacaccccacccagccacagtgccaagctactggccgagccttccccagccaggactatgcacgacaccctgctgccagatggagaccttggcactgacctggatgccatcaatccctcactcactgacttcgacttccagggaaacctgtgggaacagttgaaggatgatagcttggccctcgaccccctggtactggtgacctcatccccgacatcatcttcgatgccaccaccccagccaccacctcactgcttcccccctgggccctgtctgacagagacaggcagtggggcaggtgacttggcagccccgggcagtggtggctccggggcactgggtgacctgcacctcaccaccctctactctgcctttatggagctggagcccacgccccccacggcccctgcaggcccctctgtgtacctcagccccagctccaagcccgtggccctggcatgagctgtgcccagcttcgtcagctccagcgtttgcctggtctggaagtcctggccggccgcccacatcgggctcaccttaaaggtcaaggaaggaaaatactacctgtcccctatgccactaagccaacgtgtgtgtcagctggtagctgggggcgcagaggacatcacctggggtgctgcctctcacacatttctgccacgtggtggcccagctcctcacccagggcccccaaagagcaagcgtctgggcaagaggaaaatgccctgtccctagctcacactcatccacacttaagccctcgtgcacacacacaaattattcagatgtacacccacccacatatcttacagccagaggaaccagcactccatcactgagagcccgacttcgtttctggggcaactgagagctgagcgctttgcttaccaaaagctcagggccctgtgccaggccaaagatccccccagacccccattctgacatccacatgctctgcagtcctggccccctcgtcattttctttcccagaagcgccctgtatttattcccccatcttcatcccaacagcccagcaagaaggaggagacagagagctcctccctgggttgtctgtggacccccccaggagctgctaattggcagcacccactcagccattctctacccatccttagtacatgctctgtccagctttccccagggtgacatacagaaggggcaacatctacccgggcaccaaactgagcccaattccgaagcagtgtttggaaaagcccttgccctcggaaacttgaacatgtcctttttccccagtcccgggtgcaggaagggccccctccaggtcaccacaatctcactcctcctccagaaagaaaagttcacatagtttaggtcctggcttaactctacttatgatggttcaacttacactttttcaactttaagatggtgcaaaagcaatacacattcagtatgttcctcgacttaggatgcggttatgtccgataaacccattgtaaattgaaaccaccgaaagtcaaaaaccactttcgacttacgatgtttcccactcacgatgggtttctccggatgtagccccatcataagttgaggagcacctgttagttacttccaactgtctcaggcaacctgggcattcaggagaaaagcctggcacagggtgacagggaagcacccatgcaaagcacccccgctttgactgcttggcagacctagggtgcccgggaagcacaagggatacccttggccctgcggggtgtggcccaggtgcctgccatgagcctgaccccatcgagggggaacctcagcccaccctgggcctgggggtgacaagaacttccacaggttggccccaggcttataggaggcataagcagatcccgcgatggcttgtcattgtcccctgtcctggaacaataaagcaagtgccttgtggtctc

SEQ ID NO: 318164 - DNA, 573 bp, Artificial Sequence
  derived and/or modified sequence
ttggggttcctctggttggctggctaccatgcatgtcgtgtgttgcttatatcagaaggtgagggttctgtgtggtgtagatgctgtcggttagccggccttgcttctcacaaggggcgtttctggggagaacgctggggtctgtgtgggctcaaggaggatcccgtctccccttatgtttctggtacaggatcagatgtggccgcccagcagttgtgcacataggaggagaaggggccaggtgggaaaagggagcaagaggcaggaaagagcacagacttcgacgttcagacctgggttcccgtccagttccattccttgcacagggaatccctgacatcgtcatccgtctcctgtgcctttccgctgggtcagcctcctcccaccaagcttctgacccactgtcatccgcagctgccactctagctgcagagctcgactgggctctggtttctcagaagagctcagaggacctggctcctccctctttgcttctgaactgcatttctttccttattactcagtgtccacacccacggtggctgcctggataaaaatctgcccctttctccc

SEQ ID NO: 318165 - protein, 390 aa, Artificial Sequence
  derived and/or modified sequence
MGAKESRIGFLSYEEALRRVTDVELKRLKDAFKRTCGLSYYMGQHCFIREVLGDGVPPKVAEVIYCSFGGTSKGLHFNNLIVGLVLLTRGKDEEKAKYIFSLFSSESGNYVIREEMERMLHVVDGKVPDTLRKCFSEGEKVNYEKFRNWLFLNKDAFTFSRWLLSGGVYVTLTDDSDTPTFYQTLAGVTHLEESDIIDLEKRYWLLKAQSRTGRFDLETFGPLVSPPIRPSLSEGLFNAFDENRDNHIDFKEISCGLSACCRGPLAERQKFCFKVFDVDRDGVLSRVELRDMVVALLEVWKDNRTDDIPELHMDLSDIVEGILNAHDTTKMGHLTLEDYQIWSVKNVLANEFLNLLFQVCHIVLGLRPATPEEEGQIIRTLETDQIYTRN

SEQ ID NO: 318166 - protein, 542 aa, Artificial Sequence
  derived and/or modified sequence
MAAAAGAAAAPGSREPQDRPECGAGHPGPRYYRHPERWLLRPEAFLGPLRTRAPSAEDSQRERPAARSGPAMSRRVVRQSKFRHVFGQAAKADQAYEDIRVSKVTWDSSFCAVNPKFLAIIVEAGGGGAFIVLPLAKTGRVDKNYPLVTGHTAPVLDIDWCPHNDNVIASASDDTTIMVWQIPDYTPMRNITEPIITLEGHSKRVGILSWHPTARNVLLSAGGDNVIIIWNVGTGEVLLSLDDMHPDVIHSVCWNSNGSLLATTCKDKTLRIIDPRKGQVVAERFAAHEGMRPMRAVFTRQGHIFTTGFTRMSQRELGLWDPNNFEEPVALQEMDTSNGVLLPFYDPDSSIVYLCGKGDSSIRYFEITDEPPFVHYLNTFSSKEPQRGMGFMPKRGLDVSKCEIARFYKLHERKCEPIIMTVPRKSDLFQDDLYPDTPGPEPALEADEWLSGQDAEPVLISLRDGYVPPKHRELRVTKRNILDVRPPSGPRRSQSASDAPLSQHTLETLLEEIKALRERVQAQEQRITALENMLCELVDGTD

SEQ ID NO: 318167 - DNA, 1629 bp, Artificial Sequence
  derived and/or modified sequence
atggccgccgccgccggcgccgccgccgcccccggcagcagagagccccaggacagacccgagtgcggcgccggccaccccggccccagatactacagacaccccgagagatggctgctgagacccgaggccttcctgggccccctgagaaccagagcccccagcgccgaggacagccagagagagagacccgccgccagaagcggccccgccatgagcagaagagtggtgagacagagcaagttcagacacgtgttcggccaggccgccaaggccgaccaggcctacgaggacatcagagtgagcaaggtgacctgggacagcagcttctgcgccgtgaaccccaagttcctggccatcatcgtggaggccggcggcggcggcgccttcatcgtgctgcccctggccaagaccggcagagtggacaagaactaccccctggtgaccggccacaccgcccccgtgctggacatcgactggtgcccccacaacgacaacgtgatcgccagcgccagcgacgacaccaccatcatggtgtggcagatccccgactacacccccatgagaaacatcaccgagcccatcatcaccctggagggccacagcaagagagtgggcatcctgagctggcaccccaccgccagaaacgtgctgctgagcgccggcggcgacaacgtgatcatcatctggaacgtgggcaccggcgaggtgctgctgagcctggacgacatgcaccccgacgtgatccacagcgtgtgctggaacagcaacggcagcctgctggccaccacctgcaaggacaagaccctgagaatcatcgaccccagaaagggccaggtggtggccgagagattcgccgcccacgagggcatgagacccatgagagccgtgttcaccagacagggccacatcttcaccaccggcttcaccagaatgagccagagagagctgggcctgtgggaccccaacaacttcgaggagcccgtggccctgcaggagatggacaccagcaacggcgtgctgctgcccttctacgaccccgacagcagcatcgtgtacctgtgcggcaagggcgacagcagcatcagatacttcgagatcaccgacgagccccccttcgtgcactacctgaacaccttcagcagcaaggagccccagagaggcatgggcttcatgcccaagagaggcctggacgtgagcaagtgcgagatcgccagattctacaagctgcacgagagaaagtgcgagcccatcatcatgaccgtgcccagaaagagcgacctgttccaggacgacctgtaccccgacacccccggccccgagcccgccctggaggccgacgagtggctgagcggccaggacgccgagcccgtgctgatcagcctgagagacggctacgtgccccccaagcacagagagctgagagtgaccaagagaaacatcctggacgtgagaccccccagcggccccagaagaagccagagcgccagcgacgcccccctgagccagcacaccctggagaccctgctggaggagatcaaggccctgagagagagagtgcaggcccaggagcagagaatcaccgccctggagaacatgctgtgcgagctggtggacggcaccgactag

SEQ ID NO: 318168 - DNA, 2606 bp, Artificial Sequence
  derived and/or modified sequence
gatggcagcggcagctggggctgcagcggcgccgggctctagagagccgcaggatcggccagagtgcggagctggacacccgggtcccagatactacagacacccggagaggtggctccttcgccctgaagccttcctcggccccctacgcactcgggccccttccgcagaggattcgcagcgtgagcgccccgcagcccgctcaggaccagctatgagcagacgtgtggttcggcaaagcaagttccgccatgtgtttgggcaggcagcaaaggccgaccaggcctacgaggacatccgtgtgtccaaggtcacatgggacagctccttctgtgccgtcaaccccaaattcctggccattattgtggaggctggaggcgggggtgccttcatcgtcctgcctctggccaagacagggcgagtggataagaactacccactggtcactgggcacactgcccctgtgctggatattgactggtgtccacacaatgacaacgttatcgccagtgcctcagacgacaccaccatcatggtgtggcagattccagactatacccccatgcgcaacattacggaacctatcatcacacttgagggccactccaagcgtgtgggcatcctctcctggcaccctactgccaggaatgtcctgctcagtgcaggtggtgacaatgtgatcatcatctggaatgtgggcaccggggaggtgctgctgagcctggatgatatgcacccagacgtcatccacagtgtgtgctggaacagcaacggtagcctgctagccaccacctgcaaggacaagaccttgcgcatcattgaccccagaaaaggccaagtggtggcggagaggtttgcggcccacgaggggatgaggcccatgcgggccgtcttcacgcgccagggccatatcttcaccacgggcttcacccgcatgagccagcgagagctgggcctgtgggacccgaacaacttcgaggagccagtggcactgcaggagatggacacaagcaacggggtcctattgcccttttacgatcccgactccagcatcgtctacctgtgtggcaagggcgacagcagcattcggtactttgagattaccgacgagccgcctttcgtgcactacctgaacacgttcagcagcaaagagccgcagcggggcatgggtttcatgcccaaaaggggactggatgtcagcaagtgtgagatcgcccggttctacaagctacacgaaagaaagtgtgaacctatcatcatgactgtgccccgcaagtcagacctcttccaggacgatctgtacccggatacgccaggcccggagccggccctagaagcggacgaatggctatccggccaggacgccgaacccgtgctcatttcgctgagggacggctatgtgccccccaagcaccgcgagctccgggtcacgaagcgcaacatcctggacgtgcgcccgccctccggcccccgccgcagccagtcggccagcgacgcccccttgtcgcagcacaccctggagacgctgctggaagagatcaaggccctccgcgagcgggtgcaggcccaggagcagcgcatcacggctctggagaacatgctgtgcgagctggtggacggcacggactagccccgcgcgccaggcaggcggagcggggcggggcgcacaagctcggccccgccccggcttttagtcccgaactccggaccccgccttcttgggctgggcccgggggcgggactggggagggaactccgcccctcgcgggagaccagaactcttggagcttaggggagacccacgtcgctccagcggaggctggactgcgagcctcgtctgggactcggctggagctggcctagggaggcctggggtaacctggggggctcagcaatggtgctgcacggcgaggtggtgtccccctttgtcctccgcccagggcagggaaagtgcttagtattagcgtgatgcttggggttattggagcctgagcttgacctcaaacgggtggcgatttgatgggtacccccaggctggggaaaatgacagcgcttctcctaatcagctcactggattccatcaccctgagcggtaaaccagatgggcgtcaccccagttctgcagacacatacacaacccgtttgctgcagagccggacccagtggctacacccacagcggtctgtggtagagaactctcttccttctttccaccgacaggggcgagggctgcttcctcgcggcagcccccgcgaagaaatctcgagagaactggcatgaggagttaggttcatcacaaatacacacacactgcccccaaccctctgccgttgcctctctcagaaaaacaagacgtactgaatgaaatattttactaagcgttcagtctgtgcctcctgcatgggtgggagtgaggggaacgagacccccagcctctgcaaatgctacccccaggctcctgggagacctggcgatgcactcctgggctcagggtccatcaggcagcctcttaccctagagctctctccactctgaggttcagaaggaccccaacccacaccgtaggcgttccccccaagtaaagttaggtagcaaaagcctccggt

SEQ ID NO: 318169 - DNA, 1629 bp, Artificial Sequence
  derived and/or modified sequence
atggcagccgcggctggagccgctgccgcgcctggcagccgagaacctcaagaccgcccggaatgtggcgccgggcatcctggccctcgttactacaggcaccctgagcggtggctcttacggcccgaagcatttctcggccctctgcgaaccagggcgccttcagctgaagatagccagagagagcgacctgccgccagatccggaccggccatgtcaagaagggtagtgcgccagtcaaagttcaggcatgtgttcggacaggccgctaaggccgatcaggcatatgaggacattcgcgtttccaaagtgacctgggacagctcgttttgcgctgtgaatccgaagttcctcgctattattgtagaggcagggggcggcggagcgttcatagtccttccactcgcaaagaccggccgtgtcgacaagaactacccacttgttacaggccatactgccccagtgctggatatagactggtgtccacataacgacaacgtaattgcatccgcaagcgacgatacaactataatggtatggcagatcccggattacacccccatgagaaacatcacagagcccatcataactctggagggtcattctaagagggtaggcatcctgtcctggcatcctaccgccaggaatgtactgctctcagccggaggggacaatgtaatcattatctggaacgtcggcactggcgaagtgctgctctcccttgacgatatgcatcccgacgtcatccattcagtgtgttggaatagtaatggctcattgctcgcaaccacctgcaaggataagacactgcgaattatagacccaaggaaagggcaggtggtggctgagcggttcgccgcccatgagggaatgcggcccatgcgagctgtgttcacccgacaggggcacattttcaccaccggcttcacacggatgtctcagagagaacttggcctttgggatcccaataactttgaagagcccgtggccctgcaggagatggacacttctaacggcgttttgctccccttctatgacccagactcgtctatcgtctacctttgcggaaaaggagactcatctattcgatatttcgagatcacagacgagcctccctttgtacactacttaaacacattctcaagtaaagaaccgcagcgagggatgggctttatgcccaagcgcgggctggatgttagtaagtgtgaaatcgcacgcttttacaagctccacgagaggaaatgcgagcccatcataatgaccgtgccgcgaaagtccgatcttttccaggacgacttatatcccgacactcccgggcccgagcccgcattggaagcagacgagtggttgagtggccaggacgcagagcctgtcctcatttcactccgcgacgggtacgtgccgcccaaacatagggaactgcgagtaactaaacgcaatatactggatgtgcggccgccatccggacctaggcgatcccagagcgcaagcgatgcccccctgtcgcagcatacgctcgagaccctgctggaggaaatcaaggctctccgcgaacgtgtccaggcccaggaacaacggataacggccctcgagaacatgctctgtgaactcgtagacggaaccgattag

SEQ ID NO: 318170 - DNA, 1629 bp, Artificial Sequence
  derived and/or modified sequence
atggctgctgctgctggagctgctgctgcccctggcagccgggagccccaggacagaccagaatgtggggccggccaccctggcccccgctactaccgccaccctgagcgctggctgctgcggcctgaggccttcctgggccccctgcggacccgggcccccagcgctgaggacagccagcgggagaggcctgctgcccggagcggccctgccatgagccggcgggtggtgcggcagagcaagttccgccacgtgtttggccaggccgccaaggctgaccaggcctatgaggacatccgggtgtccaaggtgacctgggacagcagcttctgtgctgtgaaccccaagttcctggccatcatcgtggaggccggcggcggcggggccttcatcgtgctgcccctggccaagacaggccgggtggacaagaactaccccctggtgacaggccacacagcccctgtgctggacatcgactggtgcccccacaatgacaacgtcatcgccagcgccagtgatgacaccaccatcatggtgtggcagatcccagactacacccccatgaggaacatcacagagcccatcatcaccctggagggccacagcaagagggtgggcatcctgtcctggcaccccacagccagaaatgtgctgctgtctgctggaggagacaacgtcatcatcatctggaatgtgggcaccggggaggtgctgctgagcctggatgacatgcacccagatgtgatccacagcgtgtgctggaacagcaatggcagcctgctggccaccacctgcaaggacaagaccctgcgcatcatcgaccccaggaagggccaggtggtggccgagagatttgctgcccacgagggcatgaggcccatgagagctgtgttcacccggcagggccacatcttcaccaccggcttcaccaggatgagccagcgggagctgggcctgtgggaccccaacaactttgaggagcctgtggccctgcaggagatggacaccagcaatggagtgctgctgcccttctatgaccctgacagcagcatcgtgtacctgtgtgggaaaggagacagcagcatccgctactttgagatcacagatgagcccccatttgtgcactacctgaacaccttcagcagcaaggagccccagaggggcatgggcttcatgcccaagaggggcctggatgtgtccaaatgtgagatcgcccgcttctacaagctgcacgagaggaaatgtgagcccatcatcatgacagtgcccaggaagagtgacctcttccaggatgacctgtacccagacaccccaggccctgagcccgccctggaggctgatgagtggctgagcggccaggatgctgagcctgtgctgatcagcctgagagatggctacgtgccccccaagcaccgggagctgcgggtgaccaagaggaacatcctggatgtgcggccccccagcggccccaggaggagccagagcgccagtgatgcccccctgagccagcacaccctggagaccctgctggaggagatcaaggccctgcgggagcgggtgcaggcccaggagcagaggatcacagccctggagaacatgctgtgtgagctggtggatggaacagactag

SEQ ID NO: 318171 - DNA, 1629 bp, Artificial Sequence
  derived and/or modified sequence
atggccgccgccgccggcgccgccgccgcccccggcagccgggagcctcaggaccgcccagaatgcggagccggccaccccgggccccgctattaccggcaccctgagaggtggttgctgaggccagaagcctttctaggacctctgaggactagagccccctccgcagaagatagccagagggagaggcctgctgccagatcaggacctgcgatgtctcggcgggtggtgaggcagagcaaattccgccacgtatttggtcaggccgccaaagctgatcaggcctatgaagatatccgagtgagcaaagtgacatgggattcaagcttctgcgcagtcaatcccaagttcctagccattatcgtagaggcaggcggtggtggcgccttcatcgtcttgcccctggcaaagacagggcgggtcgataagaattatcctctggtgactggacatacagctccagtgctggacatagactggtgcccgcataatgacaacgttatcgcgagcgcctccgacgatactacaattatggtgtggcagatcccggactacacaccaatgcggaacattaccgagccgataattacactagagggccactcaaagcgcgtgggaattctttcatggcatccaaccgcccgcaatgtgttacttagcgcaggcggggacaacgttatcattatctggaacgtggggacaggagaggtacttctgtctctggatgacatgcatcccgacgtgatccattctgtttgttggaattcaaacggatctctcttggcaactacttgcaaagataaaacactccggattatagaccctcggaagggtcaggtggtggcagaacgttttgcagcacatgaagggatgcgtcctatgcgcgccgtattcacgcggcaaggacatatcttcaccaccgggtttacacgtatgagccagagggaactaggtctgtgggatccaaacaactttgaggaacccgtagcactgcaggaaatggacacatccaatggggttcttttacccttctatgatcctgacagctcaatcgtgtatttgtgtgggaagggcgacagcagcattcgttacttcgaaattactgacgagcctccctttgtccattatcttaacacgttcagctcaaaggaaccgcaaagaggtatgggtttcatgccgaagaggggtcttgatgtgagcaagtgcgagattgccagattctacaaactgcatgaacggaagtgtgagcccataattatgacggttcctagaaaaagcgatctgtttcaagacgacctgtatccagatacacccgggcccgagccagctcttgaggccgatgaatggttatcagggcaggatgcagaacctgtgcttatctctttgagagacgggtacgtgcctccaaagcaccgggagttgcgggttaccaagcggaacatcctcgacgtcagaccgccttcggggccccgtagatcccagtccgcctcagatgccccactgtctcagcatacactagaaacactgctggaggagatcaaagccctgcgggagagagtgcaggctcaggagcagcggattacagccctggaaaacatgctttgtgagctggtggacggtacagattag

SEQ ID NO: 318172 - DNA, 1629 bp, Artificial Sequence
  derived and/or modified sequence
atggctgcagctgcaggcgcagcggctgccccaggttctcgcgagccccaggacagacctgagtgcggtgcagggcatccaggacccagatattacagacatcctgagaggtggctgttacggcctgaggccttcctagggcctctgcggacgagggcgccatcagccgaagacagccaacgcgagagacccgcagccagatcaggtcctgcaatgtctcgaagagtcgtgcgccaatcaaagtttcgacacgtttttggacaggccgctaaggccgaccaggcatatgaggacattcgcgtgagtaaggtaacttgggactccagcttttgtgccgttaatcctaaatttcttgcaattatcgtagaagctggaggaggtggcgcatttatagttctccctcttgctaagactggcagagtggacaaaaactaccccctggttactggccacaccgccccagtgctggacatagactggtgtcctcacaatgacaacgtgatagcctctgcctcggacgataccaccatcatggtatggcagatccctgattacacccccatgaggaatattacggaacccattattacgctggaaggccactctaaaagagtgggcattctgtcttggcacccaacagctcggaacgtcctgctatccgcaggcggtgacaacgtaatcatcatttggaatgtgggcactggagaggtgcttctgtctctggatgacatgcaccccgatgtgatccacagcgtgtgctggaactcaaacggttctctgctagccacaacttgtaaggataagacattacgaatcatcgatccccgaaagggacaggtcgtggctgagagatttgcggcacacgagggcatgagaccaatgagagctgtcttcactcggcaaggacacatcttcactaccggattcacacggatgtcacagcgagagctcggactctgggatccaaacaatttcgaagagccagtcgcacttcaggaaatggacacttccaatggggtgctgctgcctttttatgacccagattcctccattgtgtacctatgtggcaaaggggattctagcattagatatttcgaaatcactgacgagccaccttttgttcactatctcaatacttttagttctaaagaacctcaaagggggatgggtttcatgcctaaaagaggtctggacgtctctaagtgcgaaattgcaagattctataagctccacgaaagaaaatgtgagccaatcattatgacagtgccaaggaagagcgatctgtttcaggatgatctgtaccccgataccccaggccctgaaccggctctggaggctgacgaatggctgagcggtcaggatgcagaacctgtgctaatttcccttcgggatggatatgttccaccaaagcaccgagagctgcgggtcacaaaaagaaacatacttgatgtacgaccgccaagtggacctcgccgaagtcagagcgctagcgacgccccactgagccagcacactctggaaaccctattggaggaaatcaaggccctgagagagagagttcaggctcaggagcagagaattacagccctcgagaacatgctttgtgagctggtggatggaactgattag

SEQ ID NO: 318173 - protein, 567 aa, Artificial Sequence
  derived and/or modified sequence
MEAERRPAPGSPSEGLFADGHLILWTLCSVLLPVFITFWCSLQRSRRQLHRRDIFRKSKHGWRDTDLFSQPTYCCVCAQHILQGAFCDCCGLRVDEGCLRKADKRFQCKEIMLKNDTKVLDAMPHHWIRGNVPLCSYCMVCKQQCGCQPKLCDYRCIWCQKTVHDECMKNSLKNEKCDFGEFKNLIIPPSYLTSINQMRKDKKTDYEVLASKLGKQWTPLIILANSRSGTNMGEGLLGEFRILLNPVQVFDVTKTPPIKALQLCTLLPYYSARVLVCGGDGTVGWVLDAVDDMKIKGQEKYIPQVAVLPLGTGNDLSNTLGWGTGYAGEIPVAQVLRNVMEADGIKLDRWKVQVTNKGYYNLRKPKEFTMNNYFSVGPDALMALNFHAHREKAPSLFSSRILNKAVYLFYGTKDCLVQECKDLNKKVELELDGERVALPSLEGIIVLNIGYWGGGCRLWEGMGDETYPLARHDDGLLEVVGVYGSFHCAQIQVKLANPFRIGQAHTVRLILKCSMMPMQVDGEPWAQGPCTVTITHKTHAMMLYFSGEQTDDDISSTSDQEDIKATE

SEQ ID NO: 318174 - DNA, 7766 bp, Artificial Sequence
  derived and/or modified sequence
ctccagctcgcggccccgcgcgccggatcggcgtgcgtgcggctggagccttaagcgtttcccccgcccggcttcatccctgctggcggcccagcgtcgttctcctcctgcgcgaggcggccaaggcctgctggcccggagccgcgcctccacccgcgcgaggtatcgtccttggagaagatggaagcggagaggcggccggcgccgggctcgccctccgagggcctgtttgcggacgggcacctgatcttgtggacgctgtgctcggtcctgctgccggtgttcatcaccttctggtgtagcctccagcggtcgcgccggcagctgcaccgcagggacatcttccgcaagagcaagcacgggtggcgcgacacggacctgttcagccagcccacctactgctgcgtgtgcgcgcagcacattctgcagggcgccttctgcgactgctgcgggctccgcgtggacgagggctgcctcaggaaggccgacaagcgcttccagtgcaaggagattatgctcaagaatgacaccaaggtcctggacgccatgccccaccactggatccggggcaacgtgcccctgtgcagttactgtatggtttgcaagcagcagtgtggctgtcaacccaagctttgcgattacaggtgcatttggtgccagaaaacagtacatgatgagtgcatgaaaaatagtttaaagaatgaaaaatgtgattttggagaattcaaaaacctaatcattccaccaagttatttaacatccattaatcagatgcgtaaagacaaaaaaacagattatgaagtgctagcctctaagcttggaaagcagtggaccccattaataatcctggccaactctcgtagtggaactaatatgggagaaggactgttgggagaatttaggatcttgttgaatccagtccaggtttttgatgtaactaaaactcctcctatcaaagccctacaactctgtactcttctcccatattattcagctcgagtacttgtttgtggaggggatgggactgtagggtgggtcctggatgcagttgatgacatgaagattaagggacaagaaaagtacattccacaagttgcagttttgcctctgggaacaggcaacgatctatccaatacattgggttggggtacaggttatgctggagaaattccagttgcgcaggttttgcgaaatgtaatggaagcagatggaattaaactagatcgatggaaagttcaagtaacaaataaaggatactacaacttaagaaaacccaaggaattcacaatgaacaactatttttctgttggacctgatgctctcatggctctcaattttcatgctcatcgtgagaaggcaccatctctgttttctagcagaattcttaataaggcggtttacttattctatggaaccaaagattgtttagtgcaagaatgtaaagatttgaataaaaaagttgagctagaactggatggtgagcgagtagcactgcccagcttggaaggtattatagttctgaacatcggatactggggcggtggctgcagactatgggaagggatgggggacgagacttaccctctagccaggcatgacgatggtctgctggaagtcgttggagtatatgggtctttccactgtgctcagattcaagtaaaactggctaatccttttcgaataggacaggcacatacagtgaggctgattttgaagtgctccatgatgccaatgcaggtggatggggagccttgggcccaagggccctgcactgtcaccataactcacaagacacatgcaatgatgttatatttctctggagaacaaacagatgatgacatctctagtacttcggatcaagaagatataaaggcgactgaatagatggatgagggagtgaaaactttgcatagaatcctcacgcaagtagatacatgttcatccaaaagtattaatagaaattctctatcagctattcagtcttaatttcactagtagtataatgggtatacatttttgtaaatagcatccccaaaccagccagccttcagttatttacaaatgtttgttcttttttcagcaaaatacttcaaatgaatagtattaacttacaaaaagtcacaaaaacttacatgagagtgaaaatttgttatgactgttttgagagtgggactcactctgaagtatgtgctgtctcatgtcttatttttgaaccatgcatatgatggacacacaatggatggacacattatatctccaacaaggtgtgggtggaaagatcaaattaacctgcttttttgaaaggaaatgattactgtcaaaccagcatggttaattgtgagcatcctcctgcagcatgccccttaagattttctacaacccaaaccaagtgtatgtattgatttctaggaacccccaaaaggagaatagtaaaaaaagatcatacttaaaatttgtattacaatttttattttaggaacttattcagacacgtaaatgttgtttaattctgtaggtaaccatttgagctgcaattcaggatcttttttataacaccagtgtagccaaaagagaaacagataagtgaattggtaagaaataagattcagagcacttgggattgtaagttataggttctgagctgaactgtttatcagccgctctttttattaaaagacagtgtcaacacttcaaaaaacgtgcttaaaggagacaacggtgagattaattgcttagaaaaagctcaaggctgactgataagttttaaaaatttggtggtcttgtagtattttgaaatacagtagtcttttaacagaatttccccttagggaggtaagtggacagaaatctttgctaaaatgtttatatcatatttattttaaaatgagagagatatatttttaaattatttattatttaccttgtggtatggtacctgtgtttagtgtttacgttctgtagctttatttaataagttaaattgatcacataaattctgctagtcacaatcagatagaaatttagtctattaattaaaattctaatttaattctcctgacagaaatctagatattcttattcttcacaaatattcctcattgtattgaaaaatgaaggagggcatgaaaagcactagggaactacttttggataactgaaagctttgtttcattgttttatttgcccctcaattgccacaaacttactgaagggctagtttcatggttcccattagagggtgcttgttcgctgctgttgaccagcccaagggtcgtgacccacaggtcggctgacccagagggcatccagcctggtgtttttctgacacatggcccaggctttgtggtctttcatgacattaatctctgaaagatcagaatgtatcccccaaaataccattagctatctttgagggtctattatgaatctgtcatccatgaattgccataaacctaagtttgcctcacctcaggcccagaccatgttttcaaagagcaacttagtaatgtatacagtagtcagtacattttatgaaatactctattttgctaaattaacctcttgcagatctcctcaggtgatcttaaattctagtcttgagaaactttgtgagcagatctgttttcagcttctttatatacctttcatggtaagtaaccatggcagtgaggatggcagagttttgttttttttttttttaatgggccaatcatgttctgagtattatgaagtttatcctttcattcatgatcaaaattgttaaagacatcacattttataaatacactgttaaatccactttgctgtaggttatagtttacctgttatataattcgtagtgctaattgtagtagaagcaaatcaatttaggatgttggaacgaaaataatcacaataactaatacagctttttaattgtgaaaactacaattaaaaattataattttaataccaaccataatattacactgtatttagaacaggcttatgtaaaatgccctcatttatctaaataagttgattttttggttattgtaatctagtaaggtttttgcatcactactggtctgtcatgaagtttttctgctggcttattcacttatttagacttcatttagggaagctatttcagaataccatctcataaaatgtatcattatcttgtttttgcaaaattcacttactttttgggcacatttacccagcatttcaaataagtgtataggcatgtgccttgtttaagtacaatttataagacttcatgtttgcaagttacatattagggtagtgattgtttatattaccagggattctacactttaccaaaaaaaattgccataagattttcctgttccattttaaattgtcttgatatttaaaaaaataacttctacattctcaggaagaaatacatgaagtaaatcatatctccatgtctgtttccagatttctctaatctttttactatcccaatacattcctaattcctataaacgtagtggcttaaatactgaatacctggcagctcttaaagatcccttaggcagatgatgataattttcagtgtttcgtcatgtttaatagaaatcaaactgacttgtgttttaaaatacaagttgtctgctagtaaagttacatgatttaggtgtgttttaggttttctgcaacaattagctgtgaacccctaatgtagctaagtttatacaaattttataatcaaaattatttatttttatttttttagagtatgtcaaaaacatatagtgtttgctttgtgaaatacatttgcttagagttataaaatatactgtgactcagaaattgtaaagtcagtttgcgttgtaaaaatgaatactaccagcatgtcaaaagaaaaataatttacatttgtaatataaagtaaaattgtatttaatatatttattgaattttaaatttgcactaacttgaaaactttaaaggttatactaatttaatgattaatgtggacccaaatacataatttggccaaaaaagtcattagaatgggtaatggttttgtgtggttttccttcaaaatgataatattgaagcaagaaccagcattttatattgataatttttttaatatttctacccagttgaggacagtggaatataagtagatatatttaaaatatctagatatttaaaaagaaagaaaaggttgtttatcccaatctgaattcattctcagcaacaagacagaaaaggtggtttgggttttgcttttaaacagtgtccccctgtctttttcaatttttcccttgaagcctttctcttgttcttcagagtacgcgctgcaggctatctgcagcatcagaatgcctgggcaggctgttgaaagtatggattcctgagcccaacccttaacttaatgattccctgtctctggagatgcaacatagaaatctctgtttttattaacaagcgcctcaggcgattcttaagcatactgaaatttgaaagcttctggtctgaacctcatgtattcacctagggcttttgctaggtgggataccatgccgaaaaattgaattaattgtatgttcttaaaattgtttttcttctactccgctgtcctcttccctcaaaatcacttttctaaaagaactctatgaaaaacttatttgtatcatacccaaattgatatatttgtctgaactctgttacataaaaattggtatgattcatatgtggaatcagtttttggactgtgacccatgcagtgttgggggacaaggagttgcttcaggagttagtgcagtgcgcctccaaggggcagtgagccatggaggcgcctgccttctcactgcagtcaatgcagccacacttgtgtatactgagtgctgcttcagatctcagtagataaaataattccacatttaaaatgattctgctattttttataaagggtttgaaagccactactataatgactttgtcacctaattgattttctactaatttttacatattcagaaacttcgtgtttttttggtggacagaatattttggaggtctccgtcgctgtttagaatgtggccacttggctgtttcacagtttttaaagctattttattgaatagtaaagcagtgaacttagcctttgttctttgtgtttctaatttaagcatatagtctatttaatttttgatatgtaaatacacatcaatacatatatatttacccatgtggccctgtgtagtcagtgcatgaggcttgcatagcccagaaaggtacattccagggttctggggaaagaattttaaaatgccatcctctaatacagacgtttataaaacttaaatgaaatgattgggcttaaccatatgcaagaaagtctgcagaaaataaatcacctagaaactataaatagaaatgtgctgctgaggctgggcacggtggctcacacctgtaatcccagcacttggggggctaagggaggcgtatcacctgaggtcaggagtttgagacaagcctggtcaacatggtgaaacgccgtctctactaaaaatacaaaaaaaattagccaggtacattggcacatgcctttaatcccagctaatcaggaggctgaggcacgagaattgctcgaacccaggcggcagagcttgcagtgagcggagatcacatgactgcactccagcctgggcaacagagcaagactccatctcaaaaaaaaaaaggccgggcgtggtggctcacgcctgtaatcccagcactttgggaggctgaggcaggtggatcacgaggtcaggagatcgagactatcctggctaacacggtgacaccccgcctctactaaaaatccaaaaatttagccgggcatggtggcgggcacctgtagtcccagctactcgggaggctgaggcaggagaatggcgtgaacccgggaggcagagcttgcagggaggcggagcttgcagcgagccgagatagtgccactgcagtggggcctgggccaaagagtgagactccatctcaaaaaaaaaaaaaaagaaagaaatgtgttgctggtatcagatatcagaccaagaacacttcagtctctctaaggatgccctgagctacctcactgttaaaggacgacatcaacacagaatgcactaaacaggaaataagctgtaatctagagaatttccattatgtgttactttttggtgactaacatggaatgttgaaaaggaagagctggaaagctcagttgttttccttgttcctctgacattgtccaggcaagagggcatcctgatcagatgagtagatttggctgagaaaaaccctagagtaaggcaggcactttgtggaggtggatgatgatggctcataaaaacgtttgttctcagtccagttcagggctctgccagcagtctttcagatctgaactgcttaaacaaaccctacagataaattggcactctgatttgtaattctgtttgtacaagtttagagcagcctagctcgagtcctcaaccccagtcctcttagaagtgaactgattgcactggatccctaaacccacaatgttgaggacacatgtgatgactccacttgctcagccagctggcctcttgcactttcccctgcccaccacttgtaactaccacttaattatcttgtgttaattgcttttgttgtgttgggtctgtatttttgtggtcagtgcctgcaggcagaaatgtgaaagcatttggtatgttgaagatacttgcttcttttttaataaaattaaaagtgcagcacgt

SEQ ID NO: 318175 - protein, 290 aa, Artificial Sequence
  derived and/or modified sequence
MELPAVGEHVFAVESIEKKRIRKGRVEYLVKWRGWSPKYNTWEPEENILDPRLLIAFQNRERQEQLMGYRKRGPKPKPLVVQVPTFARRSNVLTGLQDSSTDNRAKLDLGAQGKGQGHQYELNSKKHHHHAVGLNLSHVRKRCLSETHGEREPCKKRLTARSISTPTCLGGSPAAERPADLPPAAALPQPEVILLDSDLDEPIDLRCVKTRSEAGEPPSSLQVKPETPASAAVAVAAAAAPTTTAEKPPAEAQDEPAESLSEFKPFFGNIIITDVTANCLTVTFKEYVTV

SEQ ID NO: 318176 - DNA, 219 bp, Artificial Sequence
  derived and/or modified sequence
atggagaagtggaagctgggccggcagatccagcccccctggcccctggcccacgcccggggctcctggatggccctgcccaggtctgagcagctgggcaccggcggggaccaggactggcagctgcagggccacacccgggccacagagaccaaggagaacttccagaaggagagcatggtgaagagcctgaggatgcagaggcggcagggcgagtag

SEQ ID NO: 318177 - DNA, 13458 bp, Artificial Sequence
  derived and/or modified sequence
atgaccatggcccccgacgtgagactggagtacctggaggaggtggccagcatcgtgctgaagttcaagcccgacaagtggagcaagctgatcggcgccgaggagaacgtggccctgttcaccgagttcttcgagaagcccgacgtgcaggtgctggtgctgaccctgaacgccgccggcatgatcatcccctgcctgggcttcccccagagcctgaagagcaagggcgtgtacttcatcaagaccaagagcgagaacatcaacaaggacaactacagagccagactgctgtacggcgacatcagccccacccccgtggaccagctgatcgccgtggtggaggaggtgctgagcagcctgctgaaccagagcgagaacatggccggctggccccaggtggtgagcgaggacatcgtgaagcaggtgcacagactgaagaacgagatgttcgtgatgagcggcaagatcaagggcaagaccctgctgcccatccccgagcacctgggcagcctggacggcaccctggagagcatggagagaatccccagcagcctggacaacctgctgctgcacgccatcgagaccaccatcatcgactggagccaccagatcagagacgtgctgagcaaggacagcgcccaggccctgctggacggcctgcaccccctgccccaggtggagttcgagttctgggacaccagactgctgaacctgaagtgcatccacgagcagctgaacagacccaaggtgaacaagatcgtggagatcctggagaaggccaagagctgctactggcccgccctgcagaacgtgtacaccaacgtgaccgagggcctgaaggaggccaacgacatcgtgctgtacctgaagcccctgagaatcctgctggaggagatggagcaggccgacttcaccatgctgcccaccttcatcgccaaggtgctggacaccatctgcttcatctgggccaccagcgagtactacaacacccccgccagaatcatcgtgatcctgcaggagttctgcaaccagatcatcgagatgaccagaaccttcctgagccccgaggaggtgctgaagggcctgcagggcgagatcgaggaggtgctgagcggcatcagcctggccgtgaacgtgctgaaggagctgtaccagacctacgacttctgctgcgtgaacatgaagctgttcttcaaggacaaggagcccgtgccctgggagttccccagcagcctggccttcagcagaatcaacagcttcttccagagaatccagaccatcgaggagctgtacaagaccgccatcgagttcctgaagctggagaagatcgagctgggcggcgtgagaggcaacctgctgggcagcctggtgaccagaatctacgacgaggtgttcgagctggtgaaggtgttcgccgactgcaagtacgaccccctggaccccggcgacagcaacttcgacagagactacgccgacttcgagatcaagatccaggacctggacagaagactggccaccatcttctgccagggcttcgacgactgcagctgcatcaagagcagcgccaagctgctgtacatgtgcggcggcctgatggagagacccctgatcctggccgaggtggcccccagatacagcgtgatgctggagctgttcgacgccgagctggacaacgccaagatcctgtacgacgcccagatggccgccagcgaggagggcaacatccccctgatccacaagaacatgccccccgtggccggccagctgaagtggagcctggagctgcaggagagactggaggtgagcatgaagcacctgaagcacgtggagcaccccgtgatgagcggcgccgaggccaagctgacctaccagaagtacgacgagatgatggagctgctgagatgccacagagagaagatctaccagcagtgggtggccggcgtggaccaggactgccacttcaacctgggccagcccctgatcctgagagacgccgccagcaacctgatccacgtgaacttcagcaaggccctggtggccgtgctgagagaggtgaagtacctgaacttccagcagcagaaggagatccccgacagcgccgagagcctgttcagcgagaacgagaccttcagaaagttcgtgggcaacctggagctgatcgtgggctggtacaacgagatcaagaccatcgtgaaggccgtggagttcctgctgatcaagagcgagctggaggccatcgacgtgaagctgctgagcgccgagaccaccctgttctggaacggcgagggcgtgttccagtacatccaggaggtgagagagatcctgcacaacctgcagaacagaatgcagaaggccaagcagaacatcgagggcatcagccaggccatgaaggactggagcgccaaccccctgttcgagagaaaggacaacaagaaggaggccctgctggacctggacggcagaatcgccaacctgaacaagagatacgccgccgtgagagacgccggcgtgaagatccaggccatggtggccgagaacgccgagctgttcagagccgacaccctgagcctgccctggaaggactacgtgatctacatcgacgacatggtgctggacgagttcgaccagttcatcagaaagagcctgagcttcctgatggacaacatggtgatcgacgagagcatcgcccccctgttcgagatcagaatggagctggacgaggacggcctgaccttcaaccccaccctggaggtgggcagcgacagaggcttcctggccctgatcgagggcctggtgaacgacatctacaacgtggccagactgatccccagactggccaaggacagaatgaactacaagatggacctggaggacaacaccgacctgatcgagatgagagaggaggtgagcagcctggtgatcaacgccatgaaggaggccgaggagtaccaggacagcttcgagagatacagctacctgtggaccgacaacctgcaggagttcatgaagaacttcctgatctacggctgcgccgtgaccgccgaggacctggacacctggaccgacgacaccatccccaagaccccccccaccctggcccagttccaggagcagatcgacagctacgagaagctgtacgaggaggtgagcaagtgcgagaacaccaaggtgttccacggctggctgcagtgcgactgcagacccttcaagcaggccctgctgagcaccatcagaagatggggcttcatgttcaagagacacctgagcaaccacgtgaccaacagcctggccgacctggaggccttcatgaaggtggccagaatgggcctgaccaagcccctgaaggagggcgactacgacggcctggtggaggtgatgggccacctgatgaaggtgaaggagagacaggccgccaccgacaacatgttcgagcccctgaagcagaccatcgagctgctgaagacctacggcgaggagatgcccgaggagatccacctgaagctgcaggagctgcccgagcactgggccaacaccaagaagctggccatccaggtgaagctgaccgtggcccccctgcaggccaacgaggtgagcatcctgagaagaaagtgccagcagttcgagctgaagcagcacgagttcagagagagattcagaagagaggcccccttcagcttcagcgaccccaacccctacaagagcctgaacaaggtgttcctgctgaagggcatcatggaggccctgagcaagagcggcggcctgttcgaggtgcccgtgcccgactacaagcagctgaaggcctgccacagagaggtgagactgctgaaggagctgtgggacatggtggtggtggtgaacaccagcatcgaggactggaagaccaccaagtggaaggacatcaacgtggagcagatggacatcgactgcaagaagttcgccaaggacatgagaagcctggacaaggagatgaagacctgggacgccttcgtgggcctggacaacaccgtgaagaacgtgatcaccagcctgagagccgtgagcgagctgcagaaccccgccatcagagagagacactggcagcagctgatgcaggccacccaggtgaagttcaagatgagcgaggagaccaccctggccgacctgctgcagctgaacctgcacagctacgaggacgaggtgagaaacatcgtggacaaggccgtgaaggagagcggcatggagaaggtgctgaaggccctggacagcacctggagcatgatggagttccagcacgagccccaccccagaaccggcaccatgatgctgaagagcagcgaggtgctggtggagaccctggaggacaaccaggtgcagctgcagaacctgatgatgagcaagtacctggcccacttcctgaaggaggtgaccagctggcagcagaagctgagcaccgccgacagcgtgatcagcatctggttcgaggtgcagagaacctggagccacctggagagcatcttcatcggcagcgaggacatcagaacccagctgcccggcgacagccagagattcgacgacatcaaccaggagttcaaggccctgatggaggacgccgtgaagacccccaacgtggtggaggccaccagcaagcccggcctgtacaacaagctggaggccctgaagaagagcctggccatctgcgagaaggccctggccgagtacctggagaccaagagactggccttccccagattctacttcgtgagcagcgccgacctgctggacatcctgagcaacggcaacgaccccgtggaggtgagcagacacctgagcaagctgttcgacagcctgtgcaagctgaagttcagactggacgccagcgacaagcccctgaaggtgggcctgggcatgtacagcaaggaggacgagtacatggtgttcgaccaggagtgcgacctgagcggccaggtggaggtgtggctgaacagagtgctggacagaatgtgcagcaccctgagacacgagatccccgaggccgtggtgacctacgaggagaagcccagagagcagtggatcctggactaccccgcccagatctggtggaccaccgaggtgggcctggccttcgccagactggaggagggctacgagaacgccatcagagactacaacaagaagcagatcagccagctgaacgtgctgatcaccctgctgatgggcaacctgaacgccggcgacagaatgaagatcatgaccatctgcaccatcgacgtgcacgccagagacgtggtggccaagatgatcgtggagagcagccaggccttcacctggcaggcccagctgagacacagatgggacgaggagaagagacactgcttcgccaacatctgcgacgcccagatccagtacagctacgagtacctgggcaacacccccagactggtgatcacccccctgaccgacagatgctacatcaccctgacccagagcctgcacctgatcatgggcggcgcccccgccggccccgccggcaccggcaagaccgagaccaccaaggacctgggcagagccctgggcaccatggtgtacgtgttcaactgcagcgagcagatggactacaagagctgcggcaacatctacaagggcctggcccagaccggcgcctggggctgcttcgacgagttcaacagaatcagcgtggaggtgctgagcgtgatcgccgtgcaggtgaagtgcgtgcaggacgccatcagagccaagaagaaggccttcaacttcctgggcgagatcatcggcctgatccccaccgtgggcatcttcatcaccatgaaccccggctacgccggcagagccgagctgcccgagaacctgaaggccctgttcagaccctgcgccatggtggtgcccgacttcgagctgatctgcgagatcatgctgatggccgagggcttcctggaggccagactgctggccagaaagttcatcaccctgtacaccctgtgcaaggagctgctgagcaagcaggaccactacgactggggcctgagagccatcaagagcgtgctggtggtggccggcagcctgaagagaggcgaccccagcagagccgaggaccaggtgctgatgagagccctgagagacttcaacatccccaagatcgtgaccgacgacctgcccgtgttcatgggcctgatcggcgacctgttccccgccctggacgtgcccagaaagagagacctgaacttcgagaagatcatcaagcagagcatcgtggagctgaagctgcaggccgaggacagcttcgtgctgaaggtggtgcagctggaggagctgctgcaggtgagacacagcgtgttcatcgtgggcaacgccggcagcggcaagagccaggtgctgaagagcctgaacaagacctaccagaacctgaagagaaagcccgtggccgtggacctggaccccaaggccgtgacctgcgacgagctgttcggcatcatcaaccccgtgaccagagagtggaaggacggcctgttcagcaccatcatgagagacctggccaacatcacccacgacggccccaagtggatcatcctggacggcgacatcgaccccatgtggatcgagagcctgaacaccgtgatggacgacaacaaggtgctgaccctggccagcaacgagagaatccccctgaacagaaccatgagactggtgttcgagatcagccacctgagaaccgccacccccgccaccgtgagcagagccggcatcctgtacatcaaccccgccgacctgggctggaaccccgtggtgagcagctggatcgagagaagaaaggtgcagagcgagaaggccaacctgatgatcctgttcgacaagtacctgcccacctgcctggacaagctgagattcggcttcaagaagatcacccccgtgcccgagatcaccgtgatccagaccatcctgtacctgctggagtgcctgctgaccgagaagaccgtgccccccgacagccccagagagctgtacgagctgtacttcgtgttcacctgcttctgggccttcggcggcgccatgttccaggaccagctggtggactacagagtggagttcagcaagtggtggatcaacgagttcaagaccatcaagttccccagccagggcaccatcttcgactactacatcgaccccgacaccaagaagttcctgccctggaccgacaaggtgcccagcttcgagctggaccccgacgtgcccctgcaggccagcctggtgcacaccaccgagaccatcagaatcagatacttcatggacctgctgatggagaagagctggcccgtgatgctggtgggcaacgccggcaccggcaagagcgtgctgatgggcgacaagctggagagcctgaacaccgacaactacctggtgcaggccgtgcccttcaacttctacaccaccagcgccatgctgcagggcgtgctggagaagcccctggagaagaagagcggcagaaactacggcccccccggcaccaagaagctggtgtacttcatcgacgacatgaacatgcccgaggtggacaagtacggcaccgtggccccccacaccctgatcagacagcacatggaccacagacactggtacgacagacacaagctgaccctgaaggacatccacaactgccagtacgtggcctgcatgaaccccaccagcggcagcttcaccatcgacagcagactgcagagacacttctgcgtgttcgccgtgagcttccccggccaggaggccctgaccaccatctacaacaccatcctgacccagcacctggccttcagaagcgtgagcatggccatccagagaatcagcagccagctggtggccgccgccctggccctgcaccagaagatcaccgccaccttcctgcccaccgccatcaagttccactacgtgttcaacctgagagacctgagcaacatcttccagggcctgctgttcagcaccgccgaggtgctgaagacccccctggacctggtgagactgtggctgcacgagaccgagagagtgtacggcgacaagatggtggacgagaaggaccaggagaccctgcacagagtgaccatggccagcaccaagaagttcttcgacgacctgggcgacgagctgctgttcgccaagcccaacatcttctgccacttcgcccagggcatcggcgaccccaagtacgtgcccgtgaccgacatggcccccctgaacaagctgctggtggacgtgctggacagctacaacgaggtgaacgccgtgatgaacctggtgctgttcgaggacgccgtggcccacatctgcagaatcaacagaatcctggagagccccagaggcaacgccctgctggtgggcgtgggcggcagcggcaagcagagcctgagcagactggccgcctacatcagcggcctggacgtgttccagatcaccctgaagaagggctacggcatccccgacctgaagatcgacctggccgcccagtacatcaaggccgccgtgaagaacgtgcccagcgtgttcctgatgaccgacagccaggtggccgaggagcagttcctggtgctgatcaacgacctgctggccagcggcgagatccccggcctgttcatggaggacgaggtggagaacatcatcagcagcatgagaccccaggtgaagagcctgggcatgaacgacaccagagagacctgctggaagttcttcatcgagaaggtgagaagacagctgaaggtgatcctgtgcttcagccccgtgggcagcgtgctgagagtgagagccagaaagttccccgccgtggtgaactgcaccgccatcgactggttccacgagtggcccgaggacgccctggtgagcgtgagcgccagattcctggaggagaccgagggcatcccctgggaggtgaaggccagcatcagcttcttcatgagctacgtgcacaccaccgtgaacgagatgagcagagtgtacctggccaccgagagaagatacaactacaccacccccaagaccttcctggagcagatcaagctgtaccagaacctgctggccaagaagagaaccgagctggtggccaagatcgagagactggagaacggcctgatgaagctgcagagcaccgccagccaggtggacgacctgaaggccaagctggccatccaggaggccgagctgaagcagaagaacgagagcgccgaccagctgatccaggtggtgggcatcgaggccgagaaggtgagcaaggagaaggccatcgccgaccaggaggaggtgaaggtggaggtgatcaacaagaacgtgaccgagaagcagaaggcctgcgagaccgacctggccaaggccgagcccgccctgctggccgcccaggaggccctggacaccctgaacaagaacaacctgaccgagctgaagagcttcggcagcccccccgacgccgtggtgaacgtgaccgccgccgtgatgatcctgaccgcccccggcggcaagatccccaaggacaagagctggaaggccgccaagatcatgatgggcaaggtggacaccttcctggacagcctgaagaagttcgacaaggagcacatccccgaggcctgcctgaaggccttcaagccctaccagggcaaccccaccttcgaccccgagttcatcagaagcaagagcaccgccgccgccggcctgtgcagctggtgcatcaacatcgtgagattctacgaggtgtactgcgacgtggcccccaagagacaggccctggaggaggccaacgccgagctggccgaggcccaggagaagctgagcagaatcaagaacaagatcgccgagctgaacgccaacctgagcaacctgaccagcgccttcgagaaggccaccgccgagaagatcaagtgccagcaggaggccgacgccaccaacagagtgatcctgctggccaacagactggtgggcggcctggccagcgagaacatcagatgggccgagagcgtggagaacttcagaagccagggcgtgaccctgtgcggcgacgtgctgctgatcagcgccttcgtgagctacgtgggctacttcaccaagaagtacagaaacgagctgatggagaagttctggatcccctacatccacaacctgaaggtgcccatccccatcaccaacggcctggaccccctgagcctgctgaccgacgacgccgacgtggccacctggaacaaccagggcctgcccagcgacagaatgagcaccgagaacgccaccatcctgggcaacaccgagagatggcccctgatcgtggacgcccagctgcagggcatcaagtggatcaagaacaagtacagaagcgagctgaaggccatcagactgggccagaagagctacctggacgtgatcgagcaggccatcagcgagggcgacaccctgctgatcgagaacatcggcgagaccgtggaccccgtgctggaccccctgctgggcagaaacaccatcaagaagggcaagtacatcaagatcggcgacaaggaggtggagtaccaccccaagttcagactgatcctgcacaccaagtacttcaacccccactacaagcccgagatgcaggcccagtgcaccctgatcaacttcctggtgaccagagacggcctggaggaccagctgctggccgccgtggtggccaaggagagacccgacctggagcagctgaaggccaacctgaccaagagccagaacgagttcaagatcgtgctgaaggagctggaggacagcctgctggccagactgagcgccgccagcggcaacttcctgggcgacaccgccctggtggagaacctggagaccaccaagcacaccgccagcgagatcgaggagaaggtggtggaggccaagatcaccgaggtgaagatcaacgaggccagagagaactacagacccgccgccgagagagccagcctgctgtacttcatcctgaacgacctgaacaagatcaaccccgtgtaccagttcagcctgaaggccttcaacgtggtgttcgagaaggccatccagagaaccacccccgccaacgaggtgaagcagagagtgatcaacctgaccgacgagatcacctacagcgtgtacatgtacaccgccagaggcctgttcgagagagacaagctgatcttcctggcccaggtgaccttccaggtgctgagcatgaagaaggagctgaaccccgtggagctggacttcctgctgagattccccttcaaggccggcgtggtgagccccgtggacttcctgcagcaccagggctggggcggcatcaaggccctgagcgagatggacgagttcaagaacctggacagcgacatcgagggcagcgccaagagatggaagaagctggtggagagcgaggcccccgagaaggagatcttccccaaggagtggaagaacaagaccgccctgcagaagctgtgcatggtgagatgcctgagacccgacagaatgacctacgccatcaagaacttcgtggaggagaagatgggcagcaagttcgtggagggcagaagcgtggagttcagcaagagctacgaggagagcagccccagcaccagcatcttcttcatcctgagccccggcgtggaccccctgaaggacgtggaggccctgggcaagaagctgggcttcaccatcgacaacggcaagctgcacaacgtgagcctgggccagggccaggaggtggtggccgagaacgccctggacgtggccgccgagaagggccactgggtgatcctgcaggtgagaggcggccagcactgcagaaacatccacctggtggccagatggctgggcaccctggacaagaagctggagcactacagcaccggcagccacgaggactacagagtgttcatcagcgccgagcccgcccccagccccgagacccacatcatcccccagggcatcctggagaacgccatcaagatcaccaacgagccccccaccggcatgcacgccaacctgcacaaggccctggacctgttcacccaggacaccctggagatgtgcaccaaggagatggagttcaagtgcatgctgttcgccctgtgctacttccacgccgtggtggccgagagaagaaagttcggcgcccagggctggaacagaagctaccccttcaacaacggcgacctgaccatcagcatcaacgtgctgtacaactacctggaggccaaccccaaggtgccctgggacgacctgagatacctgttcggcgagatcatgtacggcggccacatcaccgacgactgggacagaagactgtgcagaacctacctggccgagtacatcagaaccgagatgctggagggcgacgtgctgctggcccccggcttccagatcccccccaacctggactacaagggctaccacgagtacatcgacgagaacctgccccccgagagcccctacctgtacggcctgcaccccaacgccgagatcggcttcctgaccgtgaccagcgagaagctgttcagaaccgtgctggagatgcagcccaaggagaccgacagcggcgccggcaccggcgtgagcagagaggagaaggccggcagcctgaagctgctgcccagcgagagaaagggcgaggacctggagctgagaagaggcggctgccccggcaccggcttccaggtgaaggccgtgctggacgacatcctggagaagatccccgagaccttcaacatggccgagatcatggccaaggccgccgagaagaccccctacgtggtggtggccttccaggagtgcgagagaatgaacatcctgaccaacgagatgagaagaagcctgaaggagctgaacctgggcctgaagggcgagctgaccatcaccaccgacgtggaggacctgagcaccgccctgttctacgacaccgtgcccgacacctgggtggccagagcctaccccagcatgatgggcctggccgcctggtacgccgacctgctgctgagaatcagagagctggaggcctggaccaccgacttcgccctgcccaccaccgtgtggctggccggcttcttcaacccccagagcttcctgaccgccatcatgcagagcatggccagaaagaacgagtggcccctggacaagatgtgcctgagcgtggaggtgaccaagaagaacagagaggacatgaccgccccccccagagagggcagctacgtgtacggcctgttcatggagggcgccagatgggacacccagaccggcgtgatcgccgaggccagactgaaggagctgacccccgccatgcccgtgatcttcatcaaggccatccccgtggacagaatggagaccaagaacatctacgagtgccccgtgtacaagaccagaatcagaggccccacctacgtgtggaccttcaacctgaagaccaaggagaaggccgccaagtggatcctggccgccgtggccctgctgctgcaggtgtag

SEQ ID NO: 318178 - DNA, 13458 bp, Artificial Sequence
  derived and/or modified sequence
atgaccatggcccccgacgtccgtctagagtatctagaggaagtggcctccattgtccttaagttcaaacccgacaagtggtcaaagttgattggtgcagaagagaatgttgctctgttcaccgagttcttcgaaaaaccagacgtgcaggtcctggttctcactcttaatgctgccgggatgatcatcccatgcctcggcttccctcagtctctcaaatccaagggagtgtactttataaaaacaaaatcagaaaatataaataaagacaactaccgggcacggctcctgtacggcgatatcagccccaccccagtggaccagctgattgccgttgtggaagaggtgctcagctctttactaaaccagtcagagaacatggcgggctggcctcaagttgtgtcggaagacattgtgaagcaggtgcatagactgaagaacgaaatgttcgtcatgtctggcaagataaaaggcaaaactttgctgccgataccagagcatcttgggtctcttgacggcacactggaatccatggagcgcattccttcaagcctagacaatctgctcctacacgcgatagaaacaacaattattgattggtcccaccagattcgtgacgtcctctcaaaagacagcgctcaggctctgctggacggtcttcaccccctcccacaggtggagtttgagttttgggacacccgactgttgaacctcaaatgcatccacgaacaattgaaccgcccaaaagtgaacaaaattgtggaaatcctggagaaagccaaatcttgctactggccagcactccaaaatgtctataccaatgtgactgaaggacttaaggaggctaacgacattgtgctttacttgaaaccgctgcgcattttgcttgaagaaatggagcaggccgacttcaccatgctgcctacatttatcgccaaggtgctggatactatttgcttcatctgggccaccagtgagtattacaacacccctgcccgcattatcgtcatcctgcaagagttttgtaaccagataattgaaatgactagaacctttctgagcccggaggaggttcttaaagggctccagggggaaattgaagaagttctgtctgggatctctctggcagttaatgtgctgaaggaattgtaccagacatatgacttctgctgtgttaacatgaaactctttttcaaagacaaagagccagtcccatgggaatttccttcgtccctggctttctcaagaatcaatagtttctttcagaggattcagacaattgaagagctgtataaaaccgccatcgagtttttgaagcttgagaaaatcgagttgggcggcgttcgtggcaacctgctaggctcactggtcaccagaatttatgacgaggtgtttgaattagtcaaagtctttgccgactgcaagtacgaccccctggaccccggggattccaactttgacagggattacgccgactttgagataaagattcaggatttggatcgtcggctcgccaccatcttttgtcaaggatttgacgattgctcatgcattaagtcgtccgcgaagttattgtacatgtgtggagggttaatggagaggccactgatccttgcagaagttgcgcccaggtatagtgtgatgctggagttgtttgacgccgaactggacaacgccaaaattctctatgatgcgcagatggcggcctctgaagagggcaatattccacttattcataagaatatgccccctgtcgctggtcagctcaagtggagcctagaactgcaggagcggttggaagtgagcatgaagcacttgaaacacgtcgaacaccctgtgatgtccggagcagaggccaagctgacataccagaaatatgacgagatgatggagctcctccggtgtcacagggagaagatctaccagcagtgggtagcgggcgtcgatcaggattgccacttcaatttaggccaaccactcattctgcgagatgctgccagcaaccttatccatgtcaatttttccaaggcacttgttgctgttctgagagaggtcaaatatcttaattttcagcagcaaaaggaaatccccgactctgctgaatctcttttttctgagaacgagaccttccgcaagtttgtcggtaacctcgagttaattgtcgggtggtataacgagatcaaaactatcgtaaaggcagtggagtttctccttatcaagtcagagctagaggccatcgacgttaagctgctgagtgccgaaaccaccctgttctggaacggggagggcgtcttccagtatattcaggaggtgcgcgagatcttgcacaacctgcagaatcgcatgcagaaggcaaaacagaatatagaaggcatcagccaggctatgaaggactggtctgctaacccactgtttgaaaggaaagataataaaaaggaggctctgctcgatctcgatggaaggattgccaatctcaacaagcggtacgcagctgtgcgtgatgccggggtcaagattcaggccatggtcgctgaaaatgcagagctgttcagagctgacactttaagtttaccttggaaggactacgtaatatacatcgacgatatggtgctcgatgaattcgatcaattcattaggaaatctcttagtttcctgatggacaatatggtcatcgacgaatctattgctccactgttcgagatccgcatggagctggatgaagacgggctgacattcaatccaactctagaggtggggagcgatcgcggctttttggctctgatcgaggggctggtgaatgatatctacaacgtggcacggctgattccgaggctggccaaggatcgcatgaattacaaaatggacctggaggataacaccgatcttattgagatgcgggaagaggtgagtagtctcgtgatcaacgcaatgaaggaagctgaagaatatcaggacagtttcgagaggtattcttacctctggactgacaacttgcaagaattcatgaaaaactttctgatctatggctgtgccgtcactgcagaggatctcgacacatggacagacgacaccatcccaaaaacccctcctactcttgcccagtttcaagagcagatcgacagttatgagaaattatatgaagaagtctcgaaatgtgaaaatacgaaggtgttccacggctggttacagtgcgactgtcggccattcaaacaggctctgctgagtaccattaggaggtggggctttatgtttaaacgacacctctcgaaccacgtgacgaactcactggctgacctggaagcgttcatgaaagtggctcggatgggccttacaaagcctctgaaagagggggattacgatggcctcgtcgaggtgatgggccatttgatgaaggttaaggagcgccaggctgcaacagataatatgttcgagccccttaagcagactattgaactgctaaaaacgtacggcgaggaaatgccggaggaaatccatttaaagctgcaggaactgcccgagcattgggctaacacgaaaaaactggccatacaggttaagctcactgtggcccctttacaagccaacgaagtgagcattctcagaaggaaatgccagcagttcgaactgaaacaacacgaattccgtgaacgttttagacgagaagccccgttttccttttcagatcccaatccttacaaatccctgaataaggtattcctcctaaaagggattatggaggccttaagtaaaagtggaggattgttcgaagttcctgtgcccgactataaacagttgaaggcttgccatagggaagtaagattattaaaagagctctgggatatggttgtggtagttaatacctctattgaagactggaaaaccactaagtggaaagatattaatgtggagcagatggacatcgactgtaaaaaatttgctaaagatatgcggtctttggacaaagagatgaagacttgggatgctttcgtcgggctcgacaatactgtgaaaaatgtcatcacatccctgcgtgctgttagtgagctgcagaaccctgccattagggagagacattggcagcaactgatgcaggctacacaagtgaaattcaagatgagtgaagagacaacgctggccgatcttttgcagttaaacctccatagttatgaagacgaggttaggaacatcgtcgataaggcggtgaaagagtccggaatggagaaggtgctcaaggcattggattctacctggtccatgatggagtttcaacatgagccacaccccagaacagggacgatgatgctgaaatcctccgaggtgctcgtggaaacactggaagacaatcaggtacaactgcagaacctaatgatgtcaaagtatctcgcacacttcttaaaagaagtgacgagctggcaacagaagctaagcacagcagatagcgttatcagcatctggttcgaggtgcagcgaacctggtctcacctcgagtcaatatttatcggatctgaagatatacgaacccagcttcccggcgatagccagagattcgacgatatcaaccaggaatttaaggcgttgatggaggatgcagtgaaaactcccaacgtggtggaggcaacgtctaagcccggcctttacaataagctggaagcactaaagaaatccctcgcaatctgcgaaaaagcattagccgagtatttggagactaagaggttggcttttccacgcttctacttcgtatcatcagcagacctcctggatatactgagcaacggcaatgatccggtggaggtctctagacatctgagcaagttgtttgactctctttgtaagctgaaatttaggctggacgccagcgataagccactcaaagtggggctgggtatgtatagcaaagaggacgaatacatggtcttcgaccaagaatgcgacctgtctggacaagtggaggtgtggctgaacagggttctcgaccgcatgtgttctacattaagacacgaaattcccgaagccgtcgttacttatgaagagaaacccagagagcagtggattctggattatcccgctcaaatctggtggacaactgaggtgggcctcgcttttgcccgtcttgaggagggctacgagaacgctatccgagactataacaagaagcagatctcccagctgaatgtcctaattaccttgttgatgggtaacttaaatgcgggtgaccggatgaaaatcatgaccatctgcaccattgacgtgcacgccagggatgtggtggctaaaatgatcgtggagagttcccaggcattcacctggcaggcccagctaagacacagatgggacgaagagaaaagacactgctttgctaatatatgtgatgctcaaatccagtacagttatgagtatctgggcaacacccctcggctcgtcattacacccctcacagatcgctgctacattaccttgacacagtcccttcatctcattatggggggggctcccgcagggccagccggtactgggaaaaccgagaccactaaggatctgggcagggccttaggcactatggtgtacgtcttcaactgttctgagcagatggattataagtcgtgtggcaatatctacaagggattggcacagacgggcgcttggggctgtttcgacgagttcaacagaatatccgtagaagtcctctcagtcatcgccgtacaggtgaagtgcgtccaggatgcaatacgggcgaaaaaaaaggccttcaatttcttaggcgagatcattggattaatccctacagtagggatcttcatcacaatgaaccctgggtacgcaggaagagcggaacttccagagaacctcaaagccttatttcggccatgcgcaatggttgtgccagacttcgaactcatttgtgagattatgctgatggccgaaggctttcttgaggcccgactgcttgctagaaagtttataaccctgtacacattatgtaaagagttgctcagcaagcaggatcactatgactggggcctgagggcaatcaagtccgtacttgtggtggcaggctctctgaagcgaggggatccatctcgtgccgaagaccaggtgctcatgcgggcactgagggattttaatattcccaaaatcgtcactgacgatctgcctgtattcatgggcctgataggcgatctttttcctgccctggatgtgccaaggaagcgggacttgaacttcgagaagattataaaacaaagcatcgttgagttgaaacttcaggccgaggacagctttgtcttaaaagtcgtgcagcttgaggaacttctccaggtacggcattctgtgtttattgtcggaaatgctggaagtgggaagtctcaggtgctaaagtccttgaacaaaacataccagaacttgaagcgaaaacccgtcgccgttgatcttgaccctaaggccgtgacctgcgatgagcttttcggaataatcaatccggtcacgcgcgagtggaaggatggcctgttttcaacgataatgagagacctggcaaacattacacatgacggcccaaagtggataattcttgacggggatatcgatccaatgtggattgagtctttgaacacggtgatggatgacaacaaggtccttactctggcgagtaacgagaggattcctctgaatcgcacaatgcgactggtcttcgaaattagccacctgagaacggcgacacccgcaactgtatcaagggccggcatactctacattaatccagcagacctcggctggaacccggttgtgtcatcctggatagagagacgtaaagttcagtccgaaaaagccaacctaatgatactttttgacaaataccttccgacatgcctcgataagctgagatttggctttaagaagataacccccgtgccagaaatcaccgtgatccagaccattctatacctgcttgaatgcctgctcactgagaaaactgtgcctcccgattcccctcgggaattatacgagttatatttcgtcttcacttgcttctgggcctttggcggcgctatgtttcaggatcagctggtggactatcgggtggaattctcgaaatggtggatcaacgaattcaaaacaattaagtttccaagccagggaactatctttgattactacattgacccagacacaaaaaagtttctgccctggactgacaaagttcccagcttcgagttggatcccgatgtgcccctgcaggcaagccttgttcacacaacagagactattcgaataaggtactttatggacctgttaatggagaagagttggcccgtgatgctggtgggaaacgctggaactgggaaaagcgtgctcatgggcgacaaactggaaagcctgaatacggataactatctggtacaggccgtgccattcaacttttataccaccagtgccatgcttcaaggagtgctcgaaaagcccttagagaaaaaatcaggccggaactacgggccaccgggaacgaaaaagttagtttattttattgatgatatgaacatgcctgaggtggacaaatatggcactgtggcgccccatacattgatcagacagcatatggatcatcgacattggtacgaccggcataagctcacactcaaggatattcacaattgccagtatgtcgcctgcatgaatcctacttcaggatccttcactatcgactcacgcttgcagcgtcacttttgcgtgttcgcagtctcattccccggtcaagaagctctgaccaccatctacaacaccattttaactcaacacttggccttcaggtctgtctccatggcaatccagcgaatttcttcccagctcgtggcagcagcactagctctccaccagaagataactgcaaccttcctccccacggcaatcaagttccattacgtgttcaatttgcgtgatctcagtaatatcttccagggtttgctgttctcgactgccgaagtgctgaagacacctctcgatttggtgcggttgtggctgcacgaaacagaacgcgtttacggagacaaaatggtggatgagaaggaccaggaaacacttcatagagtgacaatggccagcacaaaaaaattcttcgacgacttgggggacgaactcctgtttgcgaaaccgaacattttctgccactttgcacaagggatcggtgatcccaagtacgtacctgtgactgacatggcccccctgaataagcttctggtcgatgtcctcgatagttacaatgaagtgaatgcggttatgaatctcgtgcttttcgaggatgccgttgcccacatctgccgaataaatagaatcctggaatccccacgcgggaacgccctcctcgtgggagtggggggaagtggcaaacagtctttaagcagactcgctgcatatatctccgggctcgacgttttccagataacactgaagaagggctacggaatccctgacctgaaaattgatctggctgcgcaatatatcaaagccgccgtgaaaaacgtcccatcagtttttctgatgacggactcacaggtcgccgaagaacaattcctggtgttgatcaacgacttgttagcaagcggagaaatccccggcctcttcatggaggatgaggtggagaacattatcagttctatgcgccctcaggtgaagtcgctgggaatgaacgatacaagagaaacctgctggaaattctttattgagaaagtgaggcggcagctcaaggttatcctttgcttctctcctgtgggcagcgtgctgagagtgagggcccgtaaattcccagccgtggtgaattgcacagccatcgactggttccatgagtggccagaggacgctttagtttccgtttcagctcgattccttgaagagacagagggaatcccctgggaagtgaaagcctccataagcttttttatgtcctacgttcacaccaccgtgaatgaaatgagcagggtataccttgccacagaaaggcggtacaattataccaccccaaagacgttcctggaacaaattaagttatatcagaacctgctggcaaaaaaacggactgagttggtcgcaaagatcgagaggctggagaatggacttatgaagctgcaaagcaccgcatcgcaggtggatgacttaaaagccaaactggcaatccaggaggcggaactgaaacaaaagaacgaatccgctgatcaattgattcaggtcgtgggcattgaggccgagaaggtcagcaaagagaaggccatcgcagatcaggaggaagtaaaggtagaggttattaacaaaaacgtgaccgagaagcagaaggcctgcgaaacggacctcgcaaaggccgaacccgcccttttagctgcgcaagaagccctggataccctgaataagaacaatctgacggagcttaaatccttcggctccccaccagacgcggtggtaaacgttactgctgcggtgatgattttaaccgcaccagggggcaagatccctaaggataaaagctggaaagccgcaaagatcatgatgggaaaggtggacacgtttctcgattccctcaagaaattcgataaggagcacatccccgaggcgtgcctcaaagcgtttaaaccttatcagggcaacccaacgttcgaccctgagtttatcaggtctaagagcaccgctgccgcgggcctttgttcgtggtgcatcaacattgttaggttttacgaagtgtactgcgacgtcgctccgaagaggcaggctctcgaggaggccaacgcggagctcgcagaggcacaggagaagctgtctcggattaaaaataaaatcgctgagctaaatgccaacctttctaacttgacttctgcattcgaaaaagcgaccgccgagaagattaagtgtcagcaagaggcagatgccactaaccgggtgattttgctggccaatcggctcgtgggcggcctggccagcgaaaatatccgttgggcggaaagcgtcgaaaattttaggtcccagggtgttactttatgtggagacgtgctcttgatcagtgctttcgtttcctacgtgggctactttaccaagaagtatcgcaatgaattgatggaaaagttctggattccatacatccataaccttaaagtgccgataccaattacaaacggtctggaccctctttctttgctgacagacgatgcagatgtggctacctggaacaatcaggggctgccctcggatcgcatgtctacagagaacgcgacaattctgggaaataccgagagatggccattgatcgtggatgcacagctccagggaattaaatggattaagaacaagtaccgctcagagctgaaagccataaggctgggacagaaatcatatcttgacgtgatcgagcaggccatcagcgagggggacactctgcttattgaaaatattggcgaaacggttgatccagtcctcgacccattactgggcagaaacaccatcaaaaagggtaagtatatcaaaattggggacaaagaggttgaatatcacccaaaatttcgccttatacttcacactaaatacttcaatcctcactacaagcccgagatgcaggcccagtgtacattgatcaactttttggtgacacgcgatggattggaggaccaactcctggccgccgttgtggcaaaagagaggccagacttggagcaactcaaggccaatttgaccaagagtcagaacgagttcaagatcgtgctgaaggaactggaggattcactgttggctagattgtccgctgcgagcggaaacttcctcggcgacacagcacttgtcgagaatcttgagactacaaagcatacagcctcagagatcgaagaaaaggtggtcgaggcaaagatcacagaggtcaaaatcaatgaggcccgcgagaattataggccagccgcagagagggcctctttactgtactttatcctcaacgacttgaataagattaatcctgtttaccaattttccctgaaggcttttaacgtcgtgtttgagaaggccatccagcggacaacacctgcaaacgaggtgaaacagagagtgattaatctgactgatgagattacgtactccgtttacatgtacacagctcgggggctgttcgaacgtgataagctgatcttcttggcccaggtcactttccaggtgctaagtatgaagaaggaactcaacccggttgaactggattttctgctgcgctttcccttcaaggccggagtggtgtcccctgttgactttctgcagcaccaaggttgggggggcataaaggccctgagcgagatggatgagtttaagaaccttgattccgacatagagggatctgccaagagatggaaaaaactggtcgagagcgaagccccagagaaggagatctttcctaaggaatggaagaacaagacggcattgcagaagctgtgcatggtccgatgcctgagaccagatcggatgacctatgccatcaagaacttcgttgaggaaaaaatgggctccaaattcgtggagggaaggtccgtggagttttcaaagtcctatgaggaaagcagtccttcaacaagcatcttcttcatcctctctcccggtgttgatcctctgaaggacgtcgaggctctgggcaagaagcttggattcactattgataacggcaagcttcataacgtgtcattaggccagggtcaagaggtggtcgccgaaaacgcgctcgatgtggcggctgaaaaaggccactgggttatcctacaggtgcgggggggacagcattgtagaaacatccaccttgtggcccgctggctcggaacattggacaagaagctggagcattatagtactggtagtcacgaagactatagagtattcataagtgccgaaccagccccatccccagaaactcacattattcctcagggcatcctcgagaatgccattaagatcacgaacgagcctcctactggcatgcatgccaacttgcataaggccctggacttattcactcaagatactctcgagatgtgtacaaaggagatggagtttaagtgcatgctgtttgcactttgttacttccacgctgtggttgcggaacgaaggaaatttggggcacaaggttggaacaggtcttacccattcaataacggggacctgaccatatccattaacgtgctctacaattatctggaggcaaaccccaaggtgccctgggatgacttgcgatacctcttcggtgagatcatgtacggtggacacatcacagatgattgggaccgcagactgtgccgtacttatctggcggaatatataaggacggagatgcttgaaggcgatgtccttctcgccccaggattccaaattccccccaacttggactacaaagggtatcacgagtacatcgatgaaaacctgccacctgaaagcccttacctgtatggactgcacccaaatgcggagattggcttcctcaccgttacatcagagaaattgtttcggaccgtcctagaaatgcagcctaaggagacagactcaggagcaggcacaggtgttagtcgcgaagagaaggccggaagcctgaaactcctgccctctgaacggaaaggcgaggacctggagttgcgtagagggggctgtccaggaaccggctttcaggtgaaagctgtcctggacgacatacttgagaagattcctgaaacgtttaacatggccgagatcatggccaaagctgccgagaagactccctacgttgtggtggcctttcaggaatgcgagcggatgaatattcttaccaacgaaatgagaaggagtttaaaggagctcaatttagggttaaaaggtgaactgacaattaccaccgacgttgaagatctgagcactgcactattttatgatacagtcccagatacctgggtggcccgggcatacccctctatgatgggactggcggcctggtatgcagacttgctgctgcgcatcagagagctcgaagcatggactactgactttgcattgcccacgacagtctggctcgcagggttctttaacccccaaagtttcctgactgctattatgcagagtatggcacggaagaacgaatggccgctggacaagatgtgcctgtccgtggaggtcaccaagaaaaatcgcgaggacatgaccgctcctcccagagaaggatcctacgtgtatggcctatttatggaaggtgctcggtgggacacccagactggcgtaattgccgaggccagacttaaggagcttacaccagcaatgcctgtgatcttcatcaaagccatccctgtcgatcgaatggaaaccaagaatatctatgagtgccctgtctacaagaccaggatccgcgggccaacttatgtctggacattcaatctgaagactaaggaaaaggcagccaagtggatcctagcggctgtcgcactgttgttgcaggtctag

SEQ ID NO: 318179 - DNA, 13792 bp, Artificial Sequence
  derived and/or modified sequence
gtggcagttggagcccctcgagggaagggagccattttctttcctggtttgggaaagagttgctcatcagtttgcgggagaagctgtttgccttcagctgatacacagtgtaaggaaaggccaagatgacaatggccccggacgtcagactagagtatctggaggaagttgcctccatcgtcctgaagttcaagccggacaagtggagcaagctgataggcgccgaggagaacgtggccctgttcacagagttctttgaaaagcccgacgtccaggtgctggtgctgacgctcaatgcagccggcatgatcataccctgcctgggcttcccccagtccctcaagtccaaaggggtttacttcatcaagacaaagtccgagaacatcaacaaggacaactacagggcccggctcctttacggcgacatcagccccacacccgtggaccagctgatcgcggtggtggaggaggtcctctcttctctgttaaaccaaagtgagaacatggctggatggccccaggtggtctcggaagacatcgtgaagcaggtccacaggctgaagaatgaaatgtttgtgatgagtggcaagatcaaaggcaaaaccttgctgcctattccggagcacctgggcagcctggatggcacgctggagtccatggagaggatcccctcttcactggacaacttgctcctgcacgccattgaaaccaccatcatcgactggtcccaccagatccgggatgtgctgagcaaagactcagcccaggcgctgctggatgggctgcaccccctgccccaagtggagttcgagttctgggacactcggctgctgaacctcaagtgcatccatgaacagctaaacagacccaaagtgaacaagattgttgagatcctagagaaagccaaaagctgctactggccagccctgcaaaacgtttacaccaacgtcactgaagggctgaaggaagccaacgacatcgtgctctatttgaagcccctacggatcctgctggaggagatggaacaagccgacttcacgatgctccccaccttcattgccaaggtgctggacaccatctgcttcatctgggccacctctgagtactataacacacctgccaggatcatcgtcatcctgcaggagttctgcaaccaaatcatcgagatgacacgaaccttcctgagcccggaagaggtgctgaagggcctgcaaggtgaaatcgaggaagtcctgagtggcatctccctggctgtaaatgtgctgaaggagctctaccagacgtacgacttctgctgcgtgaacatgaagcttttctttaaggacaaagagcccgtgccttgggaattcccttcttctcttgccttttccaggataaattccttcttccagcgcatccagaccattgaggaactctataaaacagcaattgagtttctgaagctggagaaaatcgagcttgggggcgtgcgtgggaacctcctcgggagcctggtgacccgtatctatgatgaggtctttgagctggtgaaggtttttgccgactgcaaatatgatcccttggaccctggagactcgaattttgaccgtgattatgctgattttgagatcaaaatccaagacctggataggaggctggccacgatcttttgccaaggatttgatgactgcagctgtatcaagtcctccgcaaagctcctgtacatgtgtgggggcctcatggagcggcccctgattcttgccgaggtggcgcccaggtattcagtcatgctggagctgtttgacgctgagctagacaatgctaagatcttgtacgatgcccagatggcggcctccgaggaggggaacatccccctgatccacaaaaacatgcctcccgtggccgggcagctcaaatggagcctggagctgcaggagaggctagaggtgtccatgaaacacctgaagcacgtcgaacacccggtcatgtctggagcagaggccaagctgacctatcagaagtatgacgagatgatggagctgctgaggtgccaccgcgagaagatctaccagcagtgggtggcgggcgtggaccaggactgccactttaacctggggcagccgctgattctgcgggacgccgctagcaacctcatccacgtcaacttcagcaaagcgttggtggcagttctgagagaagtcaagtatttgaatttccagcaacagaaagagattccagacagtgcggagagtctgttctcagagaacgaaactttccggaagtttgtgggcaacctggagctcatcgttggctggtataatgagataaagactatagtgaaggcagtagaatttctactaataaagtcagaactggaagcaattgatgtcaagttattgagcgctgaaacgacattattctggaatggcgaaggtgtgtttcagtacattcaagaggtgcgagaaattctgcacaacttgcagaacaggatgcaaaaggcaaaacaaaatatagaaggaatttcccaggctatgaaggactggtcggccaacccgctgtttgaaagaaaggacaataagaaagaggccctgttagacttggatggaagaattgccaacctcaacaagcgctacgcagcagtcagggatgctggagtgaagatccaagccatggttgcagaaaacgcagaactattcagggcagacacactgagcctgccctggaaggattatgtcatctacattgacgacatggtcttagatgaatttgaccagttcattcgcaaatctctgagtttcctaatggacaacatggttatagatgagagtatcgctcccctgtttgagatccgcatggagctggacgaggatgggctgaccttcaacccgaccctggaggtgggctcagatcgcggcttcctggcactgatcgagggcctggtcaacgacatctacaacgtagccaggctcatccctcggctggccaaggacaggatgaactacaagatggacctggaagataacacagacctcatagagatgagggaggaggtgtccagcctggtcatcaatgccatgaaggaggccgaggagtaccaggattcctttgagaggtactcctacctctggacggacaacctgcaggagtttatgaagaatttcctgatatatgggtgtgcagtcactgcggaggacttggacacctggacagatgacaccatccccaagacaccgcccaccctggctcagttccaggagcagatcgactcctacgagaagctgtatgaggaggtgtccaagtgcgagaacaccaaggtgttccacggctggctgcagtgcgactgccgccccttcaagcaggccctgctcagcacaatccggcgctggggcttcatgttcaagcggcacctgagcaaccacgtcaccaacagcctggctgacctggaagccttcatgaaagtcgccagaatgggcttgaccaagcccctcaaggagggggactatgatgggcttgtggaggtgatggggcacctgatgaaagtcaaggagaggcaagcagccaccgacaacatgtttgagcccctgaagcaaaccatcgagctgctcaagacctacggggaggagatgccagaggagatccacttgaagctgcaggagctgccggagcactgggcaaataccaagaaactggccattcaggtgaagctgaccgtggcaccactccaggccaacgaggtcagcatcctgcggcggaaatgccagcaattcgagctcaagcaacatgagttcagggagaggttcaggcgcgaggccccgttctccttcagcgaccccaacccctacaagtccctgaataaggtatttttgctcaagggcatcatggaggcgctgtccaagtccgggggcctgttcgaggtccccgtcccagactacaagcagctcaaggcctgccaccgggaggtccgcctactgaaggagctctgggacatggttgttgtggtaaataccagcatcgaggactggaagaccaccaagtggaaagatatcaacgttgagcagatggacatagattgtaagaagtttgccaaggacatgaggtctttggacaaggagatgaaaacctgggatgccttcgtggggctcgacaacaccgtgaaaaacgtgatcacgtccctgcgtgccgtgagcgagctgcagaaccctgccattcgggaacgccactggcagcagctcatgcaggccacccaggtgaaatttaaaatgtcagaagagacgaccctggcagatttactgcagctgaacctccacagttacgaggatgaggtccgcaacatcgtggacaaggccgtgaaggagtcgggcatggaaaaggtgctgaaagccctggacagtacctggagcatgatggaattccagcacgagccgcacccgcggacaggcaccatgatgctcaagtccagcgaggtgctggtggagacgctggaggacaaccaggtgcagctgcagaacctgatgatgtccaagtacctggcccacttcctgaaggaggtgacaagctggcagcagaagctgtccacggcggactccgtcatctccatctggtttgaggtccagcgaacctggagccacctggagagcatcttcatcggctccgaagacatccgcacccagctcccgggggactcccagcgctttgacgacatcaaccaggaattcaaggccttgatggaagatgcagtgaaaacacccaacgtggtggaagccaccagcaaacccggcctctacaataaactggaggccctgaagaagagcttggccatctgtgaaaaggctttggcagagtatttagagacgaaaagactggctttcccccggttctattttgtctcctcggctgacctcctggacattctctccaatggcaatgaccccgtggaggtgagccgccacctgtccaaactcttcgatagcctgtgtaaactgaagttccggctcgatgccagtgacaaacctctcaaggtgggcctgggaatgtacagcaaggaggacgagtacatggtttttgatcaggaatgcgacctctcggggcaggtggaagtgtggctgaatcgagtgctggaccgaatgtgctctaccctccggcacgaaatcccagaggccgtggtgacctacgaagagaagccgagggagcagtggatcctggactacccagcccagatctggtggacgaccgaggtgggcctggcatttgccaggctggaggaaggctatgaaaacgctatcagagattataacaaaaagcagattagccagctgaacgtactcatcacgctgctcatggggaacctcaacgctggcgacaggatgaagatcatgaccatctgcaccatcgatgtgcacgcacgggacgtggtggccaaaatgatcgtggagagttctcaggccttcacctggcaggcccagctccggcatcgctgggacgaagagaagcgacactgctttgccaacatctgcgatgcccaaatccagtattcctatgagtatctgggcaacacgccgcggctggtcatcaccccactcactgacaggtgctatatcaccctgacccagtccctccatctcatcatgggtggagcccctgccggccccgctgggaccggcaagactgagacgaccaaggacctgggcagagccctgggcaccatggtctacgtcttcaactgctccgagcagatggactacaagtcctgtggaaatatctacaagggcctggcccagacgggagcctggggctgctttgacgagtttaatcgcatctcagtggaagtcttgtctgtgattgccgtgcaggtaaaatgtgtccaggatgcaattcgggccaagaaaaaagcattcaatttcctgggagagatcataggcctcattcccaccgtcggtatcttcatcaccatgaaccctgggtacgccggacgcgcggagctgcctgagaacctaaaagccttattcaggccctgtgccatggtcgtccccgacttcgaactgatatgtgagatcatgctcatggccgagggctttctggaagcccgccttctggccaggaagttcatcaccctgtacaccttgtgcaaggagctgctctcgaagcaggatcattacgactggggcctgagagccatcaagtctgtgctggtggtggccggctccctgaagaggggcgaccccagccgggcagaggaccaggtgctcatgcgggcgctgagagacttcaacatccccaagattgtgacagacgacctgcccgtattcatgggactgatcggggacctcttcccggctctggacgtgcctcggaaacgggacctgaattttgaaaagatcatcaagcagagcatcgtggagctcaagctgcaggcggaggacagcttcgtgctgaaggtggtgcagctggaggagctgctgcaggtccgccactccgtgttcatcgtcgggaatgcgggcagcggcaaatctcaggtcctcaaatccctcaacaagacctatcagaacctgaagaggaagccggtcgccgtggacctggaccccaaggccgtcacctgcgacgagctctttggcatcatcaacccagtgaccagggaatggaaagatggcctgttctccaccatcatgcgagacctggccaacatcacccatgacggccccaagtggatcatccttgacggagacatagaccccatgtggatcgagtctctcaacacagtcatggatgacaacaaggtcctcaccctggccagcaacgagcggatccccctgaaccgcaccatgaggctggtgttcgaaatcagccacctgaggacggccaccccagccaccgtttccagagccggcatcctctacatcaacccagccgacctgggatggaacccggtggtgagcagctggatcgagaggcgcaaggtgcagtcggagaaggccaacctgatgatcctctttgacaagtacctgcccacgtgcctggacaagttgcgctttgggttcaagaagatcacgccagtgccggagatcacggtgatccaaacgattctgtacctgctggagtgcctgctcacggagaagaccgtgccccccgactcccccagggagctgtacgagctgtacttcgtgttcacctgcttctgggccttcggtggcgccatgttccaggaccagcttgtggattatcgagtggagttcagtaaatggtggatcaacgaattcaagactatcaagttcccctcgcagggaacgatttttgactactacattgatcctgacacaaaaaagttcctgccctggacagataaagtgccctcctttgagctggatcccgatgtcccactgcaggcctctttggtccacaccacggaaaccatccgcatccgctacttcatggacctgctcatggagaagtcctggccggtgatgctggtggggaacgcggggacgggcaagtcggtgctgatgggggacaagctggaaagcctgaacacggacaactacctggtgcaggctgtgcccttcaacttctacacgacctcagccatgctgcagggggtgctggagaagccgctggagaagaaatcggggaggaactacgggccgccaggcactaagaagctcgtctacttcatcgacgacatgaacatgcccgaggtggacaagtatgggacggtggccccgcacaccctcatccggcagcacatggaccaccggcactggtatgacagacataagctgacgttaaaagatatccataattgtcagtacgtggcctgcatgaaccccacttccggatccttcaccatcgactccaggcttcagcgccatttctgcgtgtttgctgtgagcttccccggccaggaggccctcaccaccatctacaacacaatcctgacgcagcacctggccttccgctcggtctccatggctatccagaggataagcagccagctggtggccgcggccctggctttgcatcagaaaatcacggcaacatttcttcccacggccattaagtttcattatgtcttcaacctcagggacctctccaatattttccagggactcttattttccacagcagaagttctgaaaaccccactggacctcgtccgcctttggctacatgagactgaacgagtgtatggtgacaaaatggttgacgaaaaagaccaggaaacattgcatagagtcaccatggcctccaccaagaagttctttgatgatcttggtgatgaactcttatttgccaagccaaatatcttctgccactttgctcaagggattggcgatcccaaatatgttcctgtaaccgacatggctcctctgaacaagctcctcgtggacgtcctggacagctacaatgaagttaatgcagtcatgaatttggtgctgtttgaggacgccgtggctcacatctgcaggattaatcgcatcctggagtctccccgggggaatgccctgctggtgggggtgggcggcagtggcaaacagagcctctcccgcctggcagcgtacatcagcgggcttgacgtgtttcagatcaccctcaagaagggctacgggatccccgacctcaagattgacctcgctgctcagtacataaaggctgccgtgaagaacgttccctcggtgttcctgatgacagactcccaggtggccgaggagcagtttctggtgctgatcaatgacctgctggcctcaggagagatccctgggctgtttatggaggacgaggtggagaacatcatctcctccatgcgaccccaagtcaagtcccttggcatgaatgacactcgggaaacatgttggaagttcttcatcgaaaaagtgcgcagacagctcaaggtgatcctgtgtttctcccctgtgggctccgtgctgcgggtacgagccagaaagttcccagctgtggtcaactgcacggccatcgactggttccacgagtggccggaagatgcgctggtgtccgtcagcgcccgcttcctggaggagactgaggggattccgtgggaagtcaaggcctccatcagcttcttcatgtcctacgtgcacaccaccgtcaacgagatgtccagggtatacctggctactgagaggcgctacaactacaccacacccaaaacctttctggagcagatcaaactgtaccagaacctgctggccaagaagagaacggaacttgttgccaaaatcgagaggctggagaacggcctgatgaagctgcagagcacggcttcccaggtggatgatttgaaagccaagttggcgattcaggaggctgagctcaagcagaagaatgagagcgcagaccaactgatccaggtggtcggcatcgaggccgagaaggtcagcaaagagaaggccattgctgaccaggaagaagtcaaggtcgaggtcatcaataagaacgtcactgagaagcaaaaggcctgtgaaacagacctggccaaagcagaaccggccctgctggcagcccaggaggctctggacactctgaataagaacaacctgacagagctgaagtcctttgggtccccgccggatgctgtggtcaacgtcaccgccgccgtcatgattctgaccgcacctgggggcaagatccccaaggacaagagctggaaggcggccaagatcatgatgggcaaggtggacaccttcctagactccctgaagaagttcgacaaggagcacatccctgaggcctgcctgaaggccttcaagccctaccaaggcaacccgacgttcgaccccgagttcatccgctccaagtccacggccgccgccggcctgtgctcctggtgcatcaacatcgtccgcttctacgaggtctactgcgacgtggcgcccaagaggcaggcactggaggaggctaatgcagagctggcagaggcacaagagaagctgtcccggatcaaaaacaagattgccgaacttaacgccaacctgagcaacctaacctcagcgtttgaaaaagcaacagctgagaaaatcaagtgtcagcaagaggccgatgccacgaacagggtgatcttactggcgaacaggctggtcgggggattagcatcggaaaacatccgctgggctgagtctgtggagaacttcaggagccagggggtcacgctgtgtggggacgtcctgctcatctctgccttcgtgtcctacgtgggctacttcaccaagaaataccggaatgagctgatggagaaattctggatcccttacatacataacttaaaggtccccatcccgatcacgaatggcctggatcccttgagcctgctgacagatgacgcggacgtggccacctggaacaaccagggcctccccagcgaccgcatgtccaccgagaatgccaccatcctgggcaacaccgagcggtggccgctgatcgtggacgcccagctccaaggaatcaagtggatcaaaaacaaatacaggagtgaactgaaagccatccgcctgggacagaagagctacctggatgtcatcgagcaggccatctcggaaggggacaccttgctcattgagaacatcggcgaaaccgtggaccccgtgctggaccctctactgggcaggaacacgattaaaaagggaaagtacattaagatcggtgacaaggaggtggagtaccaccccaagttccgcctgatcctacacaccaagtacttcaacccacactacaagccagagatgcaggctcagtgcaccctcatcaacttcctggtcaccagggatggactcgaggaccaactcttggccgctgtggtggccaaagagcgcccagatctggaacagctgaaggcaaacctcaccaagtctcaaaacgaatttaagattgttctgaaagagctggaagattcgctcctggcccgtctgtcggctgcgtcggggaactttctgggagacacggccttggtggagaatctggagaccaccaagcacacagccagcgagatcgaggagaaggtggtggaggcaaaaatcacagaagttaaaatcaacgaagcgagagagaactaccgcccggctgcggagagggcatctctgctctacttcatactgaacgatctcaacaaaatcaaccccgtctaccagttctccctcaaggccttcaacgtggtgtttgagaaagccatccagaggaccacccctgccaacgaggtgaagcagcgggtgatcaacctgacggacgagatcacctactccgtctacatgtacacggcccggggactcttcgagagggacaaactcattttcctggcacaagttacgtttcaggtcctgtccatgaagaaggagctgaacccagtggagctggatttcctcctgcggttcccttttaaggccggagtggtctcaccagtggacttcctccagcatcaaggctggggcgggatcaaggccctctcggagatggatgagttcaaaaatctggacagtgacatcgaaggatctgccaagcgctggaaaaagctggtggagtcggaagcccccgagaaggagatcttccccaaggagtggaagaacaagacggccctgcagaagctgtgcatggtgcgctgcctgcggccagatcgcatgacctacgctatcaagaacttcgtggaggaaaagatgggcagcaagttcgtggaaggccggagtgttgagttttctaagtcctacgaggagagcagcccctccacgtcaatcttcttcatcctctccccgggggttgaccccttgaaagacgtggaagccctgggaaaaaaactagggtttaccatagacaatggaaaactccataatgtgtccctggggcagggacaagaggtggtggctgagaacgccctggacgtggctgcagagaaaggacactgggtcattctgcaggtacgagggggccagcactgcaggaatatccacctggtggcccggtggctgggaacactggacaagaagctggagcactacagcacgggcagccatgaggactaccgggtgttcatcagcgcggagcctgcccccagccccgagacccacatcatcccccagggcattctggagaacgccatcaagatcaccaacgagccccccacgggcatgcacgccaacttgcacaaggccctggacctgttcacccaggacaccctggagatgtgcaccaaggagatggagttcaagtgcatgctcttcgccctgtgctacttccacgctgtggtggcagagaggcgcaagttcggcgcccagggctggaaccggtcgtaccccttcaacaacggggacctcaccatctccatcaacgtgctctacaactacctggaggccaaccccaaggtgccctgggacgatctccgctacctttttggtgaaatcatgtatggcggccacatcacagatgactgggaccgtcggctgtgcaggacctacctggctgaatacatccggacggagatgctggagggagacgtcctgctggcccccggctttcagatcccccccaacctggactacaagggttaccacgaatacatcgatgagaacctgccccctgagagtccctatctgtatggcctgcaccccaacgcagagattggctttctgacggtcacctcagagaagctgttccgcactgtcctggaaatgcagccaaaagagacggactcgggggcaggcacgggagtgtcccgcgaggagaaggcaggatctttgaaactgctcccaagcgagaggaagggggaggatctagaactgaggagggggggctgtccggggactggcttccaggtgaaggccgtgctggacgacatcctggagaagattccggagactttcaacatggctgagatcatggcaaaggcagcggaaaagaccccctacgtggtagtcgcctttcaagaatgtgaaagaatgaacatcctgaccaacgaaatgcgccgttcgctcaaggagctgaacctggggctgaagggagaactgaccatcacgaccgacgtggaagatctgtccacggctctcttctatgacaccgtgcctgatacgtgggtggcccgggcctacccctccatgatgggcctggcggcctggtacgcagacctgctgctccgcatcagggaactcgaggcctggacgacagactttgccctgcccaccaccgtgtggctggccggcttcttcaacccccagtcgttcctcacggccatcatgcagtccatggccaggaagaacgagtggcccctggacaagatgtgtctgtctgtcgaggtgaccaagaaaaaccgagaggacatgaccgctcctccgcgagagggctcctacgtgtacggactcttcatggaaggggctcgctgggacacccagactggagtcatcgctgaagcgcggctgaaagagctgaccccggccatgcctgtcatcttcatcaaggccattcctgtggaccgcatggagaccaagaacatctatgagtgtcccgtgtacaaaacacgcatccgcggccccacctatgtctggacctttaacttgaagaccaaagagaaggcagcgaagtggatcctggcagccgtggcgctgctcctacaggtttagctcgctcctgcctcacagcccacactccctggggctggaccacaactcagcccttcacctgtgcacctgtgacttattctttacaggaactggtggtggtttttcgttctcttaaataatcaggtgctttgtaaccaagcacatcggaaccagagggtggaggttggtgtggaagaggtggggcagattaaagccagtggagccactca

SEQ ID NO: 318180 - DNA, 13458 bp, Artificial Sequence
  derived and/or modified sequence
atgaccatggccccagatgtgcggctggagtacctggaggaggtggccagcatcgtgctgaagttcaagccagacaagtggagcaagctgattggagcagaagaaaatgtggccctcttcacagagttctttgagaagccagatgtgcaggtgctggtgctgaccctgaatgctgctggcatgatcatcccctgcctgggcttcccccagagcctgaagagcaaaggagtgtacttcatcaagaccaagtctgagaacatcaacaaggacaactaccgggcccggctgctgtatggagacatcagccccacccctgtggaccagctgattgctgtggtggaggaggtgctgagcagcctgctgaaccagagcgagaacatggccggctggccccaggtggtgtctgaggacatcgtgaagcaggtgcaccggctgaagaatgagatgtttgtgatgtctgggaagatcaagggcaagaccctgctgcccatccctgagcacctgggcagcctggatggcaccctggagagcatggagcgcatccccagcagcctggacaacctgctgctgcacgccatcgagaccaccatcatcgactggagccaccagatcagagatgtgctgagcaaggacagcgcccaggccctgctggatggcctgcaccccctgccccaggtggagtttgagttctgggacacccggctgctgaacctgaagtgcatccacgagcagctgaaccggcccaaggtgaacaagatcgtggagatcctggagaaggccaagagctgctactggccagccctgcagaatgtgtacaccaacgtgacagagggcctgaaggaggccaatgacatcgtgctgtacctgaagcccctgcgcatcctgctggaggagatggagcaggccgacttcaccatgctgcccaccttcatcgccaaggtgctggacaccatctgcttcatctgggccaccagcgagtactacaacaccccagcccgcatcatcgtcatcctgcaggagttctgcaaccagatcatcgagatgaccaggaccttcctgagccctgaggaggtgctgaagggcctgcagggcgagattgaggaggtgctgagcggcatcagcctggccgtgaatgtgctgaaggagctgtaccagacctatgacttctgctgcgtgaacatgaagctgttcttcaaggacaaggagcctgtgccctgggagttccccagcagcctggccttcagccgcatcaacagcttcttccagaggatccagaccatcgaggagctgtacaagacagccatcgagttcctgaagctggagaagattgagctgggcggcgtgcggggcaacctgctgggcagcctggtgacccgcatctatgatgaggtgtttgagctggtgaaggtgtttgctgactgcaagtatgaccccctggaccccggggacagcaactttgaccgggactatgctgactttgagatcaagatccaggacctggaccggcggctggccaccatcttctgccagggctttgatgactgcagctgcatcaagagcagcgccaagctgctgtacatgtgtggcggcctgatggagcggcccctcatcctggccgaggtggccccccgctacagcgtgatgctggagctgtttgatgctgagctggacaatgccaagatcctgtatgatgcccagatggccgccagcgaggagggcaacatccccctcatccacaagaacatgcctcctgtggccggccagctgaagtggagcctggagctgcaggagcggctggaggtgtccatgaagcacctgaagcacgtggagcaccctgtgatgtctggagctgaggccaagctgacctaccagaagtatgatgagatgatggagctgctgcgctgccaccgggagaagatctaccagcagtgggtggccggcgtggaccaggactgccacttcaacctgggccagcccctcatcctgagagatgctgccagcaacctgattcatgtgaacttcagcaaggccctggtggccgtgctgcgggaggtgaagtacctgaacttccagcagcagaaggagatcccagattctgctgagagcctcttctctgaaaatgagaccttcaggaagtttgtgggcaacctggagctgattgtgggctggtacaatgagatcaagaccatcgtgaaggctgtggagttcctgctgatcaagtctgagctggaggccattgatgtgaagctgctgtctgctgagaccaccctcttctggaatggagaaggagtcttccagtacatccaggaggtgcgggagatcctgcacaacctgcagaacaggatgcagaaggccaagcagaacatcgagggcatcagccaggccatgaaggactggagcgccaaccccctgtttgagaggaaggacaacaagaaggaggccctgctggacctggatggccgcatcgccaacctgaacaagagatatgctgctgtgagagatgctggggtgaagatccaggccatggtggctgaaaatgctgagctgttccgggctgacaccctgagcctgccctggaaggactatgtgatctacattgatgacatggtgctggatgaatttgaccagttcatcaggaagagcctgtccttcctgatggacaacatggtgattgatgagagcatcgcccccctgtttgagatccgcatggagctggatgaagatggcctgaccttcaaccccaccctggaggtgggcagtgaccggggcttcctggccctgattgagggcctggtgaatgacatctacaacgtggcccggctcatcccccggctggccaaggacaggatgaactacaagatggacctggaggacaacacagacctgattgagatgagggaggaggtgagcagcctggtgatcaatgccatgaaggaggccgaggagtaccaggacagctttgagcgctacagctacctgtggacagacaacctgcaggagttcatgaagaacttcctgatctacggctgtgctgtgacagctgaggacctggacacctggacagatgacaccatccccaagaccccacccaccctggcccagttccaggagcagattgacagctatgagaagctgtatgaggaggtgtccaaatgtgagaacaccaaggtgttccacggctggctgcagtgtgactgccggcccttcaagcaggccctgctgagcaccatccgccgctggggcttcatgttcaagaggcacctgagcaaccacgtgaccaacagcctggccgacctggaggccttcatgaaggtggccaggatgggcctgaccaagcccctgaaggagggggactatgatggcctggtggaggtgatgggccacctgatgaaggtgaaggagcggcaggccgccacagacaacatgtttgagcccctgaagcagaccatcgagctgctgaagacctacggggaggagatgcctgaggagatccacctgaagctgcaggagctgcctgagcactgggccaacaccaagaagctggccatccaggtgaagctgactgtggcccccctgcaggccaatgaggtgtccatcctgcggaggaagtgccagcagtttgagctgaagcagcacgagttccgggagcgcttcagaagagaggcccccttctccttcagtgaccccaacccctacaagagcctgaacaaggtgttcctgctgaagggcatcatggaggccctgagcaagagcggcggcctgtttgaggtgcctgtgcctgactacaagcagctgaaggcctgccaccgggaggtgcggctgctgaaggagctgtgggacatggtggtggtggtgaacaccagcattgaggactggaagaccaccaagtggaaggacatcaacgtggagcagatggacatcgactgcaagaagtttgccaaggacatgaggagcctggacaaggagatgaagacctgggatgcctttgtgggcctggacaacacagtgaagaatgtcatcaccagcctgcgggctgtgtctgagctgcagaacccagccatccgggagcggcactggcagcagctgatgcaggccacccaggtgaagttcaagatgtctgaggagaccaccctggccgacctgctgcagctgaacctgcacagctatgaagatgaggtgaggaacatcgtggacaaggctgtgaaggagagcggcatggagaaggtgctgaaggccctggacagcacctggagcatgatggagttccagcacgagccccaccccaggacaggcaccatgatgctgaagagcagcgaggtgctggtggagaccctggaggacaaccaggtgcagctgcagaacctgatgatgagcaagtacctggcccacttcctgaaggaggtgacctcctggcagcagaagctgagcacagctgacagcgtcatcagcatctggtttgaggtgcagaggacctggagccacctggagagcatcttcatcggcagcgaggacatccgcacccagctgcccggggacagccagagatttgatgacatcaaccaggagttcaaggccctgatggaggatgctgtgaagaccccaaatgtggtggaggccaccagcaagccaggcctgtacaacaagctggaggccctgaagaagagcctggccatctgtgagaaggccctggccgagtacctggagaccaagaggctggccttcccccgcttctactttgtgagcagcgctgacctgctggacatcctgagcaatggaaatgaccctgtggaggtgagccgccacctgagcaagctgtttgacagcctgtgcaagctgaagttccggctggatgccagtgacaagcccctgaaggtgggcctgggcatgtacagcaaagaagatgagtacatggtgtttgaccaggagtgtgacctgagcggccaggtggaggtgtggctgaacagagtgctggacaggatgtgcagcaccctgcggcatgagatccctgaggccgtggtgacctatgaggagaagccccgggagcagtggatcctggactacccagcccagatctggtggaccacagaggtgggcctggcctttgcccggctggaggagggctatgaaaatgccatccgggactacaacaagaagcagatcagccagctgaatgtgctgatcaccctgctgatgggcaacctgaatgctggggacaggatgaagatcatgaccatctgcaccattgatgtgcacgccagagatgtggtggccaagatgattgtggagagcagccaggccttcacctggcaggcccagctgcggcaccgctgggatgaggagaagaggcactgctttgccaacatctgtgatgcccagatccagtacagctatgagtacctgggcaacaccccccggctggtgatcacccccctgacagaccgctgctacatcaccctgacccagagcctgcacctgatcatgggcggggccccagctggccctgctggcaccgggaagacagagaccaccaaggacctgggccgggccctgggcaccatggtgtatgtgttcaactgcagcgagcagatggactacaagagctgtggcaacatctacaagggcctggcccagacaggagcctggggctgctttgatgagttcaaccgcatctctgtggaggtgctgtctgtgattgctgtgcaggtgaagtgtgtgcaggatgccatccgggccaagaagaaggccttcaacttcctgggggagatcatcggcctcatccccaccgtgggcatcttcatcaccatgaaccctggctacgccggccgggcagagctgcctgagaacctgaaggccctcttccggccctgtgccatggtggtgcctgactttgagctgatctgtgagatcatgctgatggccgagggcttcctggaggcccggctgctggccaggaagttcatcaccctgtacaccctgtgcaaggagctgctgagcaagcaggaccactatgactggggcctgcgggccatcaagtctgtgctggtggtggccggcagcctgaagagaggagaccccagcagagctgaggaccaggtgctgatgagggccctgcgggacttcaacatccccaagatcgtgacagatgacctgcctgtgttcatgggcctgattggagacctcttccctgccctggatgtgcccaggaagagggacctgaactttgagaagatcatcaagcagagcatcgtggagctgaagctgcaggccgaggacagctttgtgctgaaggtggtgcagctggaggagctgctgcaggtgcgccacagcgtcttcatcgtgggcaatgccggcagcggcaagagccaggtgctgaagagcctgaacaagacctaccagaacctgaagaggaagcctgtggccgtggacctggaccccaaggctgtgacctgtgatgagctgtttggcatcatcaaccctgtgacccgggagtggaaggatggcctcttcagcaccatcatgagggacctggccaacatcacccatgatggccccaagtggatcatcctggatggagacatcgaccccatgtggattgagagcctgaacacagtgatggatgacaacaaggtgctgaccctggccagcaatgaaagaatccccctgaacagaaccatgaggctggtgtttgagatcagccacctgaggacagccaccccagccaccgtgtccagagctggcatcctgtacatcaacccagctgacctgggctggaaccctgtggtgtcctcctggattgaaagaaggaaggtgcagagcgagaaggccaacctgatgatcctgtttgacaagtacctgcccacctgcctggacaagctgcgcttcggcttcaagaagatcacccctgtgcctgagatcaccgtcatccagaccatcctgtacctgctggagtgcctgctgacagagaagacagtgcccccagacagcccccgggagctgtatgagctgtactttgtgttcacctgcttctgggcctttggaggagccatgttccaggaccagctggtggactacagagtggagttcagcaagtggtggatcaatgagttcaagaccatcaagttccccagccagggcaccatctttgactactacattgatcctgacaccaagaagttcctgccctggacagacaaggtgcccagctttgagctggaccctgatgtgcccctgcaggccagcctggtgcacaccacagagaccatccgcatccgctacttcatggacctgctgatggagaagtcctggcctgtgatgctggtgggcaatgccggcaccgggaagtctgtgctgatgggagacaagctggagagcctgaacacagacaactacctggtgcaggccgtgcccttcaacttctacaccaccagcgccatgctgcagggcgtgctggagaagcccctggagaagaagtctggaagaaattatggccccccaggcaccaagaagctggtgtacttcattgatgacatgaacatgcctgaggtggacaagtatggcaccgtggccccccacaccctcatccggcagcacatggaccaccgccactggtatgacagacacaagctgaccctgaaggacatccacaactgccagtatgtggcctgcatgaaccccaccagcggcagcttcaccatcgacagccggctgcagaggcacttctgtgtgtttgctgtgtccttccctggccaggaggccctgaccaccatctacaacaccatcctgacccagcacctggccttccgctctgtgtccatggccatccagaggatcagcagccagctggtggccgccgccctggccctgcaccagaagatcacagccaccttcctgcccacagccatcaagttccactacgtgttcaacctgcgggacctgagcaacatcttccagggcctgctcttcagcacagctgaggtgctgaagacccccctggacctggtgcggctgtggctgcacgagacagagcgggtgtatggagacaagatggtggatgagaaggaccaggagaccctgcaccgggtgaccatggccagcaccaagaagttctttgatgacctgggagatgagctgctgtttgccaagcccaacatcttctgccactttgcccagggcattggagaccccaagtatgtgcctgtgacagacatggcccccctgaacaagctgctggtggatgtgctggacagctacaatgaggtgaatgctgtgatgaacctggtgctgtttgaagatgctgtggcccacatctgccgcatcaaccgcatcctggagagccccagaggaaatgccctgctggtgggcgtgggcggcagcggcaagcagagcctgagccggctggccgcctacatcagcggcctggatgtgttccagatcaccctgaagaagggctacggcatcccagacctgaagattgacctggccgcccagtacatcaaggctgctgtgaagaatgtgcccagcgtcttcctgatgacagacagccaggtggccgaggagcagttcctggtgctgatcaatgacctgctggccagcggggagatccctggcctcttcatggaggatgaggtggagaacatcatcagctccatgaggccccaggtgaagagcctgggcatgaatgacacccgggagacctgctggaagttcttcatcgagaaggtgcggcggcagctgaaggtgatcctgtgcttcagccctgtgggctctgtgctgcgggtgcgggccaggaagtttcctgctgtggtgaactgcacagccatcgactggttccacgagtggccagaagatgccctggtgtctgtgtctgcccgcttcctggaggagacagagggcatcccctgggaggtgaaggccagcatctccttcttcatgtcctatgtgcacaccaccgtgaatgagatgagccgggtgtacctggccacagagcggcgctacaactacaccacccccaagaccttcctggagcagatcaagctgtaccagaacctgctggccaagaagaggacagagctggtggccaagattgaaaggctggagaatggcctgatgaagctgcagagcacagccagccaggtggatgacctgaaggccaagctggccatccaggaggccgagctgaagcagaagaatgaatctgctgaccagctgatccaggtggtgggcattgaagctgagaaggtgtccaaggagaaggccatcgctgaccaggaggaggtgaaggtggaggtgatcaacaagaatgtgacagagaagcagaaggcctgtgaaacagacctggccaaggccgagcccgccctgctggccgcccaggaggccctggacaccctgaacaagaacaacctgacagagctgaagagctttggcagccccccagatgctgtggtgaatgtgacagctgctgtgatgatcctgacagcccctgggggcaagatccccaaggacaagtcctggaaggccgccaagatcatgatgggcaaggtggacaccttcctggacagcctgaagaagtttgacaaggagcacatccctgaggcctgcctgaaggccttcaagccctaccagggcaaccccacctttgatcctgagttcatccgcagcaagagcacagctgctgctggcctgtgctcctggtgcatcaacatcgtgcgcttctatgaggtgtactgtgatgtggcccccaagaggcaggccctggaggaggccaatgctgagctggccgaggcccaggagaagctgagccgcatcaagaacaagattgctgagctgaatgccaacctgagcaacctgaccagcgcctttgagaaggccacagctgagaagatcaagtgccagcaggaggctgatgccaccaacagagtcatcctgctggccaaccggctggtgggcggcctggccagcgagaacatccgctgggccgagagcgtggagaacttccgcagccagggcgtgaccctgtgtggagatgtgctgctgatcagcgcctttgtgtcctatgtgggctacttcaccaagaagtacagaaatgagctgatggagaagttctggatcccctacatccacaacctgaaggtgcccatccccatcaccaacggcctggaccccctgagcctgctgacagatgatgctgatgtggccacctggaacaaccagggcctgcccagcgacaggatgagcacagaaaatgccaccatcctgggcaacacagagcgctggcccctgattgtggatgcccagctgcagggcatcaagtggatcaagaacaagtacagaagtgagctgaaggccatccggctgggccagaagagctacctggatgtgattgagcaggccatcagcgagggggacaccctgctgattgaaaatattggagagaccgtggaccctgtgctggaccccctgctgggcaggaacaccatcaagaagggcaagtacatcaagatcggggacaaggaggtggagtaccaccccaagttccgcctcatcctgcacaccaagtacttcaacccccactacaagccagagatgcaggcccagtgcaccctcatcaacttcctggtgaccagagatggcctggaggaccagctgctggccgctgtggtggccaaggagaggccagacctggagcagctgaaggccaacctgaccaagagccagaatgagttcaagatcgtgctgaaggagctggaggacagcctgctggcccggctgtctgctgccagcggcaacttcctgggggacacagccctggtggagaacctggagaccaccaagcacacagccagcgagattgaggagaaggtggtggaggccaagatcacagaggtgaagatcaatgaggcccgggagaactacagacctgctgctgagcgggccagcctgctgtacttcatcctgaatgacctgaacaagatcaaccctgtgtaccagttcagcctgaaggccttcaacgtggtgtttgagaaggccatccagaggaccaccccagccaatgaggtgaagcagagggtcatcaacctgacagatgagatcacctacagcgtgtacatgtacacagcccggggcctgtttgagcgggacaagctgatcttcctggcccaggtgaccttccaggtgctgtccatgaagaaggagctgaaccctgtggagctggacttcctgctgcgcttccccttcaaggccggcgtggtgtcccctgtggacttcctgcagcaccagggctggggcggcatcaaggccctgtctgagatggatgagttcaagaacctggacagcgacatcgagggcagcgccaagcgctggaagaagctggtggagagcgaggcccctgagaaggagatcttccccaaggagtggaagaacaagacagccctgcagaagctgtgcatggtgcgctgcctgcggccagacaggatgacctacgccatcaagaactttgtggaggagaagatgggcagcaagtttgtggagggccgctctgtggagttcagcaagagctatgaggagagcagccccagcaccagcatcttcttcatcctgagccctggggtggaccccctgaaggatgtggaggccctgggcaagaagctgggcttcaccatcgacaacgggaagctgcacaacgtgtccctgggccagggccaggaggtggtggctgaaaatgccctggatgtggccgctgagaagggccactgggtgatcctgcaggtgcggggcggccagcactgcaggaacatccacctggtggcccgctggctgggcaccctggacaagaagctggagcactacagcacaggcagccatgaggactacagagtcttcatctctgctgagcccgcccccagccctgagacccacatcatcccccagggcatcctggagaatgccatcaagatcaccaatgagccccccaccggcatgcacgccaacctgcacaaggccctggacctcttcacccaggacaccctggagatgtgcaccaaggagatggagttcaagtgcatgctgtttgccctgtgctacttccacgctgtggtggccgagaggaggaagtttggagcccagggctggaacagaagctaccccttcaacaacggggacctgaccatcagcatcaacgtgctgtacaactacctggaggccaaccccaaggtgccctgggatgacctgcgctacctgtttggagagatcatgtatggaggccacatcacagatgactgggaccggcggctgtgcaggacctacctggccgagtacatcagaacagagatgctggagggagatgtgctgctggcccctggcttccagatcccccccaacctggactacaagggctaccacgagtacattgatgagaacctgcccccagagagcccctacctgtatggcctgcaccccaatgctgagatcggcttcctgactgtgaccagcgagaagctgttcagaacagtgctggagatgcagcccaaggagacagattctggagctggcactggagtgtcccgggaggagaaggccggcagcctgaagctgctgcccagcgagaggaagggggaggacctggagctgcggcggggcggctgccccggcaccggcttccaggtgaaggctgtgctggatgacatcctggagaagatccctgagaccttcaacatggccgagatcatggccaaggctgctgagaagaccccctacgtggtggtggccttccaggagtgtgagaggatgaacatcctgaccaatgagatgagaagaagcctgaaggagctgaacctgggcctgaagggggagctgaccatcaccacagatgtggaggacctgagcacagccctcttctatgacacagtgcctgacacctgggtggcccgggcctaccccagcatgatgggcctggccgcctggtatgctgacctgctgctgcgcatccgggagctggaggcctggaccacagactttgccctgcccaccaccgtgtggctggccggcttcttcaacccccagagcttcctgacagccatcatgcagagcatggccaggaagaatgagtggcccctggacaagatgtgcctgtctgtggaggtgaccaagaagaaccgggaggacatgacagccccaccccgggagggcagctatgtgtatggcctcttcatggagggcgcccgctgggacacccagacaggagtgattgctgaggcccggctgaaggagctgaccccagccatgcctgtgatcttcatcaaggccatccctgtggacaggatggagaccaagaacatctatgagtgccctgtgtacaagacccgcatccggggccccacctacgtgtggaccttcaacctgaagaccaaggagaaggccgccaagtggatcctggccgctgtggccctgctgctgcaggtgtag

SEQ ID NO: 318181 - DNA, 13458 bp, Artificial Sequence
  derived and/or modified sequence
atgaccatggcccccgacgtgcggctggagtacctggaggaggtggccagtatcgtgctgaaattcaaaccggacaagtggtcgaaactgataggagccgaggagaatgtcgcactgttcacagagtttttcgagaaacctgacgtgcaggtcctggtactgacgttgaacgcggccgggatgattataccatgtcttgggtttcctcagtccttgaagtccaagggcgtgtacttcataaagacaaaatctgaaaacatcaataaagacaattaccgagctaggctgctgtacggcgacatttcccctacgcctgtcgatcaactgattgccgtggtggaagaagtcctgtcatccttgcttaaccaatcggaaaatatggctgggtggccccaagtcgtgtctgaggacatcgtgaagcaggtgcaccgcctcaagaacgaaatgttcgtgatgagcggcaagattaaaggcaaaaccctgctgcccattccggaacacttgggaagcctggatgggactctggagtctatggagcggatccctagctctctggacaaccttctgctgcatgccattgagaccacaattatagactggtctcaccagattagggacgtgttaagcaaggactctgcccaggccctccttgacgggctgcacccgctacctcaagtggaattcgaattttgggatactaggctcctgaaccttaaatgtatccacgagcagctcaatagaccaaaggtgaataaaatcgtggagatccttgaaaaggcaaagtcctgttattggccagccctgcaaaatgtgtacaccaacgtgaccgagggcctgaaagaggcgaatgatatcgttctgtacctcaaaccattgaggatcctgctggaagaaatggagcaggctgacttcaccatgctgccaacattcatcgctaaggtgctggacacaatctgttttatttgggctaccagcgaatactataacactcctgccagaatcattgttatactgcaggagttctgtaaccagatcattgagatgaccaggacattcctctctccagaagaggtcctaaaaggtctgcaaggggagatagaggaagtcctgtcggggatttcccttgcggtcaacgtgctgaaagagctttaccagacttatgatttttgctgtgtcaacatgaagctgtttttcaaagacaaggaaccggttccatgggaattcccttccagcctggcattctctaggattaactcattttttcagcggatacagaccatagaagagctatacaaaacagccatcgagttcctgaagctcgagaagattgagctgggcggggtccggggcaacctcttgggcagcctcgtaacccgcatttatgacgaggtgttcgaattagtgaaggtttttgccgactgtaagtacgaccccctggaccccggggatagcaacttcgaccgcgattacgctgatttcgagattaaaatacaggatctggataggaggttggccacgatcttttgccaggggtttgacgattgctcctgtatcaagtcttcggccaagctgctctacatgtgcggaggtctgatggagcggcctttgatcttagcagaggtggcaccccgctacagtgtaatgctcgagctgttcgacgctgaactggacaacgccaaaattctgtatgatgctcagatggcagcctcagaagagggaaacatcccgcttatccataaaaatatgcctccagtggctgggcagctgaagtggtccctagaactgcaggaaaggttggaggtgagcatgaaacacctcaagcacgtagagcaccctgtaatgtctggtgcggaagctaagctgacgtaccaaaaatacgatgagatgatggagctactgcgctgccaccgcgagaagatctaccagcagtgggttgcgggggtggaccaagactgtcattttaatttaggccaacctttgattctgcgcgatgctgctagtaacctcattcacgtgaacttcagcaaagcactggtcgctgtcttgcgggaagtgaaatacctcaactttcagcagcagaaggaaatccctgattctgccgagagtcttttttctgagaatgagaccttccggaaatttgtcggcaacctggaactgatcgtgggttggtacaacgagattaaaaccatcgttaaggcggtggagttcctcttgataaaaagcgaacttgaagcaatcgacgtgaaactcctgtctgcggagacaaccctattttggaatggcgagggggtgttccagtacatccaggaagtgagagaaatcttgcacaatttacaaaatcgtatgcagaaggccaaacagaatatcgaaggaatcagccaggccatgaaggactggagcgccaatcctctgtttgaacggaaagataataagaaggaggccctgcttgacctggacggcaggatcgccaatctcaacaaaaggtacgcagcggtccgggacgctggggtgaagatccaggccatggttgctgagaatgccgaactgttcagggctgacacattgagcttgccatggaaagactacgtcatctatattgacgacatggttctggacgagttcgatcagtttatccggaagtccctgtccttcctcatggataacatggtcattgatgaatccatagccccgctcttcgaaatccggatggaactggacgaagatgggttgactttcaaccctaccttagaagttggatccgatagaggatttcttgctctgatagagggcctcgtcaacgacatctataacgtggccaggctaatccctcgactagcaaaggaccggatgaactacaagatggacctcgaggataatactgatctcatcgaaatgcgcgaggaagtttcctccttggtgatcaacgccatgaaagaggcagaagaatatcaggacagttttgagcgatattcttacctctggactgacaacctgcaagaattcatgaaaaactttctcatatatggatgtgccgttactgccgaggatctcgacacatggacagatgacacgatccccaaaacccccccaacgcttgcccagttccaggaacagatcgattcttatgaaaagctgtatgaggaagttagtaagtgcgaaaacaccaaggtgttccacggatggttgcagtgcgattgtcgacccttcaagcaggcgctgctgtcaacaatcaggcgatggggattcatgttcaaacgccacctgtcgaaccatgtcacaaattctttggctgacctggaggcttttatgaaggtggcaagaatgggcctcaccaaaccactaaaagaaggcgattatgacggactggtagaggtaatgggccacttaatgaaggtgaaagaaaggcaggctgctacagataacatgtttgaaccattgaagcaaaccattgaactgctgaagacttacggtgaagaaatgccagaggagatacacttgaaactccaagaactgcccgaacattgggccaatacaaagaaactggctattcaggtcaagctgacggtagccccattacaggcaaacgaagtgtccattctgcgtagaaaatgccagcagttcgagctgaaacagcacgaatttcgagagcgatttaggagagaagccccgttctcattcagtgaccccaatccatacaagtccctcaataaagtgtttttattgaagggaatcatggaggccctgagtaaaagcggaggtctctttgaggttccggttccggattataagcagcttaaagcctgccatagggaggttaggctcctgaaggagctatgggatatggttgtcgtagtgaacacctcaatcgaggattggaaaaccacgaagtggaaagatatcaacgttgagcagatggatatcgactgtaagaagtttgccaaggatatgcggtccctggacaaggaaatgaagacttgggacgcattcgtgggcttagacaacactgtgaaaaatgtgattacctctcttcgggctgtatcagaactgcagaaccccgcaattagggaaagacattggcagcagttaatgcaggcaacacaggtcaaatttaaaatgagcgaagaaacaacccttgccgatcttctccaattgaatctgcattcttatgaggacgaagtgcgcaacatcgtggataaagcagtcaaggagtccggcatggaaaaggtgttaaaagctctggactctacatggagtatgatggaattccagcacgagccgcatccgcgtaccggcactatgatgctgaagagttctgaagttttagttgaaaccttggaagataatcaggtgcaactgcaaaacctcatgatgtcgaagtatctcgcgcactttcttaaagaagtgaccagctggcagcagaagctgtccacagccgattctgtcatatcaatatggtttgaagttcaacgtacatggtctcacctggaatctattttcattggctctgaagacatacggacccagttgcccggtgattctcagcggtttgacgatatcaatcaagaattcaaagctttgatggaggacgccgttaagacacccaatgttgtggaggccacatcaaaacctggcctctacaataagctcgaggccctcaagaaatctctggccatttgcgaaaaggcgctggcagaatatctggaaacaaaacgactggccttccccaggttttattttgtttcaagcgcagacctcctagacatcttaagtaacggaaatgaccccgtagaagtgtcgcggcacctgagtaagcttttcgactctctgtgcaaactgaaattccgtttagatgcgtcagataaacctctgaaagtgggcctgggcatgtacagcaaagaagacgagtatatggtgttcgaccaggagtgtgacctgtccgggcaagttgaagtgtggctgaatcgggttctggaccgcatgtgtagcactcttagacatgaaatccctgaggccgtggttacatacgaggaaaagccgcgggagcaatggattctcgactaccctgcccaaatttggtggacaaccgaggtgggactagcatttgcacgcctggaggaaggctacgagaacgcaattcgcgactacaacaagaagcagatatcccagctgaacgtgcttatcactctgctgatgggcaacctgaacgccggagacaggatgaagatcatgaccatatgcacaatcgacgtgcatgctagggacgtcgtggcgaagatgatagtcgagtcttcccaagcctttacctggcaggcccaactgaggcataggtgggatgaggagaaaaggcactgctttgcgaacatttgcgacgctcaaattcagtactcatatgaatatctggggaacaccccgcgattggtcataactccattgacagaccgctgttatatcaccctaacacagtccctacatcttatcatggggggtgcacctgccggtccggcggggactggcaaaacggagaccaccaaggatctggggagagccctcggaacaatggtgtacgtgttcaactgttctgaacagatggattataagagttgcggtaacatatacaaaggcctggcccagacgggcgcatgggggtgtttcgacgaattcaatcgcattagcgtggaagtgctgagtgttattgccgtccaagttaaatgcgtgcaggacgccatacgagccaagaagaaggctttcaactttctcggcgagataatcggactaattccaacagtgggaatattcataacaatgaatcctggctacgccggaagagcggagctcccagaaaatctgaaagcattgtttaggccttgtgccatggtggtgccggatttcgaactgatatgcgaaattatgttgatggctgagggtttccttgaagcccggctcctggcccgcaaatttattactttgtacacgctttgtaaagaactgctgagtaaacaggaccactatgattggggattgagggcaatcaagagtgtgctcgtggtggctggatccctcaaacgcggtgatccctccagggctgaagaccaggtgctcatgagagctctcagggatttcaatatccctaaaatcgttacggatgatttacccgtgttcatgggacttataggcgatctcttcccagccctggacgtaccccgtaagagagacctgaatttcgagaaaattataaaacagtccatcgtggagcttaaattgcaggccgaggattccttcgtacttaaggtggtgcagttggaagagctgctgcaagtcagacactctgtttttattgtcggaaacgcaggttccggaaagagccaggttctcaagagccttaataaaacataccagaacctgaagcgcaagccagtggcagtcgacctcgatcccaaagccgtgacatgcgacgagctgtttggaatcatcaaccctgtaacccgcgaatggaaagatggtttgttcagtacgatcatgcgggatctggcaaatataactcacgacggacccaaatggattatccttgatggagacatagaccctatgtggatcgagtccctcaacacagtgatggatgacaataaggtccttacactggcaagcaatgagagaatccctttgaaccgcaccatgaggctggtgtttgagatctctcatttgcgcactgctacccccgccacagtgagccgggcaggtatcctgtacattaacccagcagaccttggttggaaccccgtagtctcgagctggatcgagcgcaggaaggtgcaaagtgagaaagctaacctcatgattctgttcgataaatacctgcccacttgcttggataaactaagatttgggtttaagaagatcacacccgtcccagagatcacagtcattcagacgatcctatatttgctggaatgcctgctgactgagaagacagttccgcccgactctccaagggagctgtacgagctttacttcgtgtttacatgcttctgggccttcggaggggcaatgtttcaagatcagctggttgactaccgagtggaatttagtaagtggtggatcaacgaatttaagaccatcaaatttccctcccaaggaactattttcgattactacattgatcccgatacaaagaagtttctcccatggacagataaagtgcccagctttgagctcgatccggatgtgccactgcaggctagtctggtccacacgacagagacaatacggatccggtacttcatggacctcctcatggagaagagttggccggtcatgttggttggcaatgctggcacaggaaagtccgtactcatgggggacaagcttgagagccttaacaccgataactatctcgtacaagccgttcccttcaatttttatacgacatccgcaatgctgcagggcgttctcgagaagccgcttgagaagaagtccgggaggaattatggaccacctggcacaaaaaaactggtttactttatcgatgatatgaatatgcccgaggtggataagtacgggaccgtcgcccctcacacacttattcgacaacatatggatcacaggcactggtatgaccggcataagctgacgctgaaagacatccacaattgccagtatgtggcatgtatgaaccctacctccggttctttcacaattgattctcggctacaacggcacttttgcgtgttcgctgtgtccttcccaggccaggaggccttaaccaccatatataacaccatcttgactcagcatctggcctttagatcagtgtccatggccatccaaaggatcagctcccaactggtcgcagctgcgttagccttgcaccagaaaatcactgcaacttttctgccgactgccataaaattccactatgttttcaacctgcgggacctttcaaatatattccagggcttgctattctccacagctgaggtgttgaagactcccctcgacctagtcagactgtggttgcacgagactgagcgcgtttacggagacaagatggtagacgagaaggaccaggagacactacaccgcgtcacaatggccagcacgaaaaaatttttcgatgacttgggggatgagctcctgttcgccaaacccaacatcttttgccacttcgcccagggcattggagatccgaagtacgtccctgtcactgacatggcaccccttaacaaactcctagtggatgtgttggacagctataacgaggttaatgccgtgatgaatttggtcctgttcgaggacgccgtcgcacacatctgccgcatcaatcggatactagaatccccccggggtaacgccctgctcgtgggcgtgggtggtagtggaaaacagagcctttccagactcgccgcgtatatcagcgggctggacgtattccaaataaccctgaagaaaggatacggaattcccgatctgaagattgacctggcggctcagtatatcaaggccgcagtcaaaaatgttcctagcgtgttcctcatgaccgactctcaggtggctgaagaacagtttctcgtattgatcaatgatcttttggcgtcaggcgaaatcccaggcctcttcatggaagacgaagtggagaacattatttcatctatgagaccacaggtgaagtcacttggtatgaatgatacaagggagacatgctggaagttcttcatcgaaaaggttaggagacagctgaaggtcattctctgcttctctccggtcgggtcagtcttaagggtccgagcccggaagtttccagccgttgtaaactgtacggccatcgactggtttcatgaatggccagaggacgcattagtctccgtgtcggccaggttccttgaagagacagaaggtatcccgtgggaggtcaaggcctctatttccttctttatgagctatgtccacaccactgtgaacgagatgtcacgagtttacctggcaaccgagcggagatataactacactacgccaaagacatttctggagcagatcaagctgtaccaaaatctactcgccaagaagcgaacagaattagtggccaagattgaacgacttgaaaacgggctaatgaagctgcaaagcacagcctctcaggtcgatgatttgaaagctaagctggccatccaagaagccgaactgaagcagaagaacgagagcgctgatcagttaattcaggtggtcgggattgaggccgagaaagtatctaaagaaaaggctatcgcagatcaggaggaggtaaaagtggaagtcatcaacaagaatgtgaccgaaaaacagaaggcgtgcgagacagatctggcaaaggctgaaccagcgctgttggccgcgcaggaggccctcgacaccctgaacaaaaacaatctgacagagctcaaatccttcggctctcctccagacgcggtagtcaatgtaacagcagcggtgatgatcctgaccgcccccggcgggaagatccctaaggacaagtcttggaaggccgccaagatcatgatgggcaaagtggatacctttcttgatagcctcaagaaattcgacaaggagcacattcctgaagcctgcttgaaagcattcaagccgtaccaggggaacccaacatttgaccccgaatttataaggagcaaatccaccgcggctgccggtctttgcagctggtgtatcaatatagtgagattttacgaagtgtactgtgacgtggctccaaaaaggcaggcgctcgaggaagcaaatgctgagttagccgaggcacaggagaagctttctcggatcaaaaataaaatagcagagctcaacgccaatctgagtaatctgacctcagcgttcgagaaagcaactgcagaaaagattaagtgtcagcaggaggcggatgctacgaatcgagtcatcttgctcgctaatcggctggtagggggactagcgagcgaaaacatccgttgggccgagagcgtggagaactttcgcagccagggggtgaccctctgtggcgacgtcctgctgattagcgcatttgtaagctatgttgggtatttcactaaaaagtataggaatgagctcatggaaaaattttggatcccatacatccacaacttaaaagtgcctatccccattaccaatgggctcgatcctctcagtttgctgacagacgatgccgacgtcgcaacctggaacaaccagggcctgcccagcgaccggatgagcaccgagaatgctacaatcttaggcaatactgagcgatggcctctgatcgtggacgcccagctccaggggattaaatggatcaaaaacaagtaccgctcagagctgaaggcaattcgactcggtcaaaagtcctatttagacgtgatcgaacaggcaatttcggaaggcgatacattgctgatcgagaatatcggtgaaaccgttgaccccgttctggacccactgctgggcagaaacactataaaaaaaggtaaatacatcaagatcggcgacaaagaggtggaataccatcccaagttcagattgattttacacacaaaatacttcaatccacactacaagccagaaatgcaggcccaatgtactctgatcaactttctggtgacccgcgacgggctggaggaccaacttcttgctgctgtcgtggcaaaggagcggccagatctcgagcagcttaaggcgaatctgacgaaatcgcaaaatgagttcaaaatcgtgcttaaggaactggaggattcactcttggcaaggctgtctgcagcttcagggaatttcctgggtgacactgcccttgtggaaaacctggaaactactaagcatacagcttccgaaatcgaagagaaggtggtggaggccaagatcaccgaggtcaagatcaacgaagctcgggagaattacagaccagcggccgagcgcgcaagcttactctacttcattctgaacgacctcaacaaaattaatcctgtctatcagttctccctcaaggcctttaacgtcgtgttcgaaaaagccatacagcggacgactcccgcaaacgaagtgaaacaacgggtgattaacctcacggacgagattacttactctgtgtacatgtacaccgccaggggcctcttcgaaagggataaactgatattcttggctcaggtgaccttccaggtgctctctatgaaaaaggagctgaatccagttgaattggacttcctgctgagattcccattcaaagcaggcgtcgtctctcccgtagatttcctccagcaccaggggtggggaggaattaaggcgctgtcagagatggatgagtttaaaaacctggattccgatattgagggctcagcaaaaagatggaagaaactagtggaatctgaagcaccagagaaggagatttttcctaaggaatggaaaaataagaccgcactgcagaaactgtgtatggtcagatgcctccggcctgatagaatgacatacgccatcaagaatttcgtggaggagaaaatgggctccaaatttgtcgaaggcagaagtgtggaattttcaaaatcctatgaagagtcatcaccctccacctctatatttttcattcttagccccggcgtggaccccctgaaagacgtggaggccctcggcaagaagttgggatttaccatcgacaatggaaagttacacaacgtctccctgggtcaagggcaagaagtcgtggctgaaaacgcccttgatgtggcagccgaaaagggacactgggtgatcttacaagtacgcggaggtcagcactgccggaatatccacctggtcgctcggtggcttgggaccctggataagaagctcgagcactactctactgggtcccacgaggactacagagtgttcatctcagccgaaccagctccttccccggagactcatataattccccagggcatcctggagaacgctatcaagatcacaaatgagcctcccactggcatgcacgcaaaccttcataaagcactcgacctgtttactcaggacacactggagatgtgcaccaaagagatggaattcaagtgcatgctgttcgccctgtgctattttcatgcagtggtcgccgaacgacggaaatttggcgcgcaagggtggaacaggagttacccttttaacaacggagaccttactataagcatcaatgtgctatacaactatctggaagcaaatcccaaggtgccgtgggacgatctccggtacctgtttggggaaatcatgtatggcgggcatattactgatgattgggatcggcgcctgtgtaggacctatcttgcggaatacattcggaccgagatgctggagggcgacgtactcctggccccagggttccagataccaccgaatctcgattataaagggtatcacgagtacatcgatgagaatcttccccctgagtctccatacttgtatggccttcacccaaatgcagagatcggtttcctcaccgtaactagtgagaaactgttcaggaccgtactggagatgcagccgaaggaaaccgattctggggctggcacaggggtctctcgagaggagaaggcgggtagtctaaaactcctgccgtcagaaaggaaaggcgaggacctagagctgcgccgcggggggtgtcctggaactggttttcaggtcaaggccgtcctggatgacattctcgaaaaaattccagagactttcaatatggcagaaattatggctaaagctgctgagaagactccctatgtggtggtagccttccaagaatgcgaaaggatgaacatccttactaacgagatgaggcggtcactgaaggagctgaatctcggcctaaagggggagctgacaattactactgacgtggaggacctcagtaccgctctcttctatgacacagtgccggatacttgggttgctagagcttatccatcgatgatgggcctcgccgcctggtatgctgacctcttgcttcgcattcgtgagcttgaggcctggactactgatttcgctcttcctacgactgtgtggttggccgggtttttcaatccacaaagctttttgaccgcaatcatgcagtcaatggcacggaaaaacgaatggcctttagacaaaatgtgtctgagcgtggaagtaactaagaaaaaccgagaggatatgactgctcccccacgcgagggcagctatgtatatgggctgtttatggaaggtgctcgatgggacacccaaaccggagttattgctgaagcaaggctgaaagagctgacccctgctatgcccgtaatattcattaaggcgattcccgttgacaggatggagaccaagaatatttacgagtgcccggtgtacaagacccgaattagaggccctacctatgtgtggacgtttaatctgaaaaccaaggagaaagcagccaaatggatcttagccgcagtggccctgcttctgcaggtatag

SEQ ID NO: 318182 - DNA, 13458 bp, Artificial Sequence
  derived and/or modified sequence
atgactatggccccagatgtgcgcttggaatacctcgaggaggtggcaagtattgtgctcaaatttaagcccgacaagtggtctaaattaattggggctgaagagaatgtggccttgtttacagagttctttgaaaagccggacgtacaggtgctggtgcttaccctcaacgcagccggtatgatcatcccttgtttgggattcccccagagccttaagtctaagggagtgtactttattaagacaaagtccgagaatatcaataaagacaattacagggccagactcctctacggagatataagcccaacccccgttgaccaactgatcgccgtcgtggaggaggtgctaagttctttactgaaccagagcgagaacatggcaggatggccacaggttgtcagtgaggacattgtgaaacaggtccacagattaaagaacgagatgttcgtgatgagcgggaagatcaagggcaagaccctgctgcctattccagagcacttgggatctctggacgggaccctcgaaagtatggagaggataccatcttcccttgacaacttacttctgcatgccatcgagacaaccatcattgactggagccaccagatccgggatgtcctgtcaaaagactccgcacaagcccttctagacggtctccatccactcccacaggttgagtttgaattttgggacactagactccttaacctgaaatgtatccacgaacaactcaatcggccaaaagttaataagattgttgagatcctcgagaaggctaagtcctgctattggcctgccctgcaaaacgtgtacactaacgtgactgagggacttaaggaagccaacgacattgtgttatacttgaaacctttgcggatcttactggaagaaatggagcaggccgattttacgatgcttccaacattcatcgccaaggtcctggacacaatctgctttatttgggctacttcagaatactataatacacccgcaaggatcatcgtgatcctgcaggaattttgtaaccagatcatcgaaatgactagaacttttttgtcccctgaagaggtccttaagggcctccagggagaaatagaggaagtgctatccggcatttccctggcggtgaatgtgctgaaggaactttaccagacatatgacttttgctgcgtgaatatgaagcttttctttaaggacaaggaacccgtaccgtgggagttcccctcttccctcgcttttagtcgtatcaatagcttctttcagcgtatacagaccattgaggaactgtacaagaccgctatcgaatttctcaagctggagaagattgaactcgggggtgtgagaggcaacctgctcgggagcctggtgacgaggatctacgacgaggtgttcgaattagtgaaggttttcgccgattgtaagtacgatccgttggaccctggcgatagtaatttcgacagggattacgcagattttgaaatcaagattcaggatctggaccgtagactagccacgattttctgccagggctttgacgactgtagctgtattaagtcttctgctaagctgttatacatgtgtgggggacttatggagcggcctttaatactcgcggaggtggcacctcggtactcagtaatgctagaactattcgacgctgagctggacaacgccaagatcctgtacgacgcgcaaatggcagccagcgaggaagggaacattcccctgatccataaaaacatgccacccgtggccggtcagttaaaatggtcgcttgaattacaagaaaggctggaagtgagcatgaaacatctcaagcatgttgaacaccccgtgatgtctggcgctgaagcgaagctgacatatcagaaatatgatgaaatgatggaattactgcggtgccacagggagaagatataccagcagtgggtggctggagtcgatcaggactgccacttcaacctgggacaacccctgatccttagagatgcagcaagcaacctcatccacgtgaacttctctaaggctctagttgccgtgctcagggaagtgaaatacctgaacttccaacagcagaaggaaatccccgacagtgcagagtcactctttagtgaaaatgagacatttcgaaagttcgtggggaatctggagttgatcgtcggctggtacaatgagatcaagacaatcgttaaggctgtcgagtttttgctcatcaaaagcgaattggaggctatcgatgttaagctgttgtctgcagaaaccacactgttttggaatggtgaaggagtcttccagtacatacaggaggtgagagagatcctgcacaatcttcagaatcggatgcagaaggctaagcagaacattgaagggatctctcaggcaatgaaggattggtccgccaaccctcttttcgaaagaaaggacaacaaaaaagaagctctcctggacctggatggaaggatcgctaacctgaacaagaggtacgccgctgtacgagatgcaggggtgaaaatacaggcgatggtcgccgagaacgcggagctcttcagggctgacaccctgtcgctgccctggaaagactacgtgatttacattgacgacatggtcttagatgagttcgatcagttcattaggaagtccttgagcttcttgatggataacatggtgattgacgagtccattgcacccctgttcgagatccgcatggaactggacgaggatggtctgacctttaaccccactcttgaggtgggcagtgatcgcggatttcttgccctcatcgaagggctggtgaacgatatttataacgtggcacgtctcatacctcgcctcgctaaagatcgcatgaactataagatggatttggaggataacacagatctgatcgagatgcgggaggaggtgagcagtctggtgataaatgcaatgaaggaggccgaagagtatcaggacagctttgagagatatagttatctgtggacagataacctgcaggaatttatgaaaaactttctgatctacggctgtgccgtcactgcggaggacctggatacctggacagatgacactatccctaagactccacccaccctcgcccaatttcaggaacaaattgacagctatgagaaactctatgaggaggtctcgaagtgtgaaaacaccaaggtgttccacggttggttacagtgcgactgtcgcccttttaaacaggctctcctgtccaccattagacgctggggttttatgttcaagcgtcaccttagcaaccacgtgaccaatagtctggccgacctggaggccttcatgaaggtggctcgcatgggactgactaaacccctgaaggagggtgattacgacggactggtggaggttatgggtcacctcatgaaagtgaaagaacgacaggccgctactgataacatgttcgaacccctgaagcagaccatcgaattgttgaaaacatacggtgaagagatgcccgaagaaatacatttgaaactacaggagcttccagaacactgggccaataccaagaaactcgctatccaggtaaagttgaccgtagcacctctccaagcgaacgaggtgagtattctccgaaggaagtgccaacagttcgaactgaaacagcacgagtttagggaaaggtttcggagagaggcaccattctcgttttctgatccaaatccctacaagagtctgaacaaagtatttctcctaaaggggattatggaagcgctttctaagtcagggggtctgtttgaagtccccgtccctgattacaagcagcttaaggcatgtcatagggaggtccgcctgctcaaagaactgtgggatatggttgttgtcgtgaacacatcgatcgaagactggaagacaaccaaatggaaagacatcaacgttgagcaaatggatatcgactgtaagaagtttgctaaagatatgcgcagcctggacaaagagatgaaaacctgggacgcttttgtgggtctggataacacggtcaaaaacgtgatcactagcttacgggcagtatctgagctccagaatccggctatacgcgaacggcattggcaacaattgatgcaagcaacacaagtgaaatttaagatgagcgaggaaaccactttagccgatctcctacagctcaacctgcacagttacgaagacgaagtgagaaatattgtcgacaaagccgtgaaggagtctggcatggaaaaagtcctcaaagcactggacagcacatggtctatgatggagttccagcacgaacctcatcctaggacgggcacgatgatgctcaaaagcagtgaagtactcgtcgaaaccctcgaagacaatcaggtgcaactgcagaacttgatgatgtccaaatacctggctcacttcttaaaagaagtgacttcttggcagcagaagctctctacagctgactccgtgatttctatttggttcgaggtccagcggacatggtcccatttagagtccatcttcatcggttctgaggacataaggacacaactgcctggcgattcacagcgatttgacgatataaatcaggaattcaaggcactgatggaggacgccgtaaagacacctaatgtcgtggaggccaccagcaaacccggactctacaataaactggaagcactcaagaaatctcttgctatctgtgaaaaggcgcttgccgagtacctggagaccaaaaggctggctttccccaggttctacttcgtgtcttcagcagatctgttagacatcctgtcaaatggcaatgatccggtggaagtgtccagacacctctcgaagctgttcgatagcttgtgcaagttgaagttccgcctggacgcctccgacaaacccttgaaagtgggactagggatgtactccaaagaagatgaatatatggtatttgaccaagaatgcgacctgtccggccaagtggaggtctggctaaaccgcgtgttggaccgtatgtgctctacactgagacacgagattccggaagcagttgtgacctacgaagagaaaccgcgtgagcagtggatcttggattatcctgctcagatctggtggacaaccgaagtcggcctggctttcgctagactggaggaggggtacgaaaacgccatccgagattataacaaaaagcagatttctcagctgaatgtactcatcaccctcttgatgggtaatcttaacgccggtgaccgtatgaaaatcatgacaatctgtacaatcgatgtgcacgccagggacgttgtcgcaaagatgattgttgagagctcccaagcgtttacgtggcaggcacagcttcgtcatcggtgggatgaggaaaaacgccactgcttcgcaaacatttgtgatgcccagattcagtactcatacgagtatctagggaatacccctaggttagtgattaccccgctaaccgaccgctgttacatcactctcacacagtctctgcaccttatcatgggaggagccccagctggacctgctggaacgggaaagaccgagacaaccaaagatctgggtagagccttgggcactatggtttatgtgtttaattgcagcgagcaaatggactacaagtcgtgcggcaatatctataaagggctggctcagacgggcgcttggggttgtttcgatgagttcaaccggatttccgtcgaggtgctgtcggttatagctgttcaggtgaagtgcgtgcaagacgccattcgcgcaaaaaagaaagcattcaatttcctaggcgagatcatcgggctcatacctacagtggggattttcattacaatgaatcccggatatgctgggagggccgaactccctgaaaacctgaaagccttgttccgtccttgtgctatggtggtgcccgacttcgaattgatatgtgagataatgctcatggccgaaggatttctagaggcgcgacttctggctcggaagttcataaccctgtacaccttgtgcaaagagctgttaagtaagcaggatcattatgactggggtttgagggccatcaagtcagtgcttgtagttgctggatcactcaagcggggtgacccatctcgcgcagaagaccaggtcctgatgagagccttaagagatttcaacattcccaaaatcgtcaccgacgacctcccagtgttcatggggctcatcggagacctgttcccggctctggatgtgcctcggaagagagacctgaactttgagaaaattatcaagcagtcaattgtggagcttaagcttcaggctgaagattcatttgtcctgaaagttgtgcaactggaagaactgctccaggtgagacatagcgtcttcatagtgggcaacgccggtagcggaaagtcccaggtattgaaatccctgaacaaaacctatcaaaatctgaaacgcaaacccgtggcagtggacctcgaccccaaggccgtgacctgcgacgaactgtttggaattatcaaccccgtcactagggagtggaaagacggcttattctccacaatcatgagggatctggcaaacatcacacacgatggtcccaaatggatcatcctggacggggatatcgacccaatgtggattgaatctctgaacaccgtgatggacgacaacaaagtgctaaccctcgcctctaatgagagaattccactcaaccgcaccatgcggctcgtgtttgagatttcgcatctgcgaacggccaccccagccacagtttcacgcgctggcattctatacatcaatcctgctgatctcggctggaaccccgtggtctcaagttggatagaaaggaggaaagtgcagagcgagaaggccaacctcatgatcctgttcgacaagtacctccccacctgcttagacaaattgcgattcggttttaagaaaattacacccgtacccgagatcaccgtgatccaaactatactttatctgctcgagtgccttttgactgaaaagacagtccccccagactctccgagggaactgtacgaactgtacttcgtgtttacctgcttttgggcgttcggcggagccatgttccaggatcagctggttgactatcgagtggaattcagcaagtggtggattaacgagttcaagactatcaagttcccatcacagggcaccatttttgattattacattgaccccgatactaagaagtttctgccctggactgataaagtgcccagcttcgagcttgaccctgatgttcctctgcaggcatccctagttcataccactgagacaatccgaattcgctactttatggatctgctaatggaaaaatcatggcccgtcatgctggtgggaaacgcaggaacagggaagtcggtacttatgggtgataagttagagtcactcaatacagataactacttggtccaggctgttccatttaatttctacaccacaagtgcaatgctccagggagttctggagaaacctctcgagaagaagagtggcaggaactacggccctcctggtaccaagaaacttgtttacttcatcgatgatatgaacatgcccgaagtagacaagtatggcaccgttgctcctcataccctgatccggcagcacatggaccatcgccattggtacgacaggcacaagcttaccctgaaagacattcacaactgccagtatgtcgcctgtatgaaccccaccagcgggtcattcaccatcgattcacggctgcaaaggcacttttgtgtattcgctgtctcctttcccggacaggaggccttgaccaccatctacaatactatcctcacccagcacctggcttttcgctcagtgagtatggctattcagcgcatttcgtcccagctggtcgcagctgccctggccctgcaccagaagattaccgcaacattcttacctacggccatcaagttccattacgtatttaatttgcgggacctctcaaacatttttcagggactactgttcagtactgctgaagtgctgaagacacctttagatcttgtgcggctctggttacatgaaacggagcgcgtgtacggggataagatggttgatgagaaggaccaggagacccttcaccgcgtgactatggcctccaccaagaaatttttcgacgatttgggagacgaactgctgttcgcaaaaccaaacatattttgccacttcgcgcagggaataggggatccgaagtatgttcccgtgactgacatggcgccactgaataagttactggtcgacgtgctggattcatataacgaagtgaacgcagtgatgaacctggttctgtttgaagatgcagtggcccacatatgtcggatcaacaggatcctggagagtcccagagggaatgctctactggttggagtgggcggatcaggtaaacagagcttgtctagactggccgcatatatatcgggccttgacgtttttcagatcacactaaagaagggctacgggatcccagacttgaagattgacctggctgcccagtatattaaagccgctgtgaagaacgtacccagtgtcttcctgatgacggactcccaggtcgcagaagagcagtttctggtcctgataaatgacctgctggcctccggggagatccccggactcttcatggaggatgaagtggagaatatcatcagcagcatgcgtcctcaggtgaagagcctcggaatgaatgacacacgagaaacgtgctggaaatttttcatcgagaaagttagaagacagctgaaagtgatcctgtgcttttcccctgtgggctcagtgctgagagtgcgggcacggaaattccccgcagtggtcaactgtactgctatcgactggttccacgagtggccggaggacgccctggtgtctgtaagcgctaggtttttggaggagaccgaggggatcccttgggaagtcaaggcatcgataagcttcttcatgtcatatgtgcacacgacagttaatgagatgagcagagtctatcttgccaccgagcggaggtataattatacgacccccaagacattccttgagcaaatcaagctgtaccagaatcttctagccaagaaacggacagaacttgttgcgaaaatcgagagattggagaacggtttaatgaagctccagtcaacagctagtcaggtggacgatttgaaggccaagcttgccatccaggaagctgaactaaagcagaagaatgaatcggctgatcagctgatccaggttgtgggaatagaggctgaaaaggtctccaaggagaaggcgatagccgatcaggaggaggttaaagtggaagtgatcaacaaaaatgtaaccgaaaagcagaaggcatgtgaaactgacctggcgaaagcagaaccagctttgctggcagcccaggaagcgctggatacactgaataagaacaacctaaccgagctgaagagtttcggtagccccccagatgctgtggtgaatgtgacagccgcagtgatgattttgacagctccgggtggaaagatccccaaagacaaatcttggaaggctgccaaaattatgatgggcaaggtggataccttcctcgactctttaaagaagttcgataaagaacatataccagaggcctgcctgaaggctttcaaaccctaccaaggtaatcccacttttgacccagaatttatacgtagcaagtccacagctgctgccggactatgctcatggtgtatcaacattgtcaggttttatgaagtgtactgcgatgtggctcctaagcggcaggcccttgaggaggcgaatgcggagctggctgaggcacaggagaaactgagtcgtatcaagaacaagatcgccgagctgaacgcaaatctctccaatttaacatctgctttcgagaaggccaccgctgaaaagatcaagtgtcaacaggaagctgacgcgaccaaccgagttatactccttgccaatcgcctagttgggggacttgcgtcagaaaacattcgatgggctgaatcggtggaaaattttcgctctcagggggtgacattgtgcggcgatgtacttctcatcagcgctttcgtctcatacgtgggctatttcactaagaaatacagaaacgaattgatggagaagttttggatcccatacatccataacctgaaggttccaatccctatcaccaatggactggacccgctgagcctgctcacagatgatgccgacgtggcaacatggaataatcaagggctgccctcagataggatgtctactgagaacgccacgatccttggtaataccgaaaggtggccgctgattgttgacgcccagctccaagggatcaaatggataaaaaataagtatcgatccgagcttaaagccatacgactgggccagaagagttatttggatgtgatcgaacaggctatcagtgagggtgacacgctgctcattgagaatatcggagaaacggtagatcccgtgctagacccacttctcggccgtaacacaattaagaagggaaagtatattaaaattggcgacaaagaggtggaatatcatcccaagtttagactcatcttacacacgaagtactttaaccctcactataagcctgagatgcaagctcagtgcacgttgattaacttcctggtgactagggatggacttgaagaccagcttttggccgcagttgtggcaaaagagaggccagacctggaacagctgaaagcaaatctgaccaagtcccagaacgaatttaagatagtccttaaagaactggaggattctctgctcgcaaggctgagcgcagcatctggtaatttccttggagacaccgccctagtagaaaatctggaaactaccaaacataccgctagcgaaattgaggaaaaggtagtcgaagctaagattaccgaagttaagattaacgaagcccgtgagaattataggccagccgctgagagagcctccttgctgtactttattctgaacgatcttaataaaataaaccccgtatatcaatttagtcttaaggcttttaatgtggtgtttgagaaggccattcagcggaccacccctgcaaacgaagttaaacaaagggtcattaatttgacagatgagattacttatagcgtatacatgtatacggctagaggcttgttcgagcgcgacaagttaatttttctggcccaagtgacatttcaggtgctgagcatgaaaaaagagcttaatcctgtggaactggacttcctcctcagatttcctttcaaagccggtgtggtgtcccccgtggattttctccagcaccaaggctggggcggtataaaggctctgagtgagatggacgaatttaaaaacctggacagcgatatcgaaggatccgctaagagatggaagaagctggttgaaagcgaggcgccagagaaggagattttcccaaaggagtggaaaaacaaaaccgctctgcagaagctctgcatggtgcggtgtttaagacctgaccgtatgacatatgctattaagaacttcgtggaggagaagatgggcagcaagttcgtcgaaggccgaagcgtggagttcagcaagtcttacgaggaaagctccccatccactagtatcttcttcatcctttcaccaggagtggaccccctgaaggatgtcgaggcccttgggaagaaactgggctttacgattgacaacggaaaactgcacaatgtgagcctaggtcaggggcaggaggtagtggctgaaaacgcactggatgtcgccgcagagaaaggacattgggtgatcttgcaggtgcgaggcggtcaacactgcaggaacatccatctggtggcaagatggctgggcacattggataaaaaactggagcattactccacaggaagccacgaagattatagagtctttatttctgcagagccggcaccttcgccagagacccatattattccccagggcattcttgagaatgctattaagataaccaatgagcctccaacgggcatgcatgccaacttacacaaagcacttgatcttttcactcaggatactttagagatgtgcactaaggaaatggagttcaaatgcatgctttttgcattgtgttactttcacgctgttgtggcagagcgcaggaaatttggcgctcaaggttggaacagaagctaccccttcaataatggtgacttgactattagtatcaatgtcctctacaactacctcgaagccaatccaaaggtgccctgggacgatctacgctatctgttcggagagatcatgtacggcggacatattacagacgactgggaccggcgactatgccgtacttacctggccgagtatatccgcactgagatgcttgagggtgacgtgctattggcaccgggattccagatacccccaaacttggactataaagggtatcacgagtatatagatgagaatctgccaccagaaagcccttacctgtatggactgcacccaaacgctgaaatcggcttccttactgtcacatcagagaagctattccggacagtgcttgaaatgcagcctaaggaaactgactccggggctgggaccggcgtctcaagagaggaaaaggcaggatcactgaaactgcttccttccgaaagaaagggagaagacctcgagctgcggagaggcggatgccccggaaccgggttccaggtaaaggccgtcttagatgatatactggaaaaaattcccgagaccttcaacatggctgaaatcatggctaaggccgctgagaagaccccctatgtggttgtggcctttcaggaatgtgagagaatgaacatccttaccaatgagatgagaaggtctctgaaagagttaaatttgggcctgaagggggaactgactataacaacggatgtggaggatctgagcacagcccttttttacgacacagtgccggacacatgggtggccagagcatatccgagcatgatgggcctggccgcttggtacgcagacctattgctccggattagggagctggaagcttggaccacagactttgcactgcccactactgtgtggctcgccggtttttttaacccccagagcttcttaaccgctataatgcagtcaatggcccgtaagaatgagtggcctctcgacaagatgtgcctttccgtggaggtgaccaagaaaaatagggaggatatgactgctcctccgagggaaggatcttacgtgtatggactcttcatggaaggcgctcgttgggatacgcagaccggcgttattgccgaagctaggctgaaggaactgacacctgcaatgcctgtgattttcatcaaagctattcccgtcgaccgaatggagaccaagaacatttatgaatgtcccgtgtataagacgcggatccggggtcctacctacgtctggacctttaacttaaaaaccaaagagaaggctgccaaatggattctggcagctgtggccttgctccttcaagtctaa

SEQ ID NO: 318183 - DNA, 129 bp, Artificial Sequence
  derived and/or modified sequence
gccaatcagtggatcaagtttaagtcagttaaggggaggagaaggagaggttataccttcagggggctaccagacagtgttctcaacttggttaaggaggaagaaaacccagtcaatgaaattcaatga

SEQ ID NO: 318184 - DNA, 87 bp, Artificial Sequence
  derived and/or modified sequence
atggacctggccagcgagatcaccagcgccacccagaccagcagcctttgctccagcggcagagggcatgctgggtaccctgcatag

SEQ ID NO: 318185 - protein, 786 aa, Artificial Sequence
  derived and/or modified sequence
MNEAKVKETLRRCGASGDECGRLQYALTCLRKVTGLGGEHKEDSSWSSLDARRESGSGPSTDTLSAASLPWPPGSSQLGRAGNSAQGPRSISVSALPASDSPTPSFSEGLSDTCIPLHASGRLTPRALHSFITPPTTPQLRRHTKLKPPRTPPPPSRKVFQLLPSFPTLTRSKSHESQLGNRIDDVSSMRFDLSHGSPQMVRRDIGLSVTHRFSTKSWLSQVCHVCQKSMIFGVKCKHCRLKCHNKCTKEAPACRISFLPLTRLRRTESVPSDINNPVDRAAEPHFGTLPKALTKKEHPPAMNHLDSSSNPSSTTSSTPSSPAPFPTSSNPSSATTPPNPSPGQRDSRFNFPAAYFIHHRQQFIFPVPSAGHCWKCLLIAESLKENAFNISAFAHAAPLPEAADGTRLDDQPKADVLEAHEAEAEEPEAGKSEAEDDEDEVDDLPSSRRPWRGPISRKASQTSVYLQEWDIPFEQVELGEPIGQGRWGRVHRGRWHGEVAIRLLEMDGHNQDHLKLFKKEVMNYRQTRHENVVLFMGACMNPPHLAIITSFCKGRTLHSFVRDPKTSLDINKTRQIAQEIIKGMGYLHAKGIVHKDLKSKNVFYDNGKVVITDFGLFGISGVVREGRRENQLKLSHDWLCYLAPEIVREMTPGKDEDQLPFSKAADVYAFGTVWYELQARDWPLKNQAAEASIWQIGSGEGMKRVLTSVSLGKEVSEILSACWAFDLQERPSFSLLMDMLEKLPKLNRRLSHPGHFWKSADINSSKVVPRFERFGLGVLESSNPKM

SEQ ID NO: 318186 - protein, 923 aa, Artificial Sequence [sequence omitted]

SEQ ID NO: 318187 - DNA, 2361 bp, Artificial Sequence
  derived and/or modified sequence
atgaatgaggcaaaggtgaaagagacactgcgacggtgcggcgcgtccggggacgagtgtggccggttgcaatatgcgctgacctgtctccgcaaggttacagggctcggcggggagcacaaagaagactcatcgtggagctccctggatgctaggcgggaatccggctctggtcccagtactgacacactgtctgcagcctcactgccgtggccccctgggtcctctcaactcgggcgagcaggaaactcggctcaaggtcccagaagtatatctgtctccgcactaccagcatccgactcaccaacccccagcttttctgagggcctgagcgacacgtgcatcccgctgcacgcctctggccgcctgaccccaagggccctgcattcctttatcacaccccctacgaccccccaactgaggcggcatacaaaattgaaaccccctagaacacccccacccccatctcgtaaggtttttcagctcctgccatcgtttccaacgctgacccgaagcaagtcccatgaatcccagctcggcaatcgtattgacgacgtatctagtatgcggtttgatttgagccatggaagtccacagatggtccgccgtgatatagggcttagtgtgacacatagatttagtactaaatcctggctttctcaggtgtgtcatgtctgccaaaagtcaatgatcttcggtgtgaaatgtaagcattgtagactgaagtgtcacaacaagtgtacaaaagaggcccccgcttgtagaatctcttttctgccgttgaccagactgagacggacggagtcggttccttctgatatcaataaccctgtggacagggccgccgaacctcactttggcaccctgcccaaggctctgaccaaaaaagaacatcccccagcgatgaaccacctggactcgtcatcaaacccttcttcgaccacctcgtctactccatcttcgccagcgccattcccgacaagttccaatccctcttctgctacaactccaccaaaccctagcccaggccagagggactctcgctttaacttccctgctgcttatttcatccaccatcgccagcagttcattttccccgtgcccagcgccggccattgttggaagtgcctcctcattgccgagagcctgaaagaaaatgcctttaatatttccgctttcgcgcatgccgcacccttaccagaagcagccgacgggacgcgtctcgacgatcagccaaaggccgacgtgttggaggcccatgaagctgaggcggaagagcccgaggcgggaaagagtgaggccgaggacgacgaggacgaagtggatgatttgccctcaagcaggcgaccttggagggggcctatttctagaaaggctagccaaaccagcgtctatttgcaggagtgggacatcccctttgagcaagtagagctgggtgagcctattggccagggaagatggggtagagtacatagaggcaggtggcacggagaggtggcaatacgcttactcgagatggacggccataaccaggatcatctaaaactgtttaagaaggaagtcatgaactaccggcagaccaggcacgagaacgttgtattatttatgggggcatgcatgaacccaccccatctggccattattactagtttttgtaagggccgtactctccacagttttgtcagagatcctaagacttcccttgacatcaataagacgaggcagatcgcccaagagatcataaaggggatgggctatctacacgctaaggggatcgtgcataaggacctaaaaagcaagaacgtgttttatgacaatggtaaagttgtaatcactgactttggcctctttggtatatctggggtcgtgagggagggacgtcgcgagaatcagctgaagttatcccatgactggctgtgctatcttgctcccgaaatcgtgagggaaatgacacctgggaaggatgaggaccaacttccctttagtaaggccgccgatgtttatgctttcggcaccgtttggtatgaactgcaggcaagggactggccgttaaagaaccaagcagcagaggctagcatctggcagattggatcaggtgagggcatgaagcgggtcctgacgtcagtctccctcggcaaagaagtaagtgagatcttgtctgcatgttgggcgttcgatctgcaggagcgcccttctttttcattgctcatggacatgctcgaaaaattgccaaagcttaaccgcagactgtctcaccccggccacttctggaaatctgcagacataaatagctcaaaggtcgtgccacgctttgagcgtttcggactgggcgtgctggaatcttctaatcccaagatgtag

SEQ ID NO: 318188 - DNA, 2772 bp, Artificial Sequence
  derived and/or modified sequence
atggatagggccgcgttgcgtgccgcagcaatgggagaaaagaaggagggtggaggaggcggagacgctgccgccgctgaaggaggcgccggtgcggcagcctctcgggcactccagcagtgcggccagctgcagaagctgatcgacatttctataggaagtctgcgtggcctgcgcacaaaatgcgcagtgtctaacgacttaacacagcaggagatcaggacacttgaggcgaaactcgttcgctacatttgcaaacagcgccagtgtaagttgagcgtggccccaggtgagagaacacccgagctgaactcctatccacgttttagtgactggctttacaccttcaatgtacgccctgaagttgtgcaagagatcccccgggacctgaccctggacgcactgctcgaaatgaacgaggccaaggtcaaggagacccttaggcgctgtggagctagtggcgatgagtgcgggagacttcagtacgccctgacgtgcctcagaaaggtgacagggctcgggggtgaacacaaggaagacagcagctggtcttccctggatgccagacgagagagcgggtctggcccatctacagatactctttcggctgcttccttaccttggccgccaggatcaagccaacttgggagggccggaaattccgcacaaggaccaaggtcaatctccgtgtccgccctgcctgcatctgacagtcccaccccatcgttttcggagggcctcagtgatacttgcattcctctacatgccagtgggcggttgactccaagggcacttcatagttttattacaccccctactacgccccagctgagaagacataccaagctgaagcctcctaggacacccccaccaccctcacgcaaggtgtttcagctgctgccttctttcccaactttgaccaggtcgaagtcccacgagagccagctaggcaataggattgacgatgtttcctcaatgcggttcgatctcagccacggaagcccacagatggtgagacgggatataggccttagcgtgacccaccgattcagcacgaaatcttggctttcccaagtgtgccatgtgtgccaaaagtctatgatttttggggttaaatgcaaacattgcaggttaaaatgccacaacaagtgcacaaaggaggcacctgcatgtcgcatcagttttttgcccttgaccaggctaaggcggacagagagcgttcctagcgacatcaacaacccggtcgaccgggctgccgagcctcatttcggaacactccccaaggccctgacaaagaaagagcacccacctgcaatgaaccatctggatagttccagcaatccaagctctacaacttcgagcacaccctcctctccggccccttttccaacttcgtccaatccttcctctgcaaccactccgcctaacccaagcccagggcaacgtgattccagatttaacttccccgctgcctatttcattcatcaccggcaacagttcatctttcctgtcccgtccgctggccattgttggaaatgtttgcttatagctgaatcactcaaagaaaacgctttcaacatttctgcctttgcccacgccgcgccactgccagaggcggcagacggaacgaggctcgatgaccagcccaaggccgacgtgctggaggcgcatgaggccgaggcagaagaacccgaggccgggaagtcagaggctgaagatgatgaagacgaggtggacgatttaccgtccagtaggcggccctggcgtgggccaatttctagaaaggcatcacagacatcagtctatttgcaggaatgggacatccctttcgaacaggtggaactcggagaaccaatagggcaagggagatggggtagggtccaccgagggagatggcatggcgaggtggcaattcggctgttagagatggatgggcacaatcaagaccatctgaaactgttcaagaaggaagtgatgaattatcggcagacacgtcacgaaaacgttgtcctttttatgggcgcttgcatgaacccacctcacctggctatcattacctcattctgcaagggcagaactctgcactcttttgtgcgcgatccgaagacatctctggacatcaataagactcgccagattgcacaggagataatcaagggaatgggatatctccacgctaagggcatcgtacacaaggacctcaaatccaagaatgtattttatgataacggcaaggtggttataacggacttcggccttttcgggatcagtggcgtggtaagagaaggacgaagggagaatcaattgaagcttagccacgactggctctgttatcttgctcctgagatagtgagggagatgactcccggcaaagacgaagatcaattgccattcagcaaagccgccgacgtctacgcattcggaactgtatggtatgaacttcaagcgagagactggcctctgaagaaccaggcagctgaagcatcaatttggcagatcgggtccggtgagggtatgaaacgcgttctaacttcggttagcctcggaaaagaggtgtcggagatattgtcagcctgctgggcatttgacttacaggagcgcccaagcttttccctgcttatggatatgttggagaagttgcctaagcttaacagaaggctatcacaccctggacatttttggaaaagtgccgacattaactcttcaaaggttgtcccaagatttgaacgattcggactgggagttctcgagtcaagtaaccccaagatgtag

SEQ ID NO: 318189 - DNA, 2806 bp, Artificial Sequence
  derived and/or modified sequence
ctggacccctgccagggaaggggtcctcagacttgaggttgccagctcagatgtggggctgctgatactaggtgactggactgatgttctgttctagatgaaactccttgaggggaccatttgaaaaggcttgatgtgctgcccaaagcccccttcagagctgacttctccacccccagctgccgtgagccttggctgctgacagctcatagctgagtccctcccgtgaagtcaccttctgctgaagggtacatcctctcccaaggcgaagctggtccgttacatttgtaagcagaggcagtgcaagctgagcgtggctcccggtgagaggaccccagagctcaacagctacccccgcttcagcgactggctgtacactttcaacgtgaggccggaggtggtgcaggagatcccccgagacctcacgctggatgccctgctggagatgaatgaggccaaggtgaaggagacgctgcggcgctgtggggccagcggggatgagtgtggccgtctgcagtatgccctcacctgcctgcggaaggtgacaggcctgggaggggagcacaaggaggactccagttggagttcattggatgcgcggcgggaaagtggctcagggccttccacggacaccctctcagcagccagcctgccctggcccccagggagctcccagctgggcagagcaggcaacagcgcccagggcccacgctccatctccgtgtcagctctgcccgcctcagactcccccacccccagcttcagtgagggcctctcagacacctgtattcccctgcacgccagcggccggctgaccccccgtgccctgcacagcttcatcaccccgcccaccacaccccagctgcgacggcacaccaagctgaagccaccacggacgccccccccacccagccgcaaggtcttccagctgctgcccagcttccccacactcacccggagcaagtcccatgagtctcagctggggaaccgcattgatgacgtctcctcgatgaggtttgatctctcgcatggatccccacagatggtacggagggatatcgggctgtcggtgacgcacaggttctccaccaagtcctggctgtcgcaggtctgccacgtgtgccagaagagcatgatatttggagtgaagtgcaagcattgcaggttgaagtgtcacaacaaatgtaccaaagaagcccctgcctgtagaatatccttcctgccactaactcggcttcggaggacagaatctgtcccctcggacatcaacaacccggtggacagagcagccgaaccccattttggaaccctccccaaagcactgacaaagaaggagcaccctccggccatgaatcacctggactccagcagcaacccttcctccaccacctcctccacaccctcctcaccggcgcccttcccgacatcatccaacccatccagcgccaccacgccccccaacccctcacctggccagcgggacagcaggttcaacttcccagctgcctacttcattcatcatagacagcagtttatctttccagtgccatctgctggccattgctggaaatgcctccttattgcagaaagtttaaaggaaaacgctttcaacatttcagcctttgcacacgcagccccgctccctgaagctgccgacggtacccggctcgatgaccagccgaaagcagatgtgttggaagctcacgaagcggaggctgaggagccagaggctggcaagtcagaggcagaagacgatgaggacgaggtggacgacttgccgagctctcgccggccctggcggggccccatctctcgcaaggccagccagaccagcgtgtacctgcaggagtgggacatccccttcgagcaggtagagctgggcgagcccatcgggcagggccgctggggccgggtgcaccgcggccgctggcatggcgaggtggccattcgcctgctggagatggacggccacaaccaggaccacctgaagctcttcaagaaagaggtgatgaactaccggcagacgcggcatgagaacgtggtgctcttcatgggggcctgcatgaacccgccccacctggccattatcaccagcttctgcaaggggcggacgttgcactcgtttgtgagggaccccaagacgtctctggacatcaacaagacgaggcaaatcgctcaggagatcatcaagggcatgggatatcttcatgccaagggcatcgtacacaaagatctcaaatctaagaacgtcttctatgacaacggcaaggtggtcatcacagacttcgggctgtttgggatctcaggcgtggtccgagagggacggcgtgagaaccagctaaagctgtcccacgactggctgtgctatctggcccctgagattgtacgcgagatgacccccgggaaggacgaggatcagctgccattctccaaagctgctgatgtctatgcatttgggactgtttggtatgagctgcaagcaagagactggcccttgaagaaccaggctgcagaggcatccatctggcagattggaagcggggaaggaatgaagcgtgtcctgacttctgtcagcttggggaaggaagtcagtgagatcctgtcggcctgctgggctttcgacctgcaggagagacccagcttcagcctgctgatggacatgctggagaaacttcccaagctgaaccggcggctctcccaccctggacacttctggaagtcagctgacattaacagcagcaaagttgtaccccggtttgaaaggtttggcttgggcgtcctggagtccagtaatccaaagatgtag

SEQ ID NO: 318190 - DNA, 3071 bp, Artificial Sequence
  derived and/or modified sequence
atggatagagcagcgctgcgcgcggcggcgatgggagagaagaaggagggcggtggcgggggggatgcggcggccgcggagggaggcgcaggggccgcggccagccgggcgctgcagcagtgcgggcagctccagaagctcatcgacatctccatcggcagcctgcgcgggctgcgcaccaagtgcgctgtgtccaacgacctcacccagcaggagatacggaccctggaggcgaagctggtccgttacatttgtaagcagaggcagtgcaagctgagcgtggctcccggtgagaggaccccagagctcaacagctacccccgcttcagcgactggctgtacactttcaacgtgaggccggaggtggtgcaggagatcccccgagacctcacgctggatgccctgctggagatgaatgaggccaaggtgaaggagacgctgcggcgctgtggggccagcggggatgagtgtggccgtctgcagtatgccctcacctgcctgcggaaggtgacaggcctgggaggggagcacaaggaggactccagttggagttcattggatgcgcggcgggaaagtggctcagggccttccacggacaccctctcagcagccagcctgccctggcccccagggagctcccagctgggcagagcaggcaacagcgcccagggcccacgctccatctccgtgtcagctctgcccgcctcagactcccccacccccagcttcagtgagggcctctcagacacctgtattcccctgcacgccagcggccggctgaccccccgtgccctgcacagcttcatcaccccgcccaccacaccccagctgcgacggcacaccaagctgaagccaccacggacgccccccccacccagccgcaaggtcttccagctgctgcccagcttccccacactcacccggagcaagtcccatgagtctcagctggggaaccgcattgatgacgtctcctcgatgaggtttgatctctcgcatggatccccacagatggtacggagggatatcgggctgtcggtgacgcacaggttctccaccaagtcctggctgtcgcaggtctgccacgtgtgccagaagagcatgatatttggagtgaagtgcaagcattgcaggttgaagtgtcacaacaaatgtaccaaagaagcccctgcctgtagaatatccttcctgccactaactcggcttcggaggacagaatctgtcccctcggacatcaacaacccggtggacagagcagccgaaccccattttggaaccctccccaaagcactgacaaagaaggagcaccctccggccatgaatcacctggactccagcagcaacccttcctccaccacctcctccacaccctcctcaccggcgcccttcccgacatcatccaacccatccagcgccaccacgccccccaacccctcacctggccagcgggacagcaggttcaacttcccagctgcctacttcattcatcatagacagcagtttatctttccagtgccatctgctggccattgctggaaatgcctccttattgcagaaagtttaaaggaaaacgctttcaacatttcagcctttgcacacgcagccccgctccctgaagctgccgacggtacccggctcgatgaccagccgaaagcagatgtgttggaagctcacgaagcggaggctgaggagccagaggctggcaagtcagaggcagaagacgatgaggacgaggtggacgacttgccgagctctcgccggccctggcggggccccatctctcgcaaggccagccagaccagcgtgtacctgcaggagtgggacatccccttcgagcaggtagagctgggcgagcccatcgggcagggccgctggggccgggtgcaccgcggccgctggcatggcgaggtggccattcgcctgctggagatggacggccacaaccaggaccacctgaagctcttcaagaaagaggtgatgaactaccggcagacgcggcatgagaacgtggtgctcttcatgggggcctgcatgaacccgccccacctggccattatcaccagcttctgcaaggggcggacgttgcactcgtttgtgagggaccccaagacgtctctggacatcaacaagacgaggcaaatcgctcaggagatcatcaagggcatgggatatcttcatgccaagggcatcgtacacaaagatctcaaatctaagaacgtcttctatgacaacggcaaggtggtcatcacagacttcgggctgtttgggatctcaggcgtggtccgagagggacggcgtgagaaccagctaaagctgtcccacgactggctgtgctatctggcccctgagattgtacgcgagatgacccccgggaaggacgaggatcagctgccattctccaaagctgctgatgtctatgcatttgggactgtttggtatgagctgcaagcaagagactggcccttgaagaaccaggctgcagaggcatccatctggcagattggaagcggggaaggaatgaagcgtgtcctgacttctgtcagcttggggaaggaagtcagtgagatcctgtcggcctgctgggctttcgacctgcaggagagacccagcttcagcctgctgatggacatgctggagaaacttcccaagctgaaccggcggctctcccaccctggacacttctggaagtcagctgacattaacagcagcaaagttgtaccccggtttgaaaggtttggcttgggcgtcctggagtccagtaatccaaagatgtagccagccatatggtttttcgctgctgatctctttctttttaaaatgtgtttctgaaacatcccaacaaccaccacgacaaaaaaacactgcctgcccagcgctgcaaaccaggagcacacgtcctagattcagactgttggccataaaccccactcgggagatggagctgcacctgctatttcttaaaatgacaccaccaacaaccaaacctgtcatgacagacagcaaatgtttacacgtatatttctcctgagtgaacctgatgttttacaataggtaataataaaaacagtctgtgc

SEQ ID NO: 318191 - DNA, 2361 bp, Artificial Sequence
  derived and/or modified sequence
atgaatgaggccaaggtgaaggagaccctgcggcgctgtggggccagcggagatgaatgtggccgcctgcagtatgccctgacctgcctgaggaaggtgacaggcctgggcggggagcacaaggaggacagctcctggagcagcctggatgcccggcgggagagcggcagcggccccagcacagacaccctgtctgctgccagcctgccctggcccccaggcagcagccagctgggccgggccggcaacagcgcccagggccccaggagcatctctgtgtctgccctgcctgccagtgacagccccacccccagcttcagcgagggcctgagtgacacctgcatccccctgcacgccagcggccgcctgaccccccgggccctgcacagcttcatcaccccacccaccaccccccagctgcggcggcacaccaagctgaagccacccaggaccccacctccacccagcaggaaggtgttccagctgctgcccagcttccccaccctgaccaggagcaagagccatgagagccagctgggcaacagaattgatgatgtgtcctccatgagatttgacctgagccacggcagcccccagatggtgcggcgggacatcggcctgtctgtgacccaccgcttcagcaccaagtcctggctgagccaggtgtgccacgtgtgccagaagtccatgatcttcggcgtgaagtgcaagcactgccgcctgaagtgccacaacaagtgcaccaaggaggccccagcctgccgcatctccttcctgcccctgacccggctgcggaggacagaatctgtgcccagcgacatcaacaaccctgtggacagagctgctgagccccacttcggcaccctgcccaaggccctgaccaagaaggagcaccccccagccatgaaccacctggacagcagcagcaaccccagcagcaccaccagcagcacccccagcagccctgcccccttccccaccagcagcaaccccagcagcgccaccaccccacccaaccccagccctggccagagggacagccgcttcaacttccctgctgcctacttcatccaccaccggcagcagttcatcttccctgtgcccagcgctggccactgctggaagtgcctgctgattgctgagagcctgaaggaaaatgccttcaacatcagcgcctttgcccacgccgcccccctgcctgaggccgcagatggcacccggctggatgaccagcccaaggcagatgtgctggaggcccacgaggccgaggccgaggagcctgaggccggcaagtctgaggctgaagatgatgaagatgaggtggatgacctgcccagcagccggcggccctggaggggccccatcagcaggaaggccagccagacctctgtgtacctgcaggagtgggacatcccctttgagcaggtggagctgggggagcccatcggccagggccgctggggccgggtgcaccggggccgctggcacggggaggtggccatccggctgctggagatggatggccacaaccaggaccacctgaagctgttcaagaaggaggtgatgaactaccggcagaccaggcatgaaaatgtggtgctcttcatgggcgcctgcatgaaccccccccacctggccatcatcaccagcttctgcaagggccgcaccctgcacagctttgtgcgggaccccaagaccagcctggacatcaacaagacccggcagatcgcccaggagatcatcaagggcatgggctacctgcacgccaagggcatcgtgcacaaggacctgaagagcaagaatgtgttctatgacaacgggaaggtggtgatcacagactttggcctgtttggcatcagcggcgtggtgcgggagggcagaagagagaaccagctgaagctgagccatgactggctgtgctacctggcccctgagatcgtgcgggagatgacccctgggaaggatgaggaccagctgcccttcagcaaggctgctgatgtgtatgccttcggcaccgtgtggtatgagctgcaggcccgggactggcccctgaagaaccaggccgctgaggccagcatctggcagatcggcagcggggagggcatgaagagggtgctgacctctgtgtccctgggcaaggaggtgtctgagatcctgagcgcctgctgggcctttgacctgcaggagcggcccagcttcagcctgctgatggacatgctggagaagctgcccaagctgaacagaaggctgagccaccctggccacttctggaagtctgctgacatcaacagcagcaaggtggtgcccaggtttgagcgcttcggcctgggcgtgctggagagcagcaaccccaagatgtag

SEQ ID NO: 318192 - DNA, 2772 bp, Artificial Sequence
  derived and/or modified sequence
atggaccgggccgccctgcgggctgctgccatgggagagaagaaggagggcggcggcggcggagatgctgctgctgctgagggcggggccggggctgctgccagccgggccctgcagcagtgtggccagctgcagaagctgattgacatcagcatcggcagcctgcggggcctgcggaccaagtgtgctgtgtccaatgacctgacccagcaggagatccgcaccctggaggccaagctggtgcgctacatctgcaagcagaggcagtgcaagctgtctgtggcccctggagagaggaccccagagctgaacagctacccccgcttcagtgactggctgtacaccttcaacgtgcggcctgaggtggtgcaggagatcccccgggacctgaccctggatgccctgctggagatgaatgaggccaaggtgaaggagaccctgcggcgctgtggggccagcggagatgaatgtggccgcctgcagtatgccctgacctgcctgaggaaggtgacaggcctgggcggggagcacaaggaggacagctcctggagcagcctggatgcccggcgggagagcggcagcggccccagcacagacaccctgtctgctgccagcctgccctggcccccaggcagcagccagctgggccgggccggcaacagcgcccagggccccaggagcatctctgtgtctgccctgcctgccagtgacagccccacccccagcttcagcgagggcctgagtgacacctgcatccccctgcacgccagcggccgcctgaccccccgggccctgcacagcttcatcaccccacccaccaccccccagctgcggcggcacaccaagctgaagccacccaggaccccacctccacccagcaggaaggtgttccagctgctgcccagcttccccaccctgaccaggagcaagagccatgagagccagctgggcaacagaattgatgatgtgtcctccatgagatttgacctgagccacggcagcccccagatggtgagaagagacatcggcctgtctgtgacccaccgcttcagcaccaagtcctggctgagccaggtgtgccacgtgtgccagaagtccatgatctttggagtgaagtgcaagcactgccgcctgaagtgccacaacaagtgcaccaaggaggccccagcctgccgcatctccttcctgcccctgacccggctgcggaggacagagagcgtgcccagcgacatcaacaaccctgtggacagagctgctgagccccacttcggcaccctgcccaaggccctgaccaagaaggagcaccccccagccatgaaccacctggacagcagcagcaaccccagcagcaccaccagcagcacccccagcagccctgcccccttccccaccagcagcaaccccagcagcgccaccaccccacccaaccccagccctggccagagggacagccgcttcaacttccctgctgcctacttcatccaccaccggcagcagttcatcttccctgtgcccagcgctggccactgctggaagtgcctgctgattgctgagagcctgaaggaaaatgccttcaacatcagcgcctttgcccatgctgcccccctgcctgaggccgcagatggcacccggctggatgaccagcccaaggcagatgtgctggaggcccatgaagctgaggccgaggagcctgaggccggcaagtctgaggccgaggatgatgaagatgaggtggatgacctgcccagcagcagaagaccctggaggggccccatcagcaggaaggccagccagacctctgtgtacctgcaggagtgggacatcccctttgagcaggtggagctgggggagcccatcggccagggccgctggggccgggtgcaccggggccgctggcatggagaggtggccatccggctgctggagatggatggccacaaccaggaccacctgaagctgttcaagaaggaggtgatgaactaccggcagaccaggcatgaaaatgtggtgctcttcatgggcgcctgcatgaaccccccccacctggccatcatcaccagcttctgcaagggccgcaccctgcacagctttgtgcgggaccccaagaccagcctggacatcaacaagacccggcagatcgcccaggagatcatcaagggcatgggctacctgcacgccaagggcatcgtgcacaaggacctgaagagcaagaatgtgttctatgacaatggcaaggtggtgatcacagactttggcctgtttggcatctctggagtggtgcgggagggccggcgggagaaccagctgaagctgagccatgactggctgtgctacctggcccctgagatcgtgcgggagatgaccccaggcaaggatgaggaccagctgcccttcagcaaggccgcagatgtgtatgcctttggaacagtgtggtatgagctgcaggcccgggactggcccctgaagaaccaggccgctgaggccagcatctggcagatcggcagcggggagggcatgaagagggtgctgacctctgtgtccctgggcaaggaggtgtctgagatcctgagcgcctgctgggcctttgacctgcaggagcggcccagcttcagcctgctgatggacatgctggagaagctgcccaagctgaacagaaggctgagccaccctggccacttctggaagtctgctgacatcaacagcagcaaggtggtgcccaggtttgaaagatttggcctgggcgtgctggagagcagcaaccccaagatgtag

SEQ ID NO: 318193 - DNA, 2361 bp, Artificial Sequence
  derived and/or modified sequence
atgaacgaggccaaggtgaaggagaccctgcggcggtgcggcgcctcaggagatgaatgcggtcggctgcagtatgcactgacctgtttgaggaaggtgaccggactcggtggagaacacaaggaagactcttcgtggtcctcactcgatgcccgtcgcgaaagcgggtccggacccagcacagataccttgagtgctgccagtctaccgtggccccctgggtcatcccagttgggaagggccggcaattcagcgcagggaccaagatcgatctccgtatcggctctaccagctagtgactcgcctaccccatccttctcagagggcctgtccgacacctgtatcccactccacgcctccgggagacttactcctcgggctctgcatagctttattactcctccaaccacccctcagctccgccggcacaccaagctgaaacctccaagaactccgcctccacctagcagaaaagtatttcagctgttgccctcatttccgacgctgaccaggagtaagtcacacgaatctcaactgggaaatagaatagatgacgtctcaagcatgagatttgatctcagccacggatctcctcaaatggtgcgtcgggacataggcctgtctgtgacccaccgcttctctactaagagctggcttagccaagtgtgccacgtgtgtcagaagagtatgattttcggcgtaaagtgtaaacactgcagactgaaatgtcacaacaagtgcacgaaagaggcccctgcctgccggatctcattcctccctttgactagactcagacgaaccgaatccgttcccagcgacattaacaatcctgtagatcgggccgccgagccacactttggaacactccctaaggctctgaccaaaaaagagcacccgccagctatgaaccacctggatagttccagcaatccatcatcaacaacatctagcaccccctctagccccgcaccttttcctacgagctcaaacccttctagcgccacgactcctccgaaccccagtccaggtcagagagattctcggtttaatttcccggctgcatactttatccaccatcgccaacaattcatttttcctgtgccttcagccggccactgctggaaatgccttcttattgctgagagcctcaaagaaaatgccttcaatatctcagcctttgctcatgcggctcctctgccagaggcggctgatggcacacgactggacgatcagcctaaagctgatgtgttggaggcccacgaggctgaggcagaggagcccgaagcgggcaagtccgaagcagaggatgacgaggatgaagtcgatgacctgccatcctccaggagaccgtggcggggaccaatttccaggaaagcttcccagacctccgtgtacctccaagagtgggacattccctttgagcaggtggaactcggcgaacccattggtcagggacgatggggaagggttcatagggggcgctggcacggcgaggtagctatacgcctgctggagatggacggacacaatcaggatcacctaaagctgttcaaaaaggaggttatgaattacaggcaaacaaggcatgagaacgttgtattgtttatgggggcctgcatgaatcctccgcatctggccattattacttctttttgcaaaggaagaaccctgcatagtttcgttagagaccctaagactagcttggatatcaataaaacaaggcaaatcgctcaggaaatcattaaggggatggggtacttgcacgccaaagggatcgtgcataaggatctgaaatctaagaacgtgttctacgacaacggaaaagtggttatcacagacttcggtctgttcggaatcagcggcgtggtgcgggagggccgacgagagaatcagttaaagctgtcacacgactggctgtgttacctagctcctgagatcgttcgcgagatgacgcccggcaaagatgaggaccagcttccgttctccaaagcagctgacgtgtatgcgtttggaacagtgtggtatgaattgcaagctcgggattggccacttaaaaatcaggccgctgaagcaagtatttggcaaattggctctggggaggggatgaagcgagtgttgacctcggtttctctgggcaaggaagtgtccgaaatcctgtctgcttgttgggccttcgaccttcaggaacgtccgtctttcagccttcttatggacatgctggaaaaattgcctaaactgaacaggagactctcacatcccgggcacttctggaagtctgctgacatcaatagctcaaaagtggtgcctcgtttcgaaaggtttgggttgggcgtgctggagagcagtaaccctaaaatgtag

SEQ ID NO: 318194 - DNA, 2772 bp, Artificial Sequence
  derived and/or modified sequence
atggaccgggccgccctgcgggccgccgccatgggcgagaagaaggaaggcggggggggcggagatgccgccgcggccgagggaggtgcaggcgccgcggcttccagggcactccagcagtgcgggcagctgcagaaattaatcgatatcagtatcgggagcttgcgcggtctgaggactaaatgtgctgtgtcaaatgatctgacccaacaggagattagaaccttggaggctaagctggttcggtacatctgtaagcagagacagtgtaagctttccgtcgctcctggggagaggacacccgagctaaattcctacccccgcttttctgattggctgtacacattcaatgtacggccagaggtcgtgcaggagatccccagggatctaaccctggacgctttgctggagatgaatgaagccaaagtcaaggaaaccctgcgcagatgtggagcatctggtgacgagtgcggaaggctgcagtatgcccttacttgcttgaggaaagttaccgggttaggtggcgaacataaagaagacagcagctggtcctccctcgacgcgcgaagggagtccggatctggcccttccacagatacactttccgccgcttctctgccttggcccccaggctcttcccaacttggtagagctgggaacagcgctcagggtccccggagtatcagcgtcagtgctttgcccgcatctgactccccaactccaagcttcagcgagggtctgagtgacacgtgtattcctctgcacgcaagcggtcggctgaccccgcgggctcttcatagtttcatcactccaccaactacgccgcagctacgccgacacaccaaacttaaacctccccgcacaccacctcctccatctcgcaaggtgtttcaactcctgccttcatttcccaccttgacccgcagtaagtcacatgaatcacagctggggaaccgaattgacgacgtgtcaagtatgcggttcgatctgtctcacggctctccccagatggtgcgcagggatattggactgagcgtgacccacaggttcagcaccaagagctggctctcccaagtgtgtcatgtctgccagaagtcaatgatcttcggcgtgaaatgtaagcactgtaggctgaaatgccataacaaatgtactaaagaggcacccgcatgcagaatttctttcctgccgttgaccaggttacgaagaacagaaagcgtccctagcgatattaataaccccgtggatagagctgcggagccccatttcggaaccctccctaaagccctcacaaagaaggaacacccacctgccatgaatcatctggatagttcatctaatccatcaagcacaacgtcctccacgccttcgagcccagcgccttttcctacaagctcaaatccaagcagtgcaaccacaccacctaaccccagtcccgggcagcgcgacagccgatttaattttcctgctgcatatttcatccaccataggcagcaatttatatttccagtgccctctgccggtcactgttggaagtgcctgttgattgcagaaagcctgaaggagaacgccttcaatatttccgcatttgcccacgccgccccgctgccagaagcggccgatgggacgagactggatgaccagccaaaggccgacgtgctggaggctcatgaggcagaagcagaggagccggaggccgggaagagcgaagcagaagatgatgaggatgaagtggacgacttgccttccagtaggcggccatggcgtgggcccatctcccggaaggcatcccagacgagtgtatacctccaggaatgggatatcccgtttgaacaggtggagcttggcgagccaataggccagggacggtggggaagagttcaccgagggcggtggcacggagaagtggctattagactgctagagatggatggccacaatcaggatcatctgaagctcttcaagaaagaggtgatgaactataggcagacacggcatgaaaatgtcgtactttttatgggtgcatgcatgaacccaccccatttagccattatcacctccttctgcaaagggcggactctgcactcatttgtccgggaccccaagaccagcctggatataaacaagacccgacagatcgcacaggaaatcatcaaagggatgggttatctccatgcaaagggcattgtacataaggatctcaagtccaagaacgtgttctatgacaacggcaaagtcgtcattacagatttcgggctgtttggaatctccggtgtagtccgggagggacggagagagaatcagcttaagctgtcccatgattggctgtgctacctggctcccgaaatcgttagggagatgactccaggtaaagacgaagaccagcttccgttctctaaggccgctgacgtgtacgctttcggcacagtctggtatgaattgcaggcaagggactggcctctgaaaaaccaggctgctgaggcgagcatatggcagatcggatcaggagaagggatgaagcgggtgctcacgtccgtttcccttggcaaggaagtgagcgaaatcctgtcggcgtgctgggcctttgacctgcaagagaggccatcattctccctattaatggacatgctagagaagctgcccaagttaaaccgcaggttaagccatccaggacacttttggaaaagcgccgatatcaactcgtccaaggtcgtgccacgcttcgagagattcggtctgggcgttctggagtccagtaacccaaaaatgtag

SEQ ID NO: 318195 - DNA, 2361 bp, Artificial Sequence
  derived and/or modified sequence
atgaatgaagcaaaagtcaaagaaacgctacgacgttgcggggctagtggggatgaatgcggaagactccaatacgccctgacctgcctgcggaaggtcactggcctgggaggggagcataaggaggacagctcttggtccagtttggacgcgcgaagagaaagcggctctgggccttcgactgataccctatctgctgctagtttgccctggccacccggaagtagccagctgggaagagcaggcaactctgcgcagggccctcgctctatatccgtaagtgctttaccggcatccgactctcctaccccgagtttttcagagggactgagcgatacatgtatcccgctgcatgctagcggaagactgacccctagggctttgcatagtttcatcacacctcctaccaccccccagctccgcaggcatacgaaattgaaaccacccagaacgcctcctccgccatctagaaaggtctttcagttgctccctagcttccctacgctcactaggtctaaatcgcatgagtcacaattggggaacaggatcgatgacgtgtcttcaatgagattcgatctctcccatggtagtccgcagatggttcgacgggatattgggctgtcagtgactcatcgcttcagcactaaatcatggctgagccaggtgtgccatgtgtgtcagaaatctatgatattcggggtaaaatgtaagcactgtcgccttaagtgtcacaataaatgcaccaaggaggccccagcgtgtagaattagctttctccccttaacccgccttcgacgtaccgagtcggtaccgtctgacatcaataaccctgtcgaccgcgcagcagaaccgcacttcggcaccctgcccaaggccctgactaaaaaagagcaccctcccgctatgaatcacctagatagcagctcaaacccatcctccacaacatccagcacaccatcaagccctgccccattcccaacaagctctaaccctagctcggccaccactccgcctaacccgtcccccggacagcgggactcccggtttaactttcccgcagcatatttcatccaccacagacagcagtttatcttcccggtgcctagtgcaggtcattgttggaaatgcctgctgatcgctgagagcctgaaggagaacgccttcaacatttccgcatttgcccatgctgcacctctcccagaggctgcggacgggactagattggacgaccagccaaaggcggacgtcctcgaagctcacgaggctgaagctgaggagcctgaggccggaaagtcagaagccgaagacgacgaagacgaggttgacgacctgccttctagccggagaccctggcgtgggcctatctccagaaaagcctcacagacctcagtgtacttacaggagtgggacatcccctttgagcaggtagaactgggcgaacccatagggcagggcagatgggggagagtgcaccggggtcgttggcatggtgaggtggcgattcggcttctggaaatggacgggcataaccaagatcaccttaagctgtttaaaaaggaagtaatgaactatcggcaaactaggcacgaaaatgtagtcttgtttatgggagcatgtatgaatcccccacacctggccatcataacctctttttgcaaaggcaggactttgcactctttcgtccgcgacccaaaaacaagtctggacatcaataaaaccaggcagatcgcccaagaaatcatcaaaggcatgggctatctccacgcgaagggaattgtccacaaagacttaaaatccaagaatgtgttttatgacaatggcaaagttgtgatcaccgattttggcctattcggcatctcaggtgtcgtgagagagggtcgaagagaaaaccagctgaaactgtcgcacgattggttatgctatctcgcgcctgagatcgttcgagagatgacacctggcaaagacgaggaccaactgcccttctctaaggctgccgacgtttacgcgttcggaacggtgtggtacgaactccaagctagagattggccccttaagaaccaagctgcagaggcttccatatggcagattgggagtggggaagggatgaagcgggtgcttacctcggtgagcctgggaaaagaggtcagcgagatcctgtcagcttgctgggccttcgaccttcaggagagaccgagcttcagtctgctgatggacatgctggagaagctccccaaactgaacagacgtctgtcccatcccggtcacttctggaagagcgctgacattaattcatctaaagtggtcccacgctttgagagatttggtctgggcgtgctcgaaagcagcaaccccaaaatgtag

SEQ ID NO: 318196 - DNA, 2772 bp, Artificial Sequence
  derived and/or modified sequence
atggacagagcggctctacgcgcagcagccatgggggaaaagaaagaaggaggcggaggaggtgatgcagccgcagccgaggggggtgccggagcagcggcaagcagggcgcttcaacaatgtggacagctgcagaagctcattgacatttcaatcggttccttgagaggcctcaggactaagtgcgcagtttccaacgatttgacccagcaagaaatcaggaccctggaagcaaagctcgtacgatacatctgcaagcagaggcaatgtaaactctcagtggctcccggtgagaggacccctgaactcaattcatatccgcgtttcagcgattggttgtacaccttcaacgttcggccagaagttgtgcaggaaatccccagagacctcactcttgatgcgctgctcgagatgaacgaagctaaggttaaggagacactacgtagatgtggtgctagtggtgacgaatgcggacggctgcaatacgcactcacttgcctacgaaaggtgacaggcctcggcggagagcataaggaggatagctcatggtcctcactggacgctcggagagaatcaggctccggcccaagcactgacacattgtccgccgcatcgctcccttggcccccaggctccagccagctggggcgagccggtaactcagctcaaggaccacgcagcataagcgtgtcggcactgccagcctccgattccccgaccccgtctttcagtgagggactgtctgatacgtgcatccctctccatgcctctggaagactgacgcctcgcgcactccactcttttatcactcccccaacaacaccccagctcagacgccacacaaaacttaaaccacccagaactccgcctcccccttctaggaaggttttccaattgcttccaagttttccaaccctgaccaggtccaagagtcatgaatctcaattgggcaatcggatcgacgacgtaagttccatgcgctttgacctgtctcatggcagtccacagatggtccggagggatattggactgtcagtgacccataggtttagtacaaaaagctggctttctcaggtgtgtcacgtttgccagaaatccatgatttttggggtgaaatgcaagcactgtcgactgaagtgtcataataagtgcaccaaagaggccccagcttgccgcatcagcttcctgcctctgacgcggctgcgtcgcactgaatcggttccctccgacattaataatcccgtagacagagccgcagaaccccactttggaaccctgcccaaggccttgacaaagaaagagcacccaccagctatgaatcacttggactcaagttctaacccaagtagcacgacctcttcaaccccctccagccctgccccattccccacaagtagcaatccctcatccgccactactccacctaacccatctccgggacagagagacagccgattcaacttccccgctgcctatttcatacaccaccgacaacagttcatctttcccgtgccttcggctggccattgttggaaatgcctgcttatagccgagtcactgaaagagaatgccttcaatatatctgcctttgctcatgcagctcccttacccgaggccgctgatggcacccggttggacgaccaaccaaaggccgacgtgctggaggcccatgaggcggaagccgaggaaccggaagctgggaagtctgaggccgaagatgatgaggatgaggtggatgacctgccctcgagccggcgtccctggcgtggcccaattagtcgcaaagcttcccagacgtccgtgtatctgcaggaatgggacatacccttcgagcaggtagagttgggggaaccaatcgggcagggacgctggggaagagttcacagaggtcgctggcatggcgaagtcgcgatccgcctcctggaaatggacgggcacaatcaggaccacctcaagctttttaaaaaagaagtcatgaactataggcaaacccgccatgaaaatgtcgtgctgtttatgggagcttgcatgaatccacctcatctggcaattatcacttctttttgtaaggggaggactctgcattcattcgtccgagatccgaagactagtctcgatattaacaagacaagacaaatcgcacaagagatcatcaagggaatgggctacctgcacgctaaaggaatcgttcacaaggatctgaaatctaagaacgtgttttatgataacggaaaagtagttattaccgacttcggtctgttcgggatcagtggtgtagtgcgtgaaggccgacgagaaaaccaacttaaactgagtcacgactggctctgctatctggccccagaaatagttagagagatgactcctggaaaagatgaggatcagctgcccttttccaaagccgctgatgtgtatgcgttcggcaccgtgtggtatgagctccaggccagagattggcccctgaaaaaccaggccgcagaggcctcaatctggcagattggtagcggagaggggatgaagcgcgtgctaacatctgtcagtctcggaaaggaagtctccgagatcctctccgcatgctgggcattcgatttgcaggagaggccatccttctccctgctcatggatatgctcgaaaagcttccaaaactaaataggagacttagccatccaggccacttctggaagagtgccgacatcaactcaagcaaggtcgtcccccgatttgagagattcggtctcggggtgttggaatccagtaatccaaaaatgtag

SEQ ID NO: 318197 - DNA, 2361 bp, Artificial Sequence
  derived and/or modified sequence
atgaacgaggccaaggtgaaggagaccctgagaagatgcggcgccagcggcgacgagtgcggcagactgcagtacgccctgacctgcctgagaaaggtgaccggcctgggcggcgagcacaaggaggacagcagctggagcagcctggacgccagaagagagagcggcagcggccccagcaccgacaccctgagcgccgccagcctgccctggccccccggcagcagccagctgggcagagccggcaacagcgcccagggccccagaagcatcagcgtgagcgccctgcccgccagcgacagccccacccccagcttcagcgagggcctgagcgacacctgcatccccctgcacgccagcggcagactgacccccagagccctgcacagcttcatcaccccccccaccaccccccagctgagaagacacaccaagctgaagccccccagaaccccccccccccccagcagaaaggtgttccagctgctgcccagcttccccaccctgaccagaagcaagagccacgagagccagctgggcaacagaatcgacgacgtgagcagcatgagattcgacctgagccacggcagcccccagatggtgagaagagacatcggcctgagcgtgacccacagattcagcaccaagagctggctgagccaggtgtgccacgtgtgccagaagagcatgatcttcggcgtgaagtgcaagcactgcagactgaagtgccacaacaagtgcaccaaggaggcccccgcctgcagaatcagcttcctgcccctgaccagactgagaagaaccgagagcgtgcccagcgacatcaacaaccccgtggacagagccgccgagccccacttcggcaccctgcccaaggccctgaccaagaaggagcacccccccgccatgaaccacctggacagcagcagcaaccccagcagcaccaccagcagcacccccagcagccccgcccccttccccaccagcagcaaccccagcagcgccaccaccccccccaaccccagccccggccagagagacagcagattcaacttccccgccgcctacttcatccaccacagacagcagttcatcttccccgtgcccagcgccggccactgctggaagtgcctgctgatcgccgagagcctgaaggagaacgccttcaacatcagcgccttcgcccacgccgcccccctgcccgaggccgccgacggcaccagactggacgaccagcccaaggccgacgtgctggaggcccacgaggccgaggccgaggagcccgaggccggcaagagcgaggccgaggacgacgaggacgaggtggacgacctgcccagcagcagaagaccctggagaggccccatcagcagaaaggccagccagaccagcgtgtacctgcaggagtgggacatccccttcgagcaggtggagctgggcgagcccatcggccagggcagatggggcagagtgcacagaggcagatggcacggcgaggtggccatcagactgctggagatggacggccacaaccaggaccacctgaagctgttcaagaaggaggtgatgaactacagacagaccagacacgagaacgtggtgctgttcatgggcgcctgcatgaaccccccccacctggccatcatcaccagcttctgcaagggcagaaccctgcacagcttcgtgagagaccccaagaccagcctggacatcaacaagaccagacagatcgcccaggagatcatcaagggcatgggctacctgcacgccaagggcatcgtgcacaaggacctgaagagcaagaacgtgttctacgacaacggcaaggtggtgatcaccgacttcggcctgttcggcatcagcggcgtggtgagagagggcagaagagagaaccagctgaagctgagccacgactggctgtgctacctggcccccgagatcgtgagagagatgacccccggcaaggacgaggaccagctgcccttcagcaaggccgccgacgtgtacgccttcggcaccgtgtggtacgagctgcaggccagagactggcccctgaagaaccaggccgccgaggccagcatctggcagatcggcagcggcgagggcatgaagagagtgctgaccagcgtgagcctgggcaaggaggtgagcgagatcctgagcgcctgctgggccttcgacctgcaggagagacccagcttcagcctgctgatggacatgctggagaagctgcccaagctgaacagaagactgagccaccccggccacttctggaagagcgccgacatcaacagcagcaaggtggtgcccagattcgagagattcggcctgggcgtgctggagagcagcaaccccaagatgtag

SEQ ID NO: 318198 - DNA, 2772 bp, Artificial Sequence
  derived and/or modified sequence
atggacagagccgccctgagagccgccgccatgggcgagaagaaggagggcggcggcggcggcgacgccgccgccgccgagggcggcgccggcgccgccgccagcagagccctgcagcagtgcggccagctgcagaagctgatcgacatcagcatcggcagcctgagaggcctgagaaccaagtgcgccgtgagcaacgacctgacccagcaggagatcagaaccctggaggccaagctggtgagatacatctgcaagcagagacagtgcaagctgagcgtggcccccggcgagagaacccccgagctgaacagctaccccagattcagcgactggctgtacaccttcaacgtgagacccgaggtggtgcaggagatccccagagacctgaccctggacgccctgctggagatgaacgaggccaaggtgaaggagaccctgagaagatgcggcgccagcggcgacgagtgcggcagactgcagtacgccctgacctgcctgagaaaggtgaccggcctgggcggcgagcacaaggaggacagcagctggagcagcctggacgccagaagagagagcggcagcggccccagcaccgacaccctgagcgccgccagcctgccctggccccccggcagcagccagctgggcagagccggcaacagcgcccagggccccagaagcatcagcgtgagcgccctgcccgccagcgacagccccacccccagcttcagcgagggcctgagcgacacctgcatccccctgcacgccagcggcagactgacccccagagccctgcacagcttcatcaccccccccaccaccccccagctgagaagacacaccaagctgaagccccccagaaccccccccccccccagcagaaaggtgttccagctgctgcccagcttccccaccctgaccagaagcaagagccacgagagccagctgggcaacagaatcgacgacgtgagcagcatgagattcgacctgagccacggcagcccccagatggtgagaagagacatcggcctgagcgtgacccacagattcagcaccaagagctggctgagccaggtgtgccacgtgtgccagaagagcatgatcttcggcgtgaagtgcaagcactgcagactgaagtgccacaacaagtgcaccaaggaggcccccgcctgcagaatcagcttcctgcccctgaccagactgagaagaaccgagagcgtgcccagcgacatcaacaaccccgtggacagagccgccgagccccacttcggcaccctgcccaaggccctgaccaagaaggagcacccccccgccatgaaccacctggacagcagcagcaaccccagcagcaccaccagcagcacccccagcagccccgcccccttccccaccagcagcaaccccagcagcgccaccaccccccccaaccccagccccggccagagagacagcagattcaacttccccgccgcctacttcatccaccacagacagcagttcatcttccccgtgcccagcgccggccactgctggaagtgcctgctgatcgccgagagcctgaaggagaacgccttcaacatcagcgccttcgcccacgccgcccccctgcccgaggccgccgacggcaccagactggacgaccagcccaaggccgacgtgctggaggcccacgaggccgaggccgaggagcccgaggccggcaagagcgaggccgaggacgacgaggacgaggtggacgacctgcccagcagcagaagaccctggagaggccccatcagcagaaaggccagccagaccagcgtgtacctgcaggagtgggacatccccttcgagcaggtggagctgggcgagcccatcggccagggcagatggggcagagtgcacagaggcagatggcacggcgaggtggccatcagactgctggagatggacggccacaaccaggaccacctgaagctgttcaagaaggaggtgatgaactacagacagaccagacacgagaacgtggtgctgttcatgggcgcctgcatgaaccccccccacctggccatcatcaccagcttctgcaagggcagaaccctgcacagcttcgtgagagaccccaagaccagcctggacatcaacaagaccagacagatcgcccaggagatcatcaagggcatgggctacctgcacgccaagggcatcgtgcacaaggacctgaagagcaagaacgtgttctacgacaacggcaaggtggtgatcaccgacttcggcctgttcggcatcagcggcgtggtgagagagggcagaagagagaaccagctgaagctgagccacgactggctgtgctacctggcccccgagatcgtgagagagatgacccccggcaaggacgaggaccagctgcccttcagcaaggccgccgacgtgtacgccttcggcaccgtgtggtacgagctgcaggccagagactggcccctgaagaaccaggccgccgaggccagcatctggcagatcggcagcggcgagggcatgaagagagtgctgaccagcgtgagcctgggcaaggaggtgagcgagatcctgagcgcctgctgggccttcgacctgcaggagagacccagcttcagcctgctgatggacatgctggagaagctgcccaagctgaacagaagactgagccaccccggccacttctggaagagcgccgacatcaacagcagcaaggtggtgcccagattcgagagattcggcctgggcgtgctggagagcagcaaccccaagatgtag

SEQ ID NO: 318199 - protein, 762 aa, Artificial Sequence
  derived and/or modified sequence
MNEAKVKETLRRCGASGDECGRLQYALTCLRKVTGLGGEHKEDSSWSSLDARRESGSGPSTDTLSAASLPWPPGSSQLGRAGNSAQGPRSISVSALPASDSPTPSFSEGLSDTCIPLHASGRLTPRALHSFITPPTTPQLRRHTKLKPPRTPPPPSRKVFQLLPSFPTLTRSKSHESQLGNRIDDVSSMRFDLSHGSPQMVRRDIGLSVTHRFSTKSWLSQVCHVCQKSMIFGVKCKHCRLKCHNKCTKEAPACRISFLPLTRLRRTESVPSDINNPVDRAAEPHFGTLPKALTKKEHPPAMNHLDSSSNPSSTTSSTPSSPAPFPTSSNPSSATTPPNPSPGQRDSRFNFPAAYFIHHRQQFIFPVPSAGHCWKCLLIAESLKENAFNISAFAHAAPLPEAADGTRLDDQPKADVLEAHEAEAEEPEAGKSEAEDDEDEVDDLPSSRRPWRGPISRKASQTSVYLQEWDIPFEQVELGEPIGQGRWGRVHRGRWHGEVAIRLLEMDGHNQDHLKLFKKEVMNYRQTRHENVVLFMGACMNPPHLAIITSFCKGRTLHSFVRDPKTSLDINKTRQIAQEIIKGMGYLHAKGIVHKDLKSKNVFYDNGKVVITDFGLFGISGVVREGRRENQLKLSHDWLCYLAPEIVREMTPGKDEDQLPFSKAADVYAFGTVWYELQARDWPLKNQAAEASIWQIGSGEGMKRVLTSVSLGKEVSEILSACWAFDLQERPSFSLLMDMLEKLPKLNRRLSHPGHFWKSAEL

SEQ ID NO: 318200 - DNA, 2289 bp, Artificial Sequence
  derived and/or modified sequence
atgaacgaggctaaagtcaaggagaccctaagaagatgtggagctagtggcgacgagtgcggtagactgcagtacgcactaacctgcctgcgcaaggtgaccggcctgggcggggaacacaaagaggacagctcatggtcaagtctagatgcccggagagagagcgggagtggaccaagtactgacaccttatcagccgcatccctgccttggccacccgggagctcccagctaggccgtgctggaaattccgcacaagggccacggtccatttcagtaagtgctttgcccgccagcgatagtcctactcccagcttctccgagggcctgtctgatacttgcatccccctacacgccagtggccgcctgactccaagggctctccactccttcatcactcctcccacaacaccgcagcttcggcggcatacaaagctgaaaccgcctcgaacccccccccctcctagtcgaaaagtgtttcagctcttgcctagttttccaacgttgactcgatcgaagtcgcatgagagccagctggggaataggatcgatgacgtgtcctctatgcggttcgacttgtctcacggatctccccaaatggtcaggcgcgacatcggcctctctgtgacgcaccgctttagcactaagtcctggctcagccaggtatgccacgtttgtcagaagtctatgatatttggcgtgaagtgcaaacactgcagactgaagtgtcacaataagtgtaccaaggaagctccggcatgtcggattagttttctccccctgacccggctgaggcgcaccgaatctgttccatcggatattaacaatccggtcgacagggccgcagagccacacttcggtaccttacccaaggcgcttacaaagaaggaacacccacctgcgatgaatcacctcgactcctctagcaacccttcctccacaactagttcgaccccttccagtcctgcaccgttccccacttcatccaatccaagctccgcaacgacccccccgaacccttctcccgggcagcgggatagcagatttaattttcccgctgcttatttcatacatcataggcagcagtttatatttccagtcccttctgcagggcattgctggaaatgtcttctgatcgctgagtctctcaaagaaaacgcttttaatatcagtgcatttgcgcacgccgcgcccctcccggaggcagccgatggaacccggctggatgaccaacccaaagcggacgtcctcgaagctcatgaggctgaggccgaggagcccgaggctgggaagagcgaggcagaggatgatgaagacgaggtagatgaccttcccagcagccgacgaccgtggagaggtccgatttccaggaaagcgtctcaaacaagtgtatatctgcaagagtgggacataccctttgaacaagtggagctgggtgagcctataggtcagggtcggtggggaagagtccaccgcggacgctggcacggtgaggtcgcaattcggctcctcgagatggatggacacaaccaggaccacctaaaattgtttaagaaagaagtgatgaattatcggcaaactagacacgaaaatgtcgtgttattcatgggagcttgtatgaatccaccacacttagcgatcatcacctcattttgcaagggtcgaacattacattctttcgtcagagatcccaagacctcactggacatcaacaagacaaggcaaattgcccaggagatcataaaaggtatgggatatttgcacgccaaaggtatcgtacataaggacctgaagagcaagaacgtgttctacgataacggaaaagtcgtgatcaccgacttcggactttttggaatttccggggtggtgcgtgaaggtcggagggagaaccagctgaagctttcccacgactggctgtgttacctggcacccgaaatagtgagggaaatgacacctgggaaggacgaagaccaactgcctttctcaaaggcggccgacgtgtatgcattcggaacagtgtggtacgaacttcaagcccgagactggccactcaagaatcaggcggctgaggccagtatctggcagatcggctctggggagggcatgaaaagagtgttaaccagtgtctcactgggtaaggaggtgtcagaaattcttagtgcctgctgggcctttgacctccaggagcgaccttctttctccctcttgatggatatgctggaaaaactgccgaaactcaatcgtcgattgagccaccctgggcacttttggaaatctgcggagctgtag

SEQ ID NO: 318201 - DNA, 2731 bp, Artificial Sequence
  derived and/or modified sequence
ctggacccctgccagggaaggggtcctcagacttgaggttgccagctcagatgtggggctgctgatactaggtgactggactgatgttctgttctagatgaaactccttgaggggaccatttgaaaaggcttgatgtgctgcccaaagcccccttcagagctgacttctccacccccagctgccgtgagccttggctgctgacagctcatagctgagtccctcccgtgaagtcaccttctgctgaagggtacatcctctcccaaggcgaagctggtccgttacatttgtaagcagaggcagtgcaagctgagcgtggctcccggtgagaggaccccagagctcaacagctacccccgcttcagcgactggctgtacactttcaacgtgaggccggaggtggtgcaggagatcccccgagacctcacgctggatgccctgctggagatgaatgaggccaaggtgaaggagacgctgcggcgctgtggggccagcggggatgagtgtggccgtctgcagtatgccctcacctgcctgcggaaggtgacaggcctgggaggggagcacaaggaggactccagttggagttcattggatgcgcggcgggaaagtggctcagggccttccacggacaccctctcagcagccagcctgccctggcccccagggagctcccagctgggcagagcaggcaacagcgcccagggcccacgctccatctccgtgtcagctctgcccgcctcagactcccccacccccagcttcagtgagggcctctcagacacctgtattcccctgcacgccagcggccggctgaccccccgtgccctgcacagcttcatcaccccgcccaccacaccccagctgcgacggcacaccaagctgaagccaccacggacgccccccccacccagccgcaaggtcttccagctgctgcccagcttccccacactcacccggagcaagtcccatgagtctcagctggggaaccgcattgatgacgtctcctcgatgaggtttgatctctcgcatggatccccacagatggtacggagggatatcgggctgtcggtgacgcacaggttctccaccaagtcctggctgtcgcaggtctgccacgtgtgccagaagagcatgatatttggagtgaagtgcaagcattgcaggttgaagtgtcacaacaaatgtaccaaagaagcccctgcctgtagaatatccttcctgccactaactcggcttcggaggacagaatctgtcccctcggacatcaacaacccggtggacagagcagccgaaccccattttggaaccctccccaaagcactgacaaagaaggagcaccctccggccatgaatcacctggactccagcagcaacccttcctccaccacctcctccacaccctcctcaccggcgcccttcccgacatcatccaacccatccagcgccaccacgccccccaacccctcacctggccagcgggacagcaggttcaacttcccagctgcctacttcattcatcatagacagcagtttatctttccagtgccatctgctggccattgctggaaatgcctccttattgcagaaagtttaaaggaaaacgctttcaacatttcagcctttgcacacgcagccccgctccctgaagctgccgacggtacccggctcgatgaccagccgaaagcagatgtgttggaagctcacgaagcggaggctgaggagccagaggctggcaagtcagaggcagaagacgatgaggacgaggtggacgacttgccgagctctcgccggccctggcggggccccatctctcgcaaggccagccagaccagcgtgtacctgcaggagtgggacatccccttcgagcaggtagagctgggcgagcccatcgggcagggccgctggggccgggtgcaccgcggccgctggcatggcgaggtggccattcgcctgctggagatggacggccacaaccaggaccacctgaagctcttcaagaaagaggtgatgaactaccggcagacgcggcatgagaacgtggtgctcttcatgggggcctgcatgaacccgccccacctggccattatcaccagcttctgcaaggggcggacgttgcactcgtttgtgagggaccccaagacgtctctggacatcaacaagacgaggcaaatcgctcaggagatcatcaagggcatgggatatcttcatgccaagggcatcgtacacaaagatctcaaatctaagaacgtcttctatgacaacggcaaggtggtcatcacagacttcgggctgtttgggatctcaggcgtggtccgagagggacggcgtgagaaccagctaaagctgtcccacgactggctgtgctatctggcccctgagattgtacgcgagatgacccccgggaaggacgaggatcagctgccattctccaaagctgctgatgtctatgcatttgggactgtttggtatgagctgcaagcaagagactggcccttgaagaaccaggctgcagaggcatccatctggcagattggaagcggggaaggaatgaagcgtgtcctgacttctgtcagcttggggaaggaagtcagtgagatcctgtcggcctgctgggctttcgacctgcaggagagacccagcttcagcctgctgatggacatgctggagaaacttcccaagctgaaccggcggctctcccaccctggacacttctggaagtcagctgagctg

SEQ ID NO: 318202 - DNA, 2289 bp, Artificial Sequence
  derived and/or modified sequence
atgaatgaggccaaggtgaaggagaccctgcggcgctgtggggccagcggagatgaatgtggccgcctgcagtatgccctgacctgcctgaggaaggtgacaggcctgggcggggagcacaaggaggacagctcctggagcagcctggatgcccggcgggagagcggcagcggccccagcacagacaccctgtctgctgccagcctgccctggcccccaggcagcagccagctgggccgggccggcaacagcgcccagggccccaggagcatctctgtgtctgccctgcctgccagtgacagccccacccccagcttcagcgagggcctgagtgacacctgcatccccctgcacgccagcggccgcctgaccccccgggccctgcacagcttcatcaccccacccaccaccccccagctgcggcggcacaccaagctgaagccacccaggaccccacctccacccagcaggaaggtgttccagctgctgcccagcttccccaccctgaccaggagcaagagccatgagagccagctgggcaacagaattgatgatgtgtcctccatgagatttgacctgagccacggcagcccccagatggtgcggcgggacatcggcctgtctgtgacccaccgcttcagcaccaagtcctggctgagccaggtgtgccacgtgtgccagaagtccatgatcttcggcgtgaagtgcaagcactgccgcctgaagtgccacaacaagtgcaccaaggaggccccagcctgccgcatctccttcctgcccctgacccggctgcggaggacagaatctgtgcccagcgacatcaacaaccctgtggacagagctgctgagccccacttcggcaccctgcccaaggccctgaccaagaaggagcaccccccagccatgaaccacctggacagcagcagcaaccccagcagcaccaccagcagcacccccagcagccctgcccccttccccaccagcagcaaccccagcagcgccaccaccccacccaaccccagccctggccagagggacagccgcttcaacttccctgctgcctacttcatccaccaccggcagcagttcatcttccctgtgcccagcgctggccactgctggaagtgcctgctgattgctgagagcctgaaggaaaatgccttcaacatcagcgcctttgcccacgccgcccccctgcctgaggccgcagatggcacccggctggatgaccagcccaaggcagatgtgctggaggcccacgaggccgaggccgaggagcctgaggccggcaagtctgaggctgaagatgatgaagatgaggtggatgacctgcccagcagccggcggccctggaggggccccatcagcaggaaggccagccagacctctgtgtacctgcaggagtgggacatcccctttgagcaggtggagctgggggagcccatcggccagggccgctggggccgggtgcaccggggccgctggcacggggaggtggccatccggctgctggagatggatggccacaaccaggaccacctgaagctgttcaagaaggaggtgatgaactaccggcagaccaggcatgaaaatgtggtgctcttcatgggcgcctgcatgaaccccccccacctggccatcatcaccagcttctgcaagggccgcaccctgcacagctttgtgcgggaccccaagaccagcctggacatcaacaagacccggcagatcgcccaggagatcatcaagggcatgggctacctgcacgccaagggcatcgtgcacaaggacctgaagagcaagaatgtgttctatgacaacgggaaggtggtgatcacagactttggcctgtttggcatcagcggcgtggtgcgggagggcagaagagagaaccagctgaagctgagccatgactggctgtgctacctggcccctgagatcgtgcgggagatgacccctgggaaggatgaggaccagctgcccttcagcaaggctgctgatgtgtatgccttcggcaccgtgtggtatgagctgcaggcccgggactggcccctgaagaaccaggccgctgaggccagcatctggcagatcggcagcggggagggcatgaagagggtgctgacctctgtgtccctgggcaaggaggtgtctgagatcctgagcgcctgctgggcctttgacctgcaggagcggcccagcttcagcctgctgatggacatgctggagaagctgcccaagctgaacagaaggctgagccaccctggccacttctggaagtctgctgagctgtag

SEQ ID NO: 318203 - DNA, 2289 bp, Artificial Sequence
  derived and/or modified sequence
atgaacgaggccaaggtgaaggagaccctgcggcggtgcggcgcctcgggcgacgaatgcgggcggctgcagtatgccttgacatgcctgaggaaggtgacggggctgggcggggaacataaagaggatagtagttggtcttcactagacgcccggcgtgaatcaggtagtggcccatcgactgatactctctccgctgcgtccctcccctggccacctggctcttcccagttgggccgggcaggaaactcagcccaaggcccccggtccattagtgtgtccgccttgccagccagcgactctccgaccccaagcttcagtgaaggactttcagacacttgtataccattgcacgcaagtgggagattgactccgcgagccttacattcatttatcacgccacccacgacaccccagctacggcgccataccaagctcaagccgcctaggaccccgccccctccctcacgcaaggtcttccagctgttaccgagcttccctacactcaccaggtccaagtcgcacgagtcccagctcggaaaccgaatagatgacgtgagcagcatgaggttcgacctgtcacacggaagcccacaaatggtccgccgtgatattggattgtcagttacccataggttcagcactaaaagttggcttagccaggtgtgccacgtctgccagaagtcgatgatatttggggtaaaatgtaaacattgtcgattaaagtgtcacaataagtgtacaaaggaagcgccagcctgcaggattagctttctgcccctgactcgccttagaaggacagaatccgtaccgtctgacatcaataatcctgtggatagagcagcggagccacacttcggtactctcccgaaggccctgacaaaaaaggagcatcctccagctatgaaccatctggatagcagcagtaacccgagtagtactaccagctccaccccctctagtcccgctccgtttcctacaagttcaaacccgagttccgcaacgacccccccaaacccgagtcctggtcaacgagactccagattcaacttcccagctgcatacttcattcatcaccgacagcaattcatatttccagtccccagtgccggccactgctggaaatgtctcttgatcgccgaaagccttaaagagaacgccttcaacatttctgcgtttgctcacgcggcacccctgccagaggccgccgatgggacgcgcctcgatgatcaacctaaagccgacgtcttggaggctcatgaggctgaggcggaagagccagaagccgggaaatccgaggccgaagacgatgaagatgaagtcgacgacctcccaagctcacggagaccctggcggggcccaatatctcgcaaggcatctcagacaagcgtttatctgcaggagtgggatattccattcgagcaggtggaacttggcgaacctatcggccagggccggtgggggcgagtgcatcgaggccggtggcacggagaagtagccatcagacttttggagatggatggacacaatcaggaccacttgaaactcttcaaaaaagaagtgatgaattacagacagacccggcacgaaaacgtagtcctctttatgggggcttgtatgaatccaccgcaccttgcgataattacctccttctgcaagggccggaccctgcacagtttcgttcgggatccaaaaacaagtctcgatattaacaaaaccagacaaatagcacaggaaattatcaaaggcatggggtacctccatgcaaaggggatcgttcacaaagatctaaaatcaaaaaacgtattctacgataatgggaaagtggtgatcacagactttggattgtttggtatttctggagtcgtgagagagggaagaagggagaatcagctgaagctatcgcatgactggctgtgctacctggcgccagaaatcgtccgagaaatgacacccggcaaggatgaagaccagttgcctttcagcaaggctgccgacgtttacgctttcggtacagtctggtacgagctgcaagctagagactggcccttaaagaaccaggcggctgaagcatcaatttggcagatagggagcggcgagggcatgaaaagggttctcacctcagtgagtctgggtaaagaggtgtccgagattctgagtgcatgttgggcttttgatctccaggaacgaccctcgtttagtttgcttatggacatgctggagaaactccctaaattgaatcggaggttaagtcatccgggccacttttggaagtccgcggaactgtag

SEQ ID NO: 318204 - DNA, 2289 bp, Artificial Sequence
  derived and/or modified sequence
atgaatgaagccaaggtaaaggagaccctgaggaggtgcggcgcatcaggagacgagtgcggaagattgcagtacgccctcacgtgtctccggaaggttaccgggctgggcggtgagcacaaggaggactcgtcttggagcagtttagacgccagacgtgagtctgggagtgggccatcaactgatacactatctgccgcaagtctcccttggccaccaggttcatcccagctaggtagggccggaaattccgcccaggggcctcggtccatttccgtctccgccctgcccgcttctgatagtccgaccccttcattctctgaggggctcagcgatacttgtatccctctccacgcatctggccgattgacacccagggctctccactctttcattacccctcctacaacacctcagcttcgccgacatacgaagcttaagccgccacgtacgccaccaccccctagcaggaaagtcttccagttgttacctagcttcccaactctcactagaagcaagtcgcatgagtctcagctgggcaaccgcattgacgacgtcagcagcatgcgatttgacctcagccacgggagccctcagatggtcagaagagacattggactgagtgtcacacatagattttccacgaagtcttggttgtctcaggtgtgccacgtgtgccaaaaatccatgatcttcggagtgaagtgcaaacattgccgactgaaatgccacaataaatgcacaaaagaggctcccgcttgtcgcataagctttctgccactgaccaggctccggaggaccgaatccgttccatccgacatcaataaccctgtcgatcgagctgctgagccgcatttcggcacactcccgaaagcgctcacgaagaaggagcacccgccagctatgaaccacttggactcaagctcaaatccatcgtccaccacctcgagtacgccatcttcacctgcaccgtttcccacctccagtaacccatccagtgctacaacaccaccaaacccttcacctggccaacgtgacagcagatttaacttccctgccgcatattttattcaccacaggcagcaattcattttcccagtaccgtcagccggacactgttggaaatgtttgctgatcgcggaatccctaaaagagaatgctttcaacatcagtgccttcgcgcatgccgctcctctacccgaggcagccgatggaacacgtctagatgaccagcccaaggcagacgtgctggaggctcacgaagcggaagctgaggaacccgaggcgggtaagagcgaagcggaggacgatgaggacgaggtcgacgatctcccttcatcccgcagaccttggcgagggccaatctccaggaaggcatcgcaaactagcgtgtacctgcaggaatgggatatccctttcgagcaggttgaactcggagaaccaattggacagggtaggtgggggagggtgcaccgcggacggtggcacggggaggtggcaataaggcttctggagatggacgggcataaccaggaccatcttaagctgtttaaaaaagaagtcatgaattatcggcagactcgacatgaaaatgtagttctttttatgggtgcctgtatgaatcccccacacttagcgatcataacaagcttttgtaaagggcgaactctgcactctttcgtgcgtgatcctaagacatcccttgatattaataaaacccgccagattgcacaggagattattaaagggatggggtacctgcacgctaagggcattgtccacaaggaccttaagtccaagaacgtattctacgacaacggcaaagttgtgatcaccgatttcgggttgtttggaattagcggtgtggtgagagaagggaggcgcgagaatcagctgaagctcagccatgactggttgtgctacctggccccagagatcgttagggaaatgactcccggaaaggacgaggaccaactgccattctccaaggccgctgacgtgtatgcgttcggcacggtttggtatgagctgcaagccagggactggcccttaaaaaatcaggctgccgaggccagtatttggcaaatcggcagcggagagggcatgaagagggtgttgacgagtgttagcctcggtaaagaagtgtctgagattctgtctgcctgttgggcctttgatctccaggagcggcctagtttttctcttcttatggacatgttagagaagcttcctaagttgaacagacgtttgtcccaccctggccatttttggaaaagcgctgagctatag

SEQ ID NO: 318205 - DNA, 2289 bp, Artificial Sequence
  derived and/or modified sequence
atgaacgaggccaaggtgaaggagaccctgagaagatgcggcgccagcggcgacgagtgcggcagactgcagtacgccctgacctgcctgagaaaggtgaccggcctgggcggcgagcacaaggaggacagcagctggagcagcctggacgccagaagagagagcggcagcggccccagcaccgacaccctgagcgccgccagcctgccctggccccccggcagcagccagctgggcagagccggcaacagcgcccagggccccagaagcatcagcgtgagcgccctgcccgccagcgacagccccacccccagcttcagcgagggcctgagcgacacctgcatccccctgcacgccagcggcagactgacccccagagccctgcacagcttcatcaccccccccaccaccccccagctgagaagacacaccaagctgaagccccccagaaccccccccccccccagcagaaaggtgttccagctgctgcccagcttccccaccctgaccagaagcaagagccacgagagccagctgggcaacagaatcgacgacgtgagcagcatgagattcgacctgagccacggcagcccccagatggtgagaagagacatcggcctgagcgtgacccacagattcagcaccaagagctggctgagccaggtgtgccacgtgtgccagaagagcatgatcttcggcgtgaagtgcaagcactgcagactgaagtgccacaacaagtgcaccaaggaggcccccgcctgcagaatcagcttcctgcccctgaccagactgagaagaaccgagagcgtgcccagcgacatcaacaaccccgtggacagagccgccgagccccacttcggcaccctgcccaaggccctgaccaagaaggagcacccccccgccatgaaccacctggacagcagcagcaaccccagcagcaccaccagcagcacccccagcagccccgcccccttccccaccagcagcaaccccagcagcgccaccaccccccccaaccccagccccggccagagagacagcagattcaacttccccgccgcctacttcatccaccacagacagcagttcatcttccccgtgcccagcgccggccactgctggaagtgcctgctgatcgccgagagcctgaaggagaacgccttcaacatcagcgccttcgcccacgccgcccccctgcccgaggccgccgacggcaccagactggacgaccagcccaaggccgacgtgctggaggcccacgaggccgaggccgaggagcccgaggccggcaagagcgaggccgaggacgacgaggacgaggtggacgacctgcccagcagcagaagaccctggagaggccccatcagcagaaaggccagccagaccagcgtgtacctgcaggagtgggacatccccttcgagcaggtggagctgggcgagcccatcggccagggcagatggggcagagtgcacagaggcagatggcacggcgaggtggccatcagactgctggagatggacggccacaaccaggaccacctgaagctgttcaagaaggaggtgatgaactacagacagaccagacacgagaacgtggtgctgttcatgggcgcctgcatgaaccccccccacctggccatcatcaccagcttctgcaagggcagaaccctgcacagcttcgtgagagaccccaagaccagcctggacatcaacaagaccagacagatcgcccaggagatcatcaagggcatgggctacctgcacgccaagggcatcgtgcacaaggacctgaagagcaagaacgtgttctacgacaacggcaaggtggtgatcaccgacttcggcctgttcggcatcagcggcgtggtgagagagggcagaagagagaaccagctgaagctgagccacgactggctgtgctacctggcccccgagatcgtgagagagatgacccccggcaaggacgaggaccagctgcccttcagcaaggccgccgacgtgtacgccttcggcaccgtgtggtacgagctgcaggccagagactggcccctgaagaaccaggccgccgaggccagcatctggcagatcggcagcggcgagggcatgaagagagtgctgaccagcgtgagcctgggcaaggaggtgagcgagatcctgagcgcctgctgggccttcgacctgcaggagagacccagcttcagcctgctgatggacatgctggagaagctgcccaagctgaacagaagactgagccaccccggccacttctggaagagcgccgagctgtag

SEQ ID NO: 318206 - protein, 124 aa, Artificial Sequence
  derived and/or modified sequence
MQADLEIPRDLTLDALLEMNEAKVKETLRRCGASGDECGRLQYALTCLRKVTGLGTWGLPPSPLPGLVPLGLWPSLWWVMERGKRGPGFLGQPGKARVGCSQPPEKLSQGPQGSGSWWVWPGRI

SEQ ID NO: 318207 - DNA, 375 bp, Artificial Sequence
  derived and/or modified sequence
atgcaggcagacctggaaatacccagggatctgacgctggatgctctcctggagatgaatgaggccaaggtgaaagaaactctgcgacgctgtggcgcgtccggcgacgagtgcggcagactccagtacgctctcacctgcctcagaaaagtgactggtcttggcacatgggggctgccacccagccccttgcccggcctcgtgcctctcgggctgtggccctcgctttggtgggtgatggaaaggggcaagagaggacccgggttcctcggccagcccgggaaggcccgggtcggctgctcccagcctcccgagaaactgtcccagggaccccaggggtccgggtcgtggtgggtttggccgggcagaatttag

SEQ ID NO: 318208 - DNA, 375 bp, Artificial Sequence
  derived and/or modified sequence
atgcaggccgacctggagatcccccgggacctgaccctggatgccctgctggagatgaatgaggccaaggtgaaggagaccctgcggcgctgtggggccagcggagatgaatgtggccgcctgcagtatgccctgacctgcctgaggaaggtgacaggcctgggcacctggggcctgccccccagccccctgcccggcctggtgcccctgggcctgtggcccagcctgtggtgggtgatggagcggggcaagaggggccctggcttcctgggccagcccgggaaggcccgggtgggctgcagccagcccccagagaagctgagccagggcccccagggcagcggctcctggtgggtgtggccaggccgcatctag

SEQ ID NO: 318209 - DNA, 375 bp, Artificial Sequence
  derived and/or modified sequence
atgcaggccgacctggagatcccccgggacctgaccctggacgccttgctggagatgaacgaggctaaggtgaaggagacactcagaagatgtggcgcttctggggacgagtgcggcagactgcagtatgctcttacttgccttcgcaaggtaacagggctgggaacttggggacttcccccatctcctctgcccgggctggttcccctgggactatggcccagcttgtggtgggtcatggaacgggggaaaaggggccccgggtttttgggccagcctgggaaggctcgcgttgggtgctctcagcctcccgagaagctgagccagggtcctcagggttctggttcatggtgggtgtggccaggccgaatttag

SEQ ID NO: 318210 - DNA, 375 bp, Artificial Sequence
  derived and/or modified sequence
atgcaagcggatctcgaaatcccacgcgatttaacgcttgatgctctgctcgaaatgaatgaggccaaggtcaaggaaacactgcggaggtgtggagcgtccggggatgaatgtgggagactccagtatgccttaacctgtcttcggaaggtgacaggacttgggacatgggggctcccaccctccccactgccagggctggttccactgggcttatggcccagcctgtggtgggtcatggagcgagggaagagaggacctgggttcttaggccagccaggaaaagctcgggttgggtgctcccagcctcctgagaaactgagtcagggccctcagggcagcggatcctggtgggtgtggcctggccgtatatag

SEQ ID NO: 318211 - DNA, 375 bp, Artificial Sequence
  derived and/or modified sequence
atgcaggccgacctggagatccccagagacctgaccctggacgccctgctggagatgaacgaggccaaggtgaaggagaccctgagaagatgcggcgccagcggcgacgagtgcggcagactgcagtacgccctgacctgcctgagaaaggtgaccggcctgggcacctggggcctgccccccagccccctgcccggcctggtgcccctgggcctgtggcccagcctgtggtgggtgatggagagaggcaagagaggccccggcttcctgggccagcccggcaaggccagagtgggctgcagccagccccccgagaagctgagccagggcccccagggcagcggcagctggtgggtgtggcccggcagaatctag

SEQ ID NO: 318212 - protein, 307 aa, Artificial Sequence
  derived and/or modified sequence
MGTVLSLSPSYRKATLFEDGAATVGHYTAVQNSKNAKDKNLKRHSIISVLPWKRIVAVSAKKKNSKKVQPNSSYQNNITHLNNENLKKSLSCANLSTFAQPPPAQPPAPPASQLSGSQTGGSSSVKKAPHPAVTSAGTPKRVIVQASTSELLRCLGEFLCRRCYRLKHLSPTDPVLWLRSVDRSLLLQGWQDQGFITPANVVFLYMLCRDVISSEVGSDHELQAVLLTCLYLSYSYMGNEISYPLKPFLVESCKEAFWDRCLSVINLMSSKMLQINADPHYFTQVFSDLKNESGQEDKKRLLLGLDR

SEQ ID NO: 318213 - DNA, 924 bp, Artificial Sequence
  derived and/or modified sequence
atgggcaccgtgctgagcctgagccccagctacagaaaggccaccctgttcgaggacggcgccgccaccgtgggccactacaccgccgtgcagaacagcaagaacgccaaggacaagaacctgaagagacacagcatcatcagcgtgctgccctggaagagaatcgtggccgtgagcgccaagaagaagaacagcaagaaggtgcagcccaacagcagctaccagaacaacatcacccacctgaacaacgagaacctgaagaagagcctgagctgcgccaacctgagcaccttcgcccagcccccccccgcccagccccccgccccccccgccagccagctgagcggcagccagaccggcggcagcagcagcgtgaagaaggccccccaccccgccgtgaccagcgccggcacccccaagagagtgatcgtgcaggccagcaccagcgagctgctgagatgcctgggcgagttcctgtgcagaagatgctacagactgaagcacctgagccccaccgaccccgtgctgtggctgagaagcgtggacagaagcctgctgctgcagggctggcaggaccagggcttcatcacccccgccaacgtggtgttcctgtacatgctgtgcagagacgtgatcagcagcgaggtgggcagcgaccacgagctgcaggccgtgctgctgacctgcctgtacctgagctacagctacatgggcaacgagatcagctaccccctgaagcccttcctggtggagagctgcaaggaggccttctgggacagatgcctgagcgtgatcaacctgatgagcagcaagatgctgcagatcaacgccgacccccactacttcacccaggtgttcagcgacctgaagaacgagagcggccaggaggacaagaagagactgctgctgggcctggacagatag

SEQ ID NO: 318214 - DNA, 4325 bp, Artificial Sequence
  derived and/or modified sequence
ggctgctgttgggcggcggcgcggagcgggcggcgagctgtgcgggaggggcggccccgaggggcggggcgggccgacgccgcgtgtcccgccgcagccgcggagtccggctcctagatggggcccggcgcgtagaggtgcctcccgctcgttgccgcgtcctacccgcaccgtgcgcggctcgagctgaggacaccaacggccgcgactccccggcgagaccaggccggagcgtggacggcgcgcgcgccccgcgagggagggcgctgaggcgcgcgccggaagcgggagcgggagcgggagcgcggcggcggcggcgaaggtgcgggcggccgagcggggggcggggctgcggtgcctgcagaaccttggacagaagctccctagctgccgccgccgccgccgccgccgtcgccgccgccgagcgcgagcccagccgatccccgccgagcgcccccgagcgccgccgagcgccgggaccgcggcggcggggccgcggcgcgcattgcggagggcgcggagcgcaggagctgccgcctgccgggcagatccaagggggcagcacgcttcccgggagcgcccccgcctcctctccggggccgccgcaggctcggtgagcggttttatccctccggccggcaggctgggcgcgcaggggcgcgagcccccgcccggcgcgcagcagcaccatgggcacggtgctgtccctgtctcccagctaccggaaggccacgctgtttgaggatggcgcggccaccgtgggccactatacggccgtacagaacagcaagaacgccaaggacaagaacctgaagcgccactccatcatctccgtgctgccttggaagagaatcgtggccgtgtcggccaagaagaagaactccaagaaggtgcagcccaacagcagctaccagaacaacatcacgcacctcaacaatgagaacctgaagaagtcgctgtcgtgcgccaacctgtccacattcgcccagcccccaccggcccagccgcctgcacccccggccagccagctctcgggttcccagaccgggggctcctcctcagtcaagaaagcccctcaccctgccgtcacctccgcagggacgcccaaacgggtcatcgtccaggcgtccaccagtgagctgcttcgctgcctgggtgagtttctctgccgccggtgctaccgcctgaagcacctgtcccccacggaccccgtgctctggctgcgcagcgtggaccgctcgctgcttctgcagggctggcaggaccagggcttcatcacgccggccaacgtggtcttcctctacatgctctgcagggatgttatctcctccgaggtgggctcggatcacgagctccaggccgtcctgctgacatgcctgtacctctcctactcctacatgggcaacgagatctcctacccgctcaagcccttcctggtggagagctgcaaggaggccttttgggaccgttgcctctctgtcatcaacctcatgagctcaaagatgctgcagataaatgccgacccacactacttcacacaggtcttctccgacctgaagaacgagagcggccaggaggacaagaagcggctcctcctaggcctggatcggtgagcactgtagcctgcgtcatggctcaaggattcaatgcatttttaagaatttattattaaatcagttttgtgtacagtatgtgtctagcaaagccaccaagggcctcacctttcccacagtctctccctggggtttttttcatccctgccaagaactctgggcacttttgaactcacgagccttgcgcaaaacccagaagatgtattcagagccacccaggccactgacctcccactttggggaactcaaaggactgacctgcccctgccgcctgtgcccttgctgggtccagggtaggcaaggctgccggctgcaccctgtatggagctagagaggggcctctggctgcctggcccagggaggaattggggtttctggttggaggcccttttctggctcctgtgtggagttattcactctcccagaggctcctggagccagccaccctaactgagctgccagtggggtcgtgaggcaagatccccgccacccggggacatcttcaatctaggcgaggcgaagctgagcgggtctagtggaaagattgtgtctggtcgtttgaccacacaccgccctgatttgctgttttctttttttagggagaagggcttttctttagtggagaaatggaactcgcccccctacccccttgtctgctgctcccagccacgttggtggtattggccgatgagctggtttgactcattaatttctctcaatttgggtcccagctaaagaggtggggtgaagctggggacagctttcctgggtgagtttttcttttgaataatgtagtgcagtcaccctgtggcaaatgccaggacagctgcaggtgcccattagcaacgcctgccttctgggcaaggtgagggatgccataccttgagaccaagccggtgcccacctaagggctaaggcctcttgctggtgcacatgacatttgtcctgcagagctggggggaaggcgatgtggtgaccccacccccacccgttaatttaaagctgtttctaaacagttgagtttcttctaaagaggaagccttgcccagcaaggaccagtgagacagccggatcttggagacaattacaagacggggagtgagactcctgattgctctggaagcctgctgatttctacaactgatcatttgcagctgctggttttggtttccaccttaccctactggctgtaaaaacacaaatgtgtactttattgattttctttctaattctcccgcattggtggcttgggacttgggagagggagcaagccttcctccatggcccatcactcggctgtggagaacaaagaccaatgtgaagacactacagaggattctgtcttccaggcccagtccactggggagtgctggaatggggacctggggtggggaggcagagggtcactttacataggattaagttcgaggtggctaccgatttcagcacatgcactactgaaatttacacaaaaagaaagctgtgaaattgaagtcccaatttaagagtcctgaggcagaacctggtggctggaggcattcccagaggtggggaagagagcctgcccggccggagaacatctgccttgctgcacctgaggcccagcagagccgttcctgggactgtcagataatcggtgcagcggtggaaggagcctgcggctgctggcacagacttcacacagcacctcctctctgctgggtttccacacagcctgtcttcagatcctgctgccgcgtgcgaccagaggtgggaggcccctggtggcatggaagagggagggtcagtgccaagtctcaggaggagggcgcatgtgtgtatcaccctcagctggcggaacctggctgcgaactgtgcagttacgttgcatccacaggattccagttgcgtgtctgtttccttctctttctccgtatttatttttttattcttcggaggaggtggacatttcggaagtggtggggactaagggaagaactctctagttccctcagtgtgaagcctgtcgtgttctctccccttgcactggtcatcagtattgtgtaaaggaacaactgatatacttgagtgtgcaagcaaagaacccatttgccatgctgctatgaagactacttttagatcaacaataaaaaaaaacctacaaaaaaacctttattctttaattgttgcttttacggtgatattgtgcatgcaaaccaggagcattttgtgtcttaagaaaaataatcttagaacagatggctgtgaaaattacacccatgcacagaacaagccacaggaataatagttcaggatttggtttttctctttttcttgtaaacctggagggttgatatattctttccatgcagttattagaacttagttttgttccaacagttaaacttgcaatgaaaagaaaatgtgccatttttttcactcagaattattcatagctgtatatttgaaactgctaattacacacgtgtgatgtatgttggttttttagtgcaatttcttctgtagctattctttgaccaaactgtgggtattgttaatattaatttatatttgtctcattttgtatgtatgtgtagtgtgtttgtgagtatgtgtggtttataatctgacaaagtcatgaagctcagtttggctgtaatttaattccccttcccttatttttatttatttttgtactgtgctgattcaataaaatgcactgaccatccatta

SEQ ID NO: 318215 - DNA, 924 bp, Artificial Sequence
  derived and/or modified sequence
atgggaacagtcttgtctctgtcccccagttatagaaaggcaactcttttcgaagacggggcagccaccgttggccactacacagcagtgcagaactccaaaaatgccaaagataagaatctcaagagacattctattatctcggtgctgccttggaaaagaatcgtagctgtgagcgccaagaaaaaaaactcaaaaaaggtgcagcctaacagcagttatcagaacaatataacccatctgaacaacgaaaatctgaagaagtcccttagctgcgcgaatctgagcacctttgcacagcccccacccgcgcaaccccctgctcctcccgcctcccagctgtcaggcagccagacaggcgggagctcttccgtgaagaaggctcctcatccagccgtgacaagcgcgggaactccaaaaagggtaatcgtgcaggccagtacaagtgaactcctcagatgcttgggggagttcctttgcagacgctgttaccgcttaaaacacctgtcaccaaccgaccccgtcctttggctccgatccgtagaccgctcgctgttgctgcaaggctggcaggaccaaggatttatcactcctgccaatgtcgtgttcctctatatgttgtgccgcgacgtgattagtagcgaggtgggatctgaccatgaactacaggcggtacttcttacatgcctgtacctgtcctactcttatatggggaatgaaattagttaccctcttaagcctttcctcgtggagtcctgtaaagaagctttctgggaccgctgcctgagcgtgatcaatttaatgtcgtctaagatgctgcagatcaacgctgacccacattacttcactcaggtgttctcagaccttaaaaacgagtccgggcaggaggataagaagagacttctgcttgggctcgatcgctag

SEQ ID NO: 318216 - DNA, 924 bp, Artificial Sequence
  derived and/or modified sequence
atgggcaccgtgctgagcctgagccccagctacaggaaggccaccctgtttgaagatggagctgccaccgtgggccactacacagctgtgcagaacagcaagaatgccaaggacaagaacctgaagaggcacagcatcatctctgtgctgccctggaagagaattgtggccgtgtctgccaagaagaagaacagcaagaaggtgcagcccaacagcagctaccagaacaacatcacccacctgaacaatgaaaacctgaagaagagcctgagctgtgccaacctgagcacctttgcccagcccccaccagcccagcccccagcccccccagccagccagctgagcggcagccagacaggaggcagcagctctgtgaagaaggccccccaccctgctgtgaccagcgctggcacccccaagagggtgattgtgcaggccagcaccagcgagctgctgcgctgcctgggggagttcctgtgccgccgctgctaccgcctgaagcacctgagccccacagatcctgtgctgtggctgcggtctgtggacaggagcctgctgctgcagggctggcaggaccagggcttcatcaccccagccaacgtggtgttcctgtacatgctgtgcagagatgtgatcagcagcgaggtgggcagtgaccacgagctgcaggccgtgctgctgacctgcctgtacctgagctacagctacatgggaaatgagatctcctaccccctgaagcccttcctggtggagagctgcaaggaggccttctgggaccgctgcctgagcgtcatcaacctgatgagcagcaagatgctgcagatcaatgctgacccccactacttcacccaggtgttcagtgacctgaagaatgaaagtggccaggaggacaagaagaggctgctgctgggcctggacagatag

SEQ ID NO: 318217 - DNA, 924 bp, Artificial Sequence
  derived and/or modified sequence
atgggcaccgtgctgagcctgagccccagctaccggaaggccaccctctttgaagatggagcagccacagtgggccactatactgctgtgcagaacagcaagaatgcaaaagacaaaaacttgaagagacatagcatcatctcggtgttaccatggaaaagaatcgtggccgtgtctgctaagaaaaagaactctaaaaaggtccagcctaattccagttatcagaataatattacccacctgaataatgaaaacttaaaaaagagcttgtcttgtgcaaaccttagtacttttgcccagcctccacctgcccagccacctgccccccctgcatcacagctgtcgggatcccagacaggagggagttcttccgtgaagaaggcgccccaccccgcagttacttcggctgggacgcctaaaagagtcattgtgcaggcgtccacctcagagttgctgcgctgccttggtgagttcctgtgtagaagatgttaccgactgaaacacctctccccaacagatccagtgctgtggttgaggtctgtggatagatcgctgctgcttcaaggctggcaggaccagggattcattacccctgctaatgtggttttcctgtacatgttgtgtcgcgacgtgatatcttctgaggtcggtagcgatcacgaattacaggccgttctcctcacctgtttgtatctgagctactcctacatgggcaatgaaattagttaccccctgaagccgtttctggtcgaatcctgtaaggaggctttctgggaccgctgcctgtccgttattaatctgatgtcatctaagatgctgcagataaatgcggatccccattacttcacgcaggtgttttctgatctgaagaatgagtctggccaagaagacaagaagcgtctcttgttgggcctggatcggtag

SEQ ID NO: 318218 - DNA, 924 bp, Artificial Sequence
  derived and/or modified sequence
atgggcacggtactgtctctgagtccaagttaccgcaaggctactctgttcgaagatggcgctgcaaccgttggtcactacactgcagtgcagaactcaaagaacgcaaaggacaagaacctgaaaaggcattctattattagcgtgctgccctggaaacgcatcgttgcagtctcagctaagaaaaaaaactccaagaaggtgcagccaaactcgtcttatcagaacaacatcacccatctcaacaacgagaacttaaaaaagtctctgagctgtgccaacttatccacattcgcgcagccaccccctgcgcagccccctgcaccgcctgcgagtcaattgtctggctcccagaccgggggttcctctagtgtgaaaaaggcaccccaccctgccgttaccagcgccggaaccccaaaaagggtcattgttcaggcatccacttcagagctgctgagatgcctcggtgagtttctgtgtagacgctgttatcggttaaaacacttgtccccgaccgatcctgtgctttggctgcggagcgttgatcggagtttattactgcagggttggcaagaccagggattcatcacgccagcgaatgtcgtgttcctttacatgctgtgcagagatgtaatcagcagtgaagttggcagtgatcatgaactgcaggccgtgctcctgacctgcttgtatctgtcctattcctacatgggcaatgagataagttatcctctgaaacccttcctggtggaaagttgtaaggaagctttttgggaccgatgtttatcagtgattaaccttatgtcgagtaagatgctgcagattaacgctgacccccactacttcacacaggtcttctctgatcttaaaaacgagagtggtcaggaagataaaaagcgcctgctcctgggcctggataggtag

SEQ ID NO: 318219 - DNA, 1155 bp, Artificial Sequence
  derived and/or modified sequence
atggaccccgccggcggccccagaggcgtgctgcccagaccctgcagagtgctggtgctgctgaaccccagaggcggcaagggcaaggccctgcagctgttcagaagccacgtgcagcccctgctggccgaggccgagatcagcttcaccctgatgctgaccgagagaagaaaccacgccagagagctggtgagaagcgaggagctgggcagatgggacgccctggtggtgatgagcggcgacggcctgatgcacgaggtggtgaacggcctgatggagagacccgactgggagaccgccatccagaagcccctgtgcagcctgcccgccggcagcggcaacgccctggccgccagcctgaaccactacgccggctacgagcaggtgaccaacgaggacctgctgaccaactgcaccctgctgctgtgcagaagactgctgagccccatgaacctgctgagcctgcacaccgccagcggcctgagactgttcagcgtgctgagcctggcctggggcttcatcgccgacgtggacctggagagcgagaagtacagaagactgggcgagatgagattcaccctgggcaccttcctgagactggccgccctgagaacctacagaggcagactggcctacctgcccgtgggcagagtgggcagcaagacccccgccagccccgtggtggtgcagcagggccccgtggacgcccacctggtgcccctggaggagcccgtgcccagccactggaccgtggtgcccgacgaggacttcgtgctggtgctggccctgctgcacagccacctgggcagcgagatgttcgccgcccccatgggcagatgcgccgccggcgtgatgcacctgttctacgtgagagccggcgtgagcagagccatgctgctgagactgttcctggccatggagaagggcagacacatggagtacgagtgcccctacctggtgtacgtgcccgtggtggccttcagactggagcccaaggacggcaagggcgtgttcgccgtggacggcgagctgatggtgagcgaggccgtgcagggccaggtgcaccccaactacttctggatggtgagcggctgcgtggagcccccccccagctggaagccccagcagatgcccccccccgaggagcccctgtag

SEQ ID NO: 318220 - DNA, 1152 bp, Artificial Sequence
  derived and/or modified sequence
gagcccaccggcggccccagaggcgtgctgcccagaccctgcagagtgctggtgctgctgaaccccagaggcggcaagggcaaggccctgcagctgttcagaagccacgtgcagcccctgctggccgaggccgagatcagcttcaccctgatgctgaccgagagaagaaaccacgccagagagctggtgagaagcgaggagctgggcagatgggacgccctggtggtgatgagcggcgacggcctgatgcacgaggtggtgaacggcctgatggagagacccgactgggagaccgccatccagaagcccctgtgcagcctgcccgccggcagcggcaacgccctggccgccagcctgaaccactacgccggctacgagcaggtgaccaacgaggacctgctgaccaactgcaccctgctgctgtgcagaagactgctgagccccatgaacctgctgagcctgcacaccgccagcggcctgagactgttcagcgtgctgagcctggcctggggcttcatcgccgacgtggacctggagagcgagaagtacagaagactgggcgagatgagattcaccctgggcaccttcctgagactggccgccctgagaacctacagaggcagactggcctacctgcccgtgggcagagtgggcagcaagacccccgccagccccgtggtggtgcagcagggccccgtggacgcccacctggtgcccctggaggagcccgtgcccagccactggaccgtggtgcccgacgaggacttcgtgctggtgctggccctgctgcacagccacctgggcagcgagatgttcgccgcccccatgggcagatgcgccgccggcgtgatgcacctgttctacgtgagagccggcgtgagcagagccatgctgctgagactgttcctggccatggagaagggcagacacatggagtacgagtgcccctacctggtgtacgtgcccgtggtggccttcagactggagcccaaggacggcaagggcgtgttcgccgtggacggcgagctgatggtgagcgaggccgtgcagggccaggtgcaccccaactacttctggatggtgagcggctgcgtggagcccccccccagctggaagccccagcagatgcccccccccgaggagcccctgtag

SEQ ID NO: 318221 - DNA, 1155 bp, Artificial Sequence
  derived and/or modified sequence
atggaccccgccgggggccctcgtggagttttgccccgcccttgcagagtcctggtattgctgaacccaagaggcgggaaaggaaaggccctacaactgtttcggagccacgtgcaacccttgcttgctgaagccgagattagtttcacactgatgctgacagagcgccgaaatcatgccagagagctagtgagatctgaagaactaggcaggtgggacgccctggtcgtgatgagcggagacggcctcatgcatgaggtggttaacggcttgatggaacggccagactgggaaacagccattcagaagcctttgtgctctctgcctgccggatctggcaatgcgctggccgcttccctgaatcactacgccggctatgagcaggtgacaaatgaagacttgctgacaaattgcacactgctgttgtgtcggcgtcttctgtctccgatgaacctgttgtccctgcacaccgcatctggcctgaggctgtttagcgtattaagtctggcctggggatttattgcagacgtggatctcgaaagcgaaaagtacaggcggctcggcgaaatgcgctttactctcggcacctttttgcgattagctgctcttagaacctataggggcaggttggcatatcttccagtgggccgagtgggctctaaaacccctgccagccctgtagtcgtacagcaggggcctgtagatgcccacttggtcccattggaggaaccagtccccagccattggacagtcgtgcctgacgaagacttcgtgctcgtattagcattgttgcactctcacttaggatcagagatgtttgctgcacctatggggcgctgtgctgccggcgttatgcacctgttttacgtgcgagccggtgtgagcagggccatgttactccggttattcctggcaatggaaaaaggacgccatatggaatatgaatgcccctatctcgtgtacgtgcctgtggtcgcctttagacttgagcctaaagatggaaagggcgtgttcgctgtagatggggagcttatggtttcggaggccgttcagggacaagtgcaccctaactacttttggatggtctcggggtgcgtggaaccgccgcccagctggaaaccccagcagatgccaccacccgaggagcccttatag

SEQ ID NO: 318222 - DNA, 1152 bp, Artificial Sequence
  derived and/or modified sequence
gaaccgacgggaggccccaggggggtgttgcctagaccttgtagagtgcttgttttgctgaaccctcgcggcggcaaggggaaggccttacagctgttccggtcgcacgtacagccgctccttgcagaagccgagatttcctttactctcatgctgacggagaggaggaatcacgccagggaactcgtgcgcagtgaagaattaggccgatgggatgcactggtcgtgatgagcggcgacggactgatgcacgaggtggtaaatggactgatggagcgcccagactgggaaactgccatacaaaagccactctgttctctgcccgcgggttccggtaatgcactcgccgcctctctgaatcactacgcaggctacgaacaggtcacgaatgaggacctcctgactaactgtaccctgctgctctgccgtaggctgctgagccccatgaatttgctttccttgcacactgcatcgggactgcggctctttagcgtgctgtccctggcctgggggttcatcgctgatgtcgatctggaatcagaaaagtatcggcggctcggggagatgcgatttacacttgggacctttcttcggcttgctgccctccgcacataccgtggcaggcttgcgtatcttcccgtgggccgcgtgggatccaaaacccccgcctcccccgttgtcgttcagcagggcccagtggacgctcatctcgtgcccctggaagaacccgtacccagccactggaccgtggtcccggacgaggattttgtcttagtcctggccctgctccactctcacctcggttccgaaatgtttgcagcccccatgggaagatgtgcggccggagtcatgcacctgttctatgtgcgggctggcgtctctagggcaatgctgctgagactctttcttgccatggagaagggcaggcacatggaatatgagtgcccttacttggtttatgttccagttgtagccttcaggttggaacccaaggatgggaaaggggtatttgccgtcgacggagaactcatggtgagcgaggcagtgcagggccaggtccacccgaactatttttggatggtaagcggctgcgttgaaccccctccctcgtggaagcctcaacagatgccaccccctgaggagcctctatag

SEQ ID NO: 318223 - DNA, 1155 bp, Artificial Sequence
  derived and/or modified sequence
atggacccagccggaggacccagaggcgtgctgcctagaccgtgcagagtactagttctcctcaaccctcggggagggaaggggaaagcgctgcagctgtttcgctcccatgtacagcccctgctggcggaagccgaaatctccttcacactgatgttgactgaacggaggaaccatgcccgcgaattggtaaggtctgaagagctcggacggtgggacgcactcgtcgtgatgagtggggatggcctgatgcatgaggtggtaaatggactgatggagcgacccgattgggagaccgcgatccagaaacccctgtgttctttacctgccgggagcggtaatgctcttgcagccagcctgaaccactacgccggatacgaacaggtgactaacgaggacctgctgaccaactgcacgctgctcctctgcagacgcttactctcacctatgaatctgctgtccttgcacaccgcaagcggcctaaggctattctcagtgctctctttagcctggggttttatcgccgacgttgacctggagagtgagaaataccgtcgtttgggcgagatgcggttcacattaggtacgttcctgagactcgccgccctccggacatataggggcaggttagcctatctgccagtgggccgcgtgggaagtaagacccctgcaagtcccgtggtcgtgcaacaagggcccgttgatgcacacctggttcctctggaagaaccagttccttctcattggaccgtggtgcctgatgaagatttcgtgctagtgctcgctcttctccactcacacctaggaagtgagatgtttgctgcccctatgggacggtgtgccgctggcgtcatgcatctgttctacgtccgcgcaggcgtgagccgggcaatgctgttgaggctctttctggcaatggaaaagggaaggcacatggaatatgagtgtccatacctcgtatatgtgcctgttgtagctttccggctggaacctaaagatggtaagggagtgtttgcagtggacggcgaactgatggtctctgaggccgttcaaggacaggtacatcccaattacttctggatggtgagtggatgtgtggagccccccccatcttggaagccccaacagatgccccctcccgaggagccactgtag

SEQ ID NO: 318224 - DNA, 1155 bp, Artificial Sequence
  derived and/or modified sequence
atggatccagcaggcggtcctagaggcgtgctcccccgcccatgcagagtgcttgtcttattaaaccccagaggcggcaaaggaaaagccttgcagttgttccgtagccacgtgcagccgcttctagcagaggccgagatatcttttacactaatgctgacagagcgtcgtaatcacgcccgggaactggtgcggagtgaggagcttgggcgctgggatgccctggtcgtgatgtctggtgacggtttaatgcatgaggtggtgaacgggctgatggaacgccctgattgggaaactgccatacaaaagcctctctgctccttacccgcagggtccgggaatgccctcgccgcctctctgaaccactacgccggatacgagcaggtgactaatgaagacctgctcacaaactgtacactgctgttgtgtcgacggctactttctcccatgaacctgcttagcctgcacactgcctctggcttgcgcctgttctccgtcctatctctggcctggggatttatcgccgacgttgatctggaatcggagaaatacagacggctcggagagatgcgctttacactcgggacattcttaagactcgcagccctcagaacatatagaggaaggctcgcctaccttccagtcggacgtgtgggttcgaaaactcctgcgagtccagtagtcgtccagcagggacccgttgacgcccatctagtacccctcgaggagcccgttccatcccactggactgtagttcccgacgaagattttgtcttggtgctggcgctactgcactctcatctgggatccgagatgttcgccgcccccatgggtcgctgtgccgccggagtcatgcacctcttctacgtcagagccggtgtaagtagggcaatgttgctgcgactctttctcgctatggagaagggtcgacatatggagtacgagtgtccttatctcgtatatgtccccgtcgtggcttttcgactcgaacccaaagacggaaagggggtatttgcagttgatggtgaactcatggtttctgaggcggtacaaggtcaggtccatccgaactatttctggatggtctctggctgcgtcgaacctcctccctcctggaagccacagcagatgccacccccggaggaaccactgtag

SEQ ID NO: 318225 - DNA, 1155 bp, Artificial Sequence
  derived and/or modified sequence
atggaccctgctgggggcccccggggcgtgctgccccggccctgccgggtgctggtgctgctgaacccccggggcggcaagggcaaggccctgcagctgttccgcagccacgtgcagcccctgctggccgaggccgagatctccttcaccctgatgctgacagagaggagaaatcatgcccgggagctggtgcgctctgaggagctgggccgctgggatgccctggtggtgatgtctggagatggcctgatgcatgaggtggtgaatggcctgatggagaggccagactgggagacagccatccagaagcccctgtgcagcctgcctgctggcagcggaaatgccctggccgccagcctgaaccactacgccggctatgagcaggtgaccaatgaagacctgctgaccaactgcaccctgctgctgtgccggcggctgctgagccccatgaacctgctgagcctgcacacagccagcggcctgcggctcttctctgtgctgagcctggcctggggcttcatcgcagatgtggacctggagagcgagaagtacagaaggctgggggagatgaggttcaccctgggcaccttcctgcggctggccgccctgcggacctaccggggccgcctggcctacctgcctgtgggccgggtgggcagcaagaccccagccagccctgtggtggtgcagcagggccctgtggatgcccacctggtgcccctggaggagcctgtgcccagccactggacagtggtgcctgatgaagattttgtgctggtgctggccctgctgcacagccacctgggcagcgagatgtttgctgcccccatgggccgctgtgccgccggcgtgatgcacctgttctacgtgcgggccggcgtgtcccgggccatgctgctgcggctcttcctggccatggagaagggccgccacatggagtatgaatgtccctacctggtgtatgtgcctgtggtggccttccggctggagcccaaggatggaaaaggagtgtttgctgtggatggagagctgatggtgtctgaggccgtgcagggccaggtgcaccccaactacttctggatggtgtctggctgtgtggagcccccacccagctggaagccccagcagatgcctcctcctgaggagcccctgtag

SEQ ID NO: 318226 - DNA, 1152 bp, Artificial Sequence
  derived and/or modified sequence
gagcccactggaggcccccggggcgtgctgccccggccctgccgggtgctggtgctgctgaacccccggggcggcaagggcaaggccctgcagctgttccgcagccacgtgcagcccctgctggccgaggccgagatctccttcaccctgatgctgacagaaagaagaaaccacgcccgggagctggtgcgctctgaggagctgggccgctgggatgccctggtggtgatgtctggagatggcctgatgcatgaggtggtgaatggcctgatggagaggccagactgggagacagccatccagaagcccctgtgcagcctgcctgctggcagcggaaatgccctggccgccagcctgaaccactacgccggctatgagcaggtgaccaatgaagacctgctgaccaactgcaccctgctgctgtgccggcggctgctgagccccatgaacctgctgagcctgcacacagccagcggcctgcggctcttctctgtgctgagcctggcctggggcttcatcgcagatgtggacctggagagcgagaagtaccgccgcctgggggagatgaggttcaccctgggcaccttcctgcggctggccgccctgcggacctaccggggccgcctggcctacctgcctgtgggccgggtgggcagcaagaccccagccagccctgtggtggtgcagcagggccctgtggatgcccacctggtgcccctggaggagcctgtgcccagccactggacagtggtgcctgatgaggactttgtgctggtgctggccctgctgcacagccacctgggcagcgagatgtttgctgcccccatgggccgctgtgccgccggcgtgatgcacctgttctacgtgcgggccggcgtgtcccgggccatgctgctgcggctcttcctggccatggagaagggccgccacatggagtatgagtgcccctacctggtgtatgtgcctgtggtggccttccggctggagcccaaggatggcaagggcgtgtttgctgtggatggagagctgatggtgtctgaggccgtgcagggccaggtgcaccccaactacttctggatggtgtctggctgtgtggagcccccacccagctggaagccccagcagatgcctcctcctgaggagcccctgtag

SEQ ID NO: 318227 - DNA, 1155 bp, Artificial Sequence
  derived and/or modified sequence
atggaccccgccggcggcccccggggcgtgctgccccggccctgcagagtgttagtcttgttaaatccaagagggggtaagggcaaggctcttcagctgtttcgcagtcacgttcagccactcttggcggaagccgaaatatcatttactctgatgctcaccgaacgacggaatcacgctcgcgaacttgtccgtagcgaagaattggggagatgggatgctctggtagtgatgagtggggatggtcttatgcacgaggttgttaatgggctgatggaacgacccgactgggaaaccgctattcagaagccactctgttccctgcctgcaggctccggaaacgccctggccgcttccttaaatcactacgctggatatgagcaggtcacaaatgaggacctgctgaccaactgcaccctcctattatgccgcagactcctcagccctatgaacttactgagcttgcacaccgcctctggcctgcgcctattttctgtgcttagcctagcatggggcttcattgccgacgtggacctggagtcagaaaaatacaggcggcttggggagatgcggtttaccttaggtacattccttaggctggcagccctccggacctacaggggcaggctggcctatttgcctgtcggccgggtggggtcaaagaccccggccagcccagtggtggtgcagcagggcccggtggacgcccacctcgtgccgctcgaggaacccgtgccctctcattggacagtggtcccagatgaggactttgttctggtgctggctctgctgcacagtcaccttgggagcgagatgtttgctgcaccgatgggccgctgcgccgctggcgtgatgcatctcttctatgtgcgggcaggagttagccgagctatgctgctccggctctttcttgccatggagaagggacgacacatggagtatgagtgtccctacctggtgtatgtgccagtggtggcattccggcttgaacccaaggacgggaagggcgttttcgccgtggatggagagttaatggttagcgaagcggtgcagggtcaggtacatcctaattacttttggatggtatccggatgtgtcgaacctcccccatcttggaagcctcagcaaatgccaccacccgaagaacctctctag

SEQ ID NO: 318228 - DNA, 1152 bp, Artificial Sequence
  derived and/or modified sequence
gagcccaccggcggcccccggggcgtgctgccccggccctgccgggtcctggtacttctgaacccccgaggaggaaaaggaaaagctctgcagctcttccgctcccacgtgcagcccttactggctgaagctgagatttcattcacattgatgctcaccgagcgtagaaatcacgcccgcgaactggtgcgaagcgaggagttggggaggtgggatgctctggtcgtgatgagtggggacggcctcatgcacgaggtggtgaatggactgatggagagacctgattgggaaactgccattcagaaacctctctgtagcctgcccgccggttccggcaatgcactcgctgcctccctgaatcattacgcgggctacgaacaggttactaacgaggatctgttgacaaactgtaccctgctgctttgtcgccgcctcctgagcccaatgaacctgcttagcctacataccgcttctgggttacgcctgttctctgtactctcactggcttgggggttcatcgctgacgtggacctggaaagtgaaaaatatagacggctgggcgagatgcggttcactcttggcaccttcctccggctggccgccctcaggacttacagaggtcgcctagcctatctgcctgtgggtagagtaggaagcaagacaccagcaagcccagtggtcgtgcagcagggccccgttgacgcgcatttagtgccactggaggagcccgtgccgtctcattggactgtggttcctgacgaggatttcgtcctcgtcttggctctgttgcacagtcatctcggaagcgagatgtttgccgcccctatgggccgctgcgcagccggggtaatgcacttgttttacgtccgcgcaggggtcagccgggccatgttgctgcgattgtttctggcgatggagaaaggaaggcacatggaatacgaatgcccatatctggtctatgtgcctgtagtggcattccggttggagcctaaagatggaaaaggtgtgtttgccgttgacggtgagcttatggtctctgaagccgttcaggggcaagtacatcccaattatttttggatggtgtctggctgcgtggaaccgccgccatcctggaaaccgcagcaaatgcccccacctgaagagcctttatag

SEQ ID NO: 318229 - DNA, 1155 bp, Artificial Sequence
  derived and/or modified sequence
atggaccccgccggcggcccccggggcgtgctgccccggccctgccgcgtactggtcctgcttaatcccagaggagggaaaggcaaggccctgcagttgttccgaagtcatgtgcagcccctcctagctgaagcagaaatatccttcacccttatgctcacagagagaagaaatcacgctagagaattggtgagaagtgaggaactggggcgatgggacgccctggtggttatgtcaggcgacggtttaatgcatgaggtggtgaacgggcttatggaacggccagattgggagacagccatccagaagcccctctgttccttacccgccggtagcggaaacgccctggccgctagccttaaccactatgccggctacgagcaggttaccaacgaagaccttcttaccaactgtacccttctgctgtgcagacgcctgctttcaccaatgaatctgttatctctgcacaccgcaagcggacttaggctattttctgttctttccttagcgtggggcttcattgctgatgtggacttggagtctgaaaaataccgccgcctgggtgaaatgaggtttacgctcgggaccttccttcgcctggcagctctgaggacatatcgtggtcgattggcgtacctgcccgtgggtagagttgggtccaagacacccgcgtcaccggtggttgtccagcagggtccagtagatgcacaccttgttcctctggaggaacccgtccctagccattggactgttgttcccgatgaggatttcgtactggtgttggcactcctccattcccacctgggttccgagatgttcgccgcgcccatgggtaggtgtgccgctggcgtaatgcatttgttctacgtaagggctggcgtatcccgggcaatgttactgcgactctttctggccatggaaaaagggcgtcatatggaatacgagtgcccctatctggtgtacgtacccgttgtagctttcaggctcgagccgaaagacggcaaaggcgtgttcgcagtcgatggggagctcatggtgtctgaagccgttcaaggccaagtgcacccaaattatttttggatggtgtctgggtgcgtcgaaccccctccttcatggaaaccccaacagatgcctcctcccgaagaaccactgtag

SEQ ID NO: 318230 - DNA, 1155 bp, Artificial Sequence
  derived and/or modified sequence
atggaccccgccggcggcccccggggcgtgctgccccggccctgcagggttctggtattgctgaacccaagaggcgggaaaggcaaggcactgcaattatttcgctcgcacgtgcagccactgttggctgaggcagaaatttcttttactttgatgctgaccgaacgcaggaaccacgcgcgcgagctcgtacggtccgaggagctggggcggtgggatgcgctagtcgttatgagcggagacggactgatgcacgaagttgtcaacggattgatggaacgcccagattgggagactgccattcaaaagccgctctgttctctcccagctgggtcaggaaatgctcttgcagcatcactgaaccattacgcaggttacgaacaagtaaccaacgaagatctgctcaccaactgtaccctgctgctgtgcagaagacttttgtctcccatgaatctgttgtcgctgcacacggcatcaggactcagactgttcagcgtcctttctcttgcgtggggcttcatcgcagacgtggacctcgaatcagagaaatatcggcgactgggagagatgagattcaccctgggtacctttttgagacttgcagccctgcgcacttaccgcggtaggctggcttacctgcccgtgggacgagtagggtcaaagacaccagcatcccctgtggttgttcagcaaggcccggtggatgcccatctggtgccacttgaggaacccgtgccaagccactggaccgtggtacccgacgaagatttcgtcctcgttctcgccctcttgcacagccatctgggcagcgaaatgttcgccgcgcccatggggaggtgcgctgctggagtgatgcacctcttttacgttagggcaggagtgtcacgagccatgctattaagactctttctggccatggagaaaggcagacacatggaatatgaatgcccatacctggtatatgtacctgtcgtagcatttaggctggagccaaaagacggcaaaggagtgttcgccgttgacggcgagcttatggtctctgaggccgtgcagggccaggtgcatcctaactatttctggatggtgagcgggtgtgtggagccaccgccttcttggaagcctcagcaaatgccaccccccgaagaacccttatag

SEQ ID NO: 318231 - DNA, 1155 bp, Artificial Sequence
  derived and/or modified sequence
atggatcctgccggaggcccacgtggagtgctccccaggccatgtagagtgcttgtgctgcttaaccctagaggaggcaagggaaaggcccttcagctctttagaagccatgtgcagcctttactcgccgaggcagagatttcctttacactcatgctgaccgagaggaggaaccacgccagagaactggttaggagcgaggagctgggacggtgggacgctcttgtggttatgtcaggtgacgggctgatgcacgaagttgtgaacgggctaatggaacgacccgattgggagactgcaatacagaagccactctgttcattaccggctggcagcgggaatgctctggccgcaagtctcaaccactatgcaggatacgaacaggtgaccaacgaggatcttctcacaaattgtaccctgttgctgtgtaggagactgctttcaccaatgaaccttttgagtttgcataccgcctccgggctgaggctgtttagcgtgctgagcctggcctggggcttcattgctgacgtcgatctggaaagcgagaagtatcgcagactcggtgagatgaggttcaccctgggcactttcctgcgcctggccgcacttagaacataccggggtcgccttgcttacctacctgtgggaagggtaggctcaaaaacaccagcttctcctgtggttgtacaacaggggcctgtcgacgcccatctggttcccctggaagaaccagtgccctcccactggacagtcgtccctgatgaagactttgtgctcgttttggccctgctccatagccatttggggtccgagatgtttgctgcacctatgggcagatgcgctgccggtgtcatgcacctgttctatgttcgggcaggggtctctagagcgatgctgctccgcctttttctagcaatggaaaaaggacggcatatggaatacgaatgcccatacctggtgtacgttccagtcgtggcttttagattggaacccaaggatgggaagggcgttttcgccgtggatggcgagcttatggtctcagaagcagtgcaggggcaggttcaccctaattatttttggatggtctctggatgcgttgagccacccccatcttggaagcctcaacagatgcctccccctgaggagccgttatag

SEQ ID NO: 318232 - DNA, 1152 bp, Artificial Sequence
  derived and/or modified sequence
gagccaactgggggaccgagaggtgtgctgcctaggccctgtcgagtcctcgtgctgctcaatccgaggggcggaaagggtaaggcactgcagttgtttagatctcacgtgcaacctctcctggccgaggctgaaatctcatttactttgatgcttactgagcggaggaatcacgctagagaactggttcggtctgaggagctcggaaggtgggacgctctcgtagtgatgtccggcgatggcttgatgcacgaggtcgtcaatggactgatggagagacccgactgggaaaccgcaatccagaaacccttatgctccctaccagccggatcaggtaacgctctcgcagcctccctgaatcactacgcgggatacgagcaggttaccaacgaggacctgctgactaattgcactctactcttgtgcagacgattgctgtctccgatgaatctgctgtcccttcacaccgcttctggactgcggcttttttcagtattgtccctggcctgggggttcattgctgacgtggacctagagtccgaaaagtatcggcgtttgggcgaaatgcgattcactctcggcacatttttacggctggccgcactcagaacctatcgagggcgtcttgcatatctgcccgtgggcagggttggatctaagaccccagcaagtcccgtcgtggtccaacagggccctgtggatgctcatctcgtgcctctggaggagccagtgccgagtcactggactgtcgtacctgatgaggactttgtgctggtacttgctctcctgcacagccatctgggcagcgagatgttcgccgctccgatgggcagatgcgcggctggagtgatgcaccttttctatgtgagggccggagtgagccgcgctatgctgctccgactcttcctggcaatggaaaaggggaggcatatggagtatgagtgcccctatctcgtttatgttccggtcgtggcttttcgcctggagcctaaagacggaaaaggcgtgttcgccgtggatggagagttgatggttagcgaggctgtgcagggccaggtgcaccccaactacttttggatggttagcggttgcgttgaaccaccccctagttggaagccacaacaaatgccccctccagaggagcccctctag

SEQ ID NO: 318233 - DNA, 1155 bp, Artificial Sequence
  derived and/or modified sequence
atggatcctgcaggcggtccacgcggtgtactccctaggccctgtcgcgtcctggtcctcctaaatcccagaggaggaaagggtaaggcactccagctgttcaggtcacatgtgcagcctctgcttgccgaggccgagatatctttcactctgatgctcacagaacgcaggaatcacgccagagaactagtacgcagcgaggaactcgggcgatgggatgccttagtcgttatgtctggcgacggactgatgcatgaggtggttaatgggttgatggagcgcccagactgggaaacagccatacagaaacctctgtgctccctacccgcaggctccggcaatgccctggccgctagtttgaaccactacgccggatacgagcaagttacaaacgaagatctccttaccaattgcacactgctgctgtgtaggcggctgctttcgcccatgaacctgttaagcctgcacaccgctagtggacttagactatttagcgtcctgtccttggcctggggattcattgctgatgtggacctggagtctgagaagtacaggcgcttgggagagatgcggttcaccttaggcactttccttcgtttggccgcactcagaacgtaccgcggaagactcgcttatttacccgtcggtagagtgggttctaaaacccctgcgtcaccagtggtagtccagcaaggccctgttgatgcccacctcgtccctctcgaagagccggttccaagccattggacagtagtacccgatgaggatttcgttttggtcctcgctctcttgcattctcacctggggagtgagatgttcgccgcacccatgggcaggtgcgccgcaggggtaatgcatctgttctacgttagggcaggcgtgtcaagggcgatgctcctccgtctgtttttggccatggaaaagggcaggcacatggagtacgaatgtccgtatctcgtgtacgtgccagtggtcgcttttagactggagcccaaggacggcaaaggggtgttcgcagttgatggcgagctgatggtgtctgaagcagttcagggacaagtacaccccaactacttctggatggtatccgggtgtgtggagccccctccctcctggaaaccacagcagatgccaccacctgaagagcccctgtag

SEQ ID NO: 318234 - DNA, 1155 bp, Artificial Sequence
  derived and/or modified sequence
atggacccagctggtgggcctcgaggggtgctgcccagaccctgccgcgtgctagtcttgctgaatcccagaggtggtaagggtaaggccctgcagctttttagatctcacgtgcagccactgttagccgaggcggagatcagcttcactctcatgcttactgagagacgcaatcacgctcgcgagcttgtacgctctgaagagctcggccgatgggacgcactggtggtgatgagtggggacggcttaatgcacgaagtcgtgaatggcctaatggagaggcccgattgggagaccgccatacagaaacctctgtgctcgttgcccgcaggttccggtaacgctctggcagcaagccttaaccactacgcaggatacgaacaagtaacaaacgaggatttgctgaccaactgcacactcctgttgtgcagacgcctgttaagccctatgaatctgctctcgcttcataccgcgtccggactgcggctgttctccgttttgtctctcgcttggggctttatagctgatgtggacttggagtctgaaaagtatcggcgtttgggggaaatgcgctttacactcggtactttcctgcgactggcagcccttcgtacataccgcggacgcctagcttacttaccagtgggcagggtggggtctaagacccctgcctcccctgtggtggtccagcaaggtcctgtcgatgcccatttggttcccctggaagaacctgtcccctcacattggacagtggttccagacgaggacttcgtgctggtcctcgctttgctgcatagtcaccttggatccgagatgtttgcagctcctatgggacgatgtgctgcaggcgtcatgcatctcttttacgtccgggcaggagtgtcaagagccatgttgctgcgcctattcctggctatggaaaagggcagacatatggagtatgagtgcccgtacctggtttatgtacccgtagtggcgtttcggttggagcctaaggatggaaagggggtgtttgcagtagatggggagctgatggtatccgaagcggtgcaaggacaggtgcaccctaactacttctggatggtgtcaggatgtgttgagcctcctcccagctggaaaccacagcagatgccccctcctgaagaaccgctgtag

SEQ ID NO: 318235 - DNA, 1426 bp, Artificial Sequence
  derived and/or modified sequence
gagccaacgggcggcccccggggcgtgctcccgcggccctgccgcgtgctggtgctgctgaacccgcgcggcggcaagggcaaggccttgcagctcttccggagtcacgtgcagccccttttggctgaggctgaaatctccttcacgctgatgctcactgagcggcggaaccacgcgcgggagctggtgcggtcggaggagctgggccgctgggacgctctggtggtcatgtctggagacgggctgatgcacgaggtggtgaacgggctcatggagcggcctgactgggagaccgccatccagaagcccctgtgtagcctcccagcaggctctggcaacgcgctggcagcttccttgaaccattatgctggctatgagcaggtcaccaatgaagacctcctgaccaactgcacgctattgctgtgccgccggctgctgtcacccatgaacctgctgtctctgcacacggcttcggggctgcgcctcttctctgtgctcagcctggcctggggcttcattgctgatgtggacctagagagtgagaagtatcggcgtctgggggagatgcgcttcactctgggcaccttcctgcgtctggcagccctgcgcacctaccgcggccgactggcctacctccctgtaggaagagtgggttccaagacacctgcctcccccgttgtggtccagcagggcccggtagatgcacaccttgtgccactggaggagccagtgccctctcactggacagtggtgcccgacgaggactttgtgctagtcctggcactgctgcactcgcacctgggcagtgagatgtttgctgcacccatgggccgctgtgcagctggcgtcatgcatctgttctacgtgcgggcgggagtgtctcgtgccatgctgctgcgcctcttcctggccatggagaagggcaggcatatggagtatgaatgcccctacttggtatatgtgcccgtggtcgccttccgcttggagcccaaggatgggaaaggtgtgtttgcagtggatggggaattgatggttagcgaggccgtgcagggccaggtgcacccaaactacttctggatggtcagcggttgcgtggagcccccgcccagctggaagccccagcagatgccaccgccagaagagcccttatgacccctgggccgcgctgtgccttagtgtctacttgcaggacccttcctccttccctagggctgcagggcctgtccacagctcctgtgggggtggaggagactcctctggagaagggtgagaaggtggaggctatgctttggggggacaggccagaatgaagtcctgggtcaggagcccagctggctgggcccagctgcctatgtaaggccttctagtttgttctgagacccccaccccacgaaccaaatccaaataaagtgacattcccagcctg

SEQ ID NO: 318236 - DNA, 285 bp, Artificial Sequence
  derived and/or modified sequence
atgcaacactcactggtgttcttcttcgctgtgattttacatctttcacatcttctccacttagatgctagcatccatcccttccgcttgccattttcctccaaaccattcctgctcatccccatgtcaaacaccaccctgccccataccgcatggccgcttagttttctgcatcagactgttagtaccctgaaagctgtcgccgttacacacagcctctggcacctccagattcccgtggactgccaagcttgtaacagaaagagtaagaagatctactgctag

SEQ ID NO: 318237 - RNA, 285 nt, Artificial Sequence
  derived and/or modified sequence
augcaacacucacugguguucuucuucgcugugauuuuacaucuuucacaucuucuccacuuagaugcuagcauccaucccuuccgcuugccauuuuccuccaaaccauuccugcucauccccaugucaaacaccacccugccccauaccgcauggccgcuuaguuuucugcaucagacuguuaguacccugaaagcugucgccguuacacacagccucuggcaccuccagauucccguggacugccaagcuuguaacagaaagaguaagaagaucuacugcuag

SEQ ID NO: 318238 - DNA, 4668 bp, Artificial Sequence
  derived and/or modified sequence
atggacgaggaggaggacggcgccggcgccgaggagagcggccagcccagaagcttcatgagactgaacgacctgagcggcgccggcggcagacccggccccggcagcgccgagaaggaccccggcagcgccgacagcgaggccgagggcctgccctaccccgccctggcccccgtggtgttcttctacctgagccaggacagcagacccagaagctggtgcctgagaaccgtgtgcaacccctggttcgagagaatcagcatgctggtgatcctgctgaactgcgtgaccctgggcatgttcagaccctgcgaggacatcgcctgcgacagccagagatgcagaatcctgcaggccttcgacgacttcatcttcgccttcttcgccgtggagatggtggtgaagatggtggccctgggcatcttcggcaagaagtgctacctgggcgacacctggaacagactggacttcttcatcgtgatcgccggcatgctggagtacagcctggacctgcagaacgtgagcttcagcgccgtgagaaccgtgagagtgctgagacccctgagagccatcaacagagtgcccagcatgagaatcctggtgaccctgctgctggacaccctgcccatgctgggcaacgtgctgctgctgtgcttcttcgtgttcttcatcttcggcatcgtgggcgtgcagctgtgggccggcctgctgagaaacagatgcttcctgcccgagaacttcagcctgcccctgagcgtggacctggagagatactaccagaccgagaacgaggacgagagccccttcatctgcagccagcccagagagaacggcatgagaagctgcagaagcgtgcccaccctgagaggcgacggcggcggcggccccccctgcggcctggactacgaggcctacaacagcagcagcaacaccacctgcgtgaactggaaccagtactacaccaactgcagcgccggcgagcacaaccccttcaagggcgccatcaacttcgacaacatcggctacgcctggatcgccatcttccaggtgatcaccctggagggctgggtggacatcatgtacttcgtgatggacgcccacagcttctacaacttcatctacttcatcctgctgatcatcgtgggcagcttcttcatgatcaacctgtgcctggtggtgatcgccacccagttcagcgagaccaagcagagagagagccagctgatgagagagcagagagtgagattcctgagcaacgccagcaccctggccagcttcagcgagcccggcagctgctacgaggagctgctgaagtacctggtgtacatcctgagaaaggccgccagaagactggcccaggtgagcagagccgccggcgtgagagtgggcctgctgagcagccccgcccccctgggcggccaggagacccagcccagcagcagctgcagcagaagccacagaagactgagcgtgcaccacctggtgcaccaccaccaccaccaccaccaccactaccacctgggcaacggcaccctgagagcccccagagccagccccgagatccaggacagagacgccaacggcagcagaagactgatgctgcccccccccagcacccccgccctgagcggcgccccccccggcggcgccgagagcgtgcacagcttctaccacgccgactgccacctggagcccgtgagatgccaggcccccccccccagaagccccagcgaggccagcggcagaaccgtgggcagcggcaaggtgtaccccaccgtgcacaccagccccccccccgagaccctgaaggagaaggccctggtggaggtggccgccagcagcggcccccccaccctgaccagcctgaacatcccccccggcccctacagcagcatgcacaagctgctggagacccagagcaccggcgcctgccagagcagctgcaagatcagcagcccctgcctgaaggccgacagcggcgcctgcggccccgacagctgcccctactgcgccagagccggcgccggcgaggtggagctggccgacagagagatgcccgacagcgacagcgaggccgtgtacgagttcacccaggacgcccagcacagcgacctgagagacccccacagcagaagacagagaagcctgggccccgacgccgagcccagcagcgtgctggccttctggagactgatctgcgacaccttcagaaagatcgtggacagcaagtacttcggcagaggcatcatgatcgccatcctggtgaacaccctgagcatgggcatcgagtaccacgagcagcccgaggagctgaccaacgccctggagatcagcaacatcgtgttcaccagcctgttcgccctggagatgctgctgaagctgctggtgtacggccccttcggctacatcaagaacccctacaacatcttcgacggcgtgatcgtggtgatcagcgtgtgggagatcgtgggccagcagggcggcggcctgagcgtgctgagaaccttcagactgatgagagtgctgaagctggtgagattcctgcccgccctgcagagacagctggtggtgctgatgaagaccatggacaacgtggccaccttctgcatgctgctgatgctgttcatcttcatcttcagcatcctgggcatgcacctgttcggctgcaagttcgccagcgagagagacggcgacaccctgcccgacagaaagaacttcgacagcctgctgtgggccatcgtgaccgtgttccagatcctgacccaggaggactggaacaaggtgctgtacaacggcatggccagcaccagcagctgggccgccctgtacttcatcgccctgatgaccttcggcaactacgtgctgttcaacctgctggtggccatcctggtggagggcttccaggccgaggagatcagcaagagagaggacgccagcggccagctgagctgcatccagctgcccgtggacagccagggcggcgacgccaacaagagcgagagcgagcccgacttcttcagccccagcctggacggcgacggcgacagaaagaagtgcctggccctggtgagcctgggcgagcaccccgagctgagaaagagcctgctgccccccctgatcatccacaccgccgccacccccatgagcctgcccaagagcaccagcaccggcctgggcgaggccctgggccccgccagcagaagaaccagcagcagcggcagcgccgagcccggcgccgcccacgagatgaagagcccccccagcgccagaagcagcccccacagcccctggagcgccgccagcagctggaccagcagaagaagcagcagaaacagcctgggcagagcccccagcctgaagagaagaagccccagcggcgagagaagaagcctgctgagcggcgagggccaggagagccaggacgaggaggagagcagcgaggaggagagagccagccccgccggcagcgaccacagacacagaggcagcctggagagagaggccaagagcagcttcgacctgcccgacaccctgcaggtgcccggcctgcacagaaccgccagcggcagaggcagcgccagcgagcaccaggactgcaacggcaagagcgccagcggcagactggccagagccctgagacccgacgacccccccctggacggcgacgacgccgacgacgagggcaacctgagcaagggcgagagagtgagagcctggatcagagccagactgcccgcctgctgcctggagagagacagctggagcgcctacatcttccccccccagagcagattcagactgctgtgccacagaatcatcacccacaagatgttcgaccacgtggtgctggtgatcatcttcctgaactgcatcaccatcgccatggagagacccaagatcgacccccacagcgccgagagaatcttcctgaccctgagcaactacatcttcaccgccgtgttcctggccgagatgaccgtgaaggtggtggccctgggctggtgcttcggcgagcaggcctacctgagaagcagctggaacgtgctggacggcctgctggtgctgatcagcgtgatcgacatcctggtgagcatggtgagcgacagcggcaccaagatcctgggcatgctgagagtgctgagactgctgagaaccctgagacccctgagagtgatcagcagagcccagggcctgaagctggtggtggagaccctgatgagcagcctgaagcccatcggcaacatcgtggtgatctgctgcgccttcttcatcatcttcggcatcctgggcgtgcagctgttcaagggcaagttcttcgtgtgccagggcgaggacaccagaaacatcaccaacaagagcgactgcgccgaggccagctacagatgggtgagacacaagtacaacttcgacaacctgggccaggtgagccccagactgagaggcggcgccgtggtgaaggaggccggcggcggcaccggcccctgcctggtgatccccgccgacagcggcggcggcggcctgcacgaggagatcagccccagccaccccctgctgagcaaccaccagcacgtggccaagcccagccccagccacagcgcccccaagagcggccccatgggcagcctggccgtgctgaaggacgaggagaccgaggcccagagaggctag

SEQ ID NO: 318239 - DNA, 4668 bp, Artificial Sequence
  derived and/or modified sequence
atggacgaggaagaagacggtgcaggcgccgaagagagcggccagccacgaagcttcatgaggcttaatgatctttccggcgccggcggccggccggggcctggctcagcagaaaaggacccaggcagcgccgactccgaggcggagggcctgccatatcctgccctcgcacccgtagtctttttttatctgtcacaggactcaaggcccagatcatggtgcctgagaactgtctgtaacccttggtttgaacggatatccatgttggttatactgctaaactgtgtaactctcgggatgtttaggccgtgcgaagatatagcctgtgattcacagagatgcagaatcctccaagccttcgatgacttcatcttcgcattcttcgccgtggaaatggtcgtgaaaatggtcgccctcgggatttttggcaagaagtgttacctcggagacacctggaacaggctggatttctttatagtcatcgccgggatgctcgaatatagcctagacctgcagaacgtttcattttcagccgtcagaaccgttcgcgtcctgcggcccctgagggcaattaaccgtgtgcccagcatgcgcatcctagttacactgttgctggacaccctgccaatgcttggcaatgtgctgttactatgcttcttcgtgttttttatcttcggtatcgtgggcgtgcagttatgggcagggctgctccgcaaccgttgttttctcccagaaaatttcagcctgccactttctgttgacttagaacggtattatcagacagagaatgaggatgagagcccattcatatgtagccagccccgagaaaatggaatgcgttcttgcagatccgtcccaacactgcgtggcgacggtggggggggccccccctgcggtttggattacgaggcgtacaacagtagctccaataccacatgcgtcaactggaaccagtactatactaattgcagtgcaggagaacataacccattcaagggcgctatcaatttcgacaatataggctacgcctggatcgctatcttccaggtcatcacccttgagggctgggtggacattatgtacttcgtcatggacgcccattcattttataactttatttatttcattctgttaatcatcgtggggagtttcttcatgatcaatttgtgtcttgtcgtaatcgccacccagttcagtgaaacgaaacagcgggaatctcagctcatgcgcgaacagcgcgtccgcttcctaagcaatgcatcgactctggcttctttctcagagccggggagctgttacgaggagctgcttaagtacctcgtgtacattttgcgaaaggccgctcgacgtttagcacaggtctctcgggctgctggcgtgcgggtcggcctcctaagctcccctgcccccctgggcggacaagaaacacagccctcatccagctgtagccggtcacaccgccgcctgagtgtccaccatctggtccatcaccaccaccaccaccatcaccattatcatttaggtaacggaaccctgagggctccgcgggcgtcgcccgaaatccaggacagggatgcgaacggctccagacggttaatgctgccacccccttctacacccgcgctctctggcgcccctcctggaggcgctgaaagtgtgcactccttttaccacgcagactgtcacttggagcccgttaggtgccaggcccccccgccccgttcaccaagtgaagcctcaggacggacggttggttcaggcaaagtgtatcctacagtgcacacttctcctcctccggagaccctgaaggagaaggcattggtcgaggtggctgctagttcaggcccaccaacactcacgtctctcaatatccccccgggaccctattcgtccatgcataagttgctcgagacccagtctaccggcgcttgtcagagttcatgtaaaatcagtagcccttgtttgaaggcagattcaggcgcctgcgggccagattcatgcccctactgtgctagagctggcgccggcgaggttgagctggcagatcgggaaatgccagatagcgacagtgaggctgtgtatgaattcacacaagacgctcagcactccgacctgcgagacccgcactccaggcgacagcgttctctgggccctgatgcggaaccgtctagtgtcctggctttctggagactgatttgcgatacatttaggaaaatcgtggactccaaatacttcggtagaggtatcatgatcgcaatcctggttaatacactgagtatgggcatcgaataccacgaacagccagaggaattgaccaacgccctggaaattagcaatatagtgtttaccagtctgttcgcactcgagatgctactgaaactgctcgtctatggcccttttggctacatcaagaacccctataacatttttgatggcgtgatcgttgtcatcagcgtctgggagattgtagggcagcaaggcgggggcctaagcgtgctgcggacgtttcgcctcatgcgcgtcctcaaactcgtgaggtttctgcccgccctgcaaaggcagttagttgtcctgatgaaaactatggacaacgtggcaaccttttgtatgcttctcatgctcttcatattcattttttctatcctgggcatgcaccttttcggctgtaagttcgcctctgagcgagatggagatacactgcccgatagaaaaaacttcgatagtctcctatgggcaattgtgacagtctttcagatcctgacccaggaagactggaacaaagttctctacaacggcatggcttcaacatcttcctgggccgcactgtacttcattgccctgatgacattcggaaactacgtgttattcaatctactggtcgccatcttggtcgaggggttccaggccgaggagatcagcaagagggaggatgcatctgggcagttgtcatgcatccaactgccagttgattcccagggaggagatgcaaacaaaagcgaaagcgaaccagacttcttcagccctagtttggatggtgacggagaccgaaagaagtgtcttgccctggtgagcctgggtgagcaccccgagctgagaaagagtttattgcccccccttatcatccacactgcagcaaccccaatgagtctgcccaagagcacgagcacagggctgggagaagcactaggcccagcgtccaggcgaaccagttcatctggtagcgctgaaccgggtgccgcacatgaaatgaagtcgccccccagcgctcgcagctccccccattccccttggtcggcagcaagcagctggactagtcgacgctcgtcaaggaattccctggggcgggctccttcattaaagaggcgcagtccaagcggagagagacgctcattgctgtcaggcgaggggcaagaaagtcaagacgaagaggagtccagtgaggaggaacgcgcaagccccgcaggctccgatcatagacatcgtggctctctcgagagggaagcaaaatcaagtttcgatctccccgacacactacaggtgcccgggcttcacaggacagcttcagggaggggatctgcatccgaacaccaggactgtaatggaaagtcagccagtgggcggctagctcgagccctgcgacctgatgatccccccctggatggtgatgacgccgatgacgagggtaacctgtcaaagggtgagcgagttagagcttggatcagggcgcgcctgccagcctgctgtttggaacgtgacagctggtcagcatacatctttcctcctcagtctcgctttcggctgctgtgccacaggattatcacccacaaaatgtttgaccatgtggttctcgtgattatttttctcaactgcatcaccattgcgatggaacgacccaagattgaccctcacagtgctgagcgcatctttcttacactcagcaattacattttcaccgcagtttttctcgcagaaatgactgtgaaagtggtggctctgggatggtgcttcggcgagcaagcctacctgcgatcatcatggaatgtgctggatggactgcttgtgctcatttcagttattgacattcttgtgagtatggtgtccgactccggcacaaaaattctgggaatgctcagggttctccgacttttgcgaaccctgaggcctctcagggtaatttctcgcgcccagggtctcaagctggtggtggagactttgatgtcctccctgaagcctattggcaatatcgtcgtcatctgctgcgctttctttatcatattcgggatattgggagtgcagctttttaaagggaaattcttcgtctgccagggtgaagacacaagaaatatcacgaacaagtccgactgcgccgaggcttcataccgatgggtgcgccacaagtacaattttgacaatttgggccaggtcagtccaaggcttcgcgggggtgccgtggtgaaagaagcagggggtggcacagggccatgtctcgttattcctgcagacagcgggggaggggggctccacgaggaaatttcaccctcccatccactgctctcgaaccatcagcatgtggccaaaccatctccaagtcatagtgcaccaaaaagcggcccaatgggcagcctggctgtgttgaaagatgaggagactgaggcccagcgggggtag

SEQ ID NO: 318240 - DNA, 4668 bp, Artificial Sequence
  derived and/or modified sequence
atggatgaggaggaggatggagctggagctgaggagagcggccagcccaggagcttcatgaggctgaatgacctgagcggggccggcggccggcccggccctggcagcgctgagaaggaccccggcagcgctgacagcgaggccgagggcctgccctacccagccctggcccctgtggtgttcttctacctgagccaggacagccggcccaggtcctggtgcctgaggacagtgtgcaacccctggtttgagcgcatctccatgctggtgatcctgctgaactgtgtgaccctgggcatgttccggccctgtgaagatattgcctgtgacagccagcgctgccgcatcctgcaggcctttgatgacttcatctttgccttctttgctgtggagatggtggtgaagatggtggccctgggcatctttgggaagaagtgctacctgggggacacctggaaccggctggacttcttcatcgtgattgctggcatgctggagtacagcctggacctgcagaatgtgtccttctctgctgtgaggacagtgcgggtgctgcggcccctgcgggccatcaacagagtgcccagcatgaggatcctggtgaccctgctgctggacaccctgcccatgctgggcaatgtgctgctgctgtgcttctttgtgttcttcatctttggaattgtgggcgtgcagctgtgggccggcctgctgaggaaccgctgcttcctgcctgagaacttcagcctgcccctgtctgtggacctggagcgctactaccagacagaaaatgaagatgagagccccttcatctgcagccagccccgggagaatggcatgaggagctgccgctctgtgcccaccctgcggggagatggcggcggcggccccccctgtggcctggactatgaggcctacaacagcagcagcaacaccacctgtgtgaactggaaccagtactacaccaactgcagcgctggggagcacaaccccttcaagggggccatcaactttgacaacatcggctacgcctggatcgccatcttccaggtgatcaccctggagggctgggtggacatcatgtactttgtgatggatgcccacagcttctacaacttcatctacttcatcctgctgatcatcgtgggcagcttcttcatgatcaacctgtgcctggtggtgattgccacccagttcagcgagaccaagcagcgggagagccagctgatgagggagcagagggtgcgcttcctgagcaatgccagcaccctggccagcttcagcgagcccggcagctgctatgaggagctgctgaagtacctggtgtacatcctgaggaaggccgcccggcggctggcccaggtgtccagagctgctggggtgcgggtgggcctgctgagcagccctgcccccctgggcggccaggagacccagcccagcagcagctgcagccgcagccaccggcggctgtctgtgcaccacctggtgcaccaccaccaccaccaccaccaccactaccacctgggcaatggcaccctgcgggccccccgggccagccctgagatccaggacagagatgccaacggcagccggcggctgatgctgcccccacccagcaccccagccctgagcggggcccctcctggaggagctgagagcgtgcacagcttctaccacgccgactgccacctggagcctgtgcgctgccaggcccccccacccaggagccccagcgaggccagcggccgcacagtgggcagcggcaaggtgtaccccaccgtgcacaccagccccccacctgagaccctgaaggagaaggccctggtggaggtggccgccagcagcggcccccccaccctgaccagcctgaacatccccccaggcccctacagctccatgcacaagctgctggagacccagagcactggagcctgccagagcagctgcaagatcagcagcccctgcctgaaggctgacagcggggcctgtggccctgacagctgcccctactgtgcccgggccggggccggggaggtggagctggccgaccgggagatgccagacagcgacagcgaggccgtgtatgagttcacccaggatgcccagcacagcgacctgcgggacccccacagccggcggcagaggagcctgggcccagatgctgagcccagctctgtgctggccttctggaggctcatctgtgacaccttcaggaagatcgtggacagcaagtacttcggccggggcatcatgattgccatcctggtgaacaccctgtccatgggcatcgagtaccacgagcagcctgaggagctgaccaatgccctggagatcagcaacatcgtgttcaccagcctgtttgccctggagatgctgctgaagctgctggtgtatggccccttcggctacatcaagaacccctacaacatctttgatggagtcatcgtggtgatctctgtgtgggagatcgtgggccagcagggcggcggcctgtctgtgctgcggaccttccggctgatgagggtgctgaagctggtgcgcttcctgcctgccctgcagaggcagctggtggtgctgatgaagaccatggacaacgtggccaccttctgcatgctgctgatgctgttcatcttcatcttcagcatcctgggcatgcacctgtttggctgcaagtttgccagcgagagagatggagacaccctgcctgacaggaagaactttgacagcctgctgtgggccatcgtgacagtgttccagatcctgacccaggaggactggaacaaggtgctgtacaacggcatggccagcaccagctcctgggccgccctgtacttcatcgccctgatgaccttcggcaactacgtgctcttcaacctgctggtggccatcctggtggagggcttccaggccgaggagatcagcaagcgggaggatgccagcggccagctgagctgcatccagctgcctgtggacagccagggcggagatgccaacaagtctgagagcgagccagacttcttcagccccagcctggatggagatggagacaggaagaagtgcctggccctggtgtccctgggggagcaccctgagctgaggaagagcctgctgcccccactcatcatccacacagctgccacccccatgagcctgcccaagagcaccagcacaggcctgggggaggccctgggccctgccagcaggaggaccagcagcagcggcagcgctgagcctggagctgcccacgagatgaagagcccccccagcgcccggagcagcccccacagcccctggagcgctgccagctcctggaccagccgccgcagcagcaggaacagcctgggccgggcccccagcctgaagagaagaagccccagcggggagcggcgcagcctgctgtctggagagggccaggagagccaggatgaggaggagagcagcgaggaggagcgggccagccctgctggcagtgaccaccgccaccggggcagcctggagcgggaggccaagagcagctttgacctgcctgacaccctgcaggtgcccggcctgcacaggacagccagcggccggggcagcgccagcgagcaccaggactgcaatggcaagagcgccagcggccgcctggcccgggccctgcggccagatgatcctcccctggatggagatgatgctgatgatgagggcaacctgagcaagggggagcgggtgcgggcctggatccgggcccggctgcctgcctgctgcctggagcgggacagctggagcgcctacatcttccccccccagagccgcttccggctgctgtgccaccgcatcatcacccacaagatgtttgaccacgtggtgctggtgatcatcttcctgaactgcatcaccatcgccatggagcggcccaagattgacccccacagcgctgagcgcatcttcctgaccctgagcaactacatcttcaccgctgtgttcctggccgagatgacagtgaaggtggtggccctgggctggtgcttcggggagcaggcctacctgcggagctcctggaatgtgctggatggcctgctggtgctgatctctgtgattgacatcctggtgtccatggtgtctgattctggcaccaagatcctgggcatgctgcgggtgctgcggctgctgcggaccctgcggcccctgcgggtcatcagccgggcccagggcctgaagctggtggtggagaccctgatgagcagcctgaagcccatcggcaacatcgtggtgatctgctgtgccttcttcatcatcttcggcatcctgggcgtgcagctgttcaagggcaagttctttgtgtgccagggcgaggacaccaggaacatcaccaacaagagtgactgtgccgaggccagctaccgctgggtgcgccacaagtacaactttgacaacctgggccaggtgagcccccggctgcggggcggcgctgtggtgaaggaggccggcggcggcaccggcccctgcctggtgatcccagctgacagcggcggcggcggcctgcacgaggagatcagccccagccaccccctgctgagcaaccaccagcacgtggccaagcccagccccagccacagcgcccccaagagcggccccatgggcagcctggccgtgctgaaggatgaggagacagaggcccagaggggctag

SEQ ID NO: 318241 - DNA, 4668 bp, Artificial Sequence
  derived and/or modified sequence
atggacgaggaggaggacggcgccggcgccgaggagagcggccagcctaggtccttcatgcggctgaatgatctttctggagcaggcggccggcccggccctgggtccgcagagaaggaccctggatccgccgattcagaggccgaggggctgccctaccctgctctggccccagtcgtgttcttctacctgtcacaggactctaggccccggagctggtgcctccgtactgtctgtaacccctggttcgagcgcatcagtatgttggttatattgcttaactgcgtcacactgggtatgtttcggccgtgcgaagacattgcctgcgacagtcagcgttgccgaatactgcaggcattcgacgactttatcttcgccttttttgctgtggagatggtggtgaagatggttgctcttggcatcttcgggaaaaaatgctacctgggggatacctggaacagactcgatttcttcatcgtaattgctggcatgctggaatatagtctcgacctacagaatgtctccttctctgccgtgcgaactgtgcgtgtactgcggcctctgagagccattaatcgcgtaccatcaatgagaatcctggtaactctcttactggacactctccctatgctcgggaacgtcctgcttctttgttttttcgttttctttatttttggaattgtcggcgtccaactgtgggctggcctgctgcgcaatcggtgtttcctgccggaaaattttagcctccctttatcagtggacctcgagagatattaccagacagagaacgaagatgaatctccattcatttgcagccaaccaagggaaaacggtatgcgcagctgtcgaagcgtccctactcttagaggggacggtggtggcggccccccctgtgggctggactatgaagcttacaattcatcaagtaacacaacgtgcgtgaattggaaccaatactatactaactgttccgccggagaacacaatccctttaagggagctattaatttcgataatatcgggtatgcttggattgccatctttcaggtgataacactggaagggtgggtggacattatgtattttgtgatggacgctcatagcttttataactttatctattttatcttacttatcatcgtggggtcctttttcatgattaacctctgcttggtggttatagccacccagttttccgagacaaagcagagagagagccagctgatgagagaacaacgggtgagatttcttagtaacgcgagtacactggccagcttcagtgagcctggttcctgctacgaggagctgttaaaatacctcgtttacattttacggaaggcagccagacgactggcccaggtcagtcgcgccgcgggagtccgcgtggggcttctcagctctccggctccgctggggggacaggaaacccaaccctcgtctagctgttcccgcagtcatcggcgtctgtcagttcatcacttggttcaccaccatcaccatcatcaccaccactatcatctggggaatgggacgctccgcgccccacgagcaagccctgagatccaggacagagatgctaatggcagtagacgtttgatgttgccaccaccatctacccctgcattgagtggtgcaccacccgggggggcagagtctgttcacagcttctaccacgccgattgccatctcgagccagtgcgatgccaggctccccctccacggtctccgagtgaggcatcagggcgcaccgtaggaagtgggaaggtgtatcccacagtgcatacatcccctccccccgagactctgaaagaaaaagctctcgtggaagtcgccgcttcctccggcccccctaccttaacgtctctcaatatcccgccaggtccctactcttctatgcacaagctcttagaaacccagagtaccggtgcttgccaatccagttgcaagatcagttctccctgcctgaaagcagattcaggcgcctgcggaccagacagctgtccctattgcgccagggcaggagccggtgaagtggagctagccgatcgggaaatgcccgatagcgattcagaggccgtctatgagttcacacaagatgcccagcacagcgatcttcgcgatccccactcccgtagacagagaagcctaggtcctgacgctgagccatcttcagtgctggccttctggcgcctgatctgcgacaccttcagaaagatcgtggatagcaagtactttggtagggggatcatgatcgctattcttgtgaatactctgagcatgggcatcgagtaccacgagcaacctgaggaattaactaatgcgttggagataagcaatattgtatttactagcctattcgcccttgagatgcttttaaagttattggtctatggccctttcggctatattaagaacccttacaatatttttgacggagtgattgtggtgatcagtgtttgggagattgtgggtcaacagggaggcgggttaagcgtccttaggaccttcagactaatgcgcgtattgaagctagtgcgcttcctcccagcccttcagagacagctggtggttctgatgaaaaccatggataacgtagccacattttgcatgttgcttatgttatttatatttatcttttctatcctgggtatgcatctgtttggctgcaaattcgcatccgaacgtgatggagacacattgcccgacagaaagaatttcgacagtctgctgtgggccattgtgactgtgtttcagatcctgactcaggaagattggaacaaagtgctgtacaacggcatggcatctacatctagctgggcagcactgtattttattgccctcatgacatttgggaattacgtcctcttcaatctgctcgtcgctattcttgtggaaggtttccaggctgaagagatttccaagcgggaggacgcatctggtcagttaagttgtatccagctgcccgtcgactctcagggtggagatgcgaacaagagcgagagtgagcctgacttctttagcccatcgctggacggtgatggcgatagaaaaaagtgcctcgcgttggtgagccttggcgaacaccccgaactgagaaaaagtttactacctccactcatcatccataccgccgctaccccgatgtcccttcctaaatccacctccacaggtctgggcgaggccctaggacccgcctctcgccgaacgtcctcgagcggatctgctgagccgggcgcagcccacgagatgaaaagtccgccaagcgccagatcctcacctcactctccttggagcgcagcatctagctggacctctaggcgctctagccgaaactcactggggcgcgctcccagcctgaaaagacgctctccttcaggcgagaggagaagcctgctcagcggggaaggacaggagtcccaagatgaggaagagtccagcgaagaagagcgggcttcgccagccggctcagaccaccgacacaggggtagtttagagagggaagcaaaatcttctttcgacctgccagacaccctccaggtgcccggcctccatagaacagctagcggccggggttctgcatccgaacatcaggactgcaacgggaaaagcgctagcggaagactagcgagggcactcaggccggacgatcctcctttggacggtgatgatgcagacgacgagggcaatctttcaaaaggcgaaagggtcagagcctggattcgggcccggctgcctgcatgctgtctggaaagagactcgtggtctgcctacatctttcctcctcaaagccggtttcggttgctgtgtcacagaataatcacacacaagatgttcgatcatgtcgtgctggttataatttttctgaattgtatcaccatcgcgatggagagacctaagatagaccctcactccgccgagcggattttcttaaccttgtctaactatatttttacagcggttttcctggcggagatgacagtgaaggtcgtcgcactgggctggtgcttcggcgagcaggcgtatctccgtagctcatggaacgtactcgatggactgttggtcctgatctccgtgatcgacatcctcgtctccatggtgagtgactcaggtacaaagatactggggatgctgcgggtgcttcggctattgcgtacgctcaggcctcttcgtgttattagccgagcccagggcctgaagctggtggttgagactctcatgtcttctctcaagcccattgggaacatcgtagtgatctgttgcgccttttttatcatcttcggtatacttggtgtgcagctgttcaaaggcaagttttttgtgtgtcaaggagaagacacaaggaacatcaccaacaagagcgactgcgctgaggccagctatagatgggttcgacacaagtataacttcgacaatctcgggcaagtctctcctcggcttcggggcggcgctgtggtgaaggaggcaggcggcgggaccggaccctgcctcgtgatccctgcagacagcggtggtggtgggctccatgaggagatctctccgagtcatcctttgttaagtaaccaccaacatgtggcaaagccctctccttcacactccgctcctaagtccggtcctatgggatccctagccgttttgaaggatgaagagacagaggcacaaaggggatag

SEQ ID NO: 318242 - DNA, 4668 bp, Artificial Sequence
  derived and/or modified sequence
atggacgaggaagaagatggagctggagccgaggaatcaggacagccaaggtcttttatgagactgaatgatctgagtggggcagggggtcggcctgggccagggagcgctgagaaggaccccggaagcgctgattctgaagccgaaggactgccataccccgctctggccccagtggtctttttctacttgtcccaggatagtagaccacgctcatggtgtttgcggactgtgtgtaacccatggttcgagcggatcagcatgcttgtgatcctgcttaattgcgtgacactgggaatgttccgtccatgtgaagatatcgcctgtgacagccagcgttgtcgcatcctccaggcttttgacgactttatatttgcattctttgcagtggaaatggttgtgaagatggtcgcattgggcatttttggtaaaaagtgctaccttggggacacctggaacaggctcgacttcttcatcgtcatagccggaatgctggagtattctctggacttacagaacgtttctttctctgccgttcgtaccgtccgggtgctcaggcccctgagagctatcaaccgtgtgccgtcaatgaggatcctggtgactttgcttctagacacattgcctatgctcggtaacgtcctgctgctttgcttcttcgtgttttttattttcgggatcgtgggagtgcaattatgggcagggcttttgaggaacaggtgcttcttgcctgaaaacttctccttacccttgtctgtcgacctggagcggtactaccagaccgaaaatgaagacgagtcaccttttatatgctcgcaacccagggaaaatggcatgagatcgtgcagatccgtgccaaccttacgtggtgacggcggtgggggaccgccatgtggcctggactacgaggcctataactctagctccaataccacttgcgtcaattggaatcagtattacacgaattgtagcgcaggggaacacaatccatttaagggggctattaacttcgacaatatcggatatgcctggatcgctatattccaggtgatcacattggaaggctgggttgacataatgtactttgtgatggatgcccacagcttttacaatttcatatattttatactgctgatcatcgtcgggagcttctttatgatcaacttgtgtctggtcgtgatcgctacgcagttctcagagaccaagcagcgcgaaagccagctgatgcgggaacagcgggtcagattcctgtctaacgcttccacactcgcgagcttctctgaaccgggatcgtgctacgaggagctcctgaagtatctggtctacattttacgcaaggcagctcgcaggctggcccaggtctctagagcggctggcgtgcgcgtgggcctgcttagcagtcccgcaccactggggggacaagaaacacagccaagctcgtcctgctctaggtcccatagaagactgagcgtgcatcacctggtacatcaccatcaccatcaccaccaccattatcatctcggaaacgggactcttagagcacccagggcctctcctgagattcaagatcgggatgccaacggaagcagacggttaatgctcccaccaccatcaacacctgcactttctggggctccaccaggcggagctgagtcagtgcattccttctaccacgcagactgtcacttggagccagtacggtgccaggcaccgcctccccgatctccaagtgaggcctccgggcgaaccgtgggttctgggaaggtttacccaacagtgcatacctctcctccgcctgagactctcaaggagaaggcacttgtggaggtggccgcttcttccggtccgccaacactgacgagcttgaatattcctccagggccttactcatcaatgcacaaactccttgagacacagtctacaggcgcttgtcaatcctcatgtaagataagctccccttgcttgaaggcagacagtggggcttgcgggcctgatagctgcccctattgcgctcgggctggcgctggtgaggtggagctggccgacagagagatgcctgactcagattctgaggccgtttacgagttcacacaggacgctcagcacagcgatttgcgggacccacactcacgccgacagagatctttggggcctgatgcggagcccagtagtgtgctggccttctggcggcttatatgcgacacattcaggaagatagtggatagtaagtacttcggcagaggcatcatgatcgccattctggtcaacactctaagcatggggatagagtatcacgagcaaccagaagaactgaccaacgcactggagatcagtaacatcgtgtttacatccctgtttgccttagaaatgcttttaaagctgttggtgtacggccctttcgggtatattaagaatccctacaatatcttcgacggtgtcatcgtggtgatcagcgtgtgggaaattgtgggacagcaggggggtggtttatccgttctgaggaccttccgtctgatgagggttttgaagctggtaaggtttctgccggcacttcaacgccagctggtggtgctaatgaaaacaatggataacgttgctacattttgcatgctcctaatgttgtttatattcatctttagtatcttgggaatgcatctatttggatgcaagtttgcttccgagcgtgacggcgacactctgccggataggaagaattttgacagcctgctctgggctattgtgacagtgtttcagattctgacccaagaagactggaacaaggtcctttataacggcatggcttcaaccagctcgtgggctgccctgtactttatagcccttatgacgttcggaaattacgtgctgttcaacctgcttgtggcgatcctagtagaggggttccaggccgaagagatctctaaacgcgaggatgccagtggccagctgtcgtgtatacaattgcccgtggactcacaaggcggtgatgctaacaagtctgagtctgagcctgactttttttcacccagcctcgatggagacggcgataggaaaaagtgtcttgcactggtgagcctaggagaacaccccgagctccgcaagagtctgcttcctcccctgatcatccatacggctgcaacaccaatgtccctcccaaagtctacctcaaccggcctaggggaggccctgggaccagcttcacggaggacctcttcctctgggagcgctgagcccggagccgctcacgaaatgaaaagccccccaagcgctaggagctcccctcactcaccttggtctgccgctagcagttggacttcgagacgttctagcaggaatagtcttggaagggcgcctagtttgaaacgtagatccccaagcggagagcgccgaagcctcctgtctggagagggccaggaatctcaagatgaggaagaatcctcagaggaggagcgcgctagccccgcaggaagcgatcacaggcatcgcggttctttagaaagagaggccaaaagtagcttcgatctgcctgacacgctgcaggtgcccggattgcatcgaacggcgtccggacgtggctcggccagtgaacaccaagactgcaatgggaaatctgcttccggcaggctcgcaagggctctacgtcctgacgaccctccgctggacggtgacgacgctgacgacgaggggaacttgagcaaaggagagagggtgagagcttggatcagagcacgcctcccggcatgctgcctggaacgggactcctggagcgcatacattttcccccctcagtccaggtttcggctgctttgtcataggattatcacacacaaaatgttcgaccatgtcgtgctcgttatcatttttttgaattgcataacaattgccatggaacgcccaaagatagaccctcactccgcagagcgcatctttttaaccttgagtaattacatttttactgcagtattcctggcagagatgacagttaaagtagtggccctaggatggtgttttggcgagcaggcctaccttcggagcagctggaatgtgcttgacggactgctagtgcttatctctgtaatcgatatcttggtgtctatggtgagcgatagcggtaccaagatattggggatgctgcgggtcctgagactgctgcggactctacgcccactgcgcgtgatctctagggcccagggactgaaattggtggttgagactctcatgagtagcctcaaacccattggcaatatagtcgtcatttgttgcgcgtttttcatcatatttggcatcctgggagttcagctgtttaagggcaaattctttgtttgtcaaggcgaagacacccgcaacattacgaacaagagcgactgtgcagaggccagttaccggtgggtccgtcacaagtacaactttgacaacttaggccaggtgtccccccgtctgaggggcggagccgtggtcaaagaagcaggcggtggtactggcccatgtctggtcatacccgcagacagtggcggagggggacttcatgaagagatatccccatcccatcccctactcagcaaccaccagcatgtggctaagccatccccttctcactccgctccaaagtcaggccctatggggtccctggctgttttgaaggacgaggaaacggaggcgcagaggggatag

SEQ ID NO: 318243 - DNA, 5243 bp, Artificial Sequence
  derived and/or modified sequence
ccttttcgttcgccctctcggggcggcttcgccgaaggtagcgccgaatccggcaaccggagcctgggcgcgaagcgaagaagccggaacaaagtgagggggagccggccggctggcccgggaagccccaggggcgcaggggaagcgggactcgcgccgggcggggtttccctgcgccccggcgccccgcgggcagcatgcccctgcgggcagggggagctgggctgaactggccctcccgggggctcagcttgcgccctagagcccaccagatgtgcccccgccggggcccccgggttgcgtgaggacacctcctctgaggggcgccgcttgcccctctccggatcgcccggggccccggctggccagaggatggacgaggaggaggatggagcgggcgccgaggagtcgggacagccccggagcttcatgcggctcaacgacctgtcgggggccgggggccggccggggccggggtcagcagaaaaggacccgggcagcgcggactccgaggcggaggggctgccgtacccggcgctggccccggtggttttcttctacttgagccaggacagccgcccgcggagctggtgtctccgcacggtctgtaacccctggtttgagcgcatcagcatgttggtcatccttctcaactgcgtgaccctgggcatgttccggccatgcgaggacatcgcctgtgactcccagcgctgccggatcctgcaggcctttgatgacttcatctttgccttctttgccgtggagatggtggtgaagatggtggccttgggcatctttgggaaaaagtgttacctgggagacacttggaaccggcttgactttttcatcgtcatcgcagggatgctggagtactcgctggacctgcagaacgtcagcttctcagctgtcaggacagtccgtgtgctgcgaccgctcagggccattaaccgggtgcccagcatgcgcatccttgtcacgttgctgctggatacgctgcccatgctgggcaacgtcctgctgctctgcttcttcgtcttcttcatcttcggcatcgtcggcgtccagctgtgggcagggctgcttcggaaccgatgcttcctacctgagaatttcagcctccccctgagcgtggacctggagcgctattaccagacagagaacgaggatgagagccccttcatctgctcccagccacgcgagaacggcatgcggtcctgcagaagcgtgcccacgctgcgcggggacgggggcggtggcccaccttgcggtctggactatgaggcctacaacagctccagcaacaccacctgtgtcaactggaaccagtactacaccaactgctcagcgggggagcacaaccccttcaagggcgccatcaactttgacaacattggctatgcctggatcgccatcttccaggtcatcacgctggagggctgggtcgacatcatgtactttgtgatggatgctcattccttctacaatttcatctacttcatcctcctcatcatcgtgggctccttcttcatgatcaacctgtgcctggtggtgattgccacgcagttctcagagaccaagcagcgggaaagccagctgatgcgggagcagcgtgtgcggttcctgtccaacgccagcaccctggctagcttctctgagcccggcagctgctatgaggagctgctcaagtacctggtgtacatccttcgtaaggcagcccgcaggctggctcaggtctctcgggcagcaggtgtgcgggttgggctgctcagcagcccagcacccctcgggggccaggagacccagcccagcagcagctgctctcgctcccaccgccgcctatccgtccaccacctggtgcaccaccaccaccaccatcaccaccactaccacctgggcaatgggacgctcagggccccccgggccagcccggagatccaggacagggatgccaatgggtcccgccggctcatgctgccaccaccctcgacgcctgccctctccggggccccccctggtggcgcagagtctgtgcacagcttctaccatgccgactgccacttagagccagtccgctgccaggcgccccctcccaggtccccatctgaggcatccggcaggactgtgggcagcgggaaggtgtatcccaccgtgcacaccagccctccaccggagacgctgaaggagaaggcactagtagaggtggctgccagctctgggcccccaaccctcaccagcctcaacatcccacccgggccctacagctccatgcacaagctgctggagacacagagtacaggtgcctgccaaagctcttgcaagatctccagcccttgcttgaaagcagacagtggagcctgtggtccagacagctgcccctactgtgcccgggccggggcaggggaggtggagctcgccgaccgtgaaatgcctgactcagacagcgaggcagtttatgagttcacacaggatgcccagcacagcgacctccgggacccccacagccggcggcaacggagcctgggcccagatgcagagcccagctctgtgctggccttctggaggctaatctgtgacaccttccgaaagattgtggacagcaagtactttggccggggaatcatgatcgccatcctggtcaacacactcagcatgggcatcgaataccacgagcagcccgaggagcttaccaacgccctagaaatcagcaacatcgtcttcaccagcctctttgccctggagatgctgctgaagctgcttgtgtatggtccctttggctacatcaagaatccctacaacatcttcgatggtgtcattgtggtcatcagcgtgtgggagatcgtgggccagcaggggggcggcctgtcggtgctgcggaccttccgcctgatgcgtgtgctgaagctggtgcgcttcctgccggcgctgcagcggcagctggtggtgctcatgaagaccatggacaacgtggccaccttctgcatgctgcttatgctcttcatcttcatcttcagcatcctgggcatgcatctcttcggctgcaagtttgcctctgagcgggatggggacaccctgccagaccggaagaattttgactccttgctctgggccatcgtcactgtctttcagatcctgacccaggaggactggaacaaagtcctctacaatggtatggcctccacgtcgtcctgggcggccctttatttcattgccctcatgaccttcggcaactacgtgctcttcaatttgctggtcgccattctggtggagggcttccaggcggaggaaatcagcaaacgggaagatgcgagtggacagttaagctgtattcagctgcctgtcgactcccaggggggagatgccaacaagtccgaatcagagcccgatttcttctcacccagcctggatggtgatggggacaggaagaagtgcttggccttggtgtccctgggagagcacccggagctgcggaagagcctgctgccgcctctcatcatccacacggccgccacacccatgtcgctgcccaagagcaccagcacgggcctgggcgaggcgctgggccctgcgtcgcgccgcaccagcagcagcgggtcggcagagcctggggcggcccacgagatgaagtcaccgcccagcgcccgcagctctccgcacagcccctggagcgctgcaagcagctggaccagcaggcgctccagccggaacagcctcggccgtgcacccagcctgaagcggagaagcccaagtggagagcggcggtccctgttgtcgggagaaggccaggagagccaggatgaagaggagagctcagaagaggagcgggccagccctgcgggcagtgaccatcgccacagggggtccctggagcgggaggccaagagttcctttgacctgccagacacactgcaggtgccagggctgcatcgcactgccagtggccgagggtctgcttctgagcaccaggactgcaatggcaagtcggcttcagggcgcctggcccgggccctgcggcctgatgaccccccactggatggggatgacgccgatgacgagggcaacctgagcaaaggggaacgggtccgcgcgtggatccgagcccgactccctgcctgctgcctcgagcgagactcctggtcagcctacatcttccctcctcagtccaggttccgcctcctgtgtcaccggatcatcacccacaagatgttcgaccacgtggtccttgtcatcatcttccttaactgcatcaccatcgccatggagcgccccaaaattgacccccacagcgctgaacgcatcttcctgaccctctccaattacatcttcaccgcagtctttctggctgaaatgacagtgaaggtggtggcactgggctggtgcttcggggagcaggcgtacctgcggagcagttggaacgtgctggacgggctgttggtgctcatctccgtcatcgacattctggtgtccatggtctctgacagcggcaccaagatcctgggcatgctgagggtgctgcggctgctgcggaccctgcgcccgctcagggtgatcagccgggcgcaggggctgaagctggtggtggagacgctgatgtcctcactgaaacccatcggcaacattgtagtcatctgctgtgccttcttcatcattttcggcatcttgggggtgcagctcttcaaagggaagtttttcgtgtgccagggcgaggataccaggaacatcaccaataaatcggactgtgccgaggccagttaccggtgggtccggcacaagtacaactttgacaaccttggccaggtgagccccaggctcagaggtggggctgtggtgaaggaggctggagggggcacagggccatgcttagtgatacctgctgactccggtggaggtgggctccacgaagagatcagcccttcacaccctctgctgtctaaccaccagcatgtcgcaaagcccagtccatcccacagtgccccaaaaagtgggcccatggggtctctagccgtccttaaagatgaagaaacagaggctcagagagggtaaggggcttgcccagggccacagagctacatggtggagcaggaagcacacgtggcagtgggggcaggcagccctggatgtgaatcctgtgcaaatcctgaccccaccattgtcagctcaatgacctggagcagctgacttaccagggcctcagtttcattaactggtgaatggagtcataatagaatctcctcggaggtcacaat

SEQ ID NO: 318244 - protein, 946 aa, Artificial Sequence
  derived and/or modified sequence
MAVMEMACPGAPGSAVGQQKELPKAKEKTPPLGKKQSSVYKLEAVEKSPVFCGKWEILNDVITKGTAKEGSEAGPAAISIIAQAECENSQEFSPTFSERIFIAGSKQYSQSESLDQIPNNVAHATEGKMARVCWKGKRRSKARKKRKKKSSKSLAHAGVALAKPLPRTPEQESCTIPVQEDESPLGAPYVRNTPQFTKPLKEPGLGQLCFKQLGEGLRALPRSELHKLISPLQCLNHVWKLHHPQDGGPLPLPTHPFPYSRLPHPFPFHPLQPWKPHPLESFLGKLACVDSQKPLPDPHLSKLACVDSPKPLPGPHLEPSCLSRGAHEKFSVEEYLVHALQGSVSSGQAHSLTSLAKTWAARGSRSREPSPKTEDNEGVLLTEKLKPVDYEYREEVHWATHQLRLGRGSFGEVHRMEDKQTGFQCAVKKVRLEVFRAEELMACAGLTSPRIVPLYGAVREGPWVNIFMELLEGGSLGQLVKEQGCLPEDRALYYLGQALEGLEYLHSRRILHGDVKADNVLLSSDGSHAALCDFGHAVCLQPDGLGKSLLTGDYIPGTETHMAPEVVLGRSCDAKVDVWSSCCMMLHMLNGCHPWTQFFRGPLCLKIASEPPPVREIPPSCAPLTAQAIQEGLRKEPIHRVSAAELGGKVNRALQQVGGLKSPWRGEYKEPRHPPPNQANYHQTLHAQPRELSPRAPGPRPAEETTGRAPKLQPPLPPEPPEPNKSPPLTLSKEESGMWEPLPLSSLEPAPARNPSSPERKATVPEQELQQLEIELFLNSLSQPFSLEEQEQILSCLSIDSLSLSDDSEKNPSKASQSSRDTLSSGVHSWSSQAEARSSSWNMVLARGRPTDTPSYFNGVKVQIQSLNGEHLHIREFHRVKVGDIATGISSQIPAAAFSLVTKDGQPVRYDMEVPDSGIDLQCTLAPDGSFAWSWRVKHGQLENRP

SEQ ID NO: 318245 - protein, 433 aa, Artificial Sequence
  derived and/or modified sequence
CFKQLGEGLRALPRSELHKLISPLQCLNHVWKLHHPQDGGPLPLPTHHPFPFHPLQPWKPHPLESFLGKLACVDSQKPLPDPHLSKLACVDSPKPLPGPHLEPSCLSRGAHEKFSVEEYLVHALQGSVSSGQAHSLTSLAKTWAARGSRSREPSPKTEDNEGVLLTEKLKPVDYEYREEVHWATHQLRLGRGSFGEVHRMEDKQTGFQCAVKKVRLEVFRAEELMACAGLTSPRIVPLYGAVREGPWVNIFMELLEGGSLGQLVKEQGCLPEDRALYYLGQALEGLEYLHSRRILHGDVKADNVLLSSDGSHAALCDFGHAVCLQPDGLGKSLLTGDYIPGTETHMAPEVVLGRSCDAKVDVWSSCCMMLHMLNGCHPWTQFFRGPLCLKVGDGTQHGQQGELQGPGAQAAGWRGCSAVADGARGGLVIHVGS

SEQ ID NO: 318246 - DNA, 2841 bp, Artificial Sequence
  derived and/or modified sequence
atggctgtcatggagatggcgtgccctggggcacctggatccgcggttggccaacaaaaggagctgcctaaagccaaggagaaaacacctcccctgggcaagaagcaatcctccgtctacaaactcgaagcagtggaaaagtctccagtgttctgtggcaagtgggagatattgaatgacgtgatcactaagggaactgcaaaagagggatctgaggcaggcccagccgctatttctatcatcgctcaggctgaatgtgaaaacagtcaggaattttctcctacatttagtgaaagaattttcatagccggatcaaagcagtattctcaaagcgaatccctggaccaaatccccaacaacgttgcacacgccaccgaaggcaaaatggctcgggtttgctggaaagggaaaagaagatctaaggcccggaaaaagaggaagaagaaatccagcaaaagcctggcccatgcaggcgttgcactggcaaaacctttgccaaggactccagaacaggagtcatgtaccatcccagtgcaggaggatgagtcgcctctgggggctccttatgttaggaatactccccagttcactaagccactgaaggagcctgggctcggtcaactgtgcttcaagcagctgggtgaaggcctgagggccttacctagaagtgagctgcacaaactgattagtccactgcagtgtctcaaccacgtttggaagcttcaccacccccaggatggcggtccactccctctgcccacccatccttttccatactctcgactgccccacccttttcctttccatcctctgcagccttggaagccccacccccttgaaagctttctgggaaagttggcatgtgtagatagccagaaacctctgcctgatccacacctctcaaagctggcctgtgtagactccccgaagccgctgcctggtccacatctggaaccatcatgcttgagccggggcgcccacgaaaagttcagtgtggaggaatacctggtccacgctctgcaggggagtgtgtccagcggccaagctcactccctcacctccctggccaaaacctgggccgcccgcggcagtagatcccgcgaaccttctcctaaaacagaggacaacgagggggtcttgctcacagaaaagctaaagccggtggactatgagtaccgcgaggaggtgcactgggcaacacaccaactgcgcctgggccgcggttccttcggcgaggttcataggatggaggataaacagacaggttttcagtgcgccgtaaagaaagtaaggctcgaagtgtttagggctgaggagttgatggcttgtgctggcctaacttctcccagaattgtaccgctgtatggcgcagtgcgcgaggggccatgggttaacatctttatggagctgctggaaggagggtctttgggccagctcgtcaaggagcaaggttgtctcccagaggatagagccctgtactatctgggccaggccctcgagggccttgaatacttacactcgagacgcattctgcacggcgatgtgaaagcagacaacgtgttgctatcaagcgacggctctcatgcggcactgtgtgattttggccacgctgtgtgcttgcagcccgacgggctggggaagtccctcttgacaggcgactacatacccggtaccgagacgcacatggcacccgaagtcgtgttaggccgttcatgtgatgcaaaggtggacgtatggtcctcatgctgcatgatgttgcatatgctgaacggctgtcatccttggacccagttcttcagaggtccactgtgtctgaagattgcttccgagccacctccagtgcgagagattcctcctagttgtgcacctctgacagcccaggccatccaggaaggactgcgtaaagagccaatacaccgggtgagcgcggcagaactgggaggcaaagtcaaccgggccttgcagcaagttggcggtctgaaaagcccttggagaggcgagtataaggaacccagacatccaccaccgaaccaggccaactaccaccagacacttcatgcccagccccgcgaattgagccctcgtgccccaggcccacgccccgccgaggagacaactggacgcgctcccaaattgcagccacccctgccaccagagccgcctgagccaaacaaatccccaccgctgaccctatccaaggaggagagtgggatgtgggagccattgcctttaagctctttagagcccgcgccagcaaggaatccttcttctccagagagaaaagccacagtacccgaacaggaactccagcaattggagatcgagttgttcctgaacagcctgtcgcaacccttctcactagaagagcaggagcagatactgtcgtgtctgagcattgatagtttgagtctgagcgatgactctgaaaagaacccgagtaaagcaagccagagctcccgcgataccctctctagcggcgtgcattcctggtcttcccaggctgaggccagatcctcctcttggaacatggtactcgccaggggacgtccgactgacaccccaagctacttcaacggggtcaaggtgcagatccagagcctgaacggagagcacttgcacatcagggagttccaccgcgtgaaggtcggcgatattgctacgggaatttccagtcagatcccagcagcagcctttagtctggtgactaaggacggccagcccgttcgttatgatatggaggtgccagactcaggaattgatctccagtgtaccctggctccagacggcagcttcgcgtggagctggagagtgaaacatggtcagcttgagaaccggccttag

SEQ ID NO: 318247 - DNA, 1302 bp, Artificial Sequence
  derived and/or modified sequence
tgcttcaagcaactgggagaaggattaagggcactgcctaggtcagagctccacaagctgattagtccactccaatgcctcaatcacgtatggaagctccaccacccacaggacggtggcccactgccgctgccgactcaccacccattcccatttcacccattgcaaccatggaagcctcatcccctcgaatcgttcctagggaagctggcatgcgttgattcccagaagccacttcccgatccacacttgtctaagctggcatgcgtggactccccaaagccactccccgggcctcatctggaaccgtcgtgtctgtcccgaggagcgcacgagaagttctcagtcgaagaatacttagtgcacgccttgcagggctccgtttccagcggccaggcacactcattaaccagcctagctaagacatgggctgcaaggggaagtcgcagccgagagccctctccaaaaacggaggacaacgaaggtgtcctcctcactgagaagctgaaacctgtagactacgaataccgcgaagaggttcattgggccacccatcagctgcgcctcggcaggggctcctttggagaggtacatcggatggaggataaacagacaggattccagtgtgctgtcaagaaagtgagactggaggtgtttcgggccgaggaacttatggcttgcgcgggcctgaccagtccacggatcgttcccctgtacggcgccgtgagggaaggtccatgggtcaatatcttcatggagcttctggaaggtggctcactagggcagctggtcaaagagcagggctgcctccccgaagatagggctctgtactatctcggccaggctctggagggactagagtatctccattctcggagaatactgcacggcgatgtcaaagcggataacgtgctgctctcctctgacggcagccacgccgccttgtgcgactttggacacgccgtgtgtctacagcctgacggactcggcaaatcacttctgaccggcgattacatacctggcaccgaaactcacatggcacccgaagttgtgctgggaaggtcctgtgatgccaaggtggatgtatggtcatcttgctgcatgatgctgcacatgctgaatggctgtcatccctggactcagttctttagagggccactttgtcttaaagtgggcgatggcacgcagcacgggcagcagggcgagctgcagggccctggcgctcaggccgccgggtggcggggctgctccgctgtggccgatggtgcccgagggggcctggtaattcacgtgggctcatag

SEQ ID NO: 318248 - DNA, 2841 bp, Artificial Sequence
  derived and/or modified sequence
atggctgtgatggagatggcctgccctggggcccctggcagcgctgtgggccagcagaaggagctgcccaaggccaaggagaagaccccacccctgggcaagaagcagagctctgtgtacaagctggaggccgtggagaagagccctgtgttctgtgggaagtgggagatcctgaatgatgtgatcaccaagggcacagccaaggagggcagcgaggccggccctgctgccatcagcatcatcgcccaggctgaatgtgagaacagccaggagttcagccccaccttcagcgagcgcatcttcatcgccggcagcaagcagtacagccagagcgagagcctggaccagatccccaacaacgtggcccacgccacagagggcaagatggcccgggtgtgctggaagggcaagaggaggagcaaggccaggaagaagaggaagaagaagagcagcaagagcctggcccatgctggggtggccctggccaagcccctgcccaggaccccagagcaggagagctgcaccatccctgtgcaggaggatgagagccccctgggcgccccctacgtgaggaacaccccccagttcaccaagcccctgaaggagcccggcctgggccagctgtgcttcaagcagctgggggagggcctgcgggccctgcccaggtctgagctgcacaagctgatcagccccctgcagtgcctgaaccacgtgtggaagctgcaccacccccaggacggcggccccctgcccctgcccacccaccccttcccctacagccggctgccccaccccttccccttccaccccctgcagccctggaagccccaccccctggagagcttcctgggcaagctggcctgtgtggacagccagaagcccctgcctgacccccacctgagcaagctggcctgtgtggacagccccaagcccctgcccggcccccacctggagcccagctgcctgagcagaggagcccacgagaagttctctgtggaggagtacctggtgcacgccctgcagggctctgtgagcagcggccaggcccacagcctgaccagcctggccaagacctgggccgcccggggcagccgcagccgggagcccagccccaagacagaggacaatgaaggagtgctgctgacagagaagctgaagcctgtggactatgagtaccgggaggaggtgcactgggccacccaccagctgcggctgggccggggcagctttggagaggtgcacaggatggaggacaagcagacaggcttccagtgtgctgtgaagaaggtgcggctggaggtgttccgggcagaggagctgatggcctgtgccggcctgaccagccccagaattgtgcccctgtatggagctgtgcgggagggcccctgggtgaacatcttcatggagctgctggagggcggcagcctgggccagctggtgaaggagcagggctgcctgcctgaggaccgggccctgtactacctgggccaggccctggagggcctggagtacctgcacagccgccgcatcctgcatggagatgtgaaggctgacaacgtgctgctgagcagtgatggcagccatgctgccctgtgtgactttggacatgctgtgtgcctgcagccagatggcctgggcaagagcctgctgactggagactacatccctggaacagagacccacatggcccctgaggtggtgctgggccgcagctgtgatgccaaggtggatgtgtggagcagctgctgcatgatgctgcacatgctgaatggctgccacccctggacccagttcttccggggccccctgtgcctgaagatcgccagcgagcccccacctgtgcgggagatcccccccagctgtgcccccctgacagcccaggccatccaggagggcctgaggaaggagcccatccaccgggtgtctgctgctgagctgggcggcaaggtgaacagagccctgcagcaggtgggcggcctgaagagcccctggagaggagagtacaaggagcccaggcaccccccacccaaccaggccaactaccaccagaccctgcacgcccagccccgggagctgagcccccgggcccctggccccaggcctgctgaggagaccaccggccgggcccccaagctgcagccccccctgcccccagagcccccagagcccaacaagagcccccccctgaccctgagcaaggaggagagcggcatgtgggagcccctgcccctgagcagcctggagcccgccccagccaggaaccccagcagccctgagaggaaggccaccgtgcctgagcaggagctgcagcagctggagattgagctgttcctgaacagcctgagccagcccttcagcctggaggagcaggagcagatcctgagctgcctgagcattgacagcctgagcctgagtgatgacagcgagaagaaccccagcaaggccagccagagcagccgggacaccctgagcagtggagtgcacagctggagcagccaggccgaggcccggagcagctcctggaacatggtgctggcccggggccggcccacagacacccccagctacttcaacggggtgaaggtgcagatccagagcctgaatggagagcacctgcacatccgggagttccaccgggtgaaggtgggggacatcgccaccggcatcagcagccagatcccagctgctgccttcagcctggtgaccaaggatggccagcctgtgcgctatgacatggaggtgcctgattctggaattgacctgcagtgcaccctggccccagatggcagctttgcctggagctggagggtgaagcacggccagctggagaaccggccctag

SEQ ID NO: 318249 - DNA, 1302 bp, Artificial Sequence
  derived and/or modified sequence
tgcttcaagcagctgggggagggcctgcgggccctgcccaggtctgagctgcacaagctgatcagccccctgcagtgcctgaaccacgtgtggaagctgcaccacccccaggacggcggccccctgcccctgcccacccaccaccccttccccttccaccccctgcagccctggaagccccaccccctggagagcttcctgggcaagctggcctgtgtggacagccagaagcccctgcctgacccccacctgagcaagctggcctgtgtggacagccccaagcccctgcccggcccccacctggagcccagctgcctgagcagaggagcccacgagaagttctctgtggaggagtacctggtgcacgccctgcagggctctgtgagcagcggccaggcccacagcctgaccagcctggccaagacctgggccgcccggggcagccgcagccgggagcccagccccaagacagaggacaatgaaggagtgctgctgacagagaagctgaagcctgtggactatgagtaccgggaggaggtgcactgggccacccaccagctgcggctgggccggggcagctttggagaggtgcacaggatggaggacaagcagacaggcttccagtgtgctgtgaagaaggtgcggctggaggtgttccgggcagaggagctgatggcctgtgccggcctgaccagccccagaattgtgcccctgtatggagctgtgcgggagggcccctgggtgaacatcttcatggagctgctggagggcggcagcctgggccagctggtgaaggagcagggctgcctgcctgaggaccgggccctgtactacctgggccaggccctggagggcctggagtacctgcacagccgccgcatcctgcatggagatgtgaaggctgacaacgtgctgctgagcagtgatggcagccatgctgccctgtgtgactttggacatgctgtgtgcctgcagccagatggcctgggcaagagcctgctgactggagactacatccctggaacagagacccacatggcccctgaggtggtgctgggccgcagctgtgatgccaaggtggatgtgtggagcagctgctgcatgatgctgcacatgctgaatggctgccacccctggacccagttcttccggggccccctgtgcctgaaggtgggagatggcacccagcacggccagcagggcgagctgcagggccctggggcccaggccgccggctggaggggctgcagcgctgtggctgatggagcccggggcggcctggtgatccacgtgggcagctag

SEQ ID NO: 318250 - DNA, 4465 bp, Artificial Sequence
  derived and/or modified sequence
gggagctcagcggtcggcggccggcggcgggagatcgcgggcgagcggagcgcaacactcgcttggttggggagatcggcgcttggccggatgagcacaagcctgggagatggcagtgatggaaatggcctgcccaggtgcccctggctcagcagtggggcagcagaaggaactccccaaagccaaggagaagacgccgccactggggaagaaacagagctccgtctacaagcttgaggccgtggagaagagccctgtgttctgcggaaagtgggagatcctgaatgacgtgattaccaagggcacagccaaggaaggctccgaggcagggccagctgccatctctatcatcgcccaggctgagtgtgagaatagccaagagttcagccccaccttttcagaacgcattttcatcgctgggtccaaacagtacagccagtccgagagtcttgatcagatccccaacaatgtggcccatgctacagagggcaaaatggcccgtgtgtgttggaagggaaagcgtcgcagcaaagcccggaagaaacggaagaagaagagctcaaagtccctggctcatgcaggagtggccttggccaaacccctccccaggacccctgagcaggagagctgcaccatcccagtgcaggaggatgagtctccactcggcgccccatatgttagaaacaccccgcagttcaccaagcctctgaaggaaccaggccttgggcaactctgttttaagcagcttggcgagggcctacgggctctgcctcgatcagaactccacaaactgatcagccccttgcaatgtctgaaccacgtgtggaaactgcaccacccccaggacggaggccccctgcccctgcccacgcaccccttcccctatagcagactgcctcatcccttcccattccaccctctccagccctggaaacctcaccctctggagtccttcctgggcaaactggcctgtgtagacagccagaaacccttgcctgacccacacctgagcaaactggcctgtgtagacagtccaaagcccctgcctggcccacacctggagcccagctgcctgtctcgtggtgcccatgagaagttttctgtggaggaatacctagtgcatgctctgcaaggcagcgtgagctcaggccaggcccacagcctgaccagcctggccaagacctgggcagcaaggggctccagatcccgggagcccagccccaaaactgaggacaacgagggtgtcctgctcactgagaaactcaagccagtggattatgagtaccgagaagaagtccactgggccacgcaccagctccgcctgggcagaggctccttcggagaggtgcacaggatggaggacaagcagactggcttccagtgcgctgtcaaaaaggtgcggctggaagtatttcgggcagaggagctgatggcatgtgcaggattgacctcacccagaattgtccctttgtatggagctgtgagagaagggccttgggtcaacatcttcatggagctgctggaaggtggctccctgggccagctggtcaaggagcagggctgtctcccagaggaccgggccctgtactacctgggccaggccctggagggtctggaatacctccactcacgaaggattctgcatggggacgtcaaagctgacaacgtgctcctgtccagcgatgggagccacgcagccctctgtgactttggccatgctgtgtgtcttcaacctgatggcctgggaaagtccttgctcacaggggactacatccctggcacagagacccacatggctccggaggtggtgctgggcaggagctgcgacgccaaggtggatgtctggagcagctgctgtatgatgctgcacatgctcaacggctgccacccctggactcagttcttccgagggccgctctgcctcaagattgccagcgagcctccgcctgtgagggagatcccaccctcctgcgcccctctcacagcccaggccatccaagaggggctgaggaaagagcccatccaccgcgtgtctgcagcggagctgggagggaaggtgaaccgggcactacagcaagtgggaggtctgaagagcccttggaggggagaatataaagaaccaagacatccaccgccaaatcaagccaattaccaccagaccctccatgcccagccgagagagctttcgccaagggccccagggccccggccagctgaggagacaacaggcagagcccctaagctccagcctcctctcccaccagagcccccagagccaaacaagtctcctcccttgactttgagcaaggaggagtctgggatgtgggaacccttacctctgtcctccctggagccagcccctgccagaaaccccagctcaccagagcggaaagcaaccgtcccggagcaggaactgcagcagctggaaatagaattattcctcaacagcctgtcccagccattttctctggaggagcaggagcaaattctctcgtgcctcagcatcgacagcctctccctgtcggatgacagtgagaagaacccatcaaaggcctctcaaagctcgcgggacaccctgagctcaggcgtacactcctggagcagccaggccgaggctcgaagctccagctggaacatggtgctggcccgggggcggcccaccgacaccccaagctatttcaatggtgtgaaagtccaaatacagtctcttaatggtgaacacctgcacatccgggagttccaccgggtcaaagtgggagacatcgccactggcatcagcagccagatcccagctgcagccttcagcttggtcaccaaagacgggcagcctgttcgctacgacatggaggtgccagactcgggcatcgacctgcagtgcacactggcccctgatggcagcttcgcctggagctggagggtcaagcatggccagctggagaacaggccctaaccctgccctccaccgccggctccacactgccggaagcagccttcctgctcggtgcacgatgctgccctgaaacacaggctcagccgttcccagggatctgccagcccccggctcagcagtgggaccagggcctcgcagcagcaaggtgggggcaagcagaatgcctcccaggatttcacacctgagccctgccccaccctgctgagaaaacactccgccacgtgaagagacagaggaggatggcaggagttacctcgggaaacaaacaggatcttctctgccctgctccagtcgagttggcctgacccgcttggatcagtgaccatttgctggcagacaggggagagcagcttccagcctgggtcagaaggggtgggcgagcccctcggcccctcaccctccaggctgctgtgagagtgtcaagtgtgtaagggcccaaactcaggttcagtgcagaaccaggtcagcaggtatgcccgcccgtaggttaagggggccctctaaaccccttgcctggcctcacctggccagctcaccccttttgggtgtaggggaaaagaatgcctgaccctgggaaggctccctggtagaatacaccacacttttcaggttgttgcaacacaggtcctgagttgacctctggttcagccaaggaccaaagaaggtgtgtaagtgaagtggttctcagtccccagacatgtgcccctttgctgctggctaccactcttccccagagcagcaggccccgagccccttcaggcccagcactgccccagactcgctggcactcagttccctcatctgtaaaggtgaagggtgatgcaggatatgcctgacaggaacagtctgtggatggacatgatcagtgctaaggaaagcagcagagagagacgctccggcgccccagccccactatcagtgtccagcgtgctggttccccagagcacagctcagcatcacactgacactcaccctgccctgcccctggccagagggtactgccgacggcactttgcactctgatgacctcaaagcactttcatggctgccctctggcagggcagggcagggcagtgacactgtaggagcatagcaagccaggagatggggtgaagggacacagtcttgagctgtccacatgcatgtgactcctcaaacctcttccagatttctctaagaatagcacccccttccccattgccccagcttagcctcttctcccaggggagctactcaggactcacgtagcattaaatcagctgtgaatcgtcagggggtgtctgctagcctcaacctcctggggcaggggacgccgagactccgtgggagaagctcattcccacatcttgccaagacagcctttgtccagctgtccacattgagtcagactgctcccggggagagagccccggcccccagcacataaagaactgcagccttggtactgcagagtctgggttgtagagaactctttgtaagcaataaagtttggggtgatgacaaatgtttccaggc

SEQ ID NO: 318251 - DNA, 1476 bp, Artificial Sequence
  derived and/or modified sequence
tgttttaagcagcttggcgagggcctacgggctctgcctcgatcagaactccacaaactgatcagccccttgcaatgtctgaaccacgtgtggaaactgcaccacccccaggacggaggccccctgcccctgcccacgcaccatcccttcccattccaccctctccagccctggaaacctcaccctctggagtccttcctgggcaaactggcctgtgtagacagccagaaacccttgcctgacccacacctgagcaaactggcctgtgtagacagtccaaagcccctgcctggcccacacctggagcccagctgcctgtctcgtggtgcccatgagaagttttctgtggaggaatacctagtgcatgctctgcaaggcagcgtgagctcaggccaggcccacagcctgaccagcctggccaagacctgggcagcaaggggctccagatcccgggagcccagccccaaaactgaggacaacgagggtgtcctgctcactgagaaactcaagccagtggattatgagtaccgagaagaagtccactgggccacgcaccagctccgcctgggcagaggctccttcggagaggtgcacaggatggaggacaagcagactggcttccagtgcgctgtcaaaaaggtgcggctggaagtatttcgggcagaggagctgatggcatgtgcaggattgacctcacccagaattgtccctttgtatggagctgtgagagaagggccttgggtcaacatcttcatggagctgctggaaggtggctccctgggccagctggtcaaggagcagggctgtctcccagaggaccgggccctgtactacctgggccaggccctggagggtctggaatacctccactcacgaaggattctgcatggggacgtcaaagctgacaacgtgctcctgtccagcgatgggagccacgcagccctctgtgactttggccatgctgtgtgtcttcaacctgatggcctgggaaagtccttgctcacaggggactacatccctggcacagagacccacatggctccggaggtggtgctgggcaggagctgcgacgccaaggtggatgtctggagcagctgctgtatgatgctgcacatgctcaacggctgccacccctggactcagttcttccgagggccgctctgcctcaaggtcggtgacggcacccagcatggccaacagggggagctgcagggccctggggcccaggctgcaggctggaggggctgctctgcggtggcagatggagcaaggggaggcctggtcatccatgtgggatcctaattcaaatacttgccacccaaatctgggggtacaaggggagatccagctgcggaggctcaccaagttcatggcaggtgagaactctcttctgtccataccctgggccccatccacctgcctcctaacgggccgggcctggaggctgtgggcgtcttgctgcctggctctggcctg

SEQ ID NO: 318252 - DNA, 2841 bp, Artificial Sequence
  derived and/or modified sequence
atggccgtgatggagatggcctgccccggcgcccccggcagcgccgtaggacagcaaaaggaactgccaaaagccaaggagaagactccccctctgggaaagaaacaatcatctgtgtacaagctggaggcggtggagaaaagtccggtgttttgtggcaaatgggaaatcctgaacgatgtgatcacaaaggggaccgctaaggagggcagcgaagccggccctgccgccataagtatcatcgcccaggctgagtgcgaaaactcccaagaattttctcccacattttctgaaagaattttcatcgcaggttccaagcagtactctcaatcagagtcactcgaccagatcccaaacaacgtcgcccatgctacagagggaaagatggcccgggtttgttggaagggtaaacggaggtccaaagctcgcaagaagcgcaaaaagaagagctccaaaagtctggcccatgcaggtgtggctcttgcaaagccactgccaaggacgcccgagcaagaatcctgcaccattcctgtgcaggaagatgaatcacctctgggggctccatacgtgcggaatacaccccaatttacaaaacccctcaaagaacctggactcggtcagctgtgttttaaacaactgggggagggactccgcgccctacccaggtccgaactgcacaagctgatttctcccctgcagtgcttgaatcatgtgtggaaattgcatcatccgcaggacggaggtcctttacccctgcccacacatcccttcccctacagtcggctcccccatccatttccttttcaccctttacaaccttggaaaccccatccattagaatccttcctgggtaaacttgcctgcgtagatagccagaagccgctcccggaccctcacctcagtaaactggcttgcgtggactcaccaaagcccctgcccggaccccacctggaaccctcatgccttagtcggggagctcatgagaagttctcagttgaggagtacttggtgcatgcacttcagggatcagtctcatcaggacaggctcactccttaacctcgttggcaaagacttgggcggcacgaggttcaaggtcacgcgaaccttccccaaagacagaagataatgaaggtgtactgctcaccgagaagctgaaaccagtggattatgaataccgagaagaggtgcattgggctacacatcagctgcgccttggccgcggtagcttcggtgaggttcatcggatggaagacaaacaaacgggctttcagtgtgccgtcaagaaagtacgtctggaggtgtttcgggcagaagaactgatggcatgcgctggactcacttctcccaggatcgtccctctgtacggagcagtaagggagggaccatgggtgaatatcttcatggagctacttgagggcggatccttgggtcagctggtgaaagagcagggttgcctccccgaggaccgagccttgtattaccttggacaggctctcgaaggactggagtacctgcattctcgcagaatcctgcacggagacgtgaaggctgacaatgtgttattgagttctgacgggtcccacgcagccctatgtgactttggccacgcggtctgcctgcagcctgatggccttggcaagtctctcctcaccggtgattatattcccggaaccgagacccatatggctccagaagtcgtgcttggccgcagttgcgacgcaaaggtggatgtatggtcttcctgctgcatgatgctgcatatgttgaatgggtgtcacccctggacccagttcttcaggggacccctctgtttgaagattgcctcagagccacccccagttcgggaaatacctccttcctgtgcaccactcaccgctcaggctatccaggagggcctacggaaggaaccaatccatcgcgtgtctgccgcggaattagggggaaaagtgaaccgtgcccttcagcaagtgggtgggctgaagtccccatggaggggcgaatacaaagagccacgacaccctccccccaaccaagcgaactaccaccaaacacttcacgctcagccacgcgagttgtctcctcgcgcaccggggccacggccggctgaggaaaccaccggaagagctcctaagctgcagcctcctctcccacccgaacctcccgaacccaacaagagcccaccacttactttgtccaaggaagagagtggtatgtgggaaccattaccgctcagctccctagagcccgcgcccgccaggaatccgtccagtcccgaaagaaaagccacagtgccagagcaggagctgcagcagctagaaattgagctgttcctcaacagcttgtctcaacctttcagcctggaggagcaggaacaaattctgtcatgtttgtctattgattctctttccctgtccgacgacagcgaaaagaatccgtccaaagcctcacagagttctcgggacactctttcctctggagtgcactcgtggtccagtcaggcggaggctcggtctagctcctggaatatggttctggcccgcggaagaccaactgataccccttcttacttcaacggcgtcaaagttcagattcagtctcttaacggggagcatctgcacatccgtgaatttcatagggtgaaagtaggagatattgccaccggaatcagctctcaaatccctgcagctgctttttccctggtaaccaaggacgggcagcctgtccggtatgacatggaagttcccgattccggcatcgacttgcagtgcacattagcgcctgatggcagtttcgcgtggtcttggagagtcaaacacggccagttagagaaccgcccctag

SEQ ID NO: 318253 - DNA, 1302 bp, Artificial Sequence
  derived and/or modified sequence
tgcttcaagcagctgggcgagggcctgcgggccctgccccggagcgaactacataagctgatcagtcctttacagtgtctgaaccatgtttggaagctccaccacccccaggacgggggtccgctgcccttgccaacgcaccaccccttcccatttcacccactccagccatggaaaccgcaccccctcgaaagcttcctgggtaagctggcttgcgttgacagccaaaagcctttgcccgaccctcacctgtctaaactggcatgtgtggactccccaaagcctttgcctgggcctcacctagagccctcctgtttaagccgcggcgctcacgagaagttttcggtggaagaatacctagtgcacgctcttcagggctctgtatcttccgggcaggcgcacagcctaacttccttagcaaaaacgtgggcagctaggggctcacgatcgagggagccctctcccaagaccgaagacaatgaaggcgttctactcacagagaagcttaagcctgtggattatgagtatcgcgaggaggttcattgggccactcatcaactcagactgggtcgcgggagcttcggggaagtccacagaatggaggataaacaaactgggtttcagtgcgccgtgaagaaagtgaggctcgaagtgttccgggccgaggaactcatggcatgtgccggactcacttcgccccggatcgtccctctctacggggcagtgagggaggggccttgggtcaatatttttatggaactgttagaaggaggatcattggggcaattagtgaaggaacaaggatgcttgccagaagaccgtgctttatattacctggggcaagctttggagggactggagtacctgcatagccggagaatactgcacggagacgtaaaggccgacaacgtgctgctgtctagcgacggtagtcatgctgccctatgtgacttcggacatgccgtgtgtttacaacccgatgggctgggaaagagtctgctaaccggcgattacatccctggaacagaaactcatatggccccagaggtggttctggggcggagctgtgacgctaaggtggacgtttggtccagctgctgcatgatgcttcacatgctgaacggttgtcatccttggacgcagttcttcagaggaccactgtgcctcaaggtcggtgacggaactcagcacggccagcagggagagcttcaaggccccggagcacaggcagcaggatggcgggggtgttctgcagtggctgatggagctagaggaggactagtgattcatgtcgggtcctag

SEQ ID NO: 318254 - DNA, 2841 bp, Artificial Sequence
  derived and/or modified sequence
atggcggtgatggaaatggcttgcccaggcgctccaggctctgccgtgggacagcagaaagagctgccaaaagccaaagagaaaactccacctcttggaaagaagcagtcttccgtctacaagctggaggctgtagaaaaaagccctgtgttctgcgggaagtgggagatcctcaacgacgtaattacaaaagggaccgccaaagaggggtctgaagccggacccgctgctatttccattatcgcacaggcagaatgtgagaactcacaagaattttccccaaccttcagtgaaaggatttttattgcaggttccaaacagtattcacagtccgaaagtctggaccagattcccaataatgtcgctcacgccaccgaggggaagatggctcgcgtgtgttggaagggcaaacgtagaagcaaggcccgtaagaagcggaagaaaaaatcctctaagagcctcgcacacgccggtgtggctcttgccaagccactccccagaacccctgagcaggaaagttgcacaatcccagtacaggaagatgagtccccactgggggcaccttacgtgaggaacacccctcagttcacaaagccccttaaggagccgggactcgggcagttatgcttcaagcagctgggggagggcttacgggctctgcctaggagcgagctgcacaaactgatctctcccctgcagtgtctgaaccacgtgtggaagctacatcatccacaagacggagggccactaccattgcccactcatccgttcccttatagtagactgcctcacccctttcccttccacccgttacagccttggaagccacatcccctagagtcttttttgggaaagttggcgtgcgttgattctcagaaacccctgcccgacccgcatctgagtaaattggcttgcgtcgatagtcccaagccacttccgggtccccatctggaaccgtcctgcctgtcccgaggcgctcatgaaaagttctccgtggaagagtacctggtgcacgccctccagggatctgtttcctccggccaggcccacagtcttaccagtcttgctaaaacctgggccgctcgcggaagccgctctagagaaccgagcccaaaaacagaggataatgaaggggtgctccttacggaaaagctgaagccagttgactacgagtatagggaggaagtccattgggccactcatcagcttcgcctcgggagaggtagtttcggtgaagtccaccgtatggaggataaacagactggtttccagtgcgcagtgaagaaggtccggttagaggtcttccgcgcagaagagctcatggcctgtgcgggacttacaagtccaagaatcgttccgctgtacggcgcagtgcgggaaggaccatgggttaatatttttatggagttgctggagggcggatctttgggacagttggttaaagagcagggctgcctgccagaggaccgagcactttactatctcggacaagccctggaaggcctggaatacctccattcccgcagaatcctgcatggagacgtgaaggccgacaacgtgctgctgagctccgacggcagccacgccgctttatgcgatttcgggcacgccgtgtgcctgcagcctgatggcttggggaaatccctgttgacaggcgattatattcccggaaccgagacacacatggcgcctgaggtcgttctcggcagaagttgtgatgccaaagttgacgtgtggtctagctgctgtatgatgctgcatatgcttaatggctgccatccgtggacacagtttttccggggacccctttgtttgaagatagcttcggagccacccccagtgcgcgagattcctcccagttgcgctccactgactgcccaagccatccaggagggactgcggaaggaacctattcatcgcgtgtccgccgctgaactcggtggaaaagtcaacagggctctgcagcaggtcgggggtctgaagagtccctggagaggggagtacaaggagcccaggcatccacctcccaatcaggccaactatcaccagacattacacgcccagccccgagagcttagcccgcgagctccaggtccgcgtcccgctgaagagacaactgggagagccccaaagctgcaacctccactgcctccagagcctccagagcctaataagtctccccctttaactttgagcaaggaagagtccgggatgtgggagccgctccctctgagtagccttgagccagcacctgcgagaaacccatcatcgccagagagaaaagcaacagtacctgaacaggagctgcagcagctcgaaatcgagttgttcctgaatagcttgtctcaaccattttcgctggaggagcaggagcagatcctgtcctgcctgagtattgactccctctcactgagcgacgatagtgagaaaaacccaagtaaggcgtcccagtcaagccgtgatacactgagcagtggcgttcattcttggagttcacaggctgaggccaggtcctctagctggaacatggtcttggcgaggggcaggcccacagataccccgtcttactttaacggcgtgaaggtccagatccaatcattgaacggggagcacctgcacatccgggaatttcatcgagtgaaggttggcgacatagccaccgggatatcatcgcaaatacccgctgctgcattttcactcgtcaccaaagatggccagcccgtgaggtacgatatggaggtgccggactccggcatcgatctgcaatgcaccctcgcccctgacggttcctttgcctggtcttggagagtcaaacacggacaattggagaatcggccttag

SEQ ID NO: 318255 - DNA, 1302 bp, Artificial Sequence
  derived and/or modified sequence
tgctttaaacagctgggtgaaggcttgagggctctaccccgtagcgaacttcacaaattgatttcacccctgcagtgtctcaaccacgtatggaagttacaccaccctcaggacggtgggcctcttcccctcccgacccaccacccctttccgtttcacccgctgcaaccctggaaaccccaccccctggagtcctttcttggcaagctcgcttgtgtagatagccagaagcctcttcccgatccgcacctctctaaattagcttgcgtggactccccaaagcccctgccagggcctcaccttgagccctcctgtctcagccgcggtgcccacgagaagttctctgtggaagagtatctggtccatgcgttgcaaggcagtgtttcaagcggtcaggctcacagtctgacatcgctcgccaagacctgggctgctcgagggtctcgctctcgtgagccaagccccaaaacagaggacaatgagggagttttgctgacagagaagctcaagcctgtggattacgaatatcgtgaggaagtgcattgggccacccaccagttgaggctgggtcggggatctttcggcgaagtgcaccgcatggaggataaacagacgggcttccagtgcgctgtcaaaaaagtgcgccttgaggtatttcgggcagaggagctaatggcctgtgcagggcttacatcacctagaatcgttccactgtacggtgctgtaagggagggtccttgggttaacatctttatggaactgttggaaggtgggagtctggggcagctggtgaaggaacagggatgcttgcccgaagatcgcgcactctattatctgggtcaggctctcgaagggctggaatacctgcattcacgcagaattcttcacggggacgtaaaggcggacaacgtacttctgagcagcgatgggtcacatgccgctctctgcgatttcggacacgcagtttgtctgcagcccgatggactaggtaagtccttgttgaccggggattacatcccaggaacggagacccacatggcccctgaggtcgtgttaggccgtagttgcgacgctaaagttgatgtatggagttcatgttgcatgatgctgcatatgctgaatggatgtcacccgtggacccagttttttagaggccctctctgccttaaagtgggggatggcacgcagcacggccagcagggcgagcttcaggggccaggcgctcaggcggcaggatggcggggttgtagcgccgtggctgacggggctcggggtgggctagttatacacgtgggctcttag

SEQ ID NO: 318256 - DNA, 2841 bp, Artificial Sequence
  derived and/or modified sequence
atggccgtgatggagatggcctgccccggcgcccccggcagcgccgtgggccagcagaaggagctgcccaaggccaaggagaagaccccccccctgggcaagaagcagagcagcgtgtacaagctggaggccgtggagaagagccccgtgttctgcggcaagtgggagatcctgaacgacgtgatcaccaagggcaccgccaaggagggcagcgaggccggccccgccgccatcagcatcatcgcccaggccgagtgcgagaacagccaggagttcagccccaccttcagcgagagaatcttcatcgccggcagcaagcagtacagccagagcgagagcctggaccagatccccaacaacgtggcccacgccaccgagggcaagatggccagagtgtgctggaagggcaagagaagaagcaaggccagaaagaagagaaagaagaagagcagcaagagcctggcccacgccggcgtggccctggccaagcccctgcccagaacccccgagcaggagagctgcaccatccccgtgcaggaggacgagagccccctgggcgccccctacgtgagaaacaccccccagttcaccaagcccctgaaggagcccggcctgggccagctgtgcttcaagcagctgggcgagggcctgagagccctgcccagaagcgagctgcacaagctgatcagccccctgcagtgcctgaaccacgtgtggaagctgcaccacccccaggacggcggccccctgcccctgcccacccaccccttcccctacagcagactgccccaccccttccccttccaccccctgcagccctggaagccccaccccctggagagcttcctgggcaagctggcctgcgtggacagccagaagcccctgcccgacccccacctgagcaagctggcctgcgtggacagccccaagcccctgcccggcccccacctggagcccagctgcctgagcagaggcgcccacgagaagttcagcgtggaggagtacctggtgcacgccctgcagggcagcgtgagcagcggccaggcccacagcctgaccagcctggccaagacctgggccgccagaggcagcagaagcagagagcccagccccaagaccgaggacaacgagggcgtgctgctgaccgagaagctgaagcccgtggactacgagtacagagaggaggtgcactgggccacccaccagctgagactgggcagaggcagcttcggcgaggtgcacagaatggaggacaagcagaccggcttccagtgcgccgtgaagaaggtgagactggaggtgttcagagccgaggagctgatggcctgcgccggcctgaccagccccagaatcgtgcccctgtacggcgccgtgagagagggcccctgggtgaacatcttcatggagctgctggagggcggcagcctgggccagctggtgaaggagcagggctgcctgcccgaggacagagccctgtactacctgggccaggccctggagggcctggagtacctgcacagcagaagaatcctgcacggcgacgtgaaggccgacaacgtgctgctgagcagcgacggcagccacgccgccctgtgcgacttcggccacgccgtgtgcctgcagcccgacggcctgggcaagagcctgctgaccggcgactacatccccggcaccgagacccacatggcccccgaggtggtgctgggcagaagctgcgacgccaaggtggacgtgtggagcagctgctgcatgatgctgcacatgctgaacggctgccacccctggacccagttcttcagaggccccctgtgcctgaagatcgccagcgagcccccccccgtgagagagatcccccccagctgcgcccccctgaccgcccaggccatccaggagggcctgagaaaggagcccatccacagagtgagcgccgccgagctgggcggcaaggtgaacagagccctgcagcaggtgggcggcctgaagagcccctggagaggcgagtacaaggagcccagacaccccccccccaaccaggccaactaccaccagaccctgcacgcccagcccagagagctgagccccagagcccccggccccagacccgccgaggagaccaccggcagagcccccaagctgcagccccccctgccccccgagccccccgagcccaacaagagcccccccctgaccctgagcaaggaggagagcggcatgtgggagcccctgcccctgagcagcctggagcccgcccccgccagaaaccccagcagccccgagagaaaggccaccgtgcccgagcaggagctgcagcagctggagatcgagctgttcctgaacagcctgagccagcccttcagcctggaggagcaggagcagatcctgagctgcctgagcatcgacagcctgagcctgagcgacgacagcgagaagaaccccagcaaggccagccagagcagcagagacaccctgagcagcggcgtgcacagctggagcagccaggccgaggccagaagcagcagctggaacatggtgctggccagaggcagacccaccgacacccccagctacttcaacggcgtgaaggtgcagatccagagcctgaacggcgagcacctgcacatcagagagttccacagagtgaaggtgggcgacatcgccaccggcatcagcagccagatccccgccgccgccttcagcctggtgaccaaggacggccagcccgtgagatacgacatggaggtgcccgacagcggcatcgacctgcagtgcaccctggcccccgacggcagcttcgcctggagctggagagtgaagcacggccagctggagaacagaccctag

SEQ ID NO: 318257 - DNA, 1302 bp, Artificial Sequence
  derived and/or modified sequence
tgcttcaagcagctgggcgagggcctgagagccctgcccagaagcgagctgcacaagctgatcagccccctgcagtgcctgaaccacgtgtggaagctgcaccacccccaggacggcggccccctgcccctgcccacccaccaccccttccccttccaccccctgcagccctggaagccccaccccctggagagcttcctgggcaagctggcctgcgtggacagccagaagcccctgcccgacccccacctgagcaagctggcctgcgtggacagccccaagcccctgcccggcccccacctggagcccagctgcctgagcagaggcgcccacgagaagttcagcgtggaggagtacctggtgcacgccctgcagggcagcgtgagcagcggccaggcccacagcctgaccagcctggccaagacctgggccgccagaggcagcagaagcagagagcccagccccaagaccgaggacaacgagggcgtgctgctgaccgagaagctgaagcccgtggactacgagtacagagaggaggtgcactgggccacccaccagctgagactgggcagaggcagcttcggcgaggtgcacagaatggaggacaagcagaccggcttccagtgcgccgtgaagaaggtgagactggaggtgttcagagccgaggagctgatggcctgcgccggcctgaccagccccagaatcgtgcccctgtacggcgccgtgagagagggcccctgggtgaacatcttcatggagctgctggagggcggcagcctgggccagctggtgaaggagcagggctgcctgcccgaggacagagccctgtactacctgggccaggccctggagggcctggagtacctgcacagcagaagaatcctgcacggcgacgtgaaggccgacaacgtgctgctgagcagcgacggcagccacgccgccctgtgcgacttcggccacgccgtgtgcctgcagcccgacggcctgggcaagagcctgctgaccggcgactacatccccggcaccgagacccacatggcccccgaggtggtgctgggcagaagctgcgacgccaaggtggacgtgtggagcagctgctgcatgatgctgcacatgctgaacggctgccacccctggacccagttcttcagaggccccctgtgcctgaaggtgggcgacggcacccagcacggccagcagggcgagctgcagggccccggcgcccaggccgccggctggagaggctgcagcgccgtggccgacggcgccagaggcggcctggtgatccacgtgggcagctag

SEQ ID NO: 318258 - protein, 1195 aa, Artificial Sequence
  derived and/or modified sequence
MGEEGPPSLEYIQAKDLFPPKELVKEEENLQVPFTVLQGEGVEFLGRAADALIAISNYRLHIKFKDSVINVPLRMIDSVESRDMFQLHISCKDSKVVRCHFSTFKQCQEWLSRLSRATARPAKPEDLFAFAYHAWCLGLTEEDQHTHLCQPGEHIRCRQEAELARMGFDLQNVWRVSHINSNYKLCPSYPQKLLVPVWITDKELENVASFRSWKRIPVVVYRHLRNGAAIARCSQPEISWWGWRNADDEYLVTSIAKACALDPGTRATGGSLSTGNNDTSEACDADFDSSLTACSGVESTAAPQKLLILDARSYTAAVANRAKGGGCECEEYYPNCEVVFMGMANIHAIRNSFQYLRAVCSQMPDPSNWLSALESTKWLQHLSVMLKAAVLVANTVDREGRPVLVHCSDGWDRTPQIVALAKILLDPYYRTLEGFQVLVESDWLDFGHKFGDRCGHQENVEDQNEQCPVFLQWLDSVHQLLKQFPCLFEFNEAFLVKLVQHTYSCLYGTFLANNPCEREKRNIYKRTCSVWALLRAGNKNFHNFLYTPSSDMVLHPVCHVRALHLWTAVYLPASSPCTLGEENMDLYLSPVAQSQEFSGRSLDRLPKTRSMDDLLSACDTSSPLTRTSSDPNLNNHCQEVRVGLEPWHSNPEGSETSFVDSGVGGPQQTVGEVGLPPPLPSSQKDYLSNKPFKSHKSCSPSYKLLNTAVPREMKSNTSDPEIKVLEETKGPAPDPSAQDELGRTLDGIGEPPEHCPETEAVSALSKVISNKCDGVCNFPESSQNSPTGTPQQAQPDSMLGVPSKCVLDHSLSTVCNPPSAACQTPLDPSTDFLNQDPSGSVASISHQEQLSSVPDLTHGEEDIGKRGNNRNGQLLENPRFGKMPLELVRKPISQSQISEFSFLGSNWDSFQGMVTSFPSGEATPRRLLSYGCCSKRPNSKQMRATGPCFGGQWAQREGVKSPVCSSHSNGHCTGPGGKNQMWLSSHPKQVSSTKPVPLNCPSPVPPLYLDDDGLPFPTDVIQHRLRQIEAGYKQEVEQLRRQVRELQMRLDIRHCCAPPAEPPMDYEDDFTCLKESDGSDTEDFGSDHSEDCLSEASWEPVDKKETEVTRWVPDHMASHCYNCDCEFWLAKRRHHCRNCGNVFCAGCCHLKLPIPDQQLYDPVLVCNSCYEHIQVSRARELMSQQLKKPIATASS

SEQ ID NO: 318259 - DNA, 2076 bp, Artificial Sequence
  derived and/or modified sequence
atgggacgcggtagcgggacctttgaaaggctccttgataaggcaacatcccaactgctgctcgagacagattgggagtccatcctgcagatttgcgatcttatccgccagggcgatacccaagccaagtacgccgtcaacagcattaagaaaaaggtcaacgacaagaaccctcacgtcgccctgtatgccttggaagtaatggagtcagttgtgaagaactgtggtcagacagttcacgatgaagtggcaaataagcagacgatggaagagctgaaggacttgctgaaaaggcaggtcgaagtgaacgttcggaataagattctctacttgatacaggcttgggcccacgcattccggaatgagcctaaatacaaggtggtgcaggatacataccaaattatgaaggtcgaaggtcatgtcttcccggagttcaaagaatctgatgctatgttcgctgctgagcgggcccccgattgggttgacgccgaagagtgccaccgttgccgtgttcagtttggggttatgaccaggaagcaccactgtcgggcgtgcggacaaatcttttgcggcaagtgctctagcaagtattccactatccccaaattcggaatcgagaaggaggttcgcgtttgtgaaccgtgctatgaacaactgaacagaaaggcagaagggaaggccacctctactactgagttgccacctgaatacttaacgtcgcccctctcacagcagtcacagttaccccccaaacgcgatgaaaccgcgcttcaggaagaagaggagctccagctcgctcttgccctgagccagtcggaagcggaggagaaggagcgactgcgccaaaaatcaacctacacctcctatccgaaagccgagcctatgccaagcgcctcgtctgctcctccagcatcctcattgtacagttcccccgtgaacagctccgcccctctcgcagaagacattgatccagagctggctaggtatctgaataggaactattgggaaaagaaacaggaagaggctcgcaagagtcccacaccgtccgcccctgtccctctgacagaacccgccgcccagcccggggaaggacacgccgccccaactaacgttgtggagaatccattacctgagacagactctcagccaatacctcctagtggaggccctttttctgaacctcagttccataacggcgagagcgaagagtcccatgagcagtttctgaaagccctgcaaaacgccgtcactacatttgttaatcggatgaaatccaaccacatgagagggcggagcataactaatgatagcgccgtgctatcactgttccagagcatcaatggtatgcacccccagttactggaactgcttaatcagctggacgaacgacgcctgtattatgaggggttgcaggacaagcttgcccaaatcagggatgcaagaggggccctgtccgctttaagggaggaacaccgcgagaaactccgaagggccgcagaggaagccgaaagacagcgacagatccagcttgcacagaaacttgagattatgatgcatggcgtctatatgtcccagcccgctcccgctgcagggccatacccctcaatgcctagcactgccgctgaccccagtatggtgagtgcgtacatgtatccggcgggagcgaccggggctcaggctgcccctcaagctcaagccggccctacagcaagccctgcatactcctcttaccagcccacgccaactgccggctatcaaaatgtggcctcacaggctccccagtccctcccggcaatcagtcagcctccccagtcttctaccatgggctacatgggctcacagagtgtgagcatggggtaccagccttataatatgcaaaacctcatgaccacactgccttcacaggatgcaagtttgccaccccaacaaccatacatcgccggtcaacaaccaatgtaccagcagatggccccttccgggggcccacctcagcagcaaccaccagtagcacagcagccccaggcccagggaccccctgcccagggcagcgaggctcagctcatttctttcgattag

SEQ ID NO: 318260 - DNA, 2648 bp, Artificial Sequence
  derived and/or modified sequence
gaagcggaagtcggggggcgcgccagctcgtagcaggggagcgcccgcggcgtcgggtttgggctggaggtcgccatggggcgaggcagcggcaccttcgagcgtctcctagacaaggcgaccagccagctcctgttggagacagattgggagtccattttgcagatctgcgacctgatccgccaaggggacacacaagcaaaatatgctgtgaattccatcaagaagaaagtcaacgacaagaacccacacgtcgccttgtatgccctggaggtcatggaatctgtggtaaagaactgtggccagacagttcatgatgaggtggccaacaagcagaccatggaggagctgaaggacctgctgaagagacaagtggaggtaaacgtccgtaacaagatcctgtacctgatccaggcctgggcgcatgccttccggaacgagcccaagtacaaggtggtccaggacacctaccagatcatgaaggtggaggggcacgtctttccagaattcaaagagagcgatgccatgtttgctgccgagagagccccagactgggtggacgctgaggaatgccaccgctgcagggtgcagttcggggtgatgacccgtaagcaccactgccgggcgtgtgggcagatattctgtggaaagtgttcttccaagtactccaccatccccaagtttggcatcgagaaggaggtgcgcgtgtgtgagccctgctacgagcagctgaacaggaaagcggagggaaaggccacttccaccactgagctgccccccgagtacctgaccagccccctgtctcagcagtcccagctgccccccaagagggacgagacggccctgcaggaggaggaggagctgcagctggccctggcgctgtcacagtcagaggcggaggagaaggagaggctgagacagaagtccacgtacacttcgtaccccaaggcggagcccatgccctcggcctcctcagcgccccccgccagcagcctgtactcttcacctgtgaactcgtcggcgcctctggctgaggacatcgaccctgagctcgcacggtatctcaaccggaactactgggagaagaagcaggaggaggctcgcaagagccccacgccatctgcgcccgtgcccctgacggagccggctgcacagcctggggaagggcacgcagcccccaccaacgtggtggagaaccccctcccggagacagactctcagcccattcctccctctggtggcccctttagtgagccacagttccacaatggcgagtctgaggagagccacgagcagttcctgaaggcgctgcagaacgccgtcaccaccttcgtgaaccgcatgaagagtaaccacatgcggggccgcagcatcaccaatgactcggccgtgctctcactcttccagtccatcaacggcatgcacccgcagctgctggagctgctcaaccagctggacgagcgcaggctgtactatgaggggctgcaggacaagctggcacagatccgcgatgcccggggggcgctgagtgccctgcgcgaagagcaccgggagaagcttcgccgggcagccgaggaggcagagcgccagcgccagatccagctggcccagaagctggagataatgatgcacggcgtgtacatgagccagccggcccctgccgctggcccctaccccagcatgcccagcactgcggctgatcccagcatggtgagtgcctacatgtacccagcaggggccactggggcgcaggcggccccccaggcccaggccggacccaccgccagccccgcttactcatcctaccagcctactcccacagcgggctaccagaacgtggcctcccaggccccacagagcctcccggccatctctcagcctccgcagtccagcaccatgggctacatggggagccagtcagtctccatgggctaccagccttacaacatgcagaatctcatgaccaccctcccaagccaggatgcgtctctgccaccccagcagccctacatcgcggggcagcagcccatgtaccagcagatggcaccctctggcggtcccccccagcagcagccccccgtggcccagcaaccgcaggcacaggggccgccggcacagggcagcgaggcccagctcatttcattcgactgacccaggccatgctcacgtccggagtaacactacatacagttcacctgaaacgcctcgtctctaactgccgtcgtcctgcctccctgtcctctactgccggtagtgtcccttctctgcgagtgagggggggccttcaccccaagcccacctcccttgtcctcagcctactgcagtccctgagttagtctctgctttctttccccagggctgggccatggggagggaaggactttctcccaggggaagcccccagccctgtgggtcatggtctgtgagaggtggcaggaatggggaccctcaccccccaagcagcctgtgccctctggccgcactgtgagctggctgtggtgtctgggtgtggcctggggctccctctgcaggggcctctctcggcagccacagccaagggtggaggcttcaggtctccagcttctctgcttctcagctgccatctccagtgccccagaatggtacagcgataataaaatgtatttcag

SEQ ID NO: 318261 - DNA, 2076 bp, Artificial Sequence
  derived and/or modified sequence
atgggccggggcagcggcacctttgagcggctgctggacaaggccaccagccagctgctgctggagacagactgggagagcatcctgcagatctgtgacctgatccggcagggcgacacccaggccaagtatgctgtgaacagcatcaagaagaaggtgaatgacaagaacccccacgtggccctgtatgccctggaggtgatggagagcgtggtgaagaactgtggccagacagtgcatgatgaggtggccaacaagcagaccatggaggagctgaaggacctgctgaagaggcaggtggaggtgaatgtgaggaacaagatcctgtacctgatccaggcctgggcccacgccttcagaaatgagcccaagtacaaggtggtgcaggacacctaccagatcatgaaggtggagggccacgtgtttcctgagttcaaggagagtgatgccatgtttgctgctgagcgggccccagactgggtggatgctgaggagtgccaccgctgccgggtgcagtttggagtgatgaccaggaagcaccactgccgggcctgtggccagatcttctgtgggaagtgcagcagcaagtacagcaccatccccaagtttggaattgagaaggaggtgcgggtgtgtgagccctgctatgagcagctgaacaggaaggccgagggcaaggccaccagcaccacagagctgcccccagagtacctgaccagccccctgagccagcagagccagctgccccccaagagagatgaaacagccctgcaggaggaggaggagctgcagctggccctggccctgagccagagcgaggccgaggagaaggagcggctgcggcagaagagcacctacaccagctaccccaaggccgagcccatgcccagcgccagcagcgcccccccagccagcagcctgtacagcagccctgtgaacagcagcgcccccctggccgaggacatcgaccctgagctggcccgctacctgaacagaaactactgggagaagaagcaggaggaggccaggaagagccccaccccatctgcccctgtgcccctgacagagcctgctgcccagcctggagagggccacgccgcccccaccaacgtggtggagaaccccctgcctgagacagacagccagcccatccccccatctgggggccccttcagcgagccccagttccacaacggggagagcgaggagagccatgagcagttcctgaaggccctgcagaatgctgtgaccacctttgtgaacaggatgaagagcaaccacatgaggggccgcagcatcaccaatgattctgctgtgctgagcctcttccagagcatcaatggcatgcacccccagctgctggagctgctgaaccagctggatgaaagaagactctactatgagggcctgcaggacaagctggcccagatcagagatgcccggggggccctgagcgccctgcgggaggagcaccgggagaagctgcggcgggctgctgaggaggccgagcggcagaggcagatccagctggcccagaagctggagatcatgatgcatggagtgtacatgagccagcctgccccagctgctggcccctaccccagcatgcccagcacagctgctgaccccagcatggtgtctgcctacatgtacccagctggggccaccggggcccaggccgccccccaggcccaggccggccccacagccagccctgcctacagcagctaccagcccacccccacagctggctaccagaatgtggccagccaggccccccagagcctgcctgccatcagccagcccccccagagcagcaccatgggctacatgggcagccagagcgtgtccatgggctaccagccctacaacatgcagaacctgatgaccaccctgcccagccaggatgccagcctgcccccccagcagccctacatcgccggccagcagcccatgtaccagcagatggcccccagcggcggccccccccagcagcagccccctgtggcccagcagccccaggcccagggccccccagcccagggcagcgaggcccagctgatcagctttgattag

SEQ ID NO: 318262 - DNA, 2076 bp, Artificial Sequence
  derived and/or modified sequence
atgggccggggcagcggcaccttcgagcggctgctggacaaggccacaagccaactcctgcttgagacggactgggaaagcattcttcagatttgtgatcttatccggcaaggagacactcaagccaaatacgctgtgaatagcattaaaaaaaaggtcaacgacaagaacccccatgtggctctgtacgctctggaagttatggagtcagttgttaaaaactgcggacagacagtccatgacgaggtcgctaataagcaaaccatggaagagctgaaggatctgctgaagagacaggtggaggttaatgtgaggaacaagatattgtatctcatccaagcctgggcgcacgccttccgcaacgaacccaagtacaaagtagtacaggatacataccagattatgaaggttgagggccatgtgtttccagaattcaaggaatcagacgctatgttcgctgccgagagggcaccagattgggtagacgccgaggagtgccacagatgtcgagtccagtttggcgtcatgactagaaaacatcattgtcgggcctgtggccagatcttctgtggtaagtgtagtagcaagtactccaccatccccaagttcgggatcgagaaagaggtgagggtttgtgaaccttgctatgaacaactgaatcggaaggctgaaggcaaagctacctccaccaccgagctgccacctgaatatctcacctccccactttctcagcagagtcagctccctcccaagcgcgatgagactgccttgcaggaagaggaggagctgcaattagccctggcgctttcccagtcggaagctgaggagaaggaaaggctgcgacagaagtctacctatacgtcctaccctaaggccgaacctatgcctagtgcttcgagtgcgcctccagcctcttctctgtatagcagtcccgtgaacagttcagcccctctggcggaggacatcgaccctgaactagctcggtatttgaaccgtaactattgggaaaaaaagcaggaggaggcaaggaaatcacctacaccctctgctcctgtgcctctgaccgaacccgccgctcaacctggagagggtcacgccgcccctacaaacgtggtggagaatcctctcccagaaactgactcccagccaattcctccatctggcggcccattcagcgagccccaattccacaacggggagtccgaagagagtcacgagcagttcttaaaggcactgcagaacgctgtcacaacatttgtgaatcggatgaaatcaaaccatatgcgtggccgaagcatcaccaacgactcagctgtactgtccttgtttcagtccatcaacggcatgcatccccaattgctcgaactccttaatcagctggacgagcgccggctatattacgagggtctgcaggacaaattggcccaaatcagggatgcaagaggagctctgagcgctctgagggaagagcatagggagaagttaagacgggccgctgaagaagcggagagacagcgtcagattcagcttgcgcaaaaactcgagattatgatgcatggggtctatatgtcacagccagcacccgccgccggaccctacccttccatgccctcaactgctgctgatccctcgatggtttctgcatacatgtaccccgctggtgcgacgggagcccaggcagcccctcaggcccaggccgggcccactgccagcccagcttactcgtcatatcagccaaccccgactgccgggtatcaaaacgtggcctctcaagcaccacaatctctcccagcaataagccagccccctcaatcttctaccatggggtatatgggatcgcaatccgtatccatggggtaccaaccctacaacatgcaaaacttgatgactacactcccgtcccaagatgcatcacttccaccgcagcagccttacatcgctggccagcagccgatgtaccagcagatggctccctccggcggcccgccacagcagcagcctcctgtagctcagcagcctcaggcacaaggccccccagcccaagggagtgaggcccagctcattagcttcgactag

SEQ ID NO: 318263 - DNA, 2076 bp, Artificial Sequence
  derived and/or modified sequence
atgggacggggaagcgggacgtttgaacgtctgttagataaggctacttctcaactgctcctggaaactgactgggaatccatactacagatatgtgacctgattcggcagggagatacacaggccaaatacgccgtcaattcgatcaaaaaaaaggtgaatgacaagaacccccacgtcgccctatacgcattagaggtgatggagtctgtggtcaaaaattgcggtcagactgtgcatgatgaggtggccaataagcagactatggaagagttgaaggatctgctgaagcgccaggtggaagttaatgtgcgcaataagatactgtacctaattcaggcctgggctcacgcttttcgtaatgagcccaagtataaggtggtgcaagatacttaccaaataatgaaggtggagggtcatgtgtttccagaatttaaggaatccgacgcaatgtttgcagctgaacgggctccagattgggtcgacgctgaggaatgccaccgctgcagggtccaatttggcgtgatgacccgaaaacaccattgtcgggcttgcgggcagattttttgcggcaagtgtagttccaaatacagtaccatacctaaattcggcatagagaaagaagtgcgtgtttgtgagccgtgttatgagcagttgaaccgcaaagcagaaggtaaggccactagcactacagagctgccccctgagtatctgacctcccccctgagccagcagagccaactgccgcctaagagggacgaaactgcactgcaagaggaagaggaactgcaactggcactagccttgtcacagagcgaagcagaggaaaaagagcgacttagacaaaagagcacctatacctcatatcctaaggccgaaccaatgccctctgcgtctagcgcacctcccgcatcatcattgtatagcagcccggttaactcaagcgcacccctcgctgaagacatcgatcccgaattggccaggtatctaaatagaaactattgggaaaagaaacaggaggaagctcggaagtcccctactcccagtgcaccggttcctctaactgagccagctgcccagcccggagaaggacatgcggctcctacaaatgtcgtcgagaatcctctgcctgagacggattcccagcctatccccccttctggcggaccctttagtgaacctcagttccacaatggtgagagcgaggaatcccatgaacagttccttaaagccctgcagaatgcagttaccaccttcgttaacagaatgaaatcaaatcacatgagaggcaggagtataaccaacgactctgccgtcctctcgttgtttcaaagcataaacggcatgcatccgcaactcctggagctgcttaaccaacttgacgagagaaggctatactacgaaggtctgcaggacaagctggcgcagattagagatgctcgcggtgcattgtcagccctgagagaggagcatagggaaaaactgcgccgtgctgccgaggaagctgagcgacagagacagattcagctcgcccaaaaacttgaaatcatgatgcacggggtttacatgtctcagcccgctcccgctgcgggaccctacccgagcatgcctagtactgcggcagatccatctatggtgtccgcctatatgtatcctgcaggagctactggggcacaggctgcgcctcaggcccaagcagggcctacagcaagtcctgcctatagttcttaccaacccacgcctacagccggatatcagaatgtggcttcacaggcccctcaatcgctgccagctatcagccagccgcctcaatctagcacaatgggatacatggggtcacaatccgtgtctatggggtaccaaccttacaatatgcagaaccttatgaccacactcccctcgcaggacgcctcactccctcctcagcaaccctatatcgcaggccagcaaccaatgtaccaacaaatggctccctcaggcggacctccccagcagcagcctcctgttgcccagcagccacaggcccaaggccctcccgcacagggttctgaggcccaactaatcagcttcgattag

SEQ ID NO: 318264 - DNA, 2076 bp, Artificial Sequence
  derived and/or modified sequence
atgggcagaggcagcggcaccttcgagagactgctggacaaggccaccagccagctgctgctggagaccgactgggagagcatcctgcagatctgcgacctgatcagacagggcgacacccaggccaagtacgccgtgaacagcatcaagaagaaggtgaacgacaagaacccccacgtggccctgtacgccctggaggtgatggagagcgtggtgaagaactgcggccagaccgtgcacgacgaggtggccaacaagcagaccatggaggagctgaaggacctgctgaagagacaggtggaggtgaacgtgagaaacaagatcctgtacctgatccaggcctgggcccacgccttcagaaacgagcccaagtacaaggtggtgcaggacacctaccagatcatgaaggtggagggccacgtgttccccgagttcaaggagagcgacgccatgttcgccgccgagagagcccccgactgggtggacgccgaggagtgccacagatgcagagtgcagttcggcgtgatgaccagaaagcaccactgcagagcctgcggccagatcttctgcggcaagtgcagcagcaagtacagcaccatccccaagttcggcatcgagaaggaggtgagagtgtgcgagccctgctacgagcagctgaacagaaaggccgagggcaaggccaccagcaccaccgagctgccccccgagtacctgaccagccccctgagccagcagagccagctgccccccaagagagacgagaccgccctgcaggaggaggaggagctgcagctggccctggccctgagccagagcgaggccgaggagaaggagagactgagacagaagagcacctacaccagctaccccaaggccgagcccatgcccagcgccagcagcgccccccccgccagcagcctgtacagcagccccgtgaacagcagcgcccccctggccgaggacatcgaccccgagctggccagatacctgaacagaaactactgggagaagaagcaggaggaggccagaaagagccccacccccagcgcccccgtgcccctgaccgagcccgccgcccagcccggcgagggccacgccgcccccaccaacgtggtggagaaccccctgcccgagaccgacagccagcccatcccccccagcggcggccccttcagcgagccccagttccacaacggcgagagcgaggagagccacgagcagttcctgaaggccctgcagaacgccgtgaccaccttcgtgaacagaatgaagagcaaccacatgagaggcagaagcatcaccaacgacagcgccgtgctgagcctgttccagagcatcaacggcatgcacccccagctgctggagctgctgaaccagctggacgagagaagactgtactacgagggcctgcaggacaagctggcccagatcagagacgccagaggcgccctgagcgccctgagagaggagcacagagagaagctgagaagagccgccgaggaggccgagagacagagacagatccagctggcccagaagctggagatcatgatgcacggcgtgtacatgagccagcccgcccccgccgccggcccctaccccagcatgcccagcaccgccgccgaccccagcatggtgagcgcctacatgtaccccgccggcgccaccggcgcccaggccgccccccaggcccaggccggccccaccgccagccccgcctacagcagctaccagcccacccccaccgccggctaccagaacgtggccagccaggccccccagagcctgcccgccatcagccagcccccccagagcagcaccatgggctacatgggcagccagagcgtgagcatgggctaccagccctacaacatgcagaacctgatgaccaccctgcccagccaggacgccagcctgcccccccagcagccctacatcgccggccagcagcccatgtaccagcagatggcccccagcggcggccccccccagcagcagccccccgtggcccagcagccccaggcccagggcccccccgcccagggcagcgaggcccagctgatcagcttcgactag

SEQ ID NO: 318265 - DNA, 1159 bp, Artificial Sequence
  derived and/or modified sequence
aaaactgaggaggcggagccaagacggtcggggctgcttgctaactccaggaacaggtttaagtttttgaaactgaagtaggcctacacagtaggaactcatgtcatttcttgtaagtaaaccagagcgaatcaggaccaatgatgcgagctcagagtcaatagcatccttctctaaacaggaggtcatgagtagctttctgccagagggagggtgttacgagctgctcactgtgataggcaaaggatttgaggacctgatgactgtgaatctagcaaggtacaaaccaacaggagagtacgtgactgtacggaggattaacctagaagcttgttccaatgagatggtaacattcttgcagggcgagctgcatgtctccaaactcttcaaccatcccaatatcgtgccatatcgagccacttttattgcagacaatgagctgtgggttgtcacatcattcatggcatacggttctgcaaaagatctcatctgtacacacttcatggatggcatgaatgagctggcgattgcttacatcctgcagggggtgctgaaggccctcgactacatccaccacatgggatatgtacacaggagtgtcaaagccagccacatcctgatctctgtggatgggaaggtctacctgtctggtttgcgcagcaacctcagcatgataagccatgggcagcggcagcgagtggtccacgattttcccaagtacagtgtcaaggttctgccgtggctcagccccgaggtcctccagcagaatctccagggttatgatgccaagtctgacatctacagtgtgggaatcacagcctgtgaactggccaacggccatgtcccctttaaggatatgcctgccacccagatgctgctagagaaactgaacggcacagtgccctgcctgttggataccagcaccatccccgctgaggagctgaccatgagcccttcgcgctcagtggccaactctggcctgagtgacagcctgaccaccagcaccccccggccctccaacggcccagtgccagcaccctcctgaaccactctttcttcaagcagatcaagcgacgtgcctcagaggctttgcccgaattgcttcgtcctgtcacccccatcaccaattttgagggcagccagtctcaggaccacagtg

SEQ ID NO: 318266 - DNA, 2110 bp, Artificial Sequence
  derived and/or modified sequence
cggcgcggcggcggctgctagggcctgccgcagccgcggccactcggaaagggcgggacttccccgcagggcggggtggggcggagcgctctatcagtcctcccggtcgccccactgcgcatggcacgttgcgtactcccctcccagcaaccggtctggcggcggcgcggcagtaaaactgaggaggcggagccaagacggtcggggctgcttgctaactccaggaacaggtttaagtttttgaaactgaagtaggcctacacagtaggaactcatgtcatttcttgtaagtaaaccagagcgaatcaggcggtgggtctcggaaaagttcattgttgagggcttaagagatttggaactatttggaggcaaaggatttgaggacctgatgactgtgaatctagcaaggtacaaaccaacaggagagtacgtgactgtacggaggattaacctagaagcttgttccaatgagatggtaacattcttgcagggcgagctgcatgtctccaaactcttcaaccatcccaatatcgtgccatatcgagccacttttattgcagacaatgagctgtgggttgtcacatcattcatggcatacggttctgcaaaagatctcatctgtacacacttcatggatggcatgaatgagctggcgattgcttacatcctgcagggggtgctgaaggccctcgactacatccaccacatgggatatgtacacaggagtgtcaaagccagccacatcctgatctctgtggatgggaaggtctacctgtctggtttgcgcagcaacctcagcatgataagccatgggcagcggcagcgagtggtccacgattttcccaagtacagtgtcaaggttctgccgtggctcagccccgaggtcctccagcagaatctccagggttatgatgccaagtctgacatctacagtgtgggaatcacagcctgtgaactggccaacggccatgtcccctttaaggatatgcctgccacccagatgctgctagagaaactgaacggcacagtgccctgcctgttggataccagcaccatccccgctgaggagctgaccatgagcccttcgcgctcagtggccaactctggcctgagtgacagcctgaccaccagcaccccccggccctccaacggcccagtgccagcaccctcctgaaccactctttcttcaagcagatcaagcgacgtgcctcagaggctttgcccgaattgcttcgtcctgtcacccccatcaccaattttgagggcagccagtctcaggaccacagtggaatctttggcctggtaacaaacctggaagagctggaggtggacgattgggagttctgagcctctgcaaactgtgcgcattctccagccagggatgcagaggccacccagaggcccttcctgagggccggccacattcccgccctcctgggcagattgggtagaaaggacattcttccaggaaagttgactgctgactgattgggaaagaaaatcctggagagacacttcactgctccaaggcttttgagacacaagggaatctcaacaaccagggatcaggagggtccaaagccgacattcccagtcctgtgagctcaggtgacctcctccgcagaagagagatgctgctctggccctgggagctgaattccaagcccagggtttggctccttaaacccgaggaccgccacctcttcccagtgcttgcgaccagcctcattctatttaactttgctctcagatgcctcagatgctataggtcagtgaaagggcaagtagtaagctgcctgcctcccttccctcagacctctccctcataattccagagaagggcatttctgtctttttaagcacagactaaggctggaacagtccatccttatccctcttctggcttgggccctgacacctaagtctttcccacggtttatgtgtgtgcctcattcctttcccaccaagaatccatcttagcgcctcctgccagctgccctggtgctttctccaagggccatcagtgtcttgcctagcttgagggcttaagtccttatgctgtgttagtttcgttgtcagaacaaattaaaattttcagagacgctgctgg

SEQ ID NO: 318267 - DNA, 2304 bp, Artificial Sequence
  derived and/or modified sequence
cggcgcggcggcggctgctagggcctgccgcagccgcggccactcggaaagggcgggacttccccgcagggcggggtggggcggagcgctctatcagtcctcccggtcgccccactgcgcatggcacgttgcgtactcccctcccagcaaccggtctggcggcggcgcggcagtaaaactgaggaggcggagccaagacggtcggggctgcttgctaactccaggaacaggtttaagtttttgaaactgaagtaggcctacacagtaggaactcatgtcatttcttgtaagtaaaccagagcgaatcaggcggtgggtctcggaaaagttcattgttgagggcttaagagatttggaactatttggagaccaatgatgcgagctcagagtcaatagcatccttctctaaacaggaggtcatgagtagctttctgccagagggagggtgttacgagctgctcactgtgataggcaaaggatttgaggacctgatgactgtgaatctagcaaggtacaaaccaacaggagagtacgtgactgtacggaggattaacctagaagcttgttccaatgagatggtaacattcttgcagggcgagctgcatgtctccaaactcttcaaccatcccaatatcgtgccatatcgagccacttttattgcagacaatgagctgtgggttgtcacatcattcatggcatacggttctgcaaaagatctcatctgtacacacttcatggatggcatgaatgagctggcgattgcttacatcctgcagggggtgctgaaggccctcgactacatccaccacatgggatatgtacacaggagtgtcaaagccagccacatcctgatctctgtggatgggaaggtctacctgtctggtttgcgcagcaacctcagcatgataagccatgggcagcggcagcgagtggtccacgattttcccaagtacagtgtcaaggttctgccgtggctcagccccgaggtcctccagcagaatctccagggttatgatgccaagtctgacatctacagtgtgggaatcacagcctgtgaactggccaacggccatgtcccctttaaggatatgcctgccacccagatgctgctagagaaactgaacggcacagtgccctgcctgttggataccagcaccatccccgctgaggagctgaccatgagcccttcgcgctcagtggccaactctggcctgagtgacagcctgaccaccagcaccccccggccctccaacggtgactcgccctcccacccctaccaccgaaccttctccccccacttccaccactttgtggagcagtgccttcagcgcaacccggatgccaggcccagtgccagcaccctcctgaaccactctttcttcaagcagatcaagcgacgtgcctcagaggctttgcccgaattgcttcgtcctgtcacccccatcaccaattttgagggcagccagtctcaggaccacagtggaatctttggcctggtaacaaacctggaagagctggaggtggacgattgggagttctgagcctctgcaaactgtgcgcattctccagccagggatgcagaggccacccagaggcccttcctgagggccggccacattcccgccctcctgggcagattgggtagaaaggacattcttccaggaaagttgactgctgactgattgggaaagaaaatcctggagagacacttcactgctccaaggcttttgagacacaagggaatctcaacaaccagggatcaggagggtccaaagccgacattcccagtcctgtgagctcaggtgacctcctccgcagaagagagatgctgctctggccctgggagctgaattccaagcccagggtttggctccttaaacccgaggaccgccacctcttcccagtgcttgcgaccagcctcattctatttaactttgctctcagatgcctcagatgctataggtcagtgaaagggcaagtagtaagctgcctgcctcccttccctcagacctctccctcataattccagagaagggcatttctgtctttttaagcacagactaaggctggaacagtccatccttatccctcttctggcttgggccctgacacctaagtctttcccacggtttatgtgtgtgcctcattcctttcccaccaagaatccatcttagcgcctcctgccagctgccctggtgctttctccaagggccatcagtgtcttgcctagcttgagggcttaagtccttatgctgtgttagtttcgttgtcagaacaaattaaaattttcagagacgctgctgg

SEQ ID NO: 318268 - DNA, 504 bp, Artificial Sequence
  derived and/or modified sequence
atggagcaggaacacatacctcactggatccagaccagcgctttttcaggggggctcggtcgctcatggtgtaaaatccggtgcatggcccgcgccggcttgcccgtgcatatggtgaacggagaccctgacacaggaagacctttattgaccgccccgggcgcaaagcaacctccaaggggatggcgtcggcaagctggaagttcttgcagccgggcaaggggtgtctggagaggcgcgttggcaagccggcagggcgcgcagcgggggtccaaggggccgggagtgagtcatcaaagttatggggtggaggggcttggctccagtgtgtgtcccgtgacatggcacctgcgcgctttgccaaggcagctctgcgatgcttcacatcagaccgcatgtataaagagtggggtgtgttcctctctcaagtggagaaggccagaggcactagaccggcgtagccatatactcgagggatcggtgctggggcaccgatgcccttag

SEQ ID NO: 318269 - DNA, 530 bp, Artificial Sequence
  derived and/or modified sequence
atggcccgcggggctgcgctggcgctgctgctcttcggcctgctgggtgttctggtcgccgccccggggtttggggacctgcgtcttcaggccgcgcgcggaggccgccctggagttgcctgtcacagccacgccctgcgtcccgggcctaaatttggaatcgctaggagcctgagacccgggtggtggggggaagggaaggaaaagttagaaaaaaactttgagccctgaaaatgttcaaaaatactctgtggatgcgggctccgggaatttcagcgcgtgctgtgcgccaagcaacacggggcgcagaaagaaacgtgtgcttaccaaattgtccatctgcggcggtggagaattcggaaaacagaaaaagtgggcagggaagaaagagccacggtcaccctcccacgccctaaaccgggcctatttctaattattactttaatcatgtttttctgtttccctccctttgaaacggaaacggagaccctgccggatgtggtatgttataaattcttttttcatgttat

SEQ ID NO: 318270 - protein, 218 aa, Artificial Sequence
  derived and/or modified sequence
MMEAFAQRYCQCNNGVFQSTDTCYVLSFAIIMLNTSLHNPNVKDKPTVERFIAMNRGINDGGDLPEELLRNLYESIKNEPFKIPEDDGNDLTHTFFNPDREGWLLKLAGGRVKTWKRRWFILTDNCLYYFEYTTDKEPRGIIPLENLSIREVEDSKKPNCFELYIPDNKDQVIKACKTEADGRVVEGNHTVYRISAPTPEEKEEWIKCIKFQVSPGEP

SEQ ID NO: 318271 - DNA, 657 bp, Artificial Sequence
  derived and/or modified sequence
atgatggaagcctttgcacagaggtactgtcagtgtaacaacggcgttttccagagcactgacacatgctacgtgctgagtttcgctatcataatgctcaacacctcattgcacaatcctaacgtaaaggataagcctactgtcgagagattcatcgcgatgaaccgcggcattaatgatggcggcgacttgcctgaggagctcttacggaacctgtacgagtcaatcaaaaacgagccttttaagatccccgaggacgacggcaatgaccttacccacacgtttttcaatccagatagagaaggctggttgttgaaactggctggagggagagtgaaaacatggaagcggcggtggtttatcctgacggacaactgtctctactacttcgaatacactacagataaggagcccagaggcattatcccgctagagaaccttagcatccgcgaggtagaagattctaagaaacctaactgttttgagttatatatccccgacaacaaggaccaggtaattaaggcctgtaaaaccgaagctgacgggagggtcgtggagggcaatcatacagtataccggatctctgcgccaacccctgaggagaaggaggaatggatcaaatgtattaaattccaggtaagccccggggagccttag

SEQ ID NO: 318272 - DNA, 657 bp, Artificial Sequence
  derived and/or modified sequence
atgatggaggcctttgcccagcgctactgccagtgcaacaacggggtcttccagagcacagacacctgctacgtgctgagctttgccatcatcatgctgaacaccagcctgcacaaccccaacgtgaaggacaagcccaccgtggagcgcttcatcgccatgaacagaggcatcaatgatggaggagacctgcctgaggagctgctgaggaacctgtatgagagcatcaagaatgagcccttcaagatcccagaagatgatggaaatgacctgacccacaccttcttcaacccagaccgggagggctggctgctgaagctggccggcggccgggtgaagacctggaagaggcgctggttcatcctgacagacaactgcctgtactactttgagtacaccacagacaaggagccccggggcatcatccccctggagaacctgagcatccgggaggtggaggacagcaagaagcccaactgctttgagctgtacatcccagacaacaaggaccaggtgatcaaggcctgcaagacagaagcagatggccgggtggtggagggcaaccacacagtgtaccgcatcagcgcccccaccccagaggagaaggaggagtggatcaagtgcatcaagttccaggtgtccccaggagagccctag

SEQ ID NO: 318273 - DNA, 657 bp, Artificial Sequence
  derived and/or modified sequence
atgatggaggccttcgcccagcggtactgccagtgcaacaacggcgtatttcagtccactgacacatgttatgttctgagcttcgcaataataatgcttaacaccagcctacacaatcccaatgtaaaggacaagccaacggtcgagagattcatcgcaatgaatcgcggcattaatgatggcggggatctacctgaagagttgttgcggaacctttacgaaagcattaagaatgaaccgttcaagattccagaggatgatggaaatgatcttacacataccttcttcaatcccgatagagaggggtggttgctaaaactggccggaggccgcgtgaaaacctggaagcgccggtggtttattctgacggataattgtctttactacttcgagtacaccactgataaagaaccgcgcggtatcatacctttagaaaacctgagtatcagggaggtggaggactcaaagaagccgaactgcttcgagttatatatccctgataacaaggaccaggtgataaaagcatgtaagactgaagcagacggaagagtggtagaaggaaaccatactgtctatcggatctccgcacccactccagaggagaaggaggagtggataaagtgcatcaagttccaagtctcccccggggagccctag

SEQ ID NO: 318274 - DNA, 657 bp, Artificial Sequence
  derived and/or modified sequence
atgatggaggcatttgctcagagatactgtcagtgcaataatggtgtgtttcagtccacagacacttgctatgtcctctcctttgccatcatcatgttgaataccagtctccataatccaaacgtcaaggataaacccaccgtcgagagatttatcgctatgaatcggggaatcaatgacggtggagacctgcctgaagaactcttacgtaacctctacgaaagcattaaaaatgaaccttttaaaataccagaagacgatggaaacgacctgacccacaccttctttaatccggatagggaaggatggctgctgaaattggctggtggtcgcgtgaaaacatggaaacgacgatggttcattcttacagataactgcttatactattttgagtatacaactgataaagaacccaggggaatcatccccttagaaaatctgtccatccgagaggttgaagactcaaagaaacccaactgtttcgaactttacattcctgataataaggaccaagttattaaagcctgcaaaacagaggcggacggtcgagtagtcgagggtaaccacactgtataccggatcagtgcgccaacccctgaggagaaggaggagtggattaaatgtataaagttccaggtgtctccgggagaaccctag

SEQ ID NO: 318275 - DNA, 657 bp, Artificial Sequence
  derived and/or modified sequence
atgatggaggccttcgcccagagatactgccagtgcaacaacggcgtgttccagagcaccgacacctgctacgtgctgagcttcgccatcatcatgctgaacaccagcctgcacaaccccaacgtgaaggacaagcccaccgtggagagattcatcgccatgaacagaggcatcaacgacggcggcgacctgcccgaggagctgctgagaaacctgtacgagagcatcaagaacgagcccttcaagatccccgaggacgacggcaacgacctgacccacaccttcttcaaccccgacagagagggctggctgctgaagctggccggcggcagagtgaagacctggaagagaagatggttcatcctgaccgacaactgcctgtactacttcgagtacaccaccgacaaggagcccagaggcatcatccccctggagaacctgagcatcagagaggtggaggacagcaagaagcccaactgcttcgagctgtacatccccgacaacaaggaccaggtgatcaaggcctgcaagaccgaggccgacggcagagtggtggagggcaaccacaccgtgtacagaatcagcgcccccacccccgaggagaaggaggagtggatcaagtgcatcaagttccaggtgagccccggcgagccctag

SEQ ID NO: 318276 - DNA, 1020 bp, Artificial Sequence
  derived and/or modified sequence
atgcaacgaaataagcaagtcgcgatgggccggaagaaatttaatatggacccaaaaaaagggatccagttcctgatcgaaaatgacttgctgaagaacacatgtgaggacattgctcagttcttgtacaaaggcgaggggttgaacaagacagcgattggggactacctgggagaacgggacgagtttaacatccaggttctgcatgccttcgtcgaattgcacgagttcactgacctgaatctggtgcaggcactccggcagttcctttggtccttccgcctgcctggcgaggcccagaagatcgatagaatgatggaagcctttgcccaaaggtattgccagtgtaataatggcgtttttcagtccacggatacgtgttacgtgctgtcgtttgccatcatcatgttgaatacttctttgcacaaccccaacgtcaaggacaagccaacagtggagcggttcatcgctatgaacaggggaataaatgatggcggggaccttcctgaagagctactgcgcaacctctatgagtcaatcaaaaacgagccctttaagattcccgaagacgatggtaacgatctgacacataccttctttaatccggaccgtgaaggctggctcttgaagctgggaggaggccgcgttaagacctggaagaggaggtggttcatattgacggacaattgtctgtactacttcgaatatactacggacaaggaacccaggggtatcatccctttggaaaacttatctattagggaagtagaggactcaaagaagccaaactgtttcgagctgtatatccctgataataaggatcaggtcatcaaggcttgcaagaccgaggccgacgggagggtcgtcgagggtaaccataccgtgtatcggataagtgctccaacaccagaggagaaagaggaatggatcaagtgtataaaggccgccatcagtcgggatccgttttacgagatgctcgctgcccgcaaaaagaaagtgagtagcaccaaacggcactag

SEQ ID NO: 318277 - DNA, 1020 bp, Artificial Sequence
  derived and/or modified sequence
atgcagaggaataaacaagtagctatgggtcgcaagaagtttaacatggacccaaaaaagggcatccagttcctgatcgaaaacgacctgctgaagaatacatgtgaagacatagcccagtttctgtataaaggggaaggcctaaataaaactgctataggggactatctcggagaaagggacgagtttaacatacaggtgctgcatgcttttgtggagctgcatgagttcacagatcttaatttggtgcaagctctgcgtcaattcctttggtcattccgattgcctggtgaagcgcagaaaatcgatagaatgatggaggctttcgcccagcgctattgccagtgcaacaatggagtctttcagtccacagatacttgctacgttttgagctttgccattatcatgctgaacacttctttgcataacccaaatgtcaaggataagccgaccgtggagagattcatcgcgatgaatcgcggcattaacgatggaggggacctgcccgaagaattactgcgaaatctttacgagagcatcaagaatgagccctttaaaatcccggaagacgacggtaacgatctaactcatactttttttaatcctgatcgggaaggctggctactcaaactcggtggagggcgtgttaaaacctggaagcgcagatggtttatcctgacagataactgcctgtactattttgagtacactaccgacaaagaacccagggggattattccactagaaaatctttccatcagggaagtggaagactctaagaaaccaaattgttttgaactttatataccagataataaagaccaggttatcaaagcttgtaagaccgaggcagatgggcgcgttgtggagggaaatcacactgtttatcggatctctgcccccaccccagaagagaaggaagaatggattaagtgcattaaagccgccattagtagagatcctttctatgagatgctggccgccaggaaaaagaaggtttccagcacaaagcgacattag

SEQ ID NO: 318278 - DNA, 1020 bp, Artificial Sequence
  derived and/or modified sequence
atgcagaggaacaagcaggtggccatgggcaggaagaagttcaacatggaccccaagaagggcatccagttcctgattgaaaatgacctgctgaagaacacctgtgaggacatcgcccagttcctgtacaagggggagggcctgaacaagacagccatcggggactacctgggggagagagatgagttcaacatccaggtgctgcacgcctttgtggagctgcacgagttcacagacctgaacctggtgcaggccctgcggcagttcctgtggagcttccggctgcccggggaggcccagaagattgacaggatgatggaggcctttgcccagcgctactgccagtgcaacaacggggtcttccagagcacagacacctgctacgtgctgagctttgccatcatcatgctgaacaccagcctgcacaaccccaacgtgaaggacaagcccaccgtggagcgcttcatcgccatgaacagaggcatcaatgatggaggagacctgcctgaggagctgctgaggaacctgtatgagagcatcaagaatgagcccttcaagatcccagaagatgatggaaatgacctgacccacaccttcttcaacccagaccgggagggctggctgctgaagctgggcggcggccgggtgaagacctggaagaggcgctggttcatcctgacagacaactgcctgtactactttgagtacaccacagacaaggagccccggggcatcatccccctggagaacctgagcatccgggaggtggaggacagcaagaagcccaactgctttgagctgtacatcccagacaacaaggaccaggtgatcaaggcctgcaagacagaagcagatggccgggtggtggagggcaaccacacagtgtaccgcatcagcgcccccaccccagaggagaaggaggagtggatcaagtgcatcaaggccgccatcagccgggaccccttctatgagatgctggccgccaggaagaagaaggtgagcagcaccaagaggcactag

SEQ ID NO: 318279 - DNA, 1020 bp, Artificial Sequence
  derived and/or modified sequence
atgcagcggaacaagcaggtggccatgggccggaagaagttcaacatggacccaaaaaaaggtatccagttcctgatcgaaaatgacctactgaagaacacgtgtgaagatatcgcccaattcctgtacaaaggcgaaggactgaacaagacagccatcggggactatctgggtgagcgggacgagttcaacatacaagtccttcatgctttcgtggagttacatgagttcactgatctcaatctcgttcaggctctgaggcagtttctctggagcttccggttgccaggcgaggcccagaaaattgaccggatgatggaagccttcgcacaacgctattgtcagtgcaataacggagtctttcagtccaccgacacatgttacgtgctctccttcgctatcattatgttgaacacctcactgcacaaccctaatgtgaaagataagcctactgtggagagattcatagcaatgaacaggggcattaacgacggcggcgatcttccggaagagcttttaaggaatctgtacgagagcataaaaaacgagcccttcaaaatacccgaggatgatggaaatgacttaacacacacattctttaaccctgatcgggaaggctggcttttgaagctgggaggcgggcgggtgaagacctggaaaaggagatggtttatcttgactgataattgtctctattactttgaatacacaaccgacaaggagcccagaggaattatcccactggaaaatctttccattcgagaagttgaggattccaaaaagccaaactgcttcgaattatatatcccagacaataaagatcaggtaattaaagcttgcaagaccgaagccgacgggagggtggtcgaagggaatcacaccgtttacagaatctccgccccgacccctgaagagaaagaagaatggattaaatgcattaaagcggctatttccagggaccctttctatgaaatgcttgccgcaaggaagaaaaaagtatccagcaccaaaaggcattag

SEQ ID NO: 318280 - DNA, 1020 bp, Artificial Sequence
  derived and/or modified sequence
atgcagcggaacaagcaggtggccatgggccggaagaagttcaacatggaccccaagaagggcatccagtttctcatcgaaaatgatctcctgaaaaatacttgcgaggacatcgcccaattcctctataaaggcgagggactgaataagaccgccattggtgattatctgggtgagagggatgagttcaatatccaggtcttacacgccttcgtcgaactgcatgagtttaccgatctgaatctcgtgcaggcacttagacagtttctctggtcctttcggctgcctggcgaggcccagaaaatcgataggatgatggaagcttttgcccagcggtattgccagtgtaataatggggtgttccagagcactgatacatgttacgtcctgtcatttgccattattatgttgaacaccagtctccacaaccccaacgtgaaagataagccaacagtggaaaggttcattgcaatgaacagaggaataaacgacggcggcgacttgcctgaggagctcctgcggaatctgtacgaaagcatcaagaatgagccatttaagatccctgaggacgacggaaacgacctgacacatacgttctttaatccagatagggaaggctggttgttaaaattaggtggaggccgcgttaaaacctggaagagacgatggttcatcttaactgataactgcctgtactatttcgagtataccactgacaaagagccccgcggcattattcccttagaaaatctatccatccgagaggtagaggatagcaaaaaacccaactgctttgaactgtatatccccgataacaaggatcaggtcatcaaagcctgcaagactgaagcagatgggcgcgtagtggaaggaaaccatacagtgtataggatatccgcccctacgcctgaagagaaggaggagtggatcaagtgcatcaaggccgccatatcgcgggatcccttttatgagatgcttgccgccaggaaaaagaaggtcagttcaaccaagaggcattag

SEQ ID NO: 318281 - DNA, 1020 bp, Artificial Sequence
  derived and/or modified sequence
atgcagcgtaataagcaggtggccatgggaaggaaaaaatttaatatggacccaaaaaaaggaattcaatttcttatagagaacgatctgctgaagaacacctgtgaagatatcgctcaatttctttataagggagagggcctgaacaaaaccgccattggcgactacctcggcgagcgtgatgaattcaatatacaggtcttgcacgcctttgtggagcttcacgagttcacagatttgaatctagttcaagcgttaaggcagttcctgtggagcttccgcctgccgggagaagcccaaaaaatcgataggatgatggaagcattcgctcaacgctattgtcaatgcaacaacggagtgtttcaaagtacagacacctgttatgtcctgtcattcgctatcattatgctgaacacctccctgcataatcctaacgtgaaagataagcctaccgtcgaaagatttattgcgatgaatcgcggaatcaatgatggcggagatctaccagaggagctgctgagaaatctctacgagtccatcaaaaacgaaccatttaaaattccagaagatgatggtaacgaccttactcatacctttttcaaccctgaccgcgaggggtggctcctgaaacttggcggaggcagggtaaaaacatggaagcgtaggtggtttatcctcaccgacaactgcttgtactacttcgagtatacaactgataaggagccaaggggcatcattcccctggagaatctgagtatcagagaggtcgaggacagcaaaaaaccaaattgttttgagttatacattcccgataataaggaccaagtcattaaggcatgtaaaaccgaagccgacggcagagttgtggaggggaaccataccgtatataggatcagcgctcctacaccagaagagaaggaggagtggatcaaatgcatcaaggccgctattagcagggacccattctacgagatgctcgccgctagaaagaaaaaggtgagctctaccaaacgccattag

SEQ ID NO: 318282 - DNA, 1020 bp, Artificial Sequence
  derived and/or modified sequence
atgcagcgaaacaagcaggtggccatgggtaggaagaagttcaatatggaccctaaaaagggcattcagttcttgatcgaaaacgatttactgaagaacacctgcgaagacatcgctcagtttctatacaaaggcgaaggactgaataagactgcaatcggagactatctgggggagagggatgaatttaatatccaggtcctgcatgcttttgtcgaattacatgagttcaccgacctcaacttggtccaggctctgcggcaatttttatggtcattccggctgccgggtgaggcgcagaaaatcgaccgcatgatggaggcctttgctcaacgctattgtcagtgcaataacggcgtcttccagtctactgacacttgctacgtgttatcctttgccattataatgcttaatacaagccttcataacccaaacgtcaaagataagccaacggtagagagattcatagccatgaacaggggaatcaatgatggaggcgacctccctgaggagctgcttcgtaacctgtacgagagcattaaaaatgaaccatttaagattccagaggacgatggtaacgatctgacacataccttttttaacccagaccgggagggatggcttttgaaactgggcggtgggagagtgaaaacatggaaaagaaggtggtttatcctgacggacaactgcctctattatttcgaatacactaccgacaaggagccacggggtataattcctctggaaaatttgtctatcagggaagtggaagactcgaagaagccaaactgcttcgaattatatataccagacaataaggaccaggtgatcaaggcctgcaagaccgaggcagacggacgcgtggtcgagggcaaccatacagtctatcgaatttctgcccctacgccagaggagaaggaggaatggatcaagtgcatcaaagccgcaattagccgggaccccttctatgaaatgctcgccgcacgaaagaaaaaagtttcgagcacgaaaagacattag

SEQ ID NO: 318283 - DNA, 1020 bp, Artificial Sequence
  derived and/or modified sequence
atgcagagaaacaagcaggtggccatgggcagaaagaagttcaacatggaccccaagaagggcatccagttcctgatcgagaacgacctgctgaagaacacctgcgaggacatcgcccagttcctgtacaagggcgagggcctgaacaagaccgccatcggcgactacctgggcgagagagacgagttcaacatccaggtgctgcacgccttcgtggagctgcacgagttcaccgacctgaacctggtgcaggccctgagacagttcctgtggagcttcagactgcccggcgaggcccagaagatcgacagaatgatggaggccttcgcccagagatactgccagtgcaacaacggcgtgttccagagcaccgacacctgctacgtgctgagcttcgccatcatcatgctgaacaccagcctgcacaaccccaacgtgaaggacaagcccaccgtggagagattcatcgccatgaacagaggcatcaacgacggcggcgacctgcccgaggagctgctgagaaacctgtacgagagcatcaagaacgagcccttcaagatccccgaggacgacggcaacgacctgacccacaccttcttcaaccccgacagagagggctggctgctgaagctgggcggcggcagagtgaagacctggaagagaagatggttcatcctgaccgacaactgcctgtactacttcgagtacaccaccgacaaggagcccagaggcatcatccccctggagaacctgagcatcagagaggtggaggacagcaagaagcccaactgcttcgagctgtacatccccgacaacaaggaccaggtgatcaaggcctgcaagaccgaggccgacggcagagtggtggagggcaaccacaccgtgtacagaatcagcgcccccacccccgaggagaaggaggagtggatcaagtgcatcaaggccgccatcagcagagaccccttctacgagatgctggccgccagaaagaagaaggtgagcagcaccaagagacactag

SEQ ID NO: 318284 - protein, 410 aa, Artificial Sequence
  derived and/or modified sequence
MSSHHTTFPFDPERRVRSTLKKVFGFDSFKTPLQESATMAVVKGNKDVFVCMPTGAGKSLCYQLPALLAKGITIVVSPLIALIQDQVDHLLTLKVRVSSLNSKLSAQERKELLADLEREKPQTKILYITPEMAASSSFQPTLNSLVSRHLLSYLVVDEAHCVSQWGHDFRPDYLRLGALRSRLGHAPCVALTATATPQVQEDVFAALHLKKPVAIFKTPCFRANLFYDVQFKELISDPYGNLKDFCLKALGQEADKGLSGCGIVYCRTREACEQLAIELSCRGVNAKAYHAGLKASERTLVQNDWMEEKVPVIVATISFGMGVDKANVRFVAHWNIAKSMAGYYQESGRAGRDGKPSWCRLYYSRNDRDQVSFLIRKEVAKLQEKRGNKASDKATIMAFDALVTFCEELG

SEQ ID NO: 318285 - DNA, 3396 bp, Artificial Sequence
  derived and/or modified sequence
ctccagagccgggatgtgtccagccccgagggcacggcaggcagctggaccctgacccagcggcgcggagtcggagccccggccgtcccgcgctcctcggacccgaacctgcaggggacctcgggccgctggcgcctccgcatgcggcaccgcaattagggagatgctgcaggataagggcctgtccgagagcgaggaggccttccgggccccgggcccagcgctcggagaggccagcgcagccaacgcccccgagcccgcgctggcagcgccgggcctcagcggagccgcgctaggcagccccccgggacccggggccgacgtcgtcgccgccgccgccgcggagcagaccatcgagaacatcaaggtggggctgcatgagaaggagctctggaagaagttccacgaggcgggcaccgagatgatcatcactaaggctggcaggaggatgttccccagctacaaggtaaaagtcacaggcatgaaccccaagaccaagtatatcctgctgattgacattgtccctgccgatgaccatcgctacaagttctgtgacaacaaatggatggtggcagggaaggctgagccagccatgccaggaaggctgtatgtccacccggattctcctgccacaggagcccactggatgcggcagctggtctccttccagaagctgaagctgacaaacaaccacctggacccctttggccatatcatcctcaactctatgcacaagtaccagccgcggctccacatcgttaaggctgatgagaacaatgctttcggctccaaaaacactgctttctgcacccacgtgttcccagagacctccttcatctctgtgacctcctaccagaatcacaagatcacccagctgaaaattgagaacaacccttttgccaagggattccggggcagtgatgacagtgacctgcgtgtggcccgactgcagagcaaagaataccccgtgatttccaaaagcatcatgaggcagaggctcatctccccccagctctcagccacaccggacgtgggccccctgctcggcacccaccaggcactccagcactaccagcacgagaacggggcacactcacagctcgcggagccgcaggacctgcccctcagcacctttcccacccagagggactcaagcctcttctatcactgcctgaaaagacgagcagacggtacccgccacctggacttaccttgcaagcgatcctatctggaagccccctcttcggtgggggaggatcactatttccgttccccccctccctacgaccagcaaatgctgagcccctcctactgcagtgaggtgacccccagagaagcatgtatgtactcaggttcagggcccgagattgccggggtgtctggggtggacgacctgcccccacctccgctgagctgtaacatgtggacttcagtgtcgccgtacaccagctatagcgtgcagacgatggagactgtgccgtaccagcccttccccacgcacttcaccgccaccaccatgatgccgcggctgcccaccctctccgctcagagctcccagccaccaggaaatgcccactttagtgtctacaatcagctctcccagtctcaggtccgagagcgggggcccagcgcctcattcccaagagagcgcggcctcccccaagggtgtgagaggaagccaccctcgccacatctaaatgctgccaatgagtttctctactctcaaaccttctccttgtcccgagaatcttccttacagtaccattcaggaatggggactgtggagaactggactgacggatgactctcacgtctcctccatagccccgggaccgtgttgctccagtattaacctctgtgggtggcctgcactctaccaagaaacacaggaaggtattccagtgtgtgtgtgtgtgtgtgtgtgtgtgtgtgtgtgtgtgtatacacgagcatgtatgtatttggagagcatccatcttctgacatacaactgaggtcatgacaaggaaaaaaaacaccacatttatctaagaagtgattttggctgcaggacctgggtctattgttatctgacatctcttgacatgcccgtgggtgggatgggagtggagggttcatatgagttattgagagggttttataatggttgatttactcaggggccaggtggggagttctctcccatggggaaagattctcactgctggggtgggaagattctcgctgctggggtgtgaggactctgtgcacaccttagagttcctggccttctctttgcaaggggagctgagaatctggttttggtagcaggaggcccactcctttgacttctggagagtctgtgagactgcctgagaggtgggctcagctaagccacaatgtgtactttgatagtacagctggctgctcagtgagtggcctagacattgatgactggagctctgaggtctgagggatgacgttcggaaagggtcatgggctaaatgtcacctgaggggtatttttaaagggtttttttttcccttcaagaggagggaaaatgcaaccagtagcatctctgtcatcattcagattttgtaataaagtacagagcccttccccctaggtccccaacatacagtctctcactctggtgtgtggagagtcagcctcccaggcaccataccatctgcatcctatgatgatgggcaattatgaaacacgcctcagctggcatcatccccaggaggccacactggagctgatgtctggcatctccagggcctgttctgctctcagaaaatctacgcttctggagcgagaaaggccaacagaaataaagatagttgaaaaaaatttgtttcttccagtaaattcagccggtgagctcagaggagcaaagagaattctccagtgtggcgctcacaaagtcctcagccctgcgttttagcattgaataccaccaggccatcagtgtggctggggtgaactctccatcaaacttgggaaatcactaaactctttgcatgctgaatagctatttatatattatataaataaataaatatatatattatatatcgctctctctcacaaatgcaggccacatgtcaaattcagctttgctttctacaaatgaatgaacttaataaaaataaacgttggagggggtatttggaaagacatctatttaaatttttattacatgtttgatattaaaaactaagaatggtttagataaaacatataaataaatatatatatatatatatatatatataaacacacacacactacagataaggcttttttagaaaacacattagctaacaggtgatatggaacttcaagtgttttgttatatagcatggatgttttattttgcatatcggaacataaagccattttacaactgtg

SEQ ID NO: 318286 - DNA, 2470 bp, Artificial Sequence
  derived and/or modified sequence
tgtggacctgggcgagtgactcgttgtgtgctgtgcccgcaggagatgctgcaggataagggcctgtccgagagcgaggaggccttccgggccccgggcccagcgctcggagaggccagcgcagccaacgcccccgagcccgcgctggcagcgccgggcctcagcggagccgcgctaggcagccccccgggacccggggccgacgtcgtcgccgccgccgccgcggagcagaccatcgagaacatcaaggtggggctgcatgagaaggagctctggaagaagttccacgaggcgggcaccgagatgatcatcactaaggctggcaggaggatgttccccagctacaaggtaaaagtcacaggcatgaaccccaagaccaagtatatcctgctgattgacattgtccctgccgatgaccatcgctacaagttctgtgacaacaaatggatggtggcagggaaggctgagccagccatgccaggaaggctgtatgtccacccggattctcctgccacaggagcccactggatgcggcagctggtctccttccagaagctgaagctgacaaacaaccacctggacccctttggccatatcatcctcaactctatgcacaagtaccagccgcggctccacatcgttaaggctgatgagaacaatgctttcggctccaaaaacactgctttctgcacccacgtgttcccagagacctccttcatctctgtgacctcctaccagaatcacaagatcacccagctgaaaattgagaacaacccttttgccaagggattccggggcagtgatgacagtgacctgcgtgtggcccgactgcagagcaaagaataccccgtgatttccaaaagcatcatgaggcagaggctcatctccccccagctctcagccacaccggacgtgggccccctgctcggcacccaccaggcactccagcactaccagcacgagaacggggcacactcacagctcgcggagccgcaggacctgcccctcagcacctttcccacccagagggactcaagcctcttctatcactgcctgaaaagacgagacggtacccgccacctggacttaccttgcaagcgatcctatctggaagccccctcttcggtgggggaggatcactatttccgttccccccctccctacgaccagcaaatgctgagcccctcctactgcagtgaggtgacccccagagaagcatgtatgtactcaggttcagggcccgagattgccggggtgtctggggtggacgacctgcccccacctccgctgagctgtaacatgtggacttcagtgtcgccgtacaccagctatagcgtgcagacgatggagactgtgccgtaccagcccttccccacgcacttcaccgccaccaccatgatgccgcggctgcccaccctctccgctcagagctcccagccaccaggaaatgcccactttagtgtctacaatcagctctcccagtctcaggtccgagagcgggggcccagcgcctcattcccaagagagcgcggcctcccccaagggtgtgagaggaagccaccctcgccacatctaaatgctgccaatgagtttctctactctcaaaccttctccttgtcccgagaatcttccttacagtaccattcaggaatggggactgtggagaactggactgacggatgactctcacgtctcctccatagccccgggaccgtgttgctccagtattaacctctgtgggtggcctgcactctaccaagaaacacaggaaggtattccagtgtgtgtgtgtgtgtgtgtgtgtgtgtgtgtgtgtgtgtatacacgagcatgtatgtatttggagagcatccatcttctgacatacaactgaggtcatgacaaggaaaaaaaacaccacatttatctaagaagtgattttggctgcaggacctgggtctattgttatctgacatctcttgacatgcccgtgggtgggatgggagtggagggttcatatgagttattgagagggttttataatggttgatttactcaggggccaggtggggagttctctcccatggggaaagattctcactgctggggtgggaagattctcgctgctggggtgtgaggactctgtgcacaccttagagttcctggccttctctttgcaaggggagctgagaatctggttttggtagcaggaggcccactcctttgacttctggagagtctgtgagactgcctgagaggtgggctcagctaagccacaatgtgtactttgatagtacagctggctgctcagtgagtggcctagacattgatgactggagctctgaggtctgagggatgacgttcggaaagggtcatgggctaaatgtcacctgaggggtatttttaaagggtttttttttcccttcaagaggagggaaaatgcaaccagtagcatctctgtcatcattcagattttgtaataaagtacaga

SEQ ID NO: 318287 - DNA, 1638 bp, Artificial Sequence
  derived and/or modified sequence
atgctgcaggacaagggcctgagcgagagcgaggaggccttcagagcccccggccccgccctgggcgaggccagcgccgccaacgcccccgagcccgccctggccgcccccggcctgagcggcgccgccctgggcagcccccccggccccggcgccgacgtggtggccgccgccgccgccgagcagaccatcgagaacatcaaggtgggcctgcacgagaaggagctgtggaagaagttccacgaggccggcaccgagatgatcatcaccaaggccggcagaagaatgttccccagctacaaggtgaaggtgaccggcatgaaccccaagaccaagtacatcctgctgatcgacatcgtgcccgccgacgaccacagatacaagttctgcgacaacaagtggatggtggccggcaaggccgagcccgccatgcccggcagactgtacgtgcaccccgacagccccgccaccggcgcccactggatgagacagctggtgagcttccagaagctgaagctgaccaacaaccacctggaccccttcggccacatcatcctgaacagcatgcacaagtaccagcccagactgcacatcgtgaaggccgacgagaacaacgccttcggcagcaagaacaccgccttctgcacccacgtgttccccgagaccagcttcatcagcgtgaccagctaccagaaccacaagatcacccagctgaagatcgagaacaaccccttcgccaagggcttcagaggcagcgacgacagcgacctgagagtggccagactgcagagcaaggagtaccccgtgatcagcaagagcatcatgagacagagactgatcagcccccagctgagcgccacccccgacgtgggccccctgctgggcacccaccaggccctgcagcactaccagcacgagaacggcgcccacagccagctggccgagccccaggacctgcccctgagcaccttccccacccagagagacagcagcctgttctaccactgcctgaagagaagagacggcaccagacacctggacctgccctgcaagagaagctacctggaggcccccagcagcgtgggcgaggaccactacttcagaagcccccccccctacgaccagcagatgctgagccccagctactgcagcgaggtgacccccagagaggcctgcatgtacagcggcagcggccccgagatcgccggcgtgagcggcgtggacgacctgccccccccccccctgagctgcaacatgtggaccagcgtgagcccctacaccagctacagcgtgcagaccatggagaccgtgccctaccagcccttccccacccacttcaccgccaccaccatgatgcccagactgcccaccctgagcgcccagagcagccagccccccggcaacgcccacttcagcgtgtacaaccagctgagccagagccaggtgagagagagaggccccagcgccagcttccccagagagagaggcctgccccagggctgcgagagaaagccccccagcccccacctgaacgccgccaacgagttcctgtacagccagaccttcagcctgagcagagagagcagcctgcagtaccacagcggcatgggcaccgtggagaactggaccgacggctag

SEQ ID NO: 318288 - DNA, 1638 bp, Artificial Sequence
  derived and/or modified sequence
atgctgcaggacaagggactgagcgagagcgaggaagcattcagagcccccgggccagctttgggtgaggcatccgccgcaaatgctcccgagcctgcactagccgccccaggcctgtctggagccgctcttggctcccctcccgggccaggcgctgatgtggtggccgcggcagccgcagaacagactatcgagaacataaaggtgggtttgcacgagaaagagctgtggaagaaattccatgaagccggcacagagatgataataaccaaagccggccgacgaatgttcccttcttataaggttaaggtaacgggaatgaacccaaaaaccaagtatatactgctgattgatattgtcccggccgacgatcaccgctacaagttttgtgacaataaatggatggtggctggaaaggctgagcccgctatgcctggccgcctgtatgtgcaccccgattcgcccgccacaggagcacattggatgcggcagcttgtctccttccagaagctgaagctcaccaataaccacctggatcccttcggtcacatcatcttgaactcaatgcacaagtaccagcccagattacatattgttaaggctgatgagaacaatgcctttgggagcaaaaacacggctttttgcacccacgtttttcccgaaaccagtttcatcagtgtgacctcgtatcagaatcacaagatcactcagctcaaaatcgagaacaaccctttcgcaaaaggattcagaggctctgatgatagtgatcttagggtggccagattgcaatccaaggaatatcctgtgataagcaaaagtatcatgcgacagcgcctcatctctccccaacttagcgccacccctgacgtggggcctcttctgggcactcaccaagcactgcagcactaccagcatgagaacggcgcacattcacagctcgcagagccgcaggacttgccgctgtccacttttcccactcagcgagactcaagcctgttttaccactgtcttaaaagacgcgacgggaccagacatctggatctcccctgcaagcgctcatacttggaggccccctctagtgtcggggaagatcactacttcaggtcacccccaccctacgaccagcagatgctaagtccttcctattgttctgaggttacgcctcgcgaagcctgtatgtactcaggctccgggccagagatagcgggtgttagcggggtcgatgatctgccccctccgcctcttagttgcaatatgtggaccagcgtctcgccctatacttcctactcggtccagaccatggaaacggtgccttaccagcccttccctacccactttactgccacaacaatgatgcctcggctcccaacactaagcgctcagagcagtcaacctccagggaacgcccatttcagcgtgtacaaccagctgagtcagtctcaggtcagagaaagagggccgtcggcttcttttccacgggaacggggcctccctcagggctgtgagaggaaacccccatccccacacctaaatgctgctaacgaatttttgtattctcagaccttttcccttagccgagaatcctcactgcagtatcatagcggcatgggcaccgtggagaactggaccgacggatag

SEQ ID NO: 318289 - DNA, 1638 bp, Artificial Sequence
  derived and/or modified sequence
atgctgcaggacaagggcctgtctgagagcgaggaggccttccgggcccctggccctgccctgggggaggccagcgctgccaatgcccctgagcccgccctggccgcccctggcctgagcggggccgccctgggcagccccccaggccctggagcagatgtggtggccgctgctgctgctgagcagaccatcgagaacatcaaggtgggcctgcacgagaaggagctgtggaagaagttccatgaagctggaacagagatgatcatcaccaaggccggccgcaggatgttccccagctacaaggtgaaggtgacaggcatgaaccccaagaccaagtacatcctgctgattgatattgtgcctgcagatgaccaccgctacaagttctgtgacaacaagtggatggtggccggcaaggccgagcccgccatgcctggccgcctgtatgtgcacccagacagccctgccactggagcccactggatgaggcagctggtgtccttccagaagctgaagctgaccaacaaccacctggaccccttcggccacatcatcctgaacagcatgcacaagtaccagccccggctgcacatcgtgaaggcagatgaaaataatgccttcggcagcaagaacacagccttctgcacccacgtgtttcctgagaccagcttcatctctgtgaccagctaccagaaccacaagatcacccagctgaagattgagaacaacccctttgccaagggcttccggggcagtgatgacagcgacctgcgggtggcccggctgcagagcaaggagtaccctgtgatcagcaagagcatcatgaggcagaggctcatcagcccccagctgagcgccaccccagatgtgggccccctgctgggcacccaccaggccctgcagcactaccagcatgaaaatggagcccacagccagctggccgagccccaggacctgcccctgagcaccttccccacccagagggacagcagcctcttctaccactgcctgaagagaagagatggcaccaggcacctggacctgccctgcaagaggagctacctggaggcccccagctctgtgggggaggaccactacttccgcagccccccaccctatgaccagcagatgctgagccccagctactgcagcgaggtgaccccccgggaggcctgcatgtacagcggcagcggccctgagattgctggggtgtctggagtggatgacctgcccccaccacccctgagctgcaacatgtggacctctgtgagcccctacaccagctacagcgtgcagaccatggagaccgtgccctaccagcccttccccacccacttcaccgccaccaccatgatgccccggctgcccaccctgagcgcccagagcagccagcccccaggaaatgcccacttctctgtgtacaaccagctgagccagagccaggtgcgggagcggggccccagcgccagcttcccccgggagcggggcctgccccagggctgtgagaggaagccacccagcccccacctgaatgctgccaatgagttcctgtacagccagaccttcagcctgagccgggagagcagcctgcagtaccacagcggcatgggcaccgtggagaactggacagatggatag

SEQ ID NO: 318290 - DNA, 1638 bp, Artificial Sequence
  derived and/or modified sequence
atgctgcaggacaagggcctgagcgagagcgaggaggccttccgggcacctgggcccgccctcggagaagccagtgctgcgaacgcaccagagcccgctctagctgcaccaggcctgagtggggccgccctgggatcccccccaggacctggtgccgacgtggtggccgcagccgccgcagagcagacgattgaaaacatcaaggtgggtttacatgagaaggagctttggaaaaagtttcacgaggcaggcacagagatgatcattacgaaagccggcagacggatgtttccaagttataaagtgaaagttacaggtatgaatccaaaaacaaaatacatcctgctcatagatatcgttcctgctgatgatcatcgatataaattctgtgacaataagtggatggtcgctggcaaggccgagcccgcaatgccaggaaggttgtacgtgcatcccgattccccggccaccggggctcactggatgcgacagcttgtctcctttcagaaattaaaattgaccaataaccacttagatcccttcggacacatcattctaaacagcatgcacaagtaccagccaagattgcacattgtcaaggcagacgagaataatgcatttggttcgaagaatactgcattttgcacacatgttttccccgagacctcctttatctcggtgacttcatatcagaaccataagattacacagctgaagattgaaaacaatccattcgccaagggcttcaggggctctgacgattccgaccttagggttgctcgcttacagtctaaggaatatcccgtgattagcaagagtatcatgagacaaaggctgatctcccctcagcttagcgccaccccggatgttgggcctctgcttggcacccatcaggccctgcagcactaccagcacgaaaatggtgcacactctcagttagccgagccccaagatctgccactgtccacgtttccaacgcagcgcgacagcagcctcttctaccattgccttaaaaggcgagatggcacccggcacctggatctgccatgtaaacgaagttacctggaagccccttccagcgttggcgaagatcattacttcagatccccccctccctacgaccagcagatgctatcaccaagctattgctcggaagtaacccctcgggaagcttgcatgtactctggcagcggacctgaaattgcaggagtgtctggagttgacgatctgccgccaccgccactttcatgcaacatgtggacctccgtatctccatacacgtcctatagtgtgcagacgatggagacggtgccctatcagcctttcccaacacatttcactgccaccaccatgatgccccggcttcccacactgagcgctcagtccagccagcccccaggtaatgcccactttagcgtgtacaaccaactttctcaaagccaggtccgcgaaagaggtccatcagcgagctttcctcgcgaacgcgggcttccacagggatgcgagcgaaagccaccctcgcctcatctgaacgctgcaaacgagttcctgtacagtcagaccttttctttgtcccgggagagctctttgcagtatcattctggcatgggcaccgtggaaaattggaccgacggttag

SEQ ID NO: 318291 - DNA, 1638 bp, Artificial Sequence
  derived and/or modified sequence
atgctgcaggacaaagggctgtccgagagcgaagaggcttttcgcgctcccggaccagcactcggcgaggcctctgcggctaatgcacccgaacccgcattagctgcgccaggcctgagcggtgccgcactggggagtccaccaggccctggcgctgacgtggtggcagcagccgcagcagagcagaccattgaaaatataaaagtgggtctgcatgaaaaggagctgtggaagaaatttcacgaagcagggacggagatgatcatcacaaaggccggacgccgtatgtttccttcctataaggttaaagttaccggcatgaatccaaagactaaatatattttgctcatagacatcgtgcccgctgacgatcataggtataaattctgcgataacaagtggatggtggcaggcaaagcagaacccgcaatgcctggccgactctacgtgcaccccgattctcccgctacaggagctcattggatgagacaactagttagtttccaaaagctgaagctgaccaacaaccatctggacccgtttggtcacattatcctgaacagtatgcacaagtaccagccacgcctgcacattgtcaaggcagacgaaaacaacgcattcggatctaaaaacactgcattctgtacacatgttttccccgagacatccttcatctccgttacatcttatcagaaccacaagattacccagctgaagattgagaacaatccattcgccaaaggattcaggggcagtgacgatagtgacctcagagttgccagactccagtctaaagaatacccagtgatctcaaagtccatcatgaggcaacgacttatatccccacagctgagcgccacccctgacgtcggccctctgctggggacccatcaagctctacaacactaccaacatgaaaatggtgctcacagtcaattggcggagcctcaagatctccctctctcaacttttccgactcagcgcgatagctcactgttttaccactgtcttaagcgcagagatggaacccgccatctcgatttgccttgtaaacggtcatacctggaggccccatccagtgttggagaggaccactacttccgctcgccgccaccctatgaccagcagatgctttcaccctcttattgcagcgaagtcactcccagagaggcctgcatgtattccggctcaggccctgagatagccggagtctctggggtggacgacctcccaccaccacctttaagctgtaatatgtggacctccgtttctccctatacttcttattcggtgcagacaatggagacagtgccttaccagccatttcccacccactttaccgccactactatgatgcccaggttgccaactctctccgcccagtctagccagccgcctggaaacgcacactttagcgtatataaccagctgagccagtctcaggtacgcgaacgtggaccttcggctagcttcccgagggaacgcggtctcccccaagggtgcgaacggaagcctccttctccccatttgaatgcagctaacgaattcctctacagccagaccttcagcctctctagagaatccagcctccagtaccatagcggaatggggaccgtcgagaattggaccgacggctag

SEQ ID NO: 318292 - protein, 546 aa, Artificial Sequence
  derived and/or modified sequence
MLQDKGLSESEEAFRAPGPALGEASAANAPEPALAAPGLSGAALGSPPGPGADVVAAAAAEQTIENIKVGLHEKELWKKFHEAGTEMIITKAGRRMFPSYKVKVTGMNPKTKYILLIDIVPADDHRYKFCDNKWMVAGKAEPAMPGRLYVHPDSPATGAHWMRQLVSFQKLKLTNNHLDPFGHIILNSMHKYQPRLHIVKADENNAFGSKNTAFCTHVFPETSFISVTSYQNHKITQLKIENNPFAKGFRGSDDSDLRVARLQSKEYPVISKSIMRQRLISPQLSATPDVGPLLGTHQALQHYQHENGAHSQLAEPQDLPLSTFPTQRDSSLFYHCLKRRADGTRHLDLPCKRSYLEAPSSVGEDHYFRSPPPYDQQMLSPSYCSEVTPREACMYSGSGPEIAGVSGVDDLPPPPLSCNMWTSVSPYTSYSVQTMETVPYQPFPTHFTATTMMPRLPTLSAQSSQPPGNAHFSVYNQLSQSQVRERGPSASFPRERGLPQGCERKPPSPHLNAANEFLYSQTFSLSRESSLQYHSGMGTVENWTDG

SEQ ID NO: 318293 - DNA, 1641 bp, Artificial Sequence
  derived and/or modified sequence
atgctgcaggacaagggcctgagcgagagcgaggaggccttcagagcccccggccccgccctgggcgaggccagcgccgccaacgcccccgagcccgccctggccgcccccggcctgagcggcgccgccctgggcagcccccccggccccggcgccgacgtggtggccgccgccgccgccgagcagaccatcgagaacatcaaggtgggcctgcacgagaaggagctgtggaagaagttccacgaggccggcaccgagatgatcatcaccaaggccggcagaagaatgttccccagctacaaggtgaaggtgaccggcatgaaccccaagaccaagtacatcctgctgatcgacatcgtgcccgccgacgaccacagatacaagttctgcgacaacaagtggatggtggccggcaaggccgagcccgccatgcccggcagactgtacgtgcaccccgacagccccgccaccggcgcccactggatgagacagctggtgagcttccagaagctgaagctgaccaacaaccacctggaccccttcggccacatcatcctgaacagcatgcacaagtaccagcccagactgcacatcgtgaaggccgacgagaacaacgccttcggcagcaagaacaccgccttctgcacccacgtgttccccgagaccagcttcatcagcgtgaccagctaccagaaccacaagatcacccagctgaagatcgagaacaaccccttcgccaagggcttcagaggcagcgacgacagcgacctgagagtggccagactgcagagcaaggagtaccccgtgatcagcaagagcatcatgagacagagactgatcagcccccagctgagcgccacccccgacgtgggccccctgctgggcacccaccaggccctgcagcactaccagcacgagaacggcgcccacagccagctggccgagccccaggacctgcccctgagcaccttccccacccagagagacagcagcctgttctaccactgcctgaagagaagagccgacggcaccagacacctggacctgccctgcaagagaagctacctggaggcccccagcagcgtgggcgaggaccactacttcagaagcccccccccctacgaccagcagatgctgagccccagctactgcagcgaggtgacccccagagaggcctgcatgtacagcggcagcggccccgagatcgccggcgtgagcggcgtggacgacctgccccccccccccctgagctgcaacatgtggaccagcgtgagcccctacaccagctacagcgtgcagaccatggagaccgtgccctaccagcccttccccacccacttcaccgccaccaccatgatgcccagactgcccaccctgagcgcccagagcagccagccccccggcaacgcccacttcagcgtgtacaaccagctgagccagagccaggtgagagagagaggccccagcgccagcttccccagagagagaggcctgccccagggctgcgagagaaagccccccagcccccacctgaacgccgccaacgagttcctgtacagccagaccttcagcctgagcagagagagcagcctgcagtaccacagcggcatgggcaccgtggagaactggaccgacggctag

SEQ ID NO: 318294 - DNA, 1641 bp, Artificial Sequence
  derived and/or modified sequence
atgctccaggataaaggccttagtgaatctgaagaagcattcagagctcctgggcctgccctgggagaggcaagcgccgccaatgcacctgaaccggccctggcggcgcctgggttgtctggggcggctctgggaagcccgcctggtcccggcgctgatgtcgtggccgctgctgcagccgaacagactattgagaacattaaagtggggctgcacgaaaaggagctgtggaagaaattccacgaggcaggtacagaaatgatcattaccaaggcgggcagaaggatgttccctagttacaaagtgaaggtaactgggatgaaccccaaaactaaatacatcctgctcattgatatcgttcccgctgacgaccatcgatataaattttgcgataataaatggatggtagcaggcaaggcagaacctgctatgcccgggcgactctacgttcatcctgactctccagcaactggagctcactggatgcgacagctcgtgagtttccagaagctcaagcttactaacaaccatctcgacccgttcggacacattatattaaacagcatgcacaaataccagcctcgcctgcacatcgtaaaagcagatgaaaacaacgcctttggatctaagaataccgctttctgcacgcatgtgtttccagaaactagttttattagcgttacctcataccagaatcacaaaattacccagttgaaaatcgagaataacccctttgccaaggggttccgtggcagcgacgactccgacctcagagttgccaggctccagtcgaaagaatatcccgttataagcaagtccatcatgcgacaaagactgatctctccccagctcagtgctacacctgacgtggggcctctgctggggacccatcaagcactacaacattaccagcacgaaaacggtgctcattcccaactagctgagcctcaagatctacccctgagtaccttcccgacccagcgggattctagcttgttttaccactgtctcaagaggagagcagatggaactcggcatcttgacttaccctgcaaacggtcctaccttgaggcaccatcctccgtgggagaagatcattatttccggtctcctcccccttatgaccagcagatgcttagtccttcttactgctccgaagtaaccccccgggaggcctgcatgtactcaggctctgggccagagattgctggagtgagcggggtagacgatctgcccccacccccactcagctgtaatatgtggacaagcgtgagtccatacacaagctattctgttcaaacaatggagaccgtgccttaccagcccttccccacccatttcacagccaccacaatgatgccccggttgccaacgctgagcgcacagtcctctcagccacctggaaacgcacacttttccgtgtataatcagttgtcacaatcacaggtgagggagagagggccttctgcaagcttccctcgggagcgtggactgcctcagggctgcgagcgtaagcccccaagtccgcatttaaatgccgcaaacgaatttctgtactctcagaccttttcgctgtcgcgggagtcttcacttcagtatcactctggcatgggtaccgtagagaactggactgatggttag

SEQ ID NO: 318295 - DNA, 1641 bp, Artificial Sequence
  derived and/or modified sequence
atgctgcaggacaagggcctgtctgagagcgaggaggccttccgggcccctggccctgccctgggggaggccagcgctgccaatgcccctgagcccgccctggccgcccctggcctgagcggggccgccctgggcagccccccaggccctggagcagatgtggtggccgctgctgctgctgagcagaccatcgagaacatcaaggtgggcctgcacgagaaggagctgtggaagaagttccatgaagctggaacagagatgatcatcaccaaggccggccgcaggatgttccccagctacaaggtgaaggtgacaggcatgaaccccaagaccaagtacatcctgctgattgatattgtgcctgcagatgaccaccgctacaagttctgtgacaacaagtggatggtggccggcaaggccgagcccgccatgcctggccgcctgtatgtgcacccagacagccctgccactggagcccactggatgaggcagctggtgtccttccagaagctgaagctgaccaacaaccacctggaccccttcggccacatcatcctgaacagcatgcacaagtaccagccccggctgcacatcgtgaaggcagatgaaaataatgccttcggcagcaagaacacagccttctgcacccacgtgtttcctgagaccagcttcatctctgtgaccagctaccagaaccacaagatcacccagctgaagattgagaacaacccctttgccaagggcttccggggcagtgatgacagcgacctgcgggtggcccggctgcagagcaaggagtaccctgtgatcagcaagagcatcatgaggcagaggctcatcagcccccagctgagcgccaccccagatgtgggccccctgctgggcacccaccaggccctgcagcactaccagcatgaaaatggagcccacagccagctggccgagccccaggacctgcccctgagcaccttccccacccagagggacagcagcctcttctaccactgcctgaagagaagagcagatggcaccaggcacctggacctgccctgcaagaggagctacctggaggcccccagctctgtgggggaggaccactacttccgcagccccccaccctatgaccagcagatgctgagccccagctactgcagcgaggtgaccccccgggaggcctgcatgtacagcggcagcggccctgagattgctggggtgtctggagtggatgacctgcccccaccacccctgagctgcaacatgtggacctctgtgagcccctacaccagctacagcgtgcagaccatggagaccgtgccctaccagcccttccccacccacttcaccgccaccaccatgatgccccggctgcccaccctgagcgcccagagcagccagcccccaggaaatgcccacttctctgtgtacaaccagctgagccagagccaggtgcgggagcggggccccagcgccagcttcccccgggagcggggcctgccccagggctgtgagaggaagccacccagcccccacctgaatgctgccaatgagttcctgtacagccagaccttcagcctgagccgggagagcagcctgcagtaccacagcggcatgggcaccgtggagaactggacagatggatag

SEQ ID NO: 318296 - DNA, 1641 bp, Artificial Sequence
  derived and/or modified sequence
atgctgcaggacaagggcctgagcgagagcgaggaggccttccgggcacccgggcccgcgttaggtgaggccagtgcagctaacgccccagagcccgccttagccgcacccggcttaagcggcgctgcactgggctcccccccaggtcctggggccgatgtggttgcagcggctgccgcagaacaaaccatcgagaacattaaggttggccttcatgaaaaagagctctggaagaagttccatgaagctgggacagagatgattattacaaaagcaggccgccggatgttccctagttacaaagtcaaggttacaggtatgaatcctaagactaaatacatcctactgatcgacatcgtccctgccgacgaccaccggtacaaattctgtgacaacaagtggatggtggctgggaaagctgagcctgcgatgccgggacgcttgtacgtgcaccctgacagcccagccactggagcacattggatgcgtcagctcgtgagtttccagaaacttaagttgactaacaatcaccttgatccctttggtcatatcatactaaatagcatgcacaagtatcaacccagacttcacatcgtgaaggcagatgagaacaacgcctttggttctaaaaacactgccttttgcactcacgttttccccgagacttcattcatatccgtgacttcctatcaaaatcataaaataacccagctcaagattgagaataatcctttcgccaagggattccgaggatcagatgactccgatttgagagtggcccggttacagtctaaggaatacccggtcattagcaaatctatcatgaggcagcgtcttatttcgccgcagctgagtgcaacccccgatgtaggacccctgctgggcacccatcaggcactccaacattatcagcatgagaatggggcacactcacagctggcagagccgcaggatcttcccctcagcacgttccctacccagagagattcttccctcttttaccattgcttgaagagacgtgcagacggaacacgccacctggacctaccatgcaagcggagctacctagaggcaccgtcaagcgttggtgaggaccattactttaggtcaccaccaccgtacgatcaacagatgctgagcccgtcgtattgtagcgaagttactcctcgcgaggcctgcatgtattccgggtcagggcccgagatcgcaggagtgtctggggtagatgacttgcctcctccgcccctctcatgcaatatgtggacgtctgtttctccctacactagctattccgtacagactatggagactgtaccctatcagcctttcccgacacactttaccgccaccacgatgatgccaagactcccaaccctaagcgcgcagagctctcagcccccaggtaacgcccactttagcgtgtacaatcagctctctcagagtcaggtgcgggagaggggcccaagcgctagtttccccagagagaggggcctgcctcaggggtgtgagaggaagcccccatccccccaccttaacgccgccaacgagtttctgtactcccaaaccttttctttgtctcgggagtccagtctgcaatatcatagcggcatgggcacagtcgagaactggacggacggttag

SEQ ID NO: 318297 - DNA, 1641 bp, Artificial Sequence
  derived and/or modified sequence
atgctccaggacaaaggactgagcgaatctgaggaggcttttagagctcccggacctgcactgggcgaagcctcagcagcgaacgctccggaacccgctctcgcggctcccggactctcaggagccgctctcggaagtcccccagggcctggggcagatgttgtagctgccgctgctgctgagcagaccattgagaacatcaaggtcggactccacgagaaggagctctggaaaaagtttcacgaagccggtactgagatgattattacgaaggctggacgacgaatgtttccctcttacaaagtgaaagtgaccggcatgaatcccaagacaaagtatatactcctgatcgatatcgtgccagccgacgaccaccggtataagttctgcgataacaaatggatggttgcagggaaggccgagcctgccatgccgggtaggctctatgtgcacccagacagtccagcaacgggggctcattggatgaggcagctcgtctccttccagaagctcaaactcaccaataatcacctagaccctttcgggcatattattctgaatagcatgcacaagtatcagccacgcctccatatcgtgaaagccgacgagaacaacgccttcggcagtaagaacaccgccttctgcactcatgtgttcccagagacgtccttcatctcggttacaagctaccagaaccataaaataacgcagctgaagatagagaataatccttttgctaagggctttcgaggctccgacgacagcgatctgcgcgtcgcgaggttgcaaagtaaggagtaccctgtaattagcaaatcaattatgagacaaagattgattagtccacagttatcagcgacccccgatgtcggcccactgcttgggacccatcaagccctgcagcactaccagcacgagaatggggcacatagccagctggccgaaccacaggacttacccctgtctactttcccaacacagagggactcgtcacttttttaccattgcctaaaaaggcgtgccgacggtactcgacacctggacttgccatgtaaaagaagttacttagaggccccttcgtcggtgggagaggatcattatttcagaagcccacctccctacgaccaacagatgctcagcccctcttactgtagtgaggtaaccccaagggaggcctgcatgtactcaggctcaggacccgaaatcgccggagtcagcggagtcgatgacttaccgcctcccccactgagctgtaatatgtggacatcagttagcccttacacctcctactctgtgcagaccatggaaacagtgccataccagcctttccctacccacttcactgcaacaacaatgatgcccaggctgcctaccctgtcagcccaaagttcccaaccgccagggaacgcccactttagtgtatataatcagctttcccaatcccaggttcgggagagaggcccaagtgcctctttcccacgcgaacgaggactcccccaagggtgtgaaagaaagcctccttccccccacctcaatgccgctaacgagtttctatatagccagaccttctccctttctagggagtcttcgttacagtatcactctggtatgggcacagtcgagaactggactgacggctag

SEQ ID NO: 318298 - DNA, 1437 bp, Artificial Sequence
  derived and/or modified sequence
atgtggctggccgccgccgcccccagcctggccagaagactgctgttcctgggccccccccccccccccctgctgctgctggtgttcagcagaagcagcagaagaagactgcacagcctgggcctggccgccatgcccgagaagagacccttcgagagactgcccgccgacgtgagccccatcaactgcagcctgtgcctgaagcccgacctgctggacttcaccttcgagggcaagctggaggccgccgcccaggtgagacaggccaccaaccagatcgtgatgaactgcgccgacatcgacatcatcaccgccagctacgcccccgagggcgacgaggagatccacgccaccggcttcaactaccagaacgaggacgagaaggtgaccctgagcttccccagcaccctgcagaccggcaccggcaccctgaagatcgacttcgtgggcgagctgaacgacaagatgaagggcttctacagaagcaagtacaccacccccagcggcgaggtgagatacgccgccgtgacccagttcgaggccaccgacgccagaagagccttcccctgctgggacgagcccgccatcaaggccaccttcgacatcagcctggtggtgcccaaggacagagtggccctgagcaacatgaacgtgatcgacagaaagccctaccccgacgacgagaacctggtggaggtgaagttcgccagaacccccgtgaccagcacctacctggtggccttcgtggtgggcgagtacgacttcgtggagaccagaagcaaggacggcgtgtgcgtgtgcgtgtacacccccgtgggcaaggccgagcagggcaagttcgccatcgaggtggccgccaagaccctgcccttctacaaggactacttcaacgtgccctaccccctgcccaagatcgacctgatcgccatcgccgacttcgccgccggcgccatggagaactgggacctggtgacctacagagagaccgccctgctgatcgaccccaagaacagctgcagcagcagcagacagtgggtggccctggtggtgggccacgagctggcccaccagtggttcggcaacctggtgaccatggagtggtggacccacctgtggctgaacgagggcttcgccagctggatcgagtacctgtgcgtggaccactgcttccccgagtacgacatctggacccagttcgtgagcgccgactacaccagagcccaggagctggacgccctggacaacagccaccccatcgaggtgagcgtgggccaccccagcgaggtggacgagatcttcgacgccatcagctacagcaagggcgccagcgtgatcagaatgctgcacgactacatcggcgacaaggacttcaagaagggcatgaacatgtacctgaccaagttccagcagaagaacgccgccgccggcaacctgtag

SEQ ID NO: 318299 - DNA, 975 bp, Artificial Sequence
  derived and/or modified sequence
atgaagggcttctacagaagcaagtacaccacccccagcggcgaggtgagatacgccgccgtgacccagttcgaggccaccgacgccagaagagccttcccctgctgggacgagcccgccatcaaggccaccttcgacatcagcctggtggtgcccaaggacagagtggccctgagcaacatgaacgtgatcgacagaaagccctaccccgacgacgagaacctggtggaggtgaagttcgccagaacccccgtgaccagcacctacctggtggccttcgtggtgggcgagtacgacttcgtggagaccagaagcaaggacggcgtgtgcgtgtgcgtgtacacccccgtgggcaaggccgagcagggcaagttcgccatcgaggtggccgccaagaccctgcccttctacaaggactacttcaacgtgccctaccccctgcccaagatcgacctgatcgccatcgccgacttcgccgccggcgccatggagaactgggacctggtgacctacagagagaccgccctgctgatcgaccccaagaacagctgcagcagcagcagacagtgggtggccctggtggtgggccacgagctggcccaccagtggttcggcaacctggtgaccatggagtggtggacccacctgtggctgaacgagggcttcgccagctggatcgagtacctgtgcgtggaccactgcttccccgagtacgacatctggacccagttcgtgagcgccgactacaccagagcccaggagctggacgccctggacaacagccaccccatcgaggtgagcgtgggccaccccagcgaggtggacgagatcttcgacgccatcagctacagcaagggcgccagcgtgatcagaatgctgcacgactacatcggcgacaaggacttcaagaagggcatgaacatgtacctgaccaagttccagcagaagaacgccgccgccggctggacctggtag

SEQ ID NO: 318300 - DNA, 1437 bp, Artificial Sequence
  derived and/or modified sequence
atgtggctggcggccgctgctcccagtctcgctcgaagactgctgttcctgggcccaccccccccaccccttctgttgttggtgttttcccgatctagtagaagacgcctccactccctgggactcgcagcaatgcctgagaaaagaccctttgaacgactgcccgccgacgtcagccccataaattgctccctgtgtcttaaaccggatcttttggattttacttttgaaggaaaacttgaggctgcagcccaagtgagacaggccactaatcagattgttatgaactgtgcagatattgacattatcaccgcttcctatgcccccgagggcgatgaagagattcacgccacaggtttcaattatcagaatgaagatgaaaaggtgaccctgtcatttccatcaacgctccagacaggaaccggcaccctcaagattgactttgtaggcgagctgaatgacaagatgaagggcttttaccgatcgaagtacactactccatctggtgaggtgcgttacgcagctgtaacacagttcgaagccactgacgctcgacgggcattcccatgttgggatgagccagcaattaaggcgacttttgatatcagtctggtagttcccaaagatcgggttgccctgagcaacatgaatgtaatagatcggaagccataccccgatgacgaaaacttagtggaggtaaaatttgctagaacacccgtgacgtcgacatatttggtggcctttgtcgtgggtgagtatgacttcgtggagactcgcagcaaggacggtgtttgcgtgtgtgtgtacacaccggtcggcaaggctgagcagggaaaatttgcaatcgaggtggcagcgaagaccctgcccttttataaagactatttcaacgtaccatatccactccctaagattgatctaattgccatagcagactttgccgctggagccatggagaactgggacctcgtcacataccgcgagaccgccttgttaattgacccaaaaaattcctgttcatccagccggcaatgggtggctctggtggtagggcatgagctcgcacatcagtggtttggcaacctcgtcaccatggaatggtggactcacctctggctgaacgaggggttcgcatcttggatagagtacctgtgtgtggatcactgctttccggaatatgatatctggactcagtttgtgagcgccgattacacccgcgcacaggaactcgatgctctcgacaacagccaccccatcgaggtttccgtcgggcacccttccgaggtggacgagatctttgacgcgattagttactctaaaggtgcctcggttatcagaatgttgcacgattacattggggacaaagactttaaaaagggtatgaacatgtaccttacgaagtttcagcagaagaacgccgcagcaggaaacttgtag

SEQ ID NO: 318301 - DNA, 975 bp, Artificial Sequence
  derived and/or modified sequence
atgaaggggttctaccggagcaagtacacaacgccctcaggggaggtccgctatgctgccgtgactcagttcgaagccacggacgcaagacgtgcatttccatgttgggatgaacccgctattaaagcgactttcgacatctctctcgtggtgccaaaagaccgagtggctctgtctaacatgaacgtcattgatagaaagccataccccgacgacgagaatttggtggaggtaaagtttgctagaacacctgtgaccagcacctatctggtcgcattcgtcgtcggcgagtatgacttcgttgagactagatctaaggacggagtatgcgtctgcgtgtacacccccgtgggcaaggcagaacagggaaagtttgccattgaggtagcagcaaagactctcccattttataaggattacttcaacgtaccatacccccttcccaagatcgatttgatcgctatcgccgattttgccgccggcgctatggaaaactgggacctcgtgacgtacagggagaccgcactgttgatagatccaaagaactcttgctcaagctcacgacaatgggtggccctcgtggtgggacatgagctcgctcaccagtggtttggaaacctggttacaatggagtggtggacccacttatggttgaacgagggctttgcttcatggatcgaatacctgtgcgttgaccattgttttccggagtatgatatctggactcagttcgtgtcagcggattatacccgggcccaggagctcgatgcactcgataattctcatcccatcgaggtctctgtgggccaccctagcgaggtggatgaaatttttgatgctatctcgtactctaagggcgcctctgtgattaggatgctgcatgattatataggggataaggattttaagaagggaatgaatatgtatctcacaaagttccagcagaaaaacgcagcagcagggtggacctggtag

SEQ ID NO: 318302 - DNA, 1437 bp, Artificial Sequence
  derived and/or modified sequence
atgtggctggccgccgccgcccccagcctggcccggcggctgctcttcctgggccccccacctccacccctgctgctgctggtgttcagccgcagcagcagaagaaggctgcacagcctgggcctggccgccatgcctgagaagaggccctttgagcggctgcctgcagatgtgagccccatcaactgcagcctgtgcctgaagccagacctgctggacttcacctttgagggcaagctggaggccgccgcccaggtgcggcaggccaccaaccagatcgtgatgaactgtgccgacatcgacatcatcacagccagctatgccccagaaggagatgaggagatccacgccaccggcttcaactaccagaatgaagatgagaaggtgaccctgtccttccccagcaccctgcagacaggaacaggcaccctgaagattgactttgtgggggagctgaatgacaagatgaagggcttctaccgcagcaagtacaccacccccagcggggaggtgcgctatgctgctgtgacccagtttgaggccacagatgcccggcgggccttcccctgctgggatgagcccgccatcaaggccacctttgacatcagcctggtggtgcccaaggacagagtggccctgagcaacatgaatgtgattgacaggaagccctacccagatgatgagaacctggtggaggtgaagtttgcccggacccctgtgaccagcacctacctggtggcctttgtggtgggggagtatgactttgtggagaccaggagcaaggatggagtgtgtgtgtgtgtgtacacccctgtgggcaaggccgagcagggcaagtttgccatcgaggtggccgccaagaccctgcccttctacaaggactacttcaacgtgccctaccccctgcccaagattgacctgattgccatcgctgactttgctgctggggccatggagaactgggacctggtgacctaccgggagacagccctgctgattgaccccaagaacagctgcagcagcagccggcagtgggtggccctggtggtgggccacgagctggcccaccagtggtttggaaacctggtgaccatggagtggtggacccacctgtggctgaatgaaggatttgcctcctggattgagtacctgtgtgtggaccactgcttcccagaatatgacatctggacccagtttgtgtctgctgactacacccgggcccaggagctggatgccctggacaacagccaccccatcgaggtgtctgtgggccaccccagcgaggtggatgagatctttgatgccatctcctacagcaagggggccagcgtcatccgcatgctgcatgactacatcggggacaaggacttcaagaagggcatgaacatgtacctgaccaagttccagcagaagaatgctgctgctggcaacctgtag

SEQ ID NO: 318303 - DNA, 975 bp, Artificial Sequence
  derived and/or modified sequence
atgaagggcttctaccgcagcaagtacaccaccccatctggagaggtgcgctatgctgctgtgacccagtttgaggccacagatgcccggcgggccttcccctgctgggatgagcccgccatcaaggccacctttgacatcagcctggtggtgcccaaggacagagtggccctgagcaacatgaatgtcatcgacaggaagccctacccagatgatgagaacctggtggaggtgaagtttgcccggacccctgtgaccagcacctacctggtggcctttgtggtgggggagtatgactttgtggagaccaggagcaaggatggagtgtgtgtgtgtgtgtacacccctgtgggcaaggccgagcagggcaagtttgccatcgaggtggccgccaagaccctgcccttctacaaggactacttcaacgtgccctaccccctgcccaagattgacctgattgccatcgctgactttgctgctggggccatggagaactgggacctggtgacctaccgggagacagccctgctgattgaccccaagaacagctgcagcagcagccggcagtgggtggccctggtggtgggccacgagctggcccaccagtggtttggaaacctggtgaccatggagtggtggacccacctgtggctgaatgaaggatttgcctcctggattgagtacctgtgtgtggaccactgcttcccagaatatgacatctggacccagtttgtgtctgctgactacacccgggcccaggagctggatgccctggacaacagccaccccatcgaggtgtctgtgggccaccccagcgaggtggatgagatctttgatgccatctcctacagcaaaggagccagcgtcatccgcatgctgcatgactacatcggggacaaggacttcaagaagggcatgaacatgtacctgaccaagttccagcagaagaatgctgctgctggctggacctggtag

SEQ ID NO: 318304 - DNA, 1437 bp, Artificial Sequence
  derived and/or modified sequence
atgtggctggccgccgccgcccccagcctggcccggcggctgctgtttctgggaccccctccaccaccattgttgctgctggtttttagtcggtccagccgcagacggctgcactccttaggcctggccgccatgccagagaaacggccgttcgagcggctgcccgcagacgtctcacctatcaattgttctctctgcctaaaaccagatctcctggactttacgtttgaggggaaattggaggctgcagctcaggtccggcaagctacaaatcaaattgtcatgaattgcgcggatattgacattattaccgcctcctacgctccagaaggcgacgaagagatccacgccaccggtttcaactaccagaatgaagatgagaaggttaccctctctttcccgtcaacgctgcagaccggcaccgggacactgaaaattgactttgttggggaactgaacgataaaatgaaagggttttaccggtccaagtatactaccccttcaggtgaggtccggtacgcagcagtcactcagtttgaggccacggatgcccgccgtgcattcccctgttgggatgaacccgctattaaagccacgttcgatatcagtcttgtcgtgcctaaggatcgcgtggcactgagcaatatgaacgtgatcgaccggaaaccttatcccgatgacgagaaccttgtggaagtcaagttcgcaaggacacccgtgacctccacatacctagtggcattcgtggtcggtgaatatgactttgtggagactcgatcaaaggatggggtgtgcgtctgcgtttacacccccgtaggcaaggctgaacagggaaagttcgccatcgaggtggccgcaaaaacattacccttttataaggactattttaacgtgccctatcccctgccgaaaatcgatttaatcgccatcgccgacttcgccgctggagccatggagaattgggatctagtgacatatagggagaccgcactgctgattgatcctaagaactcctgctcttcttctagacaatgggtggccctcgttgtcggccacgagctagcccatcagtggttcggaaacctcgtaaccatggaatggtggacgcatctctggttaaatgaggggttcgcctcttggatcgagtacctgtgcgtggaccattgctttcccgagtatgatatttggacccagttcgttagcgcagactatactagggcgcaggagctcgacgctctggataatagtcatcccatcgaggttagcgtgggccacccctccgaggtggatgagatcttcgatgccataagttacagtaaaggcgccagcgtgatcagaatgctccatgattacatcggggataaggactttaagaaaggcatgaatatgtatttgaccaagttccaacagaagaatgcggccgccggtaacctttag

SEQ ID NO: 318305 - DNA, 975 bp, Artificial Sequence
  derived and/or modified sequence
atgaagggcttctaccggagcaagtacaccacccccagcggcgaggtacgctatgcagctgtgacccagttcgaagctaccgatgcgcgccgtgcttttccatgttgggacgaacctgccatcaaggccacttttgatatttctctggtagtacctaaggatagagtggcactctctaatatgaatgtgattgaccgcaaaccatacccagatgacgagaacctcgtcgaggtcaagtttgcaagaactcccgttacgtccacatacttagttgccttcgtcgtgggcgagtacgactttgtggagaccagatcaaaggacggcgtgtgtgtatgtgtatatacaccagtcggtaaagccgagcaaggaaagtttgctatcgaggtcgcagccaaaaccctgcccttctataaagattactttaacgtaccataccctctgcccaagatagacctcatagcaatcgccgatttcgctgcaggagcgatggaaaactgggacctcgtgacgtacagagaaaccgcattactgatcgaccctaaaaactcctgttcctcttccaggcagtgggtggcccttgtggtgggccacgagctcgcacatcagtggtttgggaatctggtaacaatggaatggtggacacacctgtggctgaacgaggggtttgcctcctggatcgagtatctctgtgttgaccattgctttcctgagtacgatatctggacccagttcgtatctgcagactataccagagcgcaagaactggatgccctggacaacagtcaccccatcgaagtctctgtgggtcaccccagcgaggtggatgagattttcgatgcgattagttactctaagggagcttcggttattaggatgctgcatgactatataggcgacaaggacttcaagaaggggatgaatatgtatttgactaaatttcagcagaaaaatgctgcagcagggtggacctggtag

SEQ ID NO: 318306 - DNA, 1437 bp, Artificial Sequence
  derived and/or modified sequence
atgtggctggccgcagccgctccatccctcgcaagacggctcctcttccttggcccaccccctccccctttgctgctgctcgttttcagcagatcctcacgacggcgattacatagtctggggctggcagctatgcccgaaaagcgcccattcgaacgccttcccgcagatgttagtccaataaactgtagtctgtgtctgaagcctgatctcttagactttacatttgagggcaagcttgaggcagctgcccaggttagacaggctactaaccaaattgtaatgaactgcgcggacatcgacataattacagcctcctacgcaccagagggcgacgaagagatacacgcgacagggttcaattatcagaacgaagatgagaaagtgaccttgagctttcccagcaccctgcagactggcaccgggaccctgaaaatcgatttcgttggcgagcttaatgacaaaatgaaaggcttttatagaagcaagtacaccaccccaagcggcgaagtgaggtacgccgcagttacccagtttgaagccacagacgctaggagagcctttccctgttgggacgaacctgccatcaaagcaaccttcgacatctcgctagttgtgcccaaggatcgcgtggcactcagtaacatgaacgtcatcgaccgaaagccttatccagatgacgagaacctggtcgaggtgaaattcgccagaacacctgttaccagcacgtacctcgtggcctttgtcgtaggcgaatacgactttgtggaaaccagaagcaaggacggtgtgtgcgtctgcgtgtatacacctgtgggaaaagccgaacaggggaagttcgccattgaggtggccgcaaagaccttgcccttctacaaagattacttcaacgtcccctaccctcttcccaagatcgatctgatcgcgatcgccgacttcgctgcgggtgccatggaaaattgggaccttgttacatatagagagacggctttattgatagacccaaagaactcctgctcctcatcccgccagtgggtcgcattagtggtggggcatgagctggcccaccagtggtttggcaacttggttacaatggagtggtggacacatctttggttgaacgaagggttcgccagctggattgaatacctgtgtgtcgatcattgcttcccagaatatgacatctggacgcagttcgtttctgctgattacacccgcgctcaggaactggacgccctggataatagtcatcccattgaagtaagtgtggggcatcctagcgaggtcgacgagatttttgacgctataagttacagtaagggggcaagcgtgatcaggatgctgcacgactatattggggataaggacttcaaaaaaggaatgaacatgtacttaacaaagttccaacaaaaaaacgccgctgccggaaatctgtag

SEQ ID NO: 318307 - DNA, 975 bp, Artificial Sequence
  derived and/or modified sequence
atgaagggtttctatcggtctaagtacaccacaccttcaggggaagtacgatacgccgctgtgacccagttcgaagcaaccgacgcccgtcgcgctttcccctgctgggacgaacccgcaatcaaagcgacgttcgacatttcactcgtcgtgcctaaggatcgggtagctctgtccaacatgaacgttattgatagaaagccgtaccccgacgacgaaaacctggtcgaggtgaaatttgcccgaactcccgtcacgtctacttatctggtggccttcgtggtgggggagtacgacttcgtggagactcgtagtaaggacggagtgtgtgtgtgcgtgtataccccagtaggaaaggcagaacaagggaagtttgcaatcgaggtcgcggctaaaactctgcccttttataaggactatttcaacgtgccctaccctttacccaagatcgatctcatcgccattgccgacttcgccgcaggagcaatggaaaattgggatctcgtaacgtatagagaaacagccttactgatagaccccaaaaactcctgttcttcaagcaggcaatgggtggcactggtggtcgggcacgagctggcacatcaatggttcggaaacctggtcactatggaatggtggacgcatctgtggctaaatgaaggattcgcatcctggattgaatacctgtgtgttgatcactgcttccccgagtatgatatctggactcagtttgtcagcgccgattacacacgtgcgcaagaacttgatgctctggacaacagtcacccaatagaggtgagtgtcgggcacccaagtgaagttgacgagatttttgacgctattagttatagtaaaggggctagcgtcatcaggatgttgcacgactacataggtgataaggattttaaaaaagggatgaacatgtacctgaccaaattccagcagaagaatgctgctgcaggatggacgtggtag

SEQ ID NO: 318308 - DNA, 1559 bp, Artificial Sequence
  derived and/or modified sequence
atgtggctggcagctgccgccccctccctcgctcgccgcctgctcttcctcggccctccgcctcctcccctcctccttctcgtcttcagccgctcctctcgccgccgcctccacagcctgggcctcgccgcgatgccggagaagaggcccttcgagcggctgcctgccgatgtctcccccatcaactgcagcctttgcctcaagcccgacttgctggacttcaccttcgagggcaagctggaggccgccgcccaggtgaggcaggcgactaatcagattgtgatgaattgtgctgatattgatattattacagcttcatatgcaccagaaggagatgaagaaatacatgctacaggatttaactatcagaatgaagatgaaaaagtcaccttgtctttccctagtactctgcaaacaggtacgggaaccttaaagatagattttgttggagagctgaatgacaaaatgaaaggtttctatagaagtaagtatactaccccttctggagaggtgcgctatgctgctgtaacacagtttgaggctactgatgcccgaagggcttttccttgctgggatgagcctgctatcaaagcaacttttgatatctcattggttgttcctaaagacagagtagctttatcaaacatgaatgtaattgaccggaaaccataccctgatgatgaaaatttagtggaagtgaagtttgcccgcacacctgttacatctacatatctggtggcatttgttgtgggtgaatatgactttgtagaaacaaggtcaaaagatggtgtgtgtgtctgtgtttacactcctgttggcaaagcagaacaaggaaaatttgcaatagaggttgctgctaaaaccttgcctttttataaggactacttcaatgttccttatcctctacctaaaattgatctcattgctattgcagactttgcagctggtgccatggagaactgggaccttgttacttatagggagactgcattgcttattgatccaaaaaattcctgttcttcatcccgccagtgggttgctctggttgtgggacatgaacttgcccatcaatggtttggaaatcttgttactatggaatggtggactcatctttggttaaatgaaggttttgcatcctggattgaatatctgtgtgtagaccactgcttcccagagtatgatatttggactcagtttgtttctgctgattacacccgtgcccaggagcttgacgccttagataacagccatcctattgaagtcagtgtgggccatccatctgaggttgatgagatatttgatgctatatcatatagcaaaggtgcatctgtcatccgaatgctgcatgactacattggggataaggactttaagaaaggaatgaacatgtatttaaccaagttccaacaaaagaatgctgccgcaggtaatctttaatagcttgagatagaaatggagagaaagtattgtcactctatccaggctgggacattttatttttgttctgaatacttaactcaaggtcaggatccatgtaataaataaattagccttatttg

SEQ ID NO: 318309 - DNA, 1424 bp, Artificial Sequence
  derived and/or modified sequence
ctttccctagtactctgcaaacaggtaataactctttccaatactttgtattttgtttagtatgccactttttggaagtggtcactgtcaatatcttgttatggtttgatggccttggagatttaaaaccgagtaaaagtgtacgggaaccttaaagatagattttgttggagagctgaatgacaaaatgaaaggtttctatagaagtaagtatactaccccttctggagaggtgcgctatgctgctgtaacacagtttgaggctactgatgcccgaagggcttttccttgctgggatgagcctgctatcaaagcaacttttgatatctcattggttgttcctaaagacagagtagctttatcaaacatgaatgtaattgaccggaaaccataccctgatgatgaaaatttagtggaagtgaagtttgcccgcacacctgttacatctacatatctggtggcatttgttgtgggtgaatatgactttgtagaaacaaggtcaaaagatggtgtgtgtgtctgtgtttacactcctgttggcaaagcagaacaaggaaaatttgcaatagaggttgctgctaaaaccttgcctttttataaggactacttcaatgttccttatcctctacctaaaattgatctcattgctattgcagactttgcagctggtgccatggagaactgggaccttgttacttatagggagactgcattgcttattgatccaaaaaattcctgttcttcatcccgccagtgggttgctctggttgtgggacatgaacttgcccatcaatggtttggaaatcttgttactatggaatggtggactcatctttggttaaatgaaggttttgcatcctggattgaatatctgtgtgtagaccactgcttcccagagtatgatatttggactcagtttgtttctgctgattacacccgtgcccaggagcttgacgccttagataacagccatcctattgaagtcagtgtgggccatccatctgaggttgatgagatatttgatgctatatcatatagcaaaggtgcatctgtcatccgaatgctgcatgactacattggggataaggactttaagaaaggaatgaacatgtatttaaccaagttccaacaaaagaatgctgccgcaggatggacgtggtagaggtcgcgggcagttggtgggcacaagagcgagaggacatcattatgaaatacgaaaagggacaccgagctgggctgccagaggacaaggggcctaagccttttcgaagctacaacaacaacgtcgatcatttggggattgtacatgagacggagctgcctcctctgactgcgcgggaggcgaagcaaattcggcgggagatcagccgaaagagcaagtgggtggatatgctgggagactgggagaaatacaaaagcagcag

SEQ ID NO: 318310 - DNA, 2760 bp, Artificial Sequence
  derived and/or modified sequence
atgtggctagccgctgctgcaccgtcactagcgcgaaggttacttttcctgggacctccgccgcctcccctactgttacttgttttcagccggagtagccgcagacgtctgcactcacttggtctagcagcaatgcccgagaaacggcccttcgagcgccttcccgcagatgtcagtccgattaattacagcctctgcctgaagcccgaccttctcgacttcaccttcgaaggtaagttggaggccgccgcccaggtacggcaggcaaccaaccaaattgtgatgaactgtgccgatattgatatcattaccgcgagttacgcccctgagggggatgaggagatccacgctacaggctttaactaccagaacgaagacgaaaaggtgacactgtcattcccaagcaccctacagaccggtaccggcacgctgaaaatcgacttcgtgggtgaattgaatgacaaaatgaagggattctaccgcagcaagtatactactccttcaggcgaggttcgatacgctgccgtcacacagttcgaagctacagacgcaagaagagcttttccttgctgggatgaacctgccatcaaagctacatttgacattagtttggttgttccaaaggatagagtcgcattatccaatatgaatgtgattgatagaaagccctatccggatgacgagaacttggttgaagtcaaatttgctcgaacgcctgtgatgagtacctatctcgtcgccttcgtggttggagaatacgacttcgtggagacccggagtaaggacggtgtgtgtgtccgggtgtacacccctgtgggaaaagcagaacaaggtaagtttgccctcgaagtagctgcaaagacccttcccttttacaaagattacttcaatgtgccgtatccccttcccaagatcgatctgatcgccatagctgatttcgccgccggcgctatggagaattgggggttagtgacttacagagagactgccctgcttatagacccgaaaaatagctgtagtagttctagacagtgggtcgcccttgtggtggggcatgagctggctcaccagtggtttggcaatcttgtgaccatggagtggtggacacacctgtggctgaacgaaggctttgccagttggatcgagtacttatgtgtagaccactgcttccctgaatatgatatctggactcagttcgtttctgccgattatacccgggcccaagagctggatgcccttgataatagccatcctattgaggtgagcgttggacacccctctgaagtggatgaaatatttgatgctatatcatacagcaaaggtgccagcgtgatcagaatgttgcatgactatatcggagacaaggattttaagaagggaatgaacatgtacttgaccaagtttcagcagaagaacgctgccacagaggatctgtgggagtcacttgaaaacgcctccgggaaacccattgcagcagtcatgaacacttggactaagcagatgggattcccactaatttatgtagaggctgagcaggttgaggacgacagattattgagactgtcacagaaaaagttctgtgccgggggaagctacgtaggggaggactgccctcagtggatggtgccgatcaccatatccacttctgaggacccaaatcaggctaagttgaagatactgatggacaagccagagatgaatgtggttttaaaaaatgtgaagccggatcagtgggtaaagcttaatttaggaaccgtgggattttatagaacccagtactccagcgccatgctcgaatccttactgccagggatcagggacttaagtctcccaccggtggatcgactgggcttacagaacgacttattctctctggccagggcgggaataattagcactgttgaggtcctgaaggtgatggaagcctttgtaaacgaacctaactacacagtgtggagcgacctatcttgcaacctaggcattctgagcacattgttgagtcacacggacttttatgaggagattcaagaattcgttaaggatgtattctctccgatcggcgagcgccttggctgggaccccaaaccaggagaaggtcacctggacgcacttcttcgcggccttgtgctcggaaagcttggaaaagccggccacaaagccaccttagaggaggccagacgccgatttaaggatcacgtggaaggaaagcagatcctgagtgccgacctgcgcagccctgtgtaccttactgtattgaagcacggcgatggcaccacactggacatcatgctcaaattgcataaacaagctgatatgcaggaggagaaaaatcgcatcgagagggttcttggcgctactctattacctgatcttatccagaaggtcctgacttttgctttgtctgaagaagtacgcccacaagacaccgtaagtgtgattggcggggttgctggcggcagcaagcacgggagaaaagccgcctggaaattcatcaaggataactgggaagaactctacaatcgctatcagggaggctttctgatatcccggctgatcaagctgtcggtcgaaggctttgctgttgacaagatggcaggagaggtcaaggcctttttcgaatctcacccagctccatccgctgagagaacgatccagcaatgttgcgaaaatatccttctgaacgccgcatggctgaaacgggatgccgagtcaattcaccagtacctgctccagcgcaaggccagtcctccaactgtgtag

SEQ ID NO: 318311 - DNA, 1884 bp, Artificial Sequence
  derived and/or modified sequence
atgtggctggccgcggcagcccccagcctagctaggaggctgctgttccttgggcctcccccgccacctttgctgcttctcgtttttagcaggagcagccgtcgcaggttacattcccttggactcgctgacgtcagccctattaactactctctgtgcttaaaaccagatctgctggatttcactttcgagggcaaactagaggcagccgcgcaggtgagacaggcgacaaatcagattgtaatgaattgcgccgatattgacataattaccgcatcctatgcaccagagggagacgaggagatccacgccacaggattcaattaccagaatgaagatgaaaaggtcacactgtctttcccatcaactcttcagacaggaaccgggaccctgaagattgattttgtgggcgagttgaacgacaaaatgaaaggcttctaccggtccaagtacactaccccaagtggcgaagtgcgatatgcagccgttacccagttcgaggctactgacgctaggcgagcattcccatgttgggatgagcctgctatcaaagcaacattcgacatttccctagtcgtgcccaaagacagggtggctctgtcaaacatgaatgtgatcgacagaaaaccataccctgacgacgaaaatctcgtcgaggtcaaattcgctagaaccccagtgatgagcacctacctggtagccttcgtagttggagagtacgatttcgtggagacacgaagcaaagatggcgtgtgcgttcgcgtgtataccccagtggggaaggcagagcagggaaaattcgctttagaggtggcggccaagactctgccattctacaaagactactttaatgtgccatatccactgccgaagattgacctcatcgctattgccgattttgcagctggggcaatggagaattgggggctcgtgacctacagggagaccgccctcctcatcgaccctaagaactcatgcagcagctctcgacagtgggtggctctggtggtaggccacgaactggctcaccaatggtttgggaacctggtaactatggagtggtggacacacctctggctcaatgagggctttgcaagctggatagaatatctgtgcgttgatcattgtttccccgagtatgacatctggacccaatttgtcagcgctgactataccagagcccaggagctggatgcactagataattctcatcctatagaggtctcggttggccatcctagcgaggtggatgagatttttgatgccataagttattctaagggggccagcgttattaggatgctgcacgactacatcggggataaggattttaagaaagggatgaacatgtatcttacaaaattccagcaaaaaaacgccgccactgaggatctgtgggagtcacttgaaaatgccagtggcaagcctatagccgctgtgatgaatacctggactaagcaaatgggtttccctttgatatacgtggaagcggaacaagtcgaggacgatcggctcctacggctgagtcagaagaagttctgcgccgggggatcctatgtaggggaagattgcccgcagtggatggtcccgataactatatccacgtctgaggaccccaatcaggcaaaactgaaaatcctcatggacaagcccgagatgaacgtggtgctgaagaacgtcaaacctgatcaatgggtcaaactgaaccttgggactgtgggcttctatcggacccaatactccagcgcaatgttagagtctctgctccctggtattcgcgatctgagtctgccgcctgtcgatcgactcggactgcagaacgatctgttcagtttgttcatcctgtgcgtgagggaagtgtcaggaaattgctgcagggcctag

SEQ ID NO: 318312 - DNA, 2520 bp, Artificial Sequence
  derived and/or modified sequence
atgcccgagaagcggccttttgagagactccccgccgacgtcagtccaatcaactattccctctgtctcaagcctgacctcctggatttcaccttcgaaggaaagctggaagccgcagctcaggtcaggcaggcgacaaaccaaatcgtcatgaactgcgcagatatcgacatcattactgctagctatgcacccgaaggagatgaggaaattcacgccactggattcaactaccagaacgaggacgagaaagtaaccctatctttcccgtcgaccctgcagaccggtaccgggacattgaaaattgacttcgtaggggaactgaacgataagatgaaggggttttaccgctccaagtacactacccctagtggagaggttcgctacgctgccgtgactcaatttgagaatgtgatcgacaggaaaccatatccggatgacgagaatctcgtggaggtcaagtttgccagaacccctgtcatgtcgacatacctcgtggcctttgtggtgggggaatacgattttgttgagacaaggagcaaggacggcgtgtgtgtccgcgtatataccccagtcggaaaggctgaacagggaaaattcgcgttggaggttgcagccaagaccctcccattttacaaggactactttaacgtaccctacccgttgcctaaaatcgatttgatcgcgattgccgatttcgcagcgggggccatggaaaattgggggctggtgacataccgcgagactgccctattaatcgaccccaagaattcctgttcatcctccaggcagtgggtcgccctagtggtgggccacgaactagcacatcagtggttcggaaacctggtaacaatggagtggtggactcatctttggcttaatgagggctttgcttcatggatcgagtacctatgcgtggaccactgtttccctgagtacgacatttggacgcagtttgtctccgccgattatacaagggcgcaggagctggatgcactggataattcccatcccatagaagtgtccgtggggcaccccagtgaggtggatgagatttttgacgccatttcctattctaaaggcgctagtgtgatacggatgctgcatgattacataggcgataaggatttcaagaagggcatgaacatgtatttgacaaaattccagcagaaaaatgcggctaccgaagacctgtgggagtcgcttgaaaatgcctctggaaagcccatcgccgcagtgatgaacacatggacaaagcaaatggggttcccccttatttatgtagaagctgagcaagtcgaagacgataggctcctgcgtctctcccagaagaagttctgcgctgggggcagctatgtgggggaggactgccctcagtggatggtgcccattaccattagtacttcagaagaccccaatcaggccaagctcaagatcctgatggacaaacccgaaatgaacgttgtcctgaagaacgtgaagcctgaccagtgggttaagcttaatctcggcactgtggggttttatcggacccagtacagctcagctatgctagagagcctactgcccggaattagggacctctctttgccgcctgtcgacagattgggcctccagaacgacctgtttagtctcgcaagggccgggatcattagtaccgttgaggtcctgaaggtgatggaggcctttgtgaatgaacctaattacactgtctggtctgatctatcatgcaatctcgggatcctgagcactctcctgagccatactgatttttacgaggaaatccaggagtttgtcaaggatgtattttccccaatcggagaacgcttgggatgggaccctaagccaggtgaaggacatttggacgctctccttcgagggctggtgttagggaaactgggcaaagctgggcacaaagccacactcgaggaggcccggcggaggtttaaggatcatgtggaggggaaacaaatcttgtccgctgacctccgcagtcctgtgtatctaactgtccttaaacacggagatggcacgactctcgatattatgttgaagctacataaacaggccgatatgcaagaggagaagaacagaatcgagcgggttctgggcgccacgttgctgcctgacctcattcagaaggtcttaacgttcgctttgtccgaggaggtccgaccccaggatactgtgtccgtgattggtggagtggcggggggaagcaaacatgggcgcaaggccgcctggaagtttattaaagacaattgggaggaactctacaatcgctaccaaggcggcttcttgattagtcgactcattaagctgagcgtagagggtttcgctgtagataaaatggcaggtgaggtgaaggcattctttgagtctcatccagcaccatctgccgaacgtacaatccagcagtgctgtgaaaacattctgctcaacgccgcatggcttaaacgcgacgccgaatcaatacaccagtacctgctgcaacgcaaggccagcccgcctaccgtgtag

SEQ ID NO: 318313 - DNA, 2760 bp, Artificial Sequence
  derived and/or modified sequence
atgtggctggccgccgccgcccccagcctggcccggcggctgctcttcctgggccccccacctccacccctgctgctgctggtgttcagccgcagcagcagaagaaggctgcacagcctgggcctggccgccatgcctgagaagaggccctttgagcggctgcctgcagatgtgagccccatcaactacagcctgtgcctgaagccagacctgctggacttcacctttgagggcaagctggaggccgccgcccaggtgcggcaggccaccaaccagatcgtgatgaactgtgccgacatcgacatcatcacagccagctatgccccagaaggagatgaggagatccacgccaccggcttcaactaccagaatgaagatgagaaggtgaccctgtccttccccagcaccctgcagacaggaacaggcaccctgaagattgactttgtgggggagctgaatgacaagatgaagggcttctaccgcagcaagtacaccacccccagcggggaggtgcgctatgctgctgtgacccagtttgaggccacagatgcccggcgggccttcccctgctgggatgagcccgccatcaaggccacctttgacatcagcctggtggtgcccaaggacagagtggccctgagcaacatgaatgtgattgacaggaagccctacccagatgatgagaacctggtggaggtgaagtttgcccggacccctgtgatgagcacctacctggtggcctttgtggtgggggagtatgactttgtggagaccaggagcaaggatggagtgtgtgtgcgggtgtacacccctgtgggcaaggccgagcagggcaagtttgccctggaggtggccgccaagaccctgcccttctacaaggactacttcaacgtgccctaccccctgcccaagattgacctgattgccatcgctgactttgctgctggggccatggagaactggggcctggtgacctaccgggagacagccctgctgattgaccccaagaacagctgcagcagcagccggcagtgggtggccctggtggtgggccacgagctggcccaccagtggtttggaaacctggtgaccatggagtggtggacccacctgtggctgaatgaaggatttgcctcctggattgagtacctgtgtgtggaccactgcttcccagaatatgacatctggacccagtttgtgtctgctgactacacccgggcccaggagctggatgccctggacaacagccaccccatcgaggtgtctgtgggccaccccagcgaggtggatgagatctttgatgccatctcctacagcaagggggccagcgtcatccgcatgctgcatgactacatcggggacaaggacttcaagaagggcatgaacatgtacctgaccaagttccagcagaagaatgctgccacagaggacctgtgggagagcctggagaatgccagcggcaagcccatcgctgctgtgatgaacacctggaccaagcagatgggcttccccctcatctacgtggaggccgagcaggtggaggatgaccggctgctgcggctgagccagaagaagttctgtgccggcggcagctatgtgggggaggactgcccccagtggatggtgcccatcaccatcagcaccagcgaggaccccaaccaggccaagctgaagatcctgatggacaagccagagatgaatgtggtgctgaagaatgtgaagccagaccagtgggtgaagctgaacctgggcaccgtgggcttctaccgcacccagtacagcagcgccatgctggagagcctgctgcccggcatccgggacctgagcctgccccctgtggaccggctgggcctgcagaatgacctcttcagcctggcccgggccggcatcatcagcacagtggaggtgctgaaggtgatggaggcctttgtgaatgagcccaactacacagtgtggagcgacctgagctgcaacctgggcatcctgagcaccctgctgagccacacagacttctatgaggagatccaggagtttgtgaaggatgtgttcagccccatcggggagcggctgggctgggaccccaagccaggagagggccacctggatgccctgctgcggggcctggtgctgggcaagctgggcaaggccggccacaaggccaccctggaggaggcccggcggcgcttcaaggaccacgtggagggcaagcagatcctgtctgctgacctgcggagccctgtgtacctgactgtgctgaagcatggagatggcaccaccctggacatcatgctgaagctgcacaagcaggccgacatgcaggaggagaagaacagaattgagcgggtgctgggcgccaccctgctgcctgacctgatccagaaggtgctgacctttgccctgtctgaggaggtgcggccccaggacacagtgtctgtgattggaggagtggccggcggcagcaagcacggcaggaaggccgcctggaagttcatcaaggacaactgggaggagctgtacaaccgctaccagggcggcttcctgatcagccgcctcatcaagctgtctgtggagggctttgctgtggacaagatggccggggaggtgaaggccttctttgagagccacccagcccccagcgctgagaggaccatccagcagtgctgtgagaacatcctgctgaatgctgcctggctgaagagagatgctgagagcatccaccagtacctgctgcagaggaaggccagcccccccaccgtgtag

SEQ ID NO: 318314 - DNA, 1884 bp, Artificial Sequence
  derived and/or modified sequence
atgtggctggccgccgccgcccccagcctggcccggcggctgctcttcctgggccccccacctccacccctgctgctgctggtgttcagccgcagcagcagaagaaggctgcacagcctgggcctggctgatgtgagccccatcaactacagcctgtgcctgaagccagacctgctggacttcacctttgagggcaagctggaggccgccgcccaggtgcggcaggccaccaaccagatcgtgatgaactgtgccgacatcgacatcatcacagccagctatgccccagaaggagatgaggagatccacgccaccggcttcaactaccagaatgaagatgagaaggtgaccctgtccttccccagcaccctgcagacaggcaccggcaccctgaagattgactttgtgggggagctgaatgacaagatgaagggcttctaccgcagcaagtacaccaccccatctggagaggtgcgctatgctgctgtgacccagtttgaggccacagatgcccggcgggccttcccctgctgggatgagcccgccatcaaggccacctttgacatcagcctggtggtgcccaaggacagagtggccctgagcaacatgaatgtcatcgacaggaagccctacccagatgatgagaacctggtggaggtgaagtttgcccggacccctgtgatgagcacctacctggtggcctttgtggtgggggagtatgactttgtggagaccaggagcaaggatggagtgtgtgtgcgggtgtacacccctgtgggcaaggccgagcagggcaagtttgccctggaggtggccgccaagaccctgcccttctacaaggactacttcaacgtgccctaccccctgcccaagattgacctgattgccatcgctgactttgctgctggggccatggagaactggggcctggtgacctaccgggagacagccctgctgattgaccccaagaacagctgcagcagcagccggcagtgggtggccctggtggtgggccacgagctggcccaccagtggtttggaaacctggtgaccatggagtggtggacccacctgtggctgaatgaaggatttgcctcctggattgagtacctgtgtgtggaccactgcttcccagaatatgacatctggacccagtttgtgtctgctgactacacccgggcccaggagctggatgccctggacaacagccaccccatcgaggtgtctgtgggccaccccagcgaggtggatgagatctttgatgccatctcctacagcaaaggagccagcgtcatccgcatgctgcatgactacatcggggacaaggacttcaagaagggcatgaacatgtacctgaccaagttccagcagaagaatgctgccacagaggacctgtgggagagcctggagaatgccagcggcaagcccatcgctgctgtgatgaacacctggaccaagcagatgggcttccccctcatctacgtggaggccgagcaggtggaggatgaccggctgctgcggctgagccagaagaagttctgtgccggcggcagctatgtgggggaggactgcccccagtggatggtgcccatcaccatcagcaccagcgaggaccccaaccaggccaagctgaagatcctgatggacaagccagagatgaatgtggtgctgaagaatgtgaagccagaccagtgggtgaagctgaacctgggcaccgtgggcttctaccgcacccagtacagcagcgccatgctggagagcctgctgcccggcatccgggacctgagcctgccccctgtggaccggctgggcctgcagaatgacctcttcagcctcttcatcctgtgtgtgcgggaggtgtctggcaactgctgccgggcctag

SEQ ID NO: 318315 - DNA, 2520 bp, Artificial Sequence
  derived and/or modified sequence
atgcctgagaagaggccctttgagcggctgcctgcagatgtgagccccatcaactacagcctgtgcctgaagccagacctgctggacttcacctttgagggcaagctggaggccgccgcccaggtgcggcaggccaccaaccagatcgtgatgaactgtgccgacatcgacatcatcacagccagctatgccccagaaggagatgaggagatccacgccaccggcttcaactaccagaatgaagatgagaaggtgaccctgtccttccccagcaccctgcagacaggaacaggcaccctgaagattgactttgtgggggagctgaatgacaagatgaagggcttctaccgcagcaagtacaccacccccagcggggaggtgcgctatgctgctgtgacccagtttgaaaatgtgattgacaggaagccctacccagatgatgagaacctggtggaggtgaagtttgcccggacccctgtgatgagcacctacctggtggcctttgtggtgggggagtatgactttgtggagaccaggagcaaggatggagtgtgtgtgcgggtgtacacccctgtgggcaaggccgagcagggcaagtttgccctggaggtggccgccaagaccctgcccttctacaaggactacttcaacgtgccctaccccctgcccaagattgacctgattgccatcgctgactttgctgctggggccatggagaactggggcctggtgacctaccgggagacagccctgctgattgaccccaagaacagctgcagcagcagccggcagtgggtggccctggtggtgggccacgagctggcccaccagtggtttggaaacctggtgaccatggagtggtggacccacctgtggctgaatgaaggatttgcctcctggattgagtacctgtgtgtggaccactgcttcccagaatatgacatctggacccagtttgtgtctgctgactacacccgggcccaggagctggatgccctggacaacagccaccccatcgaggtgtctgtgggccaccccagcgaggtggatgagatctttgatgccatctcctacagcaagggggccagcgtcatccgcatgctgcatgactacatcggggacaaggacttcaagaagggcatgaacatgtacctgaccaagttccagcagaagaatgctgccacagaggacctgtgggagagcctggagaatgccagcggcaagcccatcgctgctgtgatgaacacctggaccaagcagatgggcttccccctcatctacgtggaggccgagcaggtggaggatgaccggctgctgcggctgagccagaagaagttctgtgccggcggcagctatgtgggggaggactgcccccagtggatggtgcccatcaccatcagcaccagcgaggaccccaaccaggccaagctgaagatcctgatggacaagccagagatgaatgtggtgctgaagaatgtgaagccagaccagtgggtgaagctgaacctgggcaccgtgggcttctaccgcacccagtacagcagcgccatgctggagagcctgctgcccggcatccgggacctgagcctgccccctgtggaccggctgggcctgcagaatgacctcttcagcctggcccgggccggcatcatcagcacagtggaggtgctgaaggtgatggaggcctttgtgaatgagcccaactacacagtgtggagcgacctgagctgcaacctgggcatcctgagcaccctgctgagccacacagacttctatgaggagatccaggagtttgtgaaggatgtgttcagccccatcggggagcggctgggctgggaccccaagccaggagagggccacctggatgccctgctgcggggcctggtgctgggcaagctgggcaaggccggccacaaggccaccctggaggaggcccggcggcgcttcaaggaccacgtggagggcaagcagatcctgtctgctgacctgcggagccctgtgtacctgactgtgctgaagcatggagatggcaccaccctggacatcatgctgaagctgcacaagcaggccgacatgcaggaggagaagaacagaattgagcgggtgctgggcgccaccctgctgcctgacctgatccagaaggtgctgacctttgccctgtctgaggaggtgcggccccaggacacagtgtctgtgattggaggagtggccggcggcagcaagcacggcaggaaggccgcctggaagttcatcaaggacaactgggaggagctgtacaaccgctaccagggcggcttcctgatcagccgcctcatcaagctgtctgtggagggctttgctgtggacaagatggccggggaggtgaaggccttctttgagagccacccagcccccagcgctgagaggaccatccagcagtgctgtgagaacatcctgctgaatgctgcctggctgaagagagatgctgagagcatccaccagtacctgctgcagaggaaggccagcccccccaccgtgtag

SEQ ID NO: 318316 - DNA, 2760 bp, Artificial Sequence
  derived and/or modified sequence
atgtggctggccgccgccgcccccagcctggcccggcggctgctgttcctcggaccacctcccccacctctcctactcttagtcttttcacgaagctcccgtaggcggctccactctttaggactcgctgcaatgcccgagaaacggccattcgaaagactgccggcagatgttagccccatcaactactcactgtgtctgaagccagacctgctcgactttactttcgagggcaagttggaggccgctgcccaagtgcgccaagctactaaccagattgtcatgaattgtgccgatattgatatcattacagcatcctatgctcctgaaggggatgaagaaatccacgctacaggattcaactatcaaaatgaggacgagaaagttactctttcctttcctagcactcttcaaactggcaccggaacccttaagatagactttgtcggcgaacttaacgataagatgaaaggcttttacaggtctaagtataccacaccatccggagaagtgcgctatgccgccgtgacgcagtttgaggccactgatgcccggagagcttttccttgttgggacgaacccgcaatcaaagcgaccttcgatatatctctcgtggtcccaaaagatagggtggccttgtctaacatgaatgtcatagacagaaagccgtacccagacgacgagaatctggtagaggtgaaattcgctcggactcccgtaatgtcaacctacctggtggcatttgtggtgggggagtacgacttcgtcgagactagatctaaggacggagtctgcgtaagggtgtatacccctgtgggcaaagccgaacagggcaaatttgctctcgaggtggccgcaaagaccctgccgttctacaaggactatttcaatgtaccctaccccttgcccaaaatcgacctgatcgcaatcgcagacttcgcagccggcgccatggagaactggggcctggtgacgtatcgcgaaaccgccttgctcattgacccaaaaaacagctgctcgtcctcaaggcaatgggtggctcttgtagtcggccacgaactcgcccaccagtggtttgggaatcttgtcacgatggagtggtggactcatctttggctgaatgaaggatttgccagctggattgaatacctttgcgtcgaccattgtttccctgagtatgacatctggacacaattcgtgagtgccgattacactcgtgctcaagagcttgacgctctggataatagccatccaatcgaagtgtctgtgggccacccatcggaggtagatgagatctttgatgcgattagctacagcaaaggcgcttccgtgatccgcatgttacacgattatatcggagacaaggattttaagaaaggcatgaacatgtacctgacgaagtttcagcagaagaatgcagcaacggaggacttatgggagtctctggagaatgctagtggtaagcctatcgcagcagtgatgaacacctggactaaacagatggggttccccctaatatacgtcgaggctgagcaagtcgaagacgatagactcctgcgcctgtcccaaaaaaaattctgcgcgggtggatcctacgtgggagaggattgcccccaatggatggttcctataacgatttccacatctgaagaccctaaccaagcaaagctcaaaatcctcatggataaacccgaaatgaacgtagtactgaaaaacgtcaagcccgaccagtgggttaaattaaatctcggcacggtcggattttacagaactcagtatagcagtgccatgctggagtctctcctgcccggaattcgagatttaagcctgcctcccgtggaccggctggggctccagaacgacctgttcagtctcgctagagccgggatcattagtactgttgaagtgctcaaggttatggaggcttttgtgaacgagccgaattataccgtgtggtctgacctgagctgcaaccttggaatcttgtcaacactgctgtcacacacggatttctacgaagaaatccaggaattcgtgaaagacgttttctccccaattggggaaagactgggatgggaccctaaacctggcgagggacacttagatgccctgttaaggggcttagtactgggcaagttagggaaggctggccacaaggcaactctggaggaagcgcggaggcgctttaaggatcatgtcgagggcaaacagatactgagcgctgatctcaggtcacccgtgtatctcacggtgcttaaacatggcgatggcactactcttgatattatgctgaagcttcacaaacaggccgatatgcaggaggaaaaaaatcgaatcgaacgtgttctgggcgctaccctgcttccagacctaatacaaaaggtgttaacctttgccttatccgaagaagttcgaccacaggatactgtcagtgtaatcgggggcgtggccggaggttcaaaacacgggcgaaaggcggcctggaagttcattaaagataattgggaagaactgtataaccgttatcagggcggttttttgattagtcgccttataaagctgagcgtggaagggtttgccgttgacaaaatggcaggagaagtgaaagcttttttcgagtcccatcccgccccctccgctgagcgtacaatccaacagtgctgcgagaatatcttgcttaacgccgcctggctcaagagggacgctgaatcaattcatcagtatcttctgcaaagaaaagcgagtccccccaccgtctag

SEQ ID NO: 318317 - DNA, 1884 bp, Artificial Sequence
  derived and/or modified sequence
atgtggctggccgccgccgcccccagcctggcccggcggctgctgtttcttggcccaccgcctcccccattgctgctcctggtgttctcacggagttcacggcgaaggctccactcattgggactggcagatgtttctccgatcaattactcgttatgtctgaaacccgacttgctcgattttacgttcgaggggaagttggaagctgccgcgcaggtacgccaggccaccaaccagatcgtaatgaattgtgccgacattgatatcataactgcctcctacgcgccagaaggcgacgaggagattcacgcgaccggttttaattaccagaatgaggacgagaaggttactttgtccttccctagcaccctgcagacagggaccggtaccctcaagattgatttcgtcggtgaattgaacgacaaaatgaaaggattttacaggtctaaatatacgacacccagtggggaggtccgctatgctgccgtgacacagttcgaggcaacagatgcccgcagggcattcccatgttgggacgaaccagctatcaaagccacgttcgacatttcactagttgttccgaaggatcgggtggcattaagcaatatgaatgtcatagataggaagccctatcctgatgatgagaatttggtggaggtcaaatttgcacggaccccagtgatgtccacttatttggtggcctttgtcgtcggcgagtatgatttcgtggaaacccggtcaaaggatggagtttgtgtcagggtctacactccagtcggtaaggcggagcagggaaagtttgcactggaggttgccgcgaagacgctccctttttacaaggattatttcaacgtcccataccctctcccaaagatagacctgatagctatcgcagacttcgccgccggcgctatggaaaactgggggctggtgacatacagggaaaccgccctcctgatcgatccgaaaaactcttgctccagttcccgacagtgggtggcattggtggtgggtcacgaattggcacatcagtggttcggcaatttagtgaccatggaatggtggactcacctgtggctgaacgagggctttgcgagctggatagagtatttatgtgtggaccattgcttccccgaatatgatatttggacccagtttgtatccgctgattacaccagggcccaggaactagacgctctggacaacagccacccaattgaggttagcgtgggccatccaagcgaggtggatgagattttcgacgctatcagctatagcaagggggctagtgtgatccgcatgttgcatgactacattggggataaagattttaagaaaggaatgaacatgtacctaacaaaattccagcagaagaatgctgctacagaggatctgtgggagtcactagagaacgcttccggcaagcccatagccgctgttatgaacacctggactaagcagatgggctttcccttgatctacgtggaggcggaacaagtggaggatgataggctgctgagactctcgcagaagaagttctgcgcaggcggatcctatgttggcgaggactgtccacaatggatggtgcccattaccatcagtacttccgaagatcctaaccaagccaaactgaagattctcatggataaaccagagatgaatgtggtgctcaagaatgtgaaaccggaccaatgggtcaaactcaacctcgggacagttggcttctatcgtacacaatactccagtgcaatgctggaaagtcttctgcctggcattcgggatctgagccttccccccgttgataggctgggtttgcagaacgacctcttcagtctctttattttatgtgttagagaggtgtctgggaactgctgtcgagcctag

SEQ ID NO: 318318 - DNA, 2520 bp, Artificial Sequence
  derived and/or modified sequence
atgcccgagaagcggcccttcgagcggctgcccgccgacgtgagcccaattaactattctctctgcttgaaacctgatctcctcgacttcacatttgaaggtaaactagaggccgcagctcaggtccgtcaggccaccaatcaaattgtaatgaactgcgctgacatagatattattaccgcatcctatgcaccggagggcgacgaagaaattcatgcaacgggtttcaattaccagaacgaggatgagaaggtgaccctgtcctttcccagcaccctccagaccggtacaggaactctgaaaatcgacttcgtgggcgagctgaacgataaaatgaaaggcttctatcggagcaagtacactactccctctggggaggttcgatatgctgcggtcactcaatttgaaaatgtgatcgatcgcaagccgtacccggatgatgagaaccttgtagaggtgaagttcgctaggacacctgtaatgtctacttatctcgtggctttcgtcgtaggagaatatgatttcgtggagaccaggtctaaggatggagtgtgcgtaagggtctacactccggtgggaaaggcagaacagggcaaatttgccttggaggtggctgccaaaacccttcctttctacaaggattatttcaacgtaccatatccactgcctaagatcgacctgatcgccatcgcggatttcgccgctggggctatggagaattgggggctggttacctatcgagagactgccctgctgatcgatcctaagaatagttgttcctccagcagacaatgggtggccctggttgtgggccatgaactggcccaccaatggttcggaaatctggttaccatggagtggtggacacatctctggctgaatgaagggttcgcaagctggattgaatacctgtgcgtcgaccactgtttccctgagtacgacatttggacccagttcgtgagtgcggactacacaagggctcaggaactagatgcattagataattcacatcctatcgaagtgtccgtgggccacccctccgaggtggacgaaatttttgatgccatctcttacagcaaaggagcgagtgtaatccgcatgctgcacgattacatcggcgataaagactttaagaaaggtatgaatatgtacctgacaaagtttcagcaaaagaacgctgcaaccgaagatttgtgggagtcactggagaatgcttcgggcaagcccattgcagcggttatgaacacttggaccaagcaaatgggcttccccctgatctacgttgaggctgagcaggtggaggacgatcggcttctgagactctcacagaaaaaattctgtgccgggggtagctacgtgggtgaagattgtccgcagtggatggttccgattacgatctccaccagcgaggatcccaaccaggctaaactgaagattctgatggataagccagaaatgaatgtggtgctgaaaaatgtaaagcccgaccaatgggtcaagctgaacctgggcacggtggggttctaccgcacacagtacagcagcgcgatgttggagtcgttgctgcctggaattagggacttgagtctcccacctgtggaccgtcttggcctgcaaaatgatctgttttctcttgccagagctgggattattagcaccgtggaggtgctcaaagtgatggaggccttcgtaaatgagcccaattacaccgtgtggtccgacctgtcttgcaatcttgggattttgtccaccctgctaagccatactgatttctatgaagagatacaggagttcgtgaaggacgtgtttagcccaatcggtgagaggctgggctgggacccgaaacccggagaaggccatctagatgcattactacgcggtctggttctgggcaaactaggaaaggcggggcacaaggccacactggaagaggctcgccgacgattcaaggatcacgtagaaggcaaacagatcctgtccgcggacttgagaagccctgtgtatttgaccgttctgaaacatggagacggcaccacactagatataatgttgaaactgcataagcaggctgatatgcaagaagagaagaacaggattgagagagttctgggcgctacattactgcctgatctcattcagaaggtgctgacttttgccctctctgaggaggtccgcccccaggatacagtatcagtcatcggcggcgtcgccggggggtccaagcatggccgtaaggctgcctggaaatttataaaagacaactgggaagaattgtataacagataccagggaggcttccttatctctcgcctcattaagcttagtgtagagggtttcgccgtagacaagatggctggcgaagtgaaggctttttttgagagtcacccagctcccagcgctgaacgcaccattcaacagtgctgcgaaaatatcctcctaaatgcagcctggctcaagcgagacgctgaatccatccaccagtatcttctccaacggaaagcctccccacccaccgtatag

SEQ ID NO: 318319 - DNA, 4353 bp, Artificial Sequence
  derived and/or modified sequence
gggcgcgcccggccggcggggccgcgcacgcagccgccgccaccacttccccctctccctccctccttgcgggccctcctccccttccctcccctccgcccccttccccgtaggcagcccgcccgccagtccgcccgcaccgcctccttcccagcccctagcgctccggctgggtctctcccccgccccccaggctcccccggtcgctctcctccggcggtcgcccgcgctcggtggatgtggctggcagctgccgccccctccctcgctcgccgcctgctcttcctcggccctccgcctcctcccctcctccttctcgtcttcagccgctcctctcgccgccgcctccacagcctgggcctcgccgcgatgccggagaagaggcccttcgagcggctgcctgccgatgtctcccccatcaactacagcctttgcctcaagcccgacttgctggacttcaccttcgagggcaagctggaggccgccgcccaggtgaggcaggcgactaatcagattgtgatgaattgtgctgatattgatattattacagcttcatatgcaccagaaggagatgaagaaatacatgctacaggatttaactatcagaatgaagatgaaaaagtcaccttgtctttccctagtactctgcaaacaggtacgggaaccttaaagatagattttgttggagagctgaatgacaaaatgaaaggtttctatagaagtaaatatactaccccttctggagaggtgcgctatgctgctgtaacacagtttgaggctactgatgcccgaagggcttttccttgctgggatgagcctgctatcaaagcaacttttgatatctcattggttgttcctaaagacagagtagctttatcaaacatgaatgtaattgaccggaaaccataccctgatgatgaaaatttagtggaagtgaagtttgcccgcacacctgttatgtctacatatctggtggcatttgttgtgggtgaatatgactttgtagaaacaaggtcaaaagatggtgtgtgtgtccgtgtttacactcctgttggcaaagcagagcaaggaaaatttgcgttagaggttgctgctaaaaccttgcctttttataaggactacttcaatgttccttatcctctacctaaaattgatctcattgctattgcagactttgcagctggtgccatggagaactggggccttgttacttatagggagactgcattgcttattgatccaaaaaattcctgttcttcatcccgccagtgggttgctctggttgtgggacatgaactcgcccatcaatggtttggaaatcttgttactatggaatggtggactcatctttggttaaatgaaggttttgcatcctggattgaatatctgtgtgtagaccactgcttcccagagtatgatatttggactcagtttgtttctgctgattacacccgtgcccaggagcttgacgccttagataacagccatcctattgaagtcagtgtgggccatccatctgaggttgatgagatatttgatgctatatcatatagcaaaggtgcatctgtcatccgaatgctgcatgactacattggggataaggactttaagaaaggaatgaacatgtatttaaccaagttccaacaaaagaatgctgccacagaggatctctgggaaagtttagaaaatgctagtggtaaacctatagcagctgtgatgaatacctggaccaaacaaatgggatttcccctcatttatgtggaagctgaacaggtagaagatgacagattattgaggttgtcccaaaagaagttctgtgctggtgggtcatatgttggtgaagattgtccccagtggatggtccctatcacaatctctactagtgaagaccccaaccaggccaaactaaaaattctaatggacaagccagagatgaatgtggttttgaaaaatgtcaaaccagaccaatgggtgaagttaaacttaggaacagttgggttttatcggacccagtacagctctgccatgctggaaagtttattaccaggcattcgtgacctttctctgccccctgtggatcgacttggattacagaatgacctcttctccttggctcgagctggaatcattagcactgtagaggttctaaaagtcatggaggcttttgtgaatgagcccaattatactgtatggagcgacctgagctgtaacctggggattctctcaactctcttgtcccacacagacttctatgaggaaatccaggagtttgtgaaagatgtcttttcacctataggggagagactgggctgggaccccaaacctggagaaggtcatctcgatgcactcctgaggggcttggttctgggaaaactaggaaaagcaggacataaggcaacgttagaagaagcccgtcgtcggtttaaggaccacgtggaaggaaaacagattctctccgctgatctgaggagtcctgtctatctgactgttttgaagcatggtgatggcactactttagatattatgttaaaacttcataaacaagcagatatgcaagaagagaaaaaccgaatcgaaagagtccttggcgctactcttttgcctgacctgattcaaaaagtcctcacgtttgcactttcagaagaggtacgtccacaggacactgtatcggtaattggtggagtagctggaggcagcaagcatggtaggaaagctgcttggaaattcataaaggacaactgggaagaactttataaccgataccagggaggattcttaatatccagactaataaagctatcagttgagggatttgcagttgataaaatggctggagaggttaaggctttcttcgagagtcacccagctccttcagctgagcgtaccatccagcagtgttgtgaaaatattctgctgaatgctgcctggctaaagcgagatgctgagagcatccaccagtacctccttcagcggaaggcctcaccacccacagtgtgaatcctgaggtgccgccattggcggttctgctgcttcgctgcagggataaggtggagctaccgaacagctgattcatatgccaagaatttggagtcttctttcaaaccagtgggggttggacaatgaatgtagttaactggttcctgctcacactccagaattaaattctattgaaaaaggaaaatcagcaattcagcaaaaaataaataaaaaataaaaatgtaaatatgatagtaataaaatagagcataacgaaactgtgaaactttctgaagccttgtcagtggttaaaagtatttaacactctactgttaatgacagatgttctgtttttataacctaccaaaaggaaactagaggcttcttggtgaagagcatttttgtgaagtgggttctgcaaggagcctataaagccaagggtggtgtccatttctgggaatggttaaacacaaaaggctgatagctggtatcacatagttggagtcagtgcataattccaagtggctttttttttttttggcacggggactgatcaggaagatatattcctgcataactcaatctgaaccaaggattgtagtttagttttcctccttgccttcccttctgtgtgaccgaccccttggccaaaaaaaaacaaaaagcaaaaaacaaaaacctaccctgttctggtttttttcctccctttagttccacccccaacccccattccctggtgtccttcttagagatgaagaaataataaggaaacatctttcatagccacattaaataagagaaactgatatacattatttttttctttttaaagatgacttataagaaccctgaaatttatataggtgagacaatagaaataaaaagatcttcagccaggcctttctgaaggagttattctgctaaaaatggtcttagttgtctgaaaagccagctcttgaacctcttcacaacagtatcaacactggcttctcccggttcattttatgcgtgcgagaagtcagtggtaactgctgcagggcttaatacattagtggtaactggtttaaaaaacaaagactgtaagcctgtgtgtgccactgtttgcttcaacagtatatcctaataagcctcacctatttaatccaatgagttttaaatctaaatctcattcccttcttctttccctaccttttttttctttttttcttaaaaaaatattttgtgttattaacagaaattcatatttggtgtggcttaacggtatttcagaaggtcatcagattgtgagactgcttccttgaaacatttttgtgctattgttttaaaaaaataattaaaaaacagttggcgttaataaaaatgtcaatgtgaaactga

SEQ ID NO: 318320 - DNA, 2238 bp, Artificial Sequence
  derived and/or modified sequence
tcctccggcggtcgcccgcgctcggtggatgtggctggcagctgccgccccctccctcgctcgccgcctgctcttcctcggccctccgcctcctcccctcctccttctcgtcttcagccgctcctctcgccgccgcctccacagcctgggcctcgccgatgtctcccccatcaactacagcctttgcctcaagcccgacttgctggacttcaccttcgagggcaagctggaggccgccgcccaggtgaggcaggcgactaatcagattgtgatgaattgtgctgatattgatattattacagcttcatatgcaccagaaggagatgaagaaatacatgctacaggatttaactatcagaatgaagatgaaaaagtcaccttgtctttccctagtactctgcaaacaggtacgggaaccttaaagatagattttgttggagagctgaatgacaaaatgaaaggtttctatagaagtaaatatactaccccttctggagaggtgcgctatgctgctgtaacacagtttgaggctactgatgcccgaagggcttttccttgctgggatgagcctgctatcaaagcaacttttgatatctcattggttgttcctaaagacagagtagctttatcaaacatgaatgtaattgaccggaaaccataccctgatgatgaaaatttagtggaagtgaagtttgcccgcacacctgttatgtctacatatctggtggcatttgttgtgggtgaatatgactttgtagaaacaaggtcaaaagatggtgtgtgtgtccgtgtttacactcctgttggcaaagcagagcaaggaaaatttgcgttagaggttgctgctaaaaccttgcctttttataaggactacttcaatgttccttatcctctacctaaaattgatctcattgctattgcagactttgcagctggtgccatggagaactggggccttgttacttatagggagactgcattgcttattgatccaaaaaattcctgttcttcatcccgccagtgggttgctctggttgtgggacatgaactcgcccatcaatggtttggaaatcttgttactatggaatggtggactcatctttggttaaatgaaggttttgcatcctggattgaatatctgtgtgtagaccactgcttcccagagtatgatatttggactcagtttgtttctgctgattacacccgtgcccaggagcttgacgccttagataacagccatcctattgaagtcagtgtgggccatccatctgaggttgatgagatatttgatgctatatcatatagcaaaggtgcatctgtcatccgaatgctgcatgactacattggggataaggactttaagaaaggaatgaacatgtatttaaccaagttccaacaaaagaatgctgccacagaggatctctgggaaagtttagaaaatgctagtggtaaacctatagcagctgtgatgaatacctggaccaaacaaatgggatttcccctcatttatgtggaagctgaacaggtagaagatgacagattattgaggttgtcccaaaagaagttctgtgctggtgggtcatatgttggtgaagattgtccccagtggatggtccctatcacaatctctactagtgaagaccccaaccaggccaaactaaaaattctaatggacaagccagagatgaatgtggttttgaaaaatgtcaaaccagaccaatgggtgaagttaaacttaggaacagttgggttttatcggacccagtacagctctgccatgctggaaagtttattaccaggcattcgtgacctttctctgccccctgtggatcgacttggattacagaatgacctcttctccttgttcattttatgcgtgcgagaagtcagtggtaactgctgcagggcttaatacattagtggtaactggtttaaaaaacaaagactgtaagcctgtgtgtgccactgtttgcttcaacagtatatcctaataagcctcacctatttaatccaatgagttttaaatctaaatctcattcccttcttctttccctaccttttttttctttttttcttaaaaaaatattttgtgttattaacagaaattcatatttggtgtggcttaacggtatttcagaaggtcatcagattgtgagactgcttccttgaaacatttttgtgctattgttttaaaaaaataattaaaaaacagttggcgttaataaaaatgtcaatgtg

SEQ ID NO: 318321 - DNA, 2823 bp, Artificial Sequence
  derived and/or modified sequence
cctcgctcgccgcctgctcttcctcggccctccgcctcctcccctcctccttctcgtcttcagccgctcctctcgccgccgcctccacagcctgggcctcgccgcgatgccggagaagaggcccttcgagcggctgcctgccgatgtctcccccatcaactacagcctttgcctcaagcccgacttgctggacttcaccttcgagggcaagctggaggccgccgcccaggtgaggcaggcgactaatcagattgtgatgaattgtgctgatattgatattattacagcttcatatgcaccagaaggagatgaagaaatacatgctacaggatttaactatcagaatgaagatgaaaaagtcaccttgtctttccctagtactctgcaaacaggtacgggaaccttaaagatagattttgttggagagctgaatgacaaaatgaaaggtttctatagaagtaaatatactaccccttctggagaggtgcgctatgctgctgtaacacagtttgagaatgtaattgaccggaaaccataccctgatgatgaaaatttagtggaagtgaagtttgcccgcacacctgttatgtctacatatctggtggcatttgttgtgggtgaatatgactttgtagaaacaaggtcaaaagatggtgtgtgtgtccgtgtttacactcctgttggcaaagcagagcaaggaaaatttgcgttagaggttgctgctaaaaccttgcctttttataaggactacttcaatgttccttatcctctacctaaaattgatctcattgctattgcagactttgcagctggtgccatggagaactggggccttgttacttatagggagactgcattgcttattgatccaaaaaattcctgttcttcatcccgccagtgggttgctctggttgtgggacatgaactcgcccatcaatggtttggaaatcttgttactatggaatggtggactcatctttggttaaatgaaggttttgcatcctggattgaatatctgtgtgtagaccactgcttcccagagtatgatatttggactcagtttgtttctgctgattacacccgtgcccaggagcttgacgccttagataacagccatcctattgaagtcagtgtgggccatccatctgaggttgatgagatatttgatgctatatcatatagcaaaggtgcatctgtcatccgaatgctgcatgactacattggggataaggactttaagaaaggaatgaacatgtatttaaccaagttccaacaaaagaatgctgccacagaggatctctgggaaagtttagaaaatgctagtggtaaacctatagcagctgtgatgaatacctggaccaaacaaatgggatttcccctcatttatgtggaagctgaacaggtagaagatgacagattattgaggttgtcccaaaagaagttctgtgctggtgggtcatatgttggtgaagattgtccccagtggatggtccctatcacaatctctactagtgaagaccccaaccaggccaaactaaaaattctaatggacaagccagagatgaatgtggttttgaaaaatgtcaaaccagaccaatgggtgaagttaaacttaggaacagttgggttttatcggacccagtacagctctgccatgctggaaagtttattaccaggcattcgtgacctttctctgccccctgtggatcgacttggattacagaatgacctcttctccttggctcgagctggaatcattagcactgtagaggttctaaaagtcatggaggcttttgtgaatgagcccaattatactgtatggagcgacctgagctgtaacctggggattctctcaactctcttgtcccacacagacttctatgaggaaatccaggagtttgtgaaagatgtcttttcacctataggggagagactgggctgggaccccaaacctggagaaggtcatctcgatgcactcctgaggggcttggttctgggaaaactaggaaaagcaggacataaggcaacgttagaagaagcccgtcgtcggtttaaggaccacgtggaaggaaaacagattctctccgctgatctgaggagtcctgtctatctgactgttttgaagcatggtgatggcactactttagatattatgttaaaacttcataaacaagcagatatgcaagaagagaaaaaccgaatcgaaagagtccttggcgctactcttttgcctgacctgattcaaaaagtcctcacgtttgcactttcagaagaggtacgtccacaggacactgtatcggtaattggtggagtagctggaggcagcaagcatggtaggaaagctgcttggaaattcataaaggacaactgggaagaactttataaccgataccagggaggattcttaatatccagactaataaagctatcagttgagggatttgcagttgataaaatggctggagaggttaaggctttcttcgagagtcacccagctccttcagctgagcgtaccatccagcagtgttgtgaaaatattctgctgaatgctgcctggctaaagcgagatgctgagagcatccaccagtacctccttcagcggaaggcctcaccacccacagtgtgaatcctgaggtgccgccattggcggttctgctgcttcgctgcagggataaggtggagctaccgaacagctgattcatatgccaagaatttggagtcttctttcaaaccagtgggggttggacaatgaatgtagttaactggttcctgctcacactccagaattaaattctattgaaaaaggaaaatcagcaattcagc

SEQ ID NO: 318322 - DNA, 2760 bp, Artificial Sequence
  derived and/or modified sequence
atgtggttagcagctgccgcacccagcttggccaggcgcctcctgttcttaggaccaccacccccacccctcctgctcctcgtattttccagatctagtcgcaggagactgcactctttggggttggctgccatgcccgaaaaacgcccatttgagcgtcttcccgcagatgtatctcccatcaattactccttgtgcttaaagcccgaccttctggatttcacatttgaaggaaagctggaggccgctgcccaagtgagacaagccactaaccagatcgtgatgaactgtgcagatattgatattattaccgccagctacgccccagagggagatgaagaaattcatgctactggtttcaattaccagaacgaggatgagaaggttactttaagctttccttctacactacagaccgggactggaaccctgaaaatcgactttgttggtgagctcaacgacaagatgaaggggttttacagaagtaaatacaccactccatcaggagaagtgcgatacgctgccgttacccagttcgaagctaccgatgcgagacgagctttcccctgttgggatgagccagcaattaaagcaactttcgacatctcattagtggtccctaaagatcgcgtggcactcagcaacatgaatgttattgaccggaagccatacccagatgacgagaacctcgttgaggtcaaatttgctaggaccccagttatgtccacctacttagtagcgttcgtagtcggtgagtatgatttcgtggagacccggagcaaagacggcgtctgtgttagagtgtataccccagtgggtaaagccgaacagggcaagttcgcgctggaggtagccgctaaaaccctcccattttacaaagattatttcaacgtgccctaccccctgcctaagatcgacctgatcgctatcgccgatttcgccgcaggagccatggaaaactggggtctggtcacctaccgggagactgccctgctgattgatcccaaaaacagttgcagtagttctcggcaatgggtagcactcgtggtgggtcacgagctagcccaccagtggtttggaaaccttgtaacgatggagtggtggacccacctgtggctgaacgagggatttgcaagctggatagaatatctgtgtgtggatcactgcttccccgaatacgatatctggacacagttcgtgtccgccgattataccagggctcaagagctggacgcacttgacaacagtcatccaatcgaggtatctgtgggtcacccaagcgaggttgatgaaatcttcgatgccatttcctactctaagggcgcttcagtcatacggatgctacatgattacatcggggacaaagattttaaaaaaggcatgaacatgtacctcacgaaattccagcagaaaaatgcagctactgaagacctttgggagagcctggaaaatgcaagcggcaagcccatcgctgccgtcatgaatacatggacgaagcagatggggttccctcttatttatgtggaggctgagcaagttgaggatgatagattgctaagactgtctcagaagaagttttgcgctggcggatcttacgttggggaagactgcccccagtggatggtccccattacaatcagcacatcagaggaccccaatcaagcaaagctgaagattctgatggacaagcccgaaatgaatgtcgtactcaagaatgtgaagcctgaccagtgggtaaagctcaatctcggcaccgttggattttacaggacacaatattctagcgccatgctggaaagtcttctgcctgggattcgggacctttccctcccacccgttgaccggttaggattacagaatgacctcttcagcctggcccgagctgggatcattagcaccgtcgaagttcttaaagtgatggaggccttcgtgaatgaacccaattacacagtctggagcgatctctcttgcaatctcggcatactgagcaccttgctgtcacacactgacttctatgaggaaatccaggagtttgtgaaagacgtgtttagccctataggtgagcgcctcggatgggatcccaaacctggcgaggggcatctggatgcactgctgcgcggacttgtgctcgggaagctagggaaagccggacataaggctacactcgaagaggcgcgtaggcgcttcaaagatcatgtggaaggaaaacaaatactgtcagccgatttaagaagtccggtgtatctcacagtcctgaagcatggggacggcacgacactggatattatgctgaaattgcacaagcaggctgatatgcaggaggagaagaacagaattgaacgtgtcctaggcgcaacgctgctccccgatttgatccagaaggtgctgacatttgccctgagcgaggaagtgagacctcaagacaccgtctccgtcatcggcggagtcgcaggtgggtccaaacacggccgaaaagctgcatggaaatttatcaaggacaactgggaagagctctacaatcggtatcagggaggatttctcatttcccgtttaattaagctttccgtggagggctttgccgttgataaaatggccggtgaggtaaaggcgttcttcgagtcacaccccgcacctagtgcagagaggacaattcagcaatgttgtgaaaacatcctgctgaacgccgcttggctgaagagggatgcagagtccattcatcagtatctactccaaaggaaagctagcccgcctacagtgtag

SEQ ID NO: 318323 - DNA, 1884 bp, Artificial Sequence
  derived and/or modified sequence
atgtggctggccgctgccgctcctagccttgctcgtcgactactgttcctggggcctcctcctcccccactgctccttttggtgttctccaggtcatcaaggagaagactgcactccctgggtctcgccgatgtgagcccaatcaattatagtctatgtttgaaacctgacttgctggacttcaccttcgagggcaaactggaggctgccgcacaagttcggcaggccacaaatcagattgtcatgaactgcgcggatatcgacattatcacggcttcatacgcccctgagggcgatgaggaaattcacgctaccggcttcaattaccagaatgaagatgagaaagtgactttgtcctttcctagcacactccagacaggcactggcactcttaaaatagatttcgtaggggagctcaatgataaaatgaagggattttacaggagcaaatataccactccgagtggcgaggtcagatacgccgctgtgacacagttcgaggcaaccgatgcaagaagggcatttccctgttgggatgagccagccataaaggccacgttcgacattagtttggttgtgcccaaagacagagtggcactcagtaatatgaacgtgatagaccgtaagccctaccctgatgacgagaatctggttgaggttaagtttgccaggacccccgtgatgagtacttatctggtggcctttgtggtcggtgaatacgatttcgtcgagacccggagcaaagacggggtgtgcgtcagggtttatacaccagtcggaaaggcggaacagggaaaatttgcgctggaggtggccgcaaagactctgccattctacaaggattactttaatgtgccctacccactgccgaagatcgaccttatcgctatcgccgactttgcggctggggcaatggaaaattggggactggttacctatcgagagaccgccctgttaatagatccaaaaaactcctgcagttcgtcaaggcagtgggtcgcattggtcgtcgggcacgagctggcgcaccagtggtttggcaaccttgtcacaatggagtggtggacacatctgtggctcaatgaaggattcgcctcatggatagagtatttgtgcgtcgatcactgtttcccggaatacgatatttggacacaatttgttagtgctgattatactagggcacaggaacttgacgctttagacaacagccacccgattgaagtgagcgtcggccacccctctgaagtagacgagatcttcgacgcaatctcatactcaaaaggtgccagcgttattcgcatgctgcacgactacatcggagataaggacttcaagaaggggatgaatatgtacttaaccaagttccagcaaaaaaacgccgcaacagaggacctctgggagagcctagaaaacgcctcaggaaagcccatcgctgctgtgatgaatacgtggaccaagcagatgggatttcccctgatttacgtggaagccgagcaggtcgaggatgacaggttacttaggcttagccaaaaaaagttttgcgcaggaggtagctatgtgggcgaagattgtccacagtggatggttccaatcactatttcgacctccgaggaccctaaccaggcaaagttaaaaattctaatggacaaaccagagatgaatgtcgtgttgaaaaatgttaaaccagatcaatgggtgaaactaaatctgggcactgtggggttttatcgcacacagtattcttctgctatgttagagtccttactgccagggatcagggacctgtccttgcccccagtagatcggctcggtctccagaatgacctgttttccctgttcatcctgtgcgttcgcgaggtgtccggaaattgctgtagagcctag

SEQ ID NO: 318324 - DNA, 2520 bp, Artificial Sequence
  derived and/or modified sequence
atgcccgagaaacgcccattcgagcgactccctgccgatgtaagccctattaactattccctttgcttaaagccagatctgctggatttcaccttcgagggcaaattagaggctgcggcacaagtgcgacaagccacgaatcagatcgtgatgaattgtgcagatattgatatcattacggccagttacgcccctgagggggacgaggaaatccatgcgacgggtttcaattaccagaatgaagacgagaaagtcaccctgagctttccatcaacccttcagacgggaaccgggacacttaagattgattttgtgggcgagctcaatgataaaatgaagggattctaccggagtaagtataccactccatccggtgaggtccggtacgccgcagtgacacaatttgagaacgtgatcgatagaaaaccctacccagatgacgaaaacctggtagaagtgaaattcgccagaacaccagtgatgagcacgtacctcgtggcttttgttgtgggagagtacgactttgtggagactcgttccaaggatggcgtatgtgtccgcgtctacaccccggtggggaaggccgaacagggcaaatttgccctagaggtggccgctaaaactcttcccttctacaaggattactttaacgttccttacccgttgcctaaaattgaccttattgccatagctgacttcgccgctggggcaatggaaaattggggcctcgtgacatacagagagacagcactgcttattgatcctaaaaactcatgctcctcatcccgccagtgggtagcactggtggttggccatgagttggctcatcagtggtttggaaatctggtaacgatggagtggtggactcacttgtggctgaacgaaggcttcgcatcctggatcgagtacctgtgtgtggaccattgtttcccagagtacgatatctggacacagttcgtaagcgctgactacacccgggcacaggagctagatgccctcgataactcacaccctatcgaggtgtctgtgggtcacccttctgaggtggatgagatcttcgatgcaatatcatatagtaagggcgcatccgtcataagaatgcttcacgactatatcggcgataaagattttaaaaagggaatgaatatgtacctgaccaagttccagcaaaaaaacgctgctaccgaggatctttgggaaagtctggagaatgccagcggcaagccgatcgctgctgtcatgaatacttggactaaacaaatgggattccccctcatttatgttgaggccgaacaagtggaggatgacagactgttgagactgagccaaaaaaaattttgcgccggagggtcctatgtcggcgaagattgcccccagtggatggtacccattactatcagcacaagcgaggatcccaatcaagcaaaactcaagatactgatggacaagcctgaaatgaatgtggtgctgaaaaatgtgaaacctgatcaatgggtgaagttaaacttaggaaccgtggggttttataggacacagtatagttcagctatgctagagagcctgctgcctggtattagagatttgagcctgccccctgtggacaggctggggttgcaaaatgatctctttagtctggctagggccggtattatctctaccgttgaagtgctcaaggtaatggaggccttcgttaatgagccgaattatacagtgtggagcgacttgtcctgcaacctggggatcttgtctacgttgctgagtcacacggatttttacgaggagatccaagagttcgtaaaggacgtgttttcacctataggcgagaggctaggatgggatccgaagcctggagaggggcacttagatgcattgttgcgcggactcgtgcttgggaaactgggtaaggccggacacaaagctaccttggaagaggctcgcagaaggttcaaggatcatgtcgaaggaaaacagattctgagcgctgatttgcgctctccagtctatctaacagtgctgaagcacggagatgggacgaccttggatatcatgctgaaacttcataagcaggctgatatgcaggaagaaaaaaacagaattgagcgagttctgggcgctactctcttgcctgacctaatccagaaggtgctgacattcgcactttcggaagaggttagacctcaggatactgtgtccgtgattgggggagtggccggaggcagcaaacatggccgaaaggcggcttggaaatttattaaggacaactgggaggagctgtacaaccgataccaggggggtttccttatatctcgccttatcaagcttagtgtggagggcttcgccgttgacaagatggcgggagaagtgaaggcttttttcgagagccatccagcaccttcggcggagaggaccatacaacagtgttgcgagaatattctgttgaacgcggcttggctcaaacgggatgccgaaagtatacatcagtatctcctgcagcgcaaagcgagcccacccacagtgtag

SEQ ID NO: 318325 - DNA, 2760 bp, Artificial Sequence
  derived and/or modified sequence
atgtggctggccgccgccgcccccagcctggccagaagactgctgttcctgggccccccccccccccccctgctgctgctggtgttcagcagaagcagcagaagaagactgcacagcctgggcctggccgccatgcccgagaagagacccttcgagagactgcccgccgacgtgagccccatcaactacagcctgtgcctgaagcccgacctgctggacttcaccttcgagggcaagctggaggccgccgcccaggtgagacaggccaccaaccagatcgtgatgaactgcgccgacatcgacatcatcaccgccagctacgcccccgagggcgacgaggagatccacgccaccggcttcaactaccagaacgaggacgagaaggtgaccctgagcttccccagcaccctgcagaccggcaccggcaccctgaagatcgacttcgtgggcgagctgaacgacaagatgaagggcttctacagaagcaagtacaccacccccagcggcgaggtgagatacgccgccgtgacccagttcgaggccaccgacgccagaagagccttcccctgctgggacgagcccgccatcaaggccaccttcgacatcagcctggtggtgcccaaggacagagtggccctgagcaacatgaacgtgatcgacagaaagccctaccccgacgacgagaacctggtggaggtgaagttcgccagaacccccgtgatgagcacctacctggtggccttcgtggtgggcgagtacgacttcgtggagaccagaagcaaggacggcgtgtgcgtgagagtgtacacccccgtgggcaaggccgagcagggcaagttcgccctggaggtggccgccaagaccctgcccttctacaaggactacttcaacgtgccctaccccctgcccaagatcgacctgatcgccatcgccgacttcgccgccggcgccatggagaactggggcctggtgacctacagagagaccgccctgctgatcgaccccaagaacagctgcagcagcagcagacagtgggtggccctggtggtgggccacgagctggcccaccagtggttcggcaacctggtgaccatggagtggtggacccacctgtggctgaacgagggcttcgccagctggatcgagtacctgtgcgtggaccactgcttccccgagtacgacatctggacccagttcgtgagcgccgactacaccagagcccaggagctggacgccctggacaacagccaccccatcgaggtgagcgtgggccaccccagcgaggtggacgagatcttcgacgccatcagctacagcaagggcgccagcgtgatcagaatgctgcacgactacatcggcgacaaggacttcaagaagggcatgaacatgtacctgaccaagttccagcagaagaacgccgccaccgaggacctgtgggagagcctggagaacgccagcggcaagcccatcgccgccgtgatgaacacctggaccaagcagatgggcttccccctgatctacgtggaggccgagcaggtggaggacgacagactgctgagactgagccagaagaagttctgcgccggcggcagctacgtgggcgaggactgcccccagtggatggtgcccatcaccatcagcaccagcgaggaccccaaccaggccaagctgaagatcctgatggacaagcccgagatgaacgtggtgctgaagaacgtgaagcccgaccagtgggtgaagctgaacctgggcaccgtgggcttctacagaacccagtacagcagcgccatgctggagagcctgctgcccggcatcagagacctgagcctgccccccgtggacagactgggcctgcagaacgacctgttcagcctggccagagccggcatcatcagcaccgtggaggtgctgaaggtgatggaggccttcgtgaacgagcccaactacaccgtgtggagcgacctgagctgcaacctgggcatcctgagcaccctgctgagccacaccgacttctacgaggagatccaggagttcgtgaaggacgtgttcagccccatcggcgagagactgggctgggaccccaagcccggcgagggccacctggacgccctgctgagaggcctggtgctgggcaagctgggcaaggccggccacaaggccaccctggaggaggccagaagaagattcaaggaccacgtggagggcaagcagatcctgagcgccgacctgagaagccccgtgtacctgaccgtgctgaagcacggcgacggcaccaccctggacatcatgctgaagctgcacaagcaggccgacatgcaggaggagaagaacagaatcgagagagtgctgggcgccaccctgctgcccgacctgatccagaaggtgctgaccttcgccctgagcgaggaggtgagaccccaggacaccgtgagcgtgatcggcggcgtggccggcggcagcaagcacggcagaaaggccgcctggaagttcatcaaggacaactgggaggagctgtacaacagataccagggcggcttcctgatcagcagactgatcaagctgagcgtggagggcttcgccgtggacaagatggccggcgaggtgaaggccttcttcgagagccaccccgcccccagcgccgagagaaccatccagcagtgctgcgagaacatcctgctgaacgccgcctggctgaagagagacgccgagagcatccaccagtacctgctgcagagaaaggccagcccccccaccgtgtag

SEQ ID NO: 318326 - DNA, 1884 bp, Artificial Sequence
  derived and/or modified sequence
atgtggctggccgccgccgcccccagcctggccagaagactgctgttcctgggccccccccccccccccctgctgctgctggtgttcagcagaagcagcagaagaagactgcacagcctgggcctggccgacgtgagccccatcaactacagcctgtgcctgaagcccgacctgctggacttcaccttcgagggcaagctggaggccgccgcccaggtgagacaggccaccaaccagatcgtgatgaactgcgccgacatcgacatcatcaccgccagctacgcccccgagggcgacgaggagatccacgccaccggcttcaactaccagaacgaggacgagaaggtgaccctgagcttccccagcaccctgcagaccggcaccggcaccctgaagatcgacttcgtgggcgagctgaacgacaagatgaagggcttctacagaagcaagtacaccacccccagcggcgaggtgagatacgccgccgtgacccagttcgaggccaccgacgccagaagagccttcccctgctgggacgagcccgccatcaaggccaccttcgacatcagcctggtggtgcccaaggacagagtggccctgagcaacatgaacgtgatcgacagaaagccctaccccgacgacgagaacctggtggaggtgaagttcgccagaacccccgtgatgagcacctacctggtggccttcgtggtgggcgagtacgacttcgtggagaccagaagcaaggacggcgtgtgcgtgagagtgtacacccccgtgggcaaggccgagcagggcaagttcgccctggaggtggccgccaagaccctgcccttctacaaggactacttcaacgtgccctaccccctgcccaagatcgacctgatcgccatcgccgacttcgccgccggcgccatggagaactggggcctggtgacctacagagagaccgccctgctgatcgaccccaagaacagctgcagcagcagcagacagtgggtggccctggtggtgggccacgagctggcccaccagtggttcggcaacctggtgaccatggagtggtggacccacctgtggctgaacgagggcttcgccagctggatcgagtacctgtgcgtggaccactgcttccccgagtacgacatctggacccagttcgtgagcgccgactacaccagagcccaggagctggacgccctggacaacagccaccccatcgaggtgagcgtgggccaccccagcgaggtggacgagatcttcgacgccatcagctacagcaagggcgccagcgtgatcagaatgctgcacgactacatcggcgacaaggacttcaagaagggcatgaacatgtacctgaccaagttccagcagaagaacgccgccaccgaggacctgtgggagagcctggagaacgccagcggcaagcccatcgccgccgtgatgaacacctggaccaagcagatgggcttccccctgatctacgtggaggccgagcaggtggaggacgacagactgctgagactgagccagaagaagttctgcgccggcggcagctacgtgggcgaggactgcccccagtggatggtgcccatcaccatcagcaccagcgaggaccccaaccaggccaagctgaagatcctgatggacaagcccgagatgaacgtggtgctgaagaacgtgaagcccgaccagtgggtgaagctgaacctgggcaccgtgggcttctacagaacccagtacagcagcgccatgctggagagcctgctgcccggcatcagagacctgagcctgccccccgtggacagactgggcctgcagaacgacctgttcagcctgttcatcctgtgcgtgagagaggtgagcggcaactgctgcagagcctag

SEQ ID NO: 318327 - DNA, 2520 bp, Artificial Sequence
  derived and/or modified sequence
atgcccgagaagagacccttcgagagactgcccgccgacgtgagccccatcaactacagcctgtgcctgaagcccgacctgctggacttcaccttcgagggcaagctggaggccgccgcccaggtgagacaggccaccaaccagatcgtgatgaactgcgccgacatcgacatcatcaccgccagctacgcccccgagggcgacgaggagatccacgccaccggcttcaactaccagaacgaggacgagaaggtgaccctgagcttccccagcaccctgcagaccggcaccggcaccctgaagatcgacttcgtgggcgagctgaacgacaagatgaagggcttctacagaagcaagtacaccacccccagcggcgaggtgagatacgccgccgtgacccagttcgagaacgtgatcgacagaaagccctaccccgacgacgagaacctggtggaggtgaagttcgccagaacccccgtgatgagcacctacctggtggccttcgtggtgggcgagtacgacttcgtggagaccagaagcaaggacggcgtgtgcgtgagagtgtacacccccgtgggcaaggccgagcagggcaagttcgccctggaggtggccgccaagaccctgcccttctacaaggactacttcaacgtgccctaccccctgcccaagatcgacctgatcgccatcgccgacttcgccgccggcgccatggagaactggggcctggtgacctacagagagaccgccctgctgatcgaccccaagaacagctgcagcagcagcagacagtgggtggccctggtggtgggccacgagctggcccaccagtggttcggcaacctggtgaccatggagtggtggacccacctgtggctgaacgagggcttcgccagctggatcgagtacctgtgcgtggaccactgcttccccgagtacgacatctggacccagttcgtgagcgccgactacaccagagcccaggagctggacgccctggacaacagccaccccatcgaggtgagcgtgggccaccccagcgaggtggacgagatcttcgacgccatcagctacagcaagggcgccagcgtgatcagaatgctgcacgactacatcggcgacaaggacttcaagaagggcatgaacatgtacctgaccaagttccagcagaagaacgccgccaccgaggacctgtgggagagcctggagaacgccagcggcaagcccatcgccgccgtgatgaacacctggaccaagcagatgggcttccccctgatctacgtggaggccgagcaggtggaggacgacagactgctgagactgagccagaagaagttctgcgccggcggcagctacgtgggcgaggactgcccccagtggatggtgcccatcaccatcagcaccagcgaggaccccaaccaggccaagctgaagatcctgatggacaagcccgagatgaacgtggtgctgaagaacgtgaagcccgaccagtgggtgaagctgaacctgggcaccgtgggcttctacagaacccagtacagcagcgccatgctggagagcctgctgcccggcatcagagacctgagcctgccccccgtggacagactgggcctgcagaacgacctgttcagcctggccagagccggcatcatcagcaccgtggaggtgctgaaggtgatggaggccttcgtgaacgagcccaactacaccgtgtggagcgacctgagctgcaacctgggcatcctgagcaccctgctgagccacaccgacttctacgaggagatccaggagttcgtgaaggacgtgttcagccccatcggcgagagactgggctgggaccccaagcccggcgagggccacctggacgccctgctgagaggcctggtgctgggcaagctgggcaaggccggccacaaggccaccctggaggaggccagaagaagattcaaggaccacgtggagggcaagcagatcctgagcgccgacctgagaagccccgtgtacctgaccgtgctgaagcacggcgacggcaccaccctggacatcatgctgaagctgcacaagcaggccgacatgcaggaggagaagaacagaatcgagagagtgctgggcgccaccctgctgcccgacctgatccagaaggtgctgaccttcgccctgagcgaggaggtgagaccccaggacaccgtgagcgtgatcggcggcgtggccggcggcagcaagcacggcagaaaggccgcctggaagttcatcaaggacaactgggaggagctgtacaacagataccagggcggcttcctgatcagcagactgatcaagctgagcgtggagggcttcgccgtggacaagatggccggcgaggtgaaggccttcttcgagagccaccccgcccccagcgccgagagaaccatccagcagtgctgcgagaacatcctgctgaacgccgcctggctgaagagagacgccgagagcatccaccagtacctgctgcagagaaaggccagcccccccaccgtgtag

SEQ ID NO: 318328 - protein, 182 aa, Artificial Sequence
  derived and/or modified sequence
MPGFDYKFLEKPKRRLLCPLCGKPMREPVQVSTCGHRFCDTCLQEFLSEGVFKCPEDQLPLDYAKFPHPYPQIYPDPELEVQVLGLPIRCIHSEEGCRWSGPLRHLQGHLNTCSFNVIPCPNRCPMKLSRRDLPAHLQHDCPKRRLKCEFCGCDFSGEAYESHEGMCPQESVYCENKCGARM

SEQ ID NO: 318329 - DNA, 549 bp, Artificial Sequence
  derived and/or modified sequence
atgcccggcttcgactacaagttcctggagaagcccaagagaagactgctgtgccccctgtgcggcaagcccatgagagagcccgtgcaggtgagcacctgcggccacagattctgcgacacctgcctgcaggagttcctgagcgagggcgtgttcaagtgccccgaggaccagctgcccctggactacgccaagttcccccacccctacccccagatctaccccgaccccgagctggaggtgcaggtgctgggcctgcccatcagatgcatccacagcgaggagggctgcagatggagcggccccctgagacacctgcagggccacctgaacacctgcagcttcaacgtgatcccctgccccaacagatgccccatgaagctgagcagaagagacctgcccgcccacctgcagcacgactgccccaagagaagactgaagtgcgagttctgcggctgcgacttcagcggcgaggcctacgagagccacgagggcatgtgcccccaggagagcgtgtactgcgagaacaagtgcggcgccagaatgtag

SEQ ID NO: 318330 - DNA, 549 bp, Artificial Sequence
  derived and/or modified sequence
atgcctggtttcgactacaagttcctggagaaaccgaaacgccggttgttatgtccgttatgcgggaaacccatgcgggaacccgttcaggtaagtacgtgcggccatcgtttctgtgacacgtgcctgcaggaatttttgtcagaaggagtatttaagtgtccagaggaccagctccccctggactacgccaaattcccacacccttacccgcagatatatcccgaccctgagctggaggttcaagtcttaggcttgcccatccggtgcatccactctgaggaggggtgccggtggtcaggacccctccggcacttgcagggacatttgaacacctgctcctttaatgtcataccttgtcccaaccgctgccccatgaaactctccaggcgcgatctgccagctcacctgcaacacgactgccccaaacgtcgtctgaaatgtgagttttgtggctgcgacttttcgggcgaagcttatgagtctcatgaaggaatgtgtccacaggaatcagtgtattgcgagaacaaatgcggggcccggatgtag

SEQ ID NO: 318331 - DNA, 549 bp, Artificial Sequence
  derived and/or modified sequence
atgcctggctttgactacaagttcctggagaagcccaagaggcggctgctgtgccccctgtgtgggaagcccatgagggagcctgtgcaggtgtccacctgtggccaccgcttctgtgacacctgcctgcaggagttcctgtctgagggcgtcttcaagtgcccagaggaccagctgcccctggactatgccaagttcccccacccctacccccagatctacccagaccctgagctggaggtgcaggtgctgggcctgcccatccgctgcatccacagcgaggagggctgccgctggagcggccccctgcggcacctgcagggccacctgaacacctgcagcttcaacgtcatcccctgccccaaccgctgccccatgaagctgagccggcgggacctgcctgcccacctgcagcacgactgccccaagaggcggctgaagtgtgagttctgtggctgtgacttcagcggggaggcctatgagagccatgagggcatgtgcccccaggagagcgtgtactgtgaaaataaatgtggggccaggatgtag

SEQ ID NO: 318332 - DNA, 549 bp, Artificial Sequence
  derived and/or modified sequence
atgcccggcttcgactacaagttcctggagaagcccaagcggcggctcttatgccccctgtgtggcaagcctatgcgcgaacccgtgcaggttagtacttgtggccacaggttttgcgatacttgtctgcaggaattcttgtcagaaggtgttttcaagtgcccagaggatcaattgccactggactatgcgaaatttccccatccctaccctcagatttaccctgatcccgaactcgaagtacaggtgctcgggctgccaattcggtgcatccatagcgaagaaggatgcagatggtccggacctttgagacaccttcagggccacctgaacacctgtagctttaatgtcatcccctgccctaatagatgtccaatgaaactctctagaagggacctgcctgctcatcttcagcacgactgccccaagaggcgcctcaaatgtgagttctgtggctgcgatttttcaggcgaagcatacgagagccatgagggcatgtgcccacaagagagcgtgtactgcgagaacaaatgtggtgcaaggatgtag

SEQ ID NO: 318333 - DNA, 549 bp, Artificial Sequence
  derived and/or modified sequence
atgcctggattcgattacaagtttttagagaagccaaaacggaggctcctatgccctttatgtggcaagcccatgcgcgagcccgtgcaagtttcaacatgcgggcatcgcttttgtgacacttgtttgcaggagttcctgtcagagggggtctttaagtgtccagaagaccagttgccactggattatgctaagtttccccacccctaccctcagatatacccagatcctgagctggaagtccaggtgttgggactgcctatcaggtgtattcacagcgaagaaggatgccggtggagcggtcctctgcggcacctccagggccaccttaatacatgttcattcaatgtgataccttgccccaacagatgtcccatgaagctatccaggagggatctgcccgcacacctgcagcacgactgtcctaagaggcgtctgaaatgtgaattctgcgggtgtgacttttccggggaagcctacgaatctcacgagggcatgtgtcctcaggagagcgtgtactgcgaaaacaagtgcggcgctcggatgtag

SEQ ID NO: 318334 - DNA, 631 bp, Artificial Sequence
  derived and/or modified sequence
cgggagcgccgctccagcgaggcgcgggctgtggggccgccgcgtgcctggccccgctcgcccgtgccggccgctcgcccgccatgcctggcttcgactacaagttcctggagaagcccaagcgacggctgctgtgcccactgtgcgggaagcccatgcgcgagcctgtgcaggtttccacctgcggccaccgtttctgcgatacctgcctgcaggagttcctcagtgaaggagtcttcaagtgccctgaggaccagcttcctctggactatgccaagttcccccatccctacccccagatctacccagacccggagctggaagtacaagtattgggcctgcctatccgctgcatccacagtgaggagggctgccgctggagtgggccactacgtcatctacagggccacctgaatacctgcagcttcaatgtcattccctgccctaatcgctgccccatgaagctgagccgccgtgatctacctgcacacttgcagcatgactgccccaagcggcgcctcaagtgcgagttttgtggctgtgacttcagtggggaggcctatgagagccatgagggtatgtgcccccaggagagtgtctactgtgagaataagtgtggtgcccgcatgat

SEQ ID NO: 318335 - protein, 167 aa, Artificial Sequence
  derived and/or modified sequence
MPGFDYKFLEKPKRRLLCPLCGKPMREPVQVSTCGHRFCDTCLQVSAFLNGNGSGEGTHLSLYIRVLPGAFDNLLEWPFARRVTFSLLDQSDPGLAKPQHVTETFHPDPNWKNFQKPGTWRGSLDESSLGFGYPKFISHQDIRKRNYVRDDAVFIRAAVELPRKILS

SEQ ID NO: 318336 - protein, 144 aa, Artificial Sequence
  derived and/or modified sequence
MPGFDYKFLEKPKRRLLCPLCGKPMREPVQVSTCGHRFCDTCLQEFLSEGVFKWPFARRVTFSLLDQSDPGLAKPQHVTETFHPDPNWKNFQKPGTWRGSLDESSLGFGYPKFISHQDIRKRNYVRDDAVFIRAAVELPRKILS

SEQ ID NO: 318337 - DNA, 504 bp, Artificial Sequence
  derived and/or modified sequence
atgcccggcttcgactacaagttcctggagaagcccaagagaagactgctgtgccccctgtgcggcaagcccatgagagagcccgtgcaggtgagcacctgcggccacagattctgcgacacctgcctgcaggtgagcgccttcctgaacggcaacggcagcggcgagggcacccacctgagcctgtacatcagagtgctgcccggcgccttcgacaacctgctggagtggcccttcgccagaagagtgaccttcagcctgctggaccagagcgaccccggcctggccaagccccagcacgtgaccgagaccttccaccccgaccccaactggaagaacttccagaagcccggcacctggagaggcagcctggacgagagcagcctgggcttcggctaccccaagttcatcagccaccaggacatcagaaagagaaactacgtgagagacgacgccgtgttcatcagagccgccgtggagctgcccagaaagatcctgagctag

SEQ ID NO: 318338 - DNA, 435 bp, Artificial Sequence
  derived and/or modified sequence
atgcccggcttcgactacaagttcctggagaagcccaagagaagactgctgtgccccctgtgcggcaagcccatgagagagcccgtgcaggtgagcacctgcggccacagattctgcgacacctgcctgcaggagttcctgagcgagggcgtgttcaagtggcccttcgccagaagagtgaccttcagcctgctggaccagagcgaccccggcctggccaagccccagcacgtgaccgagaccttccaccccgaccccaactggaagaacttccagaagcccggcacctggagaggcagcctggacgagagcagcctgggcttcggctaccccaagttcatcagccaccaggacatcagaaagagaaactacgtgagagacgacgccgtgttcatcagagccgccgtggagctgcccagaaagatcctgagctag

SEQ ID NO: 318339 - DNA, 504 bp, Artificial Sequence
  derived and/or modified sequence
atgcctggctttgattacaaatttctcgagaagcccaagaggaggctgctctgccccctttgcggcaaacctatgagagaaccagtgcaggtatcaacttgtggacatcggttctgcgatacctgcctgcaggtcagtgccttcttaaatggaaacggcagtggcgaggggacacatctgagcttgtacattcgagtcctgcccggagccttcgataatttgttggaatggccgttcgccaggcgcgtcacattctccctgctggaccagtccgaccctgggctggcaaagccccagcacgtaaccgagacgttccatccggacccaaattggaagaatttccagaagcctggaacgtggaggggctcactggatgaaagttctctgggtttcggctatcccaagtttatatctcatcaagacatcaggaagaggaactacgtcagagacgacgccgttttcattcgggccgccgtggagcttccccgaaaaatcctgagctag

SEQ ID NO: 318340 - DNA, 435 bp, Artificial Sequence
  derived and/or modified sequence
atgcctgggtttgattacaagttccttgagaagcccaaacgcaggctgctgtgtcctctttgcgggaagcccatgagggaaccggtacaggtgagcacatgcggccacaggttttgtgatacatgtctccaagaattcctgagtgaaggggtgttcaagtggccttttgccagacgcgtgaccttttcgcttctggatcagtctgatccaggactggcaaaaccacaacacgtgacggaaacattccatccggacccaaattggaaaaattttcagaaaccagggacatggcgcggatccctagacgagtcctctctggggtttgggtatccaaaattcatctcgcatcaggacatcaggaaacgcaactacgtccgggacgacgccgtatttataagggccgctgtagagctgcctcgcaagatcttgtcatag

SEQ ID NO: 318341 - DNA, 504 bp, Artificial Sequence
  derived and/or modified sequence
atgcctggctttgactacaagttcctggagaagcccaagaggcggctgctgtgccccctgtgtgggaagcccatgagggagcctgtgcaggtgtccacctgtggccaccgcttctgtgacacctgcctgcaggtgtctgccttcctgaatggaaatggcagcggggagggcacccacctgagcctgtacatccgggtgctgcccggggcctttgacaacctgctggagtggccctttgcccggcgggtgaccttcagcctgctggaccagagcgaccccggcctggccaagccccagcacgtgacagagaccttccacccagaccccaactggaagaacttccagaagccaggcacctggaggggcagcctggatgagagcagcctgggcttcggctaccccaagttcatcagccaccaggacatcaggaagagaaattatgtgagagatgatgctgtgttcatccgggctgctgtggagctgcccaggaagatcctgtcctag

SEQ ID NO: 318342 - DNA, 435 bp, Artificial Sequence
  derived and/or modified sequence
atgcctggctttgactacaagttcctggagaagcccaagaggcggctgctgtgccccctgtgtgggaagcccatgagggagcctgtgcaggtgtccacctgtggccaccgcttctgtgacacctgcctgcaggagttcctgtctgagggcgtcttcaagtggccctttgcccggcgggtgaccttcagcctgctggaccagagcgaccccggcctggccaagccccagcacgtgacagagaccttccacccagaccccaactggaagaacttccagaagccaggcacctggaggggcagcctggatgagagcagcctgggcttcggctaccccaagttcatcagccaccaggacatcaggaagaggaactacgtgagagatgatgctgtgttcatccgggctgctgtggagctgcccaggaagatcctgtcctag

SEQ ID NO: 318343 - DNA, 504 bp, Artificial Sequence
  derived and/or modified sequence
atgcccggcttcgactacaagttcctggagaagcccaagcggcggctgctgtgcccgctttgtggcaagcccatgagagaacccgtccaagtctctacgtgcggacatagattctgcgacacttgtctgcaggtctccgccttcctgaacggcaatgggagcggagagggcacacacctatcactgtacataagagtcctgcccggggctttcgacaatcttctggagtggccgttcgcacgcagggtgacgttttctctgctggatcagtcggatcccggcctggccaaaccccagcatgtgaccgagaccttccatccggaccccaattggaaaaatttccagaagcctggaacatggcgtggcagcttggacgaatcgtctttaggctttgggtacccaaagttcatctcacaccaagacattcgcaagcgtaattatgtccgcgatgatgcagtgtttatccgggccgctgtggaactaccgagaaagatcctctcttag

SEQ ID NO: 318344 - DNA, 435 bp, Artificial Sequence
  derived and/or modified sequence
atgcccggcttcgactacaagttcctggagaagcccaagcggcggctactgtgtcctttgtgcgggaagccaatgagagagcctgtgcaggtgtcaacttgcggtcacaggttctgcgatacgtgcctgcaggaatttttatccgagggcgttttcaagtggcccttcgctcgccgggtcaccttctccctgttagaccaatctgatcctgggctggctaaaccacagcatgtaacggagacatttcaccctgatcccaattggaaaaattttcagaaaccggggacctggcgaggatcccttgacgaatcatctttgggtttcgggtatcccaagttcatcagccaccaggatattagaaagcgaaactacgtaagggatgatgcagtcttcattcgagcagccgttgaactccctcgaaaaatactcagctag

SEQ ID NO: 318345 - DNA, 504 bp, Artificial Sequence
  derived and/or modified sequence
atgccgggattcgactacaaattccttgagaaacctaagaggaggctgttgtgtccactttgcgggaaacctatgagggaaccagtgcaggtgtctacgtgtggtcatcggttttgcgacacttgtcttcaagtctccgccttcttaaatggaaatggctccggcgaaggaactcacctgtccctgtacattagagtacttcccggagccttcgacaatctgctcgagtggcccttcgctagacgcgtcacctttagcctgcttgatcagagcgaccccggtctggccaagccccagcacgtaactgaaacattccacccagatcctaactggaaaaattttcagaagccaggaacatggcgcggaagtttagatgagtcatccctggggtttggctaccccaaattcatctcacatcaggatatccggaagagaaactacgtgagggatgatgccgtcttcatccgtgccgcagtggaactacccaggaaaattctttcctag

SEQ ID NO: 318346 - DNA, 435 bp, Artificial Sequence
  derived and/or modified sequence
atgcctggatttgattataagttccttgagaagccaaagaggaggctgctctgccctctgtgtgggaagcctatgcgggagcctgtgcaggtcagcacttgcgggcaccggttctgtgatacctgtctacaggagttcctctcagaaggggtatttaagtggccttttgctagaagggtgactttctctctgcttgaccagtctgaccctggtctagctaaacctcagcacgtcaccgaaacattccatcccgatcctaattggaaaaatttccagaagccagggacatggagaggctctcttgatgagtcttcgctgggatttggctatcctaagtttatttcgcatcaggacattcgcaagaggaattatgtgcgcgacgacgccgtattcataagagctgccgtagaattgcctagaaaaattttaagttag

SEQ ID NO: 318347 - DNA, 599 bp, Artificial Sequence
  derived and/or modified sequence
gctcgcccgtgccggccgctcgcccgccatgcctggcttcgactacaagttcctggagaagcccaagcgacggctgctgtgcccactgtgcgggaagcccatgcgcgagcctgtgcaggtttccacctgcggccaccgtttctgcgatacctgcctgcaggtgtctgcattcctcaatggcaatggcagtggtgagggcacacacctctcactgtacattcgtgtgctgcctggtgcctttgacaatctccttgagtggccctttgcccgccgtgtcaccttctccctgctggatcagagcgaccctgggctggctaaaccacagcacgtcactgagaccttccaccccgacccaaactggaagaatttccagaagccaggcacgtggcggggctccctggatgagagttctctgggctttggttatcccaagttcatctcccaccaggacattcgaaagcgaaactatgtgcgggatgatgcagtcttcatccgtgctgctgttgaactgccccggaagatcctcagctgagtgcaggtggggttcgaggggaaaggacgatggggcatgacctcagtcaggcactggctgaacttgg

SEQ ID NO: 318348 - DNA, 530 bp, Artificial Sequence
  derived and/or modified sequence
gctcgcccgtgccggccgctcgcccgccatgcctggcttcgactacaagttcctggagaagcccaagcgacggctgctgtgcccactgtgcgggaagcccatgcgcgagcctgtgcaggtttccacctgcggccaccgtttctgcgatacctgcctgcaggagttcctcagtgaaggagtcttcaagtggccctttgcccgccgtgtcaccttctccctgctggatcagagcgaccctgggctggctaaaccacagcacgtcactgagaccttccaccccgacccaaactggaagaatttccagaagccaggcacgtggcggggctccctggatgagagttctctgggctttggttatcccaagttcatctcccaccaggacattcgaaagcgaaactatgtgcgggatgatgcagtcttcatccgtgctgctgttgaactgccccggaagatcctcagctgagtgcaggtggggttcgaggggaaaggacgatggggcatgacctcagtcaggcactggctgaacttgg

SEQ ID NO: 318349 - DNA, 3984 bp, Artificial Sequence
  derived and/or modified sequence
taacaccaggtgaaagtgcaaggatgctggggtcgctggcgatggcaggagtttgagaacgctgagggtgacgaatatgccgcggacctagcacagggcagcccagccacggccgctcagaacggtcctgatgtgtatgtgctcccgcttaccgaggtgtcacttcccatggccaagcagcccggccggagcgtccagctactgaagagtacagatgtcggtagacactcactgttatacctgaaagagattggccggggatggttcggtaaggttttcctcggagaagtgaattcggggatcagtagcgcgcaggtcgtggtgaaagagctccaggcgtcagccagtgtacaagaacagatgcagtttctggaagaagttcagccctatagggccctgaagcactccaatctcctgcagtgcctcgcccagtgtgcagaagtaactccgtacctcctggtgatggaattctgcccactcggagatcttaaagggtacttgcggtcttgtcgggtggcagaatcaatggctcccgaccctcggacactgcagcgcatggcgtgcgaggtagcttgtggggtcttacacttgcaccgaaataattttgtgcattccgacctggctctccgcaattgtctccttacagccgacctgaccgtaaaaataggcgactatggcctggcgcattgtaagtacagagaagactatttcgttaccgctgaccagctgtgggtgcccctaaggtggatcgcacccgagctcgtggacgaggtacatagcaatcttcttgtggtggaccagaccaaaagtggcaacgtttggtcgctgggggtgactatttgggaactgttcgagttgggcacacagccctatccacagcacagcgatcagcaagtcctcgcgtacacggtgcgcgagcagcagctgaagttgcccaaaccccagttgcagttaacactgtccgaccggtggtacgaggtgatgcagttttgttggttgcaacccgaacagcgacccaccgcagaggaggtccacctgcttttaagctatctatgcgctaagggagctaccgaagcagaggaagagtttgagagacggtggaggtctctacgccctgggggaggaggtgttggacccggacctggcgctgctggaccaatgctgggaggggtggtggagctggccgccgcctccagcttccctctgctggagcagtttgccggggacggattccacgccgacggcgatgatgtgttgaccgtaacggagacgtccagaggtctgaactttgaatacaaatgggaggccggccgtggggctgaagcctttcctgccacactgtcacctggacgcaccgcgcgattgcaggagctctgtgcccctgatggcgcgcctcctggcgtggtgccagtcctctcagctcactctccaagcctgggctctgaatacttcatccgactcgaggaagctgcgcccgctgctggtcacgatcccgattgcgccggatgtgcaccaagcccgcccgccaccgcagatcaggacgacgactcagatggctctaccgccgcctcgttggcgatggagcctctattgggtcacggtccgcccgtggatgtaccctggggacgtggagatcattacccaaggcgttcactggctcgggatcctttatgtccgtctcggtcaccttctccgtcagccggaccactgagtttggcagaggggggcgccgaagatgcagactggggggttgcagctttctgccccgccttttttgaagaccccttagggacatcaccactcggttcatccggcgccccaccgttacccctcacaggggaagatgagctggaagaggttggagcacgtagggccgctcaacgcgggcactggcggtcaaatgtgagcgctaacaacaattccggatctcgttgtcccgaatcttgggatccagtctcggcgggcggacatgctgaaggctgccctagcccaaagcagaccccaagggcctccccagaacctggctaccctggcgagcctttgctggggttacaggccgccagcgcccaggaaccaggttgttgccccggactgccccacttgtgcagtgcacagggactcgcaccagccccatgcttggtcacgccatcttggaccgagaccgcatcctctggaggggatcatccccaggcagagccaaagctcgctactgaagcagaagggactacagggccacgcctacctctcccaagtgtgccgtccccttctcaggagggagcccctctgccttcggaggaagcatcagctccagatgcgccagatgcgctgccagacagccctactcctgctaccggtggggaggtttcggctatcaaattagcaagcgccttgaatggcagttcatctagtccagaggtggaggccccatcctccgaggacgaggacactgccgaggccacaagtggtatcttcacagacacctcttcggatggtctccaggctaggcggccagatgtggtgccagcctttagaagccttcaaaaacaggtgggcacccccgattctttagactctctcgacatccccagttcagcatctgatggtgggtacgaggtgttctcaccatcagcaactggcccatcaggcggccagcctcgagcgctggactcaggttacgataccgaaaactacgagtctccggaatttgttcttaaggaagcacaggaagggtgcgaaccacaggcatttgcagagttggcctctgaaggggaaggccctggacctgaaacacgtttaagcacctctctatcaggattaaatgaaaagaacccctacagagacagcgcatactttagcgatctggaagcagaggcagaagccaccagtggccctgagaaaaagtgtgggggggaccgcgcccctggcccggagctcggccttccctcgaccggacagccctccgagcaggtgtgcctgaggccaggcgtgtccggagaagcccaaggcagcgggccaggcgaagtgctgcctcctctactacagctggagggcagctcaccagaaccatccacttgcccttcaggtctggtgcccgagccacctgagcctcaggggccagcaaaggtccgccctggaccaagtccctcatgttcccagtttttcctgctgacacctgtccccctcagatcagagggcaattccagcgagttccaagggcccccaggcctactttctggaccagcaccgcagaagagaatgggagggcctggaacaccccgcgcaccgctcagattagctctgcctgggctccctgcggcgttggagggcagacccgaagaggaggaggaagactcagaggattctgacgaatcagacgaggaactacggtgttattctgtacaggagccctcagaagacagtgaggaggaagccccagctgtcccagttgtggttgctgaaagccagtccgcaaggaacttgcgcagccttttgaaaatgcctagcctgctgtccgaaaccttctgcgaagacctggaacggaagaagaaagccgtgtccttcttcgatgacgtgacagtgtatctgttcgatcaagagtctcctacacgggagctcggcgaaccgtttcccggcgcaaaagagtcccctccaaccttcctgcggggaagtccaggttcaccatccgcccccaatcggccacagcaggccgatggtagtccaaacgggagcacggctgaggaaggggggggctttgcttgggatgatgacttccccctaatgacagcgaaggcggctttcgctatggctttggatcctgcggctcctgctcccgcagcgccgacccctacaccggcgcccttctcccgcttcacagtttcccctgctccaacgtcaaggttctccattacccatgtttccgatagcgacgctgagagtaaacgtggccctgaggcaggggcaggtggcgaatctaaagaggcgtag

SEQ ID NO: 318350 - DNA, 3984 bp, Artificial Sequence
  derived and/or modified sequence
tgacaccaggtgaaggtgcagggctgctggggccgctggcgctggcaggagtttgaaaatgcagaaggagatgaatatgctgctgacctggcccagggcagccctgccacagctgcccagaatggaccagatgtgtatgtgctgcccctgacagaggtgtccctgcccatggccaagcagcccggccgctctgtgcagctgctgaagagcacagatgtgggccgccacagcctgctgtacctgaaggagatcggccggggctggtttgggaaggtgttcctgggggaggtgaacagcggcatcagcagcgcccaggtggtggtgaaggagctgcaggccagcgcctctgtgcaggagcagatgcagttcctggaggaggtgcagccctaccgggccctgaagcacagcaacctgctgcagtgcctggcccagtgtgccgaggtgaccccctacctgctggtgatggagttctgccccctgggggacctgaagggctacctgcggagctgccgggtggccgagagcatggccccagaccccaggaccctgcagaggatggcctgtgaggtggcctgtggggtgctgcacctgcacaggaacaactttgtgcacagcgacctggccctgaggaactgcctgctgacagctgacctgactgtgaagatcggggactatggcctggcccactgcaagtaccgggaggactactttgtgacagctgaccagctgtgggtgcccctgcgctggatcgcccctgagctggtggatgaggtgcacagcaacctgctggtggtggaccagaccaagtctggaaatgtgtggagcctgggcgtgaccatctgggagctgtttgagctgggcacccagccctacccccagcacagcgaccagcaggtgctggcctacacagtgcgggagcagcagctgaagctgcccaagccccagctgcagctgaccctgagtgaccgctggtatgaggtgatgcagttctgctggctgcagcctgagcagaggcccacagctgaggaggtgcacctgctgctgagctacctgtgtgccaagggggccacagaagctgaggaggagtttgaaagacgctggaggagcctgcggcctgggggcggcggcgtgggccctggccctggagctgctggccccatgctgggcggcgtggtggagctggccgccgccagcagcttccccctgctggagcagtttgctggagatggcttccacgcagatggagatgatgtgctgactgtgacagagaccagccggggcctgaactttgagtacaagtgggaggccggccgcggggctgaggccttccctgccaccctgagccctggccgcacagcccggctgcaggagctgtgtgccccagatggagcccctcctggggtggtgcctgtgctgagcgcccacagccccagcctgggcagcgagtacttcatccggctggaggaggccgccccagctgctggccatgaccctgactgtgccggctgtgcccccagccccccagccacagctgaccaggatgatgacagtgatggcagcacagctgccagcctggccatggagcccctgctgggccacggcccccctgtggatgtgccctggggccgcggggaccactaccccaggaggagcctggcccgggaccccctgtgccccagccgcagccccagccccagcgctggccccctgagcctggccgagggcggcgcagaagatgctgactggggcgtggccgccttctgcccagccttctttgaggaccccctgggcaccagccccctgggcagcagcggggccccacccctgcccctgaccggggaggatgagctggaggaggtgggcgccaggagagctgcccagaggggccactggaggagcaatgtgtctgccaacaacaacagcggcagccgctgcccagagagctgggaccctgtgtctgctgggggccacgccgagggctgccccagccccaagcagaccccccgggccagccctgagcccggctacccaggagagcccctgctgggcctgcaggccgccagcgcccaggagcccggctgctgccccggcctgccccacctgtgcagcgcccagggcctggccccagccccctgcctggtgacccccagctggacagaaacagccagcagcggcggggaccacccccaggccgagcccaagctggccacagaagctgagggcaccaccggcccccggctgcccctgcccagcgtgcccagccccagccaggagggcgcccccctgcccagcgaggaggccagcgccccagatgccccagatgccctgcctgacagccccaccccagccaccggcggggaggtgtctgccatcaagctggccagcgccctgaatggcagcagcagcagccctgaggtggaggcccccagcagtgaagatgaggacacagctgaggccaccagcggcatcttcacagacaccagcagtgatggcctgcaggcccggcggccagatgtggtgcctgccttccgcagcctgcagaagcaggtgggcaccccagacagcctggacagcctggacatccccagcagcgccagtgatggcggctatgaggtgttcagccccagcgccaccggccccagcggcggccagccccgggccctggacagcggctatgacacagaaaattatgagagccctgagtttgtgctgaaggaggcccaggagggctgtgagccccaggcctttgctgagctggccagcgagggggagggccctggccctgagacccggctgagcaccagcctgagcggcctgaatgagaagaacccctacagagacagcgcctacttcagtgacctggaggccgaggccgaggccaccagcggccctgagaagaagtgtggcggggaccgggcccctggccctgagctgggcctgcccagcacaggccagcccagcgagcaggtgtgcctgcggcctggggtgtctggagaggcccagggcagcggccctggagaggtgctgccccccctgctgcagctggagggcagcagccctgagcccagcacctgccccagcggcctggtgcctgagcccccagagccccagggccctgccaaggtgcggcccggccccagccccagctgcagccagttcttcctgctgacccctgtgcccctgcggtctgagggcaacagcagcgagttccagggccccccaggcctgctgagcggccctgccccccagaagaggatgggcggccctggcaccccccgggcccccctgcggctggccctgcccggcctgcctgctgccctggagggccggcctgaggaggaggaggaggacagtgaagattctgatgaaagtgatgaggagctgcgctgctacagcgtgcaggagcccagcgaggacagcgaggaggaggccccagctgtgcctgtggtggtggccgagagccagagcgccaggaacctgcggagcctgctgaagatgcccagcctgctgtctgagaccttctgtgaggacctggagaggaagaagaaggctgtgtccttctttgatgatgtgacagtgtacctgtttgaccaggagagccccacccgggagctgggggagcccttccctggggccaaggagagcccccccaccttcctgcggggcagccctggcagccccagcgcccccaaccggccccagcaggctgatggcagccccaacggcagcacagctgaggagggcggcggctttgcctgggatgatgacttccccctgatgacagccaaggccgcctttgccatggccctggaccctgctgccccagccccagctgcccccacccccaccccagcccccttcagccgcttcaccgtgtccccagcccccaccagccgcttcagcatcacccacgtgtctgacagtgatgctgagagcaagaggggccctgaggccggggccggcggggagagcaaggaggcctag

SEQ ID NO: 318351 - DNA, 3984 bp, Artificial Sequence
  derived and/or modified sequence
tgacaccaggtgaaggtgcagggctgctggggccggtggcggtggcaggagtttgaaaatgctgagggtgacgaatatgccgccgatctggctcaggggtcacctgcgaccgctgcccagaacggtcccgacgtatatgtcctccccctgaccgaggtgagcctacccatggctaagcaacccgggagatctgtccaactgctgaagtctacagacgtgggacggcactccctcctgtacctgaaagaaatcggcagaggctggttcggaaaggtctttttgggagaggttaactctggaatcagtagcgctcaggtggtggtgaaagagctccaagcttcagcttccgttcaagaacagatgcagtttctggaggaggtccagccctacagggccctcaagcactccaatttgctgcagtgtctagctcaatgcgccgaagtgaccccatacctgctagtcatggagttttgtccactgggcgatttaaagggctaccttaggagctgccgggtggcagaatccatggcaccggacccccggacgctgcagaggatggcatgcgaggtcgcttgtggcgttctgcacctccatcgaaacaactttgtgcactccgacctcgctctgaggaattgcctactgactgccgatttgacagtgaagatcggagactacgggttggcccactgcaaatatcgcgaggactacttcgtgactgccgaccagctatgggtgcctctgaggtggatcgcccccgagctggtggatgaggtgcattccaatcttctggtagtagatcagaccaagtcaggcaacgtatggtccctgggcgtaaccatctgggagctgttcgaacttggcacgcagccctaccctcagcacagtgaccagcaggtactcgcctataccgtaagggagcagcagctcaaacttccaaaaccacagctgcagttaaccctcagcgatcgctggtacgaagtgatgcaattttgctggttgcagcccgaacaaagacctaccgcggaggaagtccacctgctgcttagctacttatgtgccaagggcgccacagaagcggaggaagaatttgagagaaggtggcgcagcctccggcccggtggcggcggagtgggccctggtccaggcgcggccggacctatgcttgggggggttgtcgagctggcagccgcctctagtttccccctcctggagcagtttgcaggcgatggatttcatgcagatggagatgacgtgctcaccgttactgagacatcccgcggcctaaactttgaatataaatgggaagccggtaggggagctgaggcatttcctgccacactgtctcctggcagaacagcacggcttcaggagctgtgcgcccccgacggtgctccccctggggttgtgcccgttctgtcggcccactccccttcattagggagcgagtattttattcggcttgaggaggctgccccggcagccggccatgaccctgactgtgctgggtgtgctcctagcccccctgcaactgctgatcaagatgacgactctgacggatctactgccgcaagcttggccatggagccattgctgggccacggaccacccgttgacgtcccctggggccgaggcgatcactatccccggcgatcactggcccgcgacccactgtgtccaagcagatcaccaagtccctccgcaggacccctgagcctcgcagaggggggagccgaggatgcagactggggggtggctgctttctgcccagcctttttcgaggatccgctcggaacaagcccacttggttctagtggagccccacccttgcccctcacaggtgaggacgagctggaagaggtgggcgctcgacgggctgctcagaggggtcactggcgatcaaacgtgagtgctaacaacaacagcgggtcacggtgcccggagagctgggaccccgtaagtgcaggtgggcatgccgaggggtgtccttctcccaagcagacccctagggcaagccccgagcctggatatccaggcgagccactattggggctccaggctgccagtgcccaggagcccgggtgctgtccagggctgccacatctatgtagtgcccaaggcctggctcctgctccttgtctagttacgccatcttggacggagacagcaagttcaggtggcgatcatccgcaagccgagcccaagctggccaccgaagccgaaggcactactggtccacgcctaccactgccgagcgtgccatctcctagccaggaaggcgcccccctgccaagtgaggaggcatccgcccctgacgcaccagacgccctgcctgactctcctacacccgcaacaggaggggaggtctccgctatcaagttagcaagcgcgctgaatggatcatcatcatccccagaagtggaggccccctcctctgaagacgaagacactgctgaggccacttctggtatcttcaccgacacgtccagcgacggcttgcaggcgcgtcgacctgacgtcgtgcctgcatttcgctcccttcagaaacaagtaggaactcctgactcattagattccctggatatcccttcctcagcctcagacgggggctacgaggtcttctcaccaagcgccacaggacccagcggggggcagccccgagccttagactctggatacgacacggaaaactatgagagccctgagttcgtcctgaaagaagcccaagagggttgcgaaccccaagccttcgccgaactcgctagcgaaggagagggacctggccctgaaacccgtctttccaccagtcttagcgggcttaatgaaaagaacccctatagggatagtgcttacttttccgatctggaagccgaggctgaggccaccagcggccctgagaagaaatgtggtggggacagggcccctggccctgagctgggattaccctccacaggtcagccgtccgagcaggtgtgtttgagaccaggggtctccggggaagcacagggctccggacccggagaggttctccctcccctgctccagttggaggggtcaagtcctgagcccagcacatgcccatctggactagtccccgagccgcccgagccccagggacctgccaaggttcgacccgggccttctcccagctgcagtcagttttttctgctcacaccagttcccctgcgctccgaaggcaattcaagtgagttccaggggcctcccggtttgttgagcggcccggcaccccagaagaggatgggtggacccgggaccccccgcgcccctctgagactggcccttcctggcctcccagcagctctggaaggcagaccagaggaggaggaagaggactctgaagattctgacgagagcgatgaggagctgcggtgctatagtgttcaggaacccagcgaagattctgaggaggaggcccccgcagttcctgtcgttgtcgctgagtctcaatccgccaggaacctaaggtctttgctgaaaatgccatcactgctgtccgaaacattctgcgaggatctcgaaagaaagaagaaagcagtgtctttctttgatgacgttacggtctatttgtttgatcaggaaagccctactcgcgagttgggggaaccattcccaggagccaaggaatcgccccccactttcctgagaggcagccctgggagccctagtgcacctaatcgcccacagcaagccgatggctcccccaatggcagcaccgctgaggaggggggtggattcgcctgggacgacgacttccccctgatgactgcaaaagcggcatttgcaatggcgttggatcctgctgcccccgcgcccgccgcccccactcccacccccgcccctttctcacggtttactgtgtcgccagctcccacatctcgcttttcgatcactcacgtatccgattctgacgcggagtcaaaacggggcccagaggcaggcgctgggggtgagtcaaaagaagcctag

SEQ ID NO: 318352 - DNA, 3984 bp, Artificial Sequence
  derived and/or modified sequence
taacatcaggtgaaggtgcagggatgctggggaaggtggcgctggcaggagttcgaaaacgcagagggcgacgagtacgcagctgacctcgcccagggttccccagcaacggcggctcagaatgggcctgatgtctacgtgcttcccctcacagaggtgagcctccctatggcaaaacagccgggtagaagcgttcagctgctcaagtccaccgacgtggggaggcattccctgttgtatctgaaagagatcggcaggggatggtttggtaaggtctttcttggagaagtcaactccggaatcagttcagcccaagtcgtggtgaaggagttgcaggcgtccgcaagcgtgcaggagcaaatgcagttcctggaggaggtccaaccctacagagccttgaagcactcaaacctgctccagtgcctggcacagtgtgccgaggttactccctatttgttagtaatggagttctgccccctcggagacctcaaagggtacctccggtcttgtcgagttgccgagagtatggccccagaccctcggacactccagcggatggcctgtgaagtcgcttgtggcgtcttgcatctgcataggaataactttgtccactcagatctggccttgaggaactgcttgctgacagctgatttgaccgtcaagatcggcgactatggactcgcacattgtaagtaccgcgaagactatttcgtgaccgcagatcagttatgggttcccctgaggtggatcgctcctgagctggtggatgaagtccatagcaacttactggttgtggatcagactaagtcaggtaacgtatggagcctcggcgtgaccatctgggagctgttcgagctaggcacacaaccctacccgcagcattctgaccagcaggtactggcctacaccgtacgcgagcagcaactcaagttacccaagccccagctccagctgaccctctccgaccggtggtacgaggttatgcagttctgctggctgcagccagagcaacgccctaccgccgaggaggtccatctgctgctaagctatctgtgcgccaagggagccacagaggctgaagaggaattcgagcgcagatggcggtcgttgcgcccagggggaggcggagtgggacccggaccaggtgccgctgggcctatgctggggggagtggtggagctggcggcagcatcctcattcccactcctagaacaattcgctggagatggattccacgcagacggggacgatgttcttactgtcaccgagacatcccggggactcaacttcgagtacaagtgggaggcagggaggggagccgaggccttcccagctaccctgtcgccaggtcgaacggcccgtctccaggagctttgcgccccagacggcgcaccgccaggcgtcgttcctgtgcttagtgctcacagcccatcattgggcagtgagtatttcatccgcctcgaggaagctgccccagccgctggacatgatcctgactgtgccggttgtgctccctcacccccagccacagccgatcaagatgacgacagcgatggatccactgccgcttcactcgcaatggagccgttgttaggccatgggccaccggtagacgtgccatggggcaggggggaccactatcctaggaggtccctggccagggatcctttatgtccaagtcggtctccctccccctcagctgggcctctgtccctggctgaggggggtgcagaggacgccgattggggcgtcgcagccttctgcccggcatttttcgaggatccgctgggaacttcacccctggggagcagcggggcaccgcctctgcccttgaccggagaagatgagctcgaagaggttggggctaggagggcagcccagcgcggacactggcgtagcaacgtgtctgctaataacaactccggctcccggtgcccagaatcatgggaccccgtgagtgccggtgggcacgctgaggggtgtccatcccctaagcagacaccacgggcttctccagagccaggctaccccggtgagcctctcctgggacttcaagctgcttctgctcaggagccaggctgttgccctgggctgccacatctgtgcagcgcccagggattggctccagcaccatgccttgtgactccttcttggaccgaaacggctagcagtggaggggaccacccgcaggccgaaccaaagctcgccacagaagccgagggaactaccggcccacggttgccactcccttctgtaccctctccctcacaggagggggcacccctgccaagcgaagaagctagcgctcccgatgcacccgacgccctccctgatagccccaccccagcaactggcggagaggtctcagccattaaactggcctctgccctgaacggatcttcaagctcccctgaggtcgaggctccgtccagcgaagacgaggacacggccgaggccacaagcggcatctttacagacacatcctctgacggcctccaggcacgacgtcctgacgttgttccagcattcagatcactgcagaagcaggtgggaacacctgactctttggacagtctggatatcccgtcaagtgcttcagacgggggttatgaggtgtttagcccctccgctacgggaccaagcggtggccagccaagagcccttgattctggttacgacactgaaaattacgaaagcccggaattcgtactgaaggaagcccaagaagggtgtgagccccaggcgttcgccgagctcgcgtcggagggcgagggaccaggcccagagactagactgagcacatctctgtctggactcaacgaaaagaatccataccgcgactctgcatatttctctgatttggaagcagaagccgaagccacctctggacctgagaagaagtgtggtggagatcgagcccctggacccgaactgggcctgccctctaccgggcagcctagtgaacaggtttgcctgcggccaggagtgtccggtgaggcccaagggagtggacctggagaagtgctgcctccgctcctgcagctcgaagggagcagccccgaaccatccacttgccccagcgggctggtacctgaaccaccagaacctcagggcccagccaaggtgagacccggtcctagcccaagctgcagtcagttttttttgcttactccggtgccactgcggagtgaaggtaattctagtgagtttcagggcccaccaggacttttgtccgggcctgcaccccagaaacgcatgggtggccctgggacgccacgggcacctctgaggctggctttacccggactgcccgcagctctggagggtcgccctgaagaagaggaggaagatagcgaggatagcgacgaatccgatgaggaattgcgctgttactccgtgcaagaacccagcgaggactctgaagaggaggccccagccgtccctgtcgtagttgccgagagtcagtctgcgagaaacctgcggtcattgctgaagatgccatcgctgctttctgagaccttctgcgaagatctggaaaggaagaagaaggcagtaagcttctttgatgacgtgacagtgtatctgtttgaccaggagagccctacgagggaactcggagaacctttccccggtgcaaaagagtctcctccgacatttcttcggggatcacccggatcccctagcgcccctaacaggcctcaacaggctgatggatccccaaatggctcaacagccgaggaggggggagggttcgcctgggatgacgatttcccactgatgacagctaaagccgcatttgcaatggcacttgatccagccgcacctgctcctgccgcaccgaccccgaccccagcaccgttttctcgcttcactgtgtctccagctcctacttcacggttttcgattacccacgtgagtgattccgacgccgaatccaagcgaggccctgaagccggagcaggtggcgaatccaaagaagcctag

SEQ ID NO: 318353 - DNA, 5081 bp, Artificial Sequence
  derived and/or modified sequence
gccaccaggtgaaggtccaaggctgctggggcagatggcggtggcaggagtttgagaatgcggagggggacgagtacgcagccgacctggcgcagggctccccggccacggcagcacagaacgggcccgacgtgtacgtcctgccactcacggaggtctccttgcccatggccaagcagcctgggcgctcagtgcagctcctcaagtccacagacgtgggccggcacagcctcctgtacctgaaggaaatcggccgtggctggttcgggaaggtgttcctgggggaggtgaactctggcatcagcagtgcccaggtggtggtgaaggagctgcaggctagtgccagcgtgcaggagcagatgcagttcctggaggaggtgcagccctacagggccctgaagcacagcaacctgctccagtgcctggcccagtgcgccgaggtgacgccctacctgctggtgatggagttctgcccactgggggacctcaagggctacctgcggagctgccgggtggcggagtccatggctcccgacccccggaccctgcagcgcatggcctgtgaggtggcctgtggcgtcctgcaccttcatcgcaacaatttcgtgcacagcgacctggccctgcggaactgcctgctcacggctgacctgacggtgaagattggtgactatggcctggctcactgcaagtacagagaggactacttcgtgactgccgaccagctgtgggtgcctctgcgctggatcgcgccagagctggtggacgaggtgcatagcaacctgctcgtcgtggaccagaccaagagcgggaatgtgtggtccctgggcgtgaccatctgggagctctttgagctgggcacgcagccctatccccagcactcggaccagcaggtgctggcgtacacggtccgggagcagcagctcaagctgcccaagccccagctgcagctgaccctgtcggaccgctggtacgaggtgatgcagttctgctggctgcagcccgagcagcggcccacagccgaggaggtgcacctgctgctgtcctacctgtgtgccaagggcgccaccgaagcagaggaggagtttgaacggcgctggcgctctctgcggcccggcgggggcggcgtggggcccgggcccggtgcggcggggcccatgctgggcggcgtggtggagctcgccgctgcctcgtccttcccgctgctggagcagttcgcgggcgacggcttccacgcggacggcgacgacgtgctgacggtgaccgagaccagccgaggcctcaattttgagtacaagtgggaggcgggccgcggcgcggaggccttcccggccacgctgagccctggccgcaccgcacgcctgcaggagctgtgcgcccccgacggcgcgcccccgggcgtggttccggtgctcagcgcgcacagcccgtcgctgggcagcgagtacttcatccgcctagaggaggccgcacccgccgccggccacgaccctgactgcgccggctgcgcccccagtccacctgccaccgcggaccaggacgacgactctgacggcagcaccgccgcctcgctggccatggagccgctgctgggccacgggccacccgtcgacgtcccctggggccgcggcgaccactaccctcgcagaagcttggcgcgggacccgctctgcccctcacgctctccctcgccctcggcggggcccctgagtctggcggagggaggagcggaggatgcagactggggcgtggccgccttctgtcctgccttcttcgaggacccactgggcacgtcccctttggggagctcaggggcgcccccgctgccgctgactggcgaggatgagctagaggaggtgggagcgcggagggccgcccagcgcgggcactggcgctccaacgtgtcagccaacaacaacagcggcagccgctgtccagagtcctgggaccccgtctctgcgggcggccacgctgagggctgccccagtccaaagcagaccccacgggcctcccccgagccggggtaccctggagagcctctgcttgggctccaggcagcctctgcccaggagccaggctgctgccccggcctccctcatctatgctctgcccagggcctggcacctgctccctgcctggttacaccctcctggacagagacagccagtagtgggggtgaccacccgcaggcagagcccaagcttgccacggaggctgagggcactaccggaccccgcctgccccttccttccgtcccctccccatcccaggagggagccccacttccctcggaggaggccagtgcccccgacgcccctgatgccctgcctgactctcccacgcctgctactggtggcgaggtgtctgccatcaagctggcttctgccctgaatggcagcagcagctctcccgaggtggaggcacccagcagtgaggatgaggacacggccgaggccacctcaggcatcttcaccgacacgtccagcgacggcctgcaggccaggaggccggatgtggtgccagccttccgctctctgcagaagcaggtggggacccccgactccctggactccctggacatcccgtcctcagccagtgatggtggctatgaggtcttcagcccgtcggccactggcccctctggagggcagccgcgagcgctggacagtggctatgacaccgagaactatgagtcccctgagtttgtgctcaaggaggcgcaggaagggtgtgagccccaggcctttgcggagctggcctcagagggtgagggccccgggcccgagacacggctctccacctccctcagtggcctcaacgagaagaatccctaccgagactctgcctacttctcagacctcgaggctgaggccgaggccacctcaggcccagagaagaagtgcggcggggaccgagcccccgggccagagctgggcctgccgagcactgggcagccgtctgagcaggtctgtctcaggcctggggtttccggggaggcacaaggctctggccccggggaggtgctgcccccactgctgcagcttgaagggtcctccccagagcccagcacctgcccctcgggcctggtcccagagcctccggagccccaaggcccagccaaggtgcggcctgggcccagccccagctgctcccagtttttcctgctgaccccggttccgctgagatcagaaggcaacagctctgagttccaggggcccccaggactgttgtcagggccggccccacaaaagcggatggggggcccaggcacccccagagccccactccgcctggctctgcccggcctccctgcggccttggagggccggccggaggaggaggaggaggacagtgaggacagcgacgagtctgacgaggagctccgctgctacagcgtccaggagcctagcgaggacagcgaagaggaggcgccggcggtgcccgtggtggtggctgagagccagagcgcgcgcaacctgcgcagcctgctcaagatgcccagcctgctgtccgagaccttctgcgaggacctggaacgcaagaagaaggccgtgtccttcttcgacgacgtcaccgtctacctctttgaccaggaaagccccacccgggagctcggggagcccttcccgggcgccaaggaatcgccccctacgttccttagggggagccccggctctcccagcgcccccaaccggccgcagcaggctgatggctccccaaatggctccacagcggaagagggtggtgggttcgcgtgggacgacgacttcccgctgatgacggccaaggcagccttcgccatggccctagacccggccgcacccgccccggctgcgcccacgcccacgcccgctcccttctcgcgcttcacggtgtcgcccgcgcccacgtcccgcttctccatcacgcacgtgtctgactcggacgccgagtccaagagaggacctgaagctggtgccgggggtgagagtaaagaggcttgagacctgggcagctcctgcccctcaaggctggcgtcaccggagcccctgccaggcagcagcgaggatggtgaccgagaaggtggggaccacgtcctggtggctgttggcagcagattcaggtgcctctgccccacgcggtgtcctggagaagcccgtgggatgagaggccctggatggtagatcggccatgctccgccccagaggcagaattcgtctgggcttttaggcttgctgctagcccctgggggcgcctggagccacagtgggtgtctgtacacacatacacactcaaaaggggccagtgcccctgggcacggcggcccccaccctctgccctgcctgcctggcctcggaggacccgcatgccccatccggcagctcctccggtgtgctcacaggacacttaaaccaggacgaggcatggccccgagacactggcaggtttgtgagcctcttcccaccccctgtgcccccacccttgcctggttcctggtggctcagggcaaggagtggccctgggcgcccgtgtcggtcctgtttccgctgcccttatctcaaagtccgtggctgtttccccttcactgactcagctagacccgtaagcccacccttcccacagggaacaggctgctcccacctgggtcccgctgtggccacggtgggcagcccaaaagatcaggggtggaggggcttccaggctgtactcctgccccgtgggccccgttctagaggtgcccttggcaggaccgtgcaggcagctcccctctgtggggcagtatctggtcctgtgccccagctgccaaaggagagtgggggccatgccccgcagtcagtgttggggggctcctacctacagggagagggatggtggggaaggggtggagctgggggcagggcagcacagggaatatttttgtaactaactaactgctgtggttggagcgaatggaagttgggtgattttaagttattgttgccaaagagatgtaaagtttattgttgcttcgcagggggatttgttttgtgttttgtttgaggcttagaacgctggtgcaatgttttcttgttccttgttttttaagagaaatgaagctaaga

SEQ ID NO: 318354 - DNA, 3984 bp, Artificial Sequence
  derived and/or modified sequence
tgacaccaggtgaaggtgcagggctgctggggcagatggagatggcaggagttcgagaacgccgagggcgacgagtacgccgccgacctggcccagggcagccccgccaccgccgcccagaacggccccgacgtgtacgtgctgcccctgaccgaggtgagcctgcccatggccaagcagcccggcagaagcgtgcagctgctgaagagcaccgacgtgggcagacacagcctgctgtacctgaaggagatcggcagaggctggttcggcaaggtgttcctgggcgaggtgaacagcggcatcagcagcgcccaggtggtggtgaaggagctgcaggccagcgccagcgtgcaggagcagatgcagttcctggaggaggtgcagccctacagagccctgaagcacagcaacctgctgcagtgcctggcccagtgcgccgaggtgaccccctacctgctggtgatggagttctgccccctgggcgacctgaagggctacctgagaagctgcagagtggccgagagcatggcccccgaccccagaaccctgcagagaatggcctgcgaggtggcctgcggcgtgctgcacctgcacagaaacaacttcgtgcacagcgacctggccctgagaaactgcctgctgaccgccgacctgaccgtgaagatcggcgactacggcctggcccactgcaagtacagagaggactacttcgtgaccgccgaccagctgtgggtgcccctgagatggatcgcccccgagctggtggacgaggtgcacagcaacctgctggtggtggaccagaccaagagcggcaacgtgtggagcctgggcgtgaccatctgggagctgttcgagctgggcacccagccctacccccagcacagcgaccagcaggtgctggcctacaccgtgagagagcagcagctgaagctgcccaagccccagctgcagctgaccctgagcgacagatggtacgaggtgatgcagttctgctggctgcagcccgagcagagacccaccgccgaggaggtgcacctgctgctgagctacctgtgcgccaagggcgccaccgaggccgaggaggagttcgagagaagatggagaagcctgagacccggcggcggcggcgtgggccccggccccggcgccgccggccccatgctgggcggcgtggtggagctggccgccgccagcagcttccccctgctggagcagttcgccggcgacggcttccacgccgacggcgacgacgtgctgaccgtgaccgagaccagcagaggcctgaacttcgagtacaagtgggaggccggcagaggcgccgaggccttccccgccaccctgagccccggcagaaccgccagactgcaggagctgtgcgcccccgacggcgccccccccggcgtggtgcccgtgctgagcgcccacagccccagcctgggcagcgagtacttcatcagactggaggaggccgcccccgccgccggccacgaccccgactgcgccggctgcgcccccagcccccccgccaccgccgaccaggacgacgacagcgacggcagcaccgccgccagcctggccatggagcccctgctgggccacggcccccccgtggacgtgccctggggcagaggcgaccactaccccagaagaagcctggccagagaccccctgtgccccagcagaagccccagccccagcgccggccccctgagcctggccgagggcggcgccgaggacgccgactggggcgtggccgccttctgccccgccttcttcgaggaccccctgggcaccagccccctgggcagcagcggcgccccccccctgcccctgaccggcgaggacgagctggaggaggtgggcgccagaagagccgcccagagaggccactggagaagcaacgtgagcgccaacaacaacagcggcagcagatgccccgagagctgggaccccgtgagcgccggcggccacgccgagggctgccccagccccaagcagacccccagagccagccccgagcccggctaccccggcgagcccctgctgggcctgcaggccgccagcgcccaggagcccggctgctgccccggcctgccccacctgtgcagcgcccagggcctggcccccgccccctgcctggtgacccccagctggaccgagaccgccagcagcggcggcgaccacccccaggccgagcccaagctggccaccgaggccgagggcaccaccggccccagactgcccctgcccagcgtgcccagccccagccaggagggcgcccccctgcccagcgaggaggccagcgcccccgacgcccccgacgccctgcccgacagccccacccccgccaccggcggcgaggtgagcgccatcaagctggccagcgccctgaacggcagcagcagcagccccgaggtggaggcccccagcagcgaggacgaggacaccgccgaggccaccagcggcatcttcaccgacaccagcagcgacggcctgcaggccagaagacccgacgtggtgcccgccttcagaagcctgcagaagcaggtgggcacccccgacagcctggacagcctggacatccccagcagcgccagcgacggcggctacgaggtgttcagccccagcgccaccggccccagcggcggccagcccagagccctggacagcggctacgacaccgagaactacgagagccccgagttcgtgctgaaggaggcccaggagggctgcgagccccaggccttcgccgagctggccagcgagggcgagggccccggccccgagaccagactgagcaccagcctgagcggcctgaacgagaagaacccctacagagacagcgcctacttcagcgacctggaggccgaggccgaggccaccagcggccccgagaagaagtgcggcggcgacagagcccccggccccgagctgggcctgcccagcaccggccagcccagcgagcaggtgtgcctgagacccggcgtgagcggcgaggcccagggcagcggccccggcgaggtgctgccccccctgctgcagctggagggcagcagccccgagcccagcacctgccccagcggcctggtgcccgagccccccgagccccagggccccgccaaggtgagacccggccccagccccagctgcagccagttcttcctgctgacccccgtgcccctgagaagcgagggcaacagcagcgagttccagggcccccccggcctgctgagcggccccgccccccagaagagaatgggcggccccggcacccccagagcccccctgagactggccctgcccggcctgcccgccgccctggagggcagacccgaggaggaggaggaggacagcgaggacagcgacgagagcgacgaggagctgagatgctacagcgtgcaggagcccagcgaggacagcgaggaggaggcccccgccgtgcccgtggtggtggccgagagccagagcgccagaaacctgagaagcctgctgaagatgcccagcctgctgagcgagaccttctgcgaggacctggagagaaagaagaaggccgtgagcttcttcgacgacgtgaccgtgtacctgttcgaccaggagagccccaccagagagctgggcgagcccttccccggcgccaaggagagcccccccaccttcctgagaggcagccccggcagccccagcgcccccaacagaccccagcaggccgacggcagccccaacggcagcaccgccgaggagggcggcggcttcgcctgggacgacgacttccccctgatgaccgccaaggccgccttcgccatggccctggaccccgccgcccccgcccccgccgcccccacccccacccccgcccccttcagcagattcaccgtgagccccgcccccaccagcagattcagcatcacccacgtgagcgacagcgacgccgagagcaagagaggccccgaggccggcgccggcggcgagagcaaggaggcctag

SEQ ID NO: 318355 - protein, 1000 aa, Artificial Sequence
  derived and/or modified sequence
MVECFESGGTRLSLSSFNVSCDSLREQLREWRCFQWWRMDWTPRLPSRHIISELEHLTFVNTDVGRCRAWLRLALNDGLMECYLKLLLQEQARLHEYYQPTALLRDAEEGEFLLSFLQGLTSLSFELSYKSAILNEWTLTPLALSGLCPLSELDPLSTSGAELQRKESLDSISHSSGSEDIEVHHSGHKIRRNQKLTASSLSLDTASSSQLSCSLNSDSCLLQENGSKSPDHCEEPMSCDSDLGTANAEDSDRSLQEVLLEFSKAQVNSVPTNGLSQETEIPTPQASLSLHGLNTSTYLHCEAPAEPLPAQAASGTQDGVHVQEPRPQAPSPLDLQQPVESTSGQQPSSTVSETAREVGQGNGLQKAQAHDGAGLKLVVSSPTSPKNKSWISEDDFYRPSREQPLESASDHPIASYRGTPGSRPGLHRHFSQEPRKNCSLGALDQACVPSPGRRQAQAAPSQGHKSFRVVHRRQMGLSNPFRGLMKLGTVERRGAMGIWKELFCELSPLEFRLYLSNEEHTCVENCSLLRCESVGPAHSDGRFELVFSGKKLALRASSQDEAEDWLDRVREALQKVRPQQEDEWVNVQYPDQPEEPPEAPQGCLSPSDLLSEPAALQGTQFDWSSAQVPEPDAIKESLLYLYMDRTWMPYIFSLSLEALKCFRIRNNEKMLSDSHGVETIRDILPDTSLGGPSFFKIITAKAVLKLQAGNAEEAALWRDLVRKVLASYLETAEEAVTLGGSLDENCQEVLKFATRENGFLLQYLVAIPMEKGLDSQGCFCAGCSRQIGFSFVRPKLCAFSGLYYCDICHQDDASVIPARIIHNWDLTKRPICRQALKFLTQIRAQPLINLQMVNASLYEHVERMHLIGRRREQLKLLGDYLGLCRSGALKELSKRLNHRNYLLESPHRFSVADLQQIADGVYEGFSPKVPSEAAGLRPWGARSPEAASAFRCIDSSHLPSLRKVVPTLFLKCYFMQYTVPSEQGSGPEESLQCIEGIAAV

SEQ ID NO: 318356 - protein, 967 aa, Artificial Sequence
  derived and/or modified sequence
MDWTPRLPSRHIISELEHLTFVNTDVGRCRAWLRLALNDGLMECYLKLLLQEQARLHEYYQPTALLRDAEEGEFLLSFLQGLTSLSFELSYKSAILNEWTLTPLALSGLCPLSELDPLSTSGAELQRKESLDSISHSSGSEDIEVHHSGHKIRRNQKLTASSLSLDTASSSQLSCSLNSDSCLLQENGSKSPDHCEEPMSCDSDLGTANAEDSDRSLQEVLLEFSKAQVNSVPTNGLSQETEIPTPQASLSLHGLNTSTYLHCEAPAEPLPAQAASGTQDGVHVQEPRPQAPSPLDLQQPVESTSGQQPSSTVSETAREVGQGNGLQKAQAHDGAGLKLVVSSPTSPKNKSWISEDDFYRPSREQPLESASDHPIASYRGTPGSRPGLHRHFSQEPRKNCSLGALDQACVPSPGRRQAQAAPSQGHKSFRVVHRRQMGLSNPFRGLMKLGTVERRGAMGIWKELFCELSPLEFRLYLSNEEHTCVENCSLLRCESVGPAHSDGRFELVFSGKKLALRASSQDEAEDWLDRVREALQKVRPQQEDEWVNVQYPDQPEEPPEAPQGCLSPSDLLSEPAALQGTQFDWSSAQVPEPDAIKESLLYLYMDRTWMPYIFSLSLEALKCFRIRNNEKMLSDSHGVETIRDILPDTSLGGPSFFKIITAKAVLKLQAGNAEEAALWRDLVRKVLASYLETAEEAVTLGGSLDENCQEVLKFATRENGFLLQYLVAIPMEKGLDSQGCFCAGCSRQIGFSFVRPKLCAFSGLYYCDICHQDDASVIPARIIHNWDLTKRPICRQALKFLTQIRAQPLINLQMVNASLYEHVERMHLIGRRREQLKLLGDYLGLCRSGALKELSKRLNHRNYLLESPHRFSVADLQQIADGVYEGFLKALIEFASQHVYHCDLCTQRGFICQICQHHDIIFPFEFDTTVRCAECKTVFHQSCQAVVKKGCPRCARRRKYQEQNIFA

SEQ ID NO: 318357 - protein, 1000 aa, Artificial Sequence
  derived and/or modified sequence
MVECFESGGTRLSLSSFNVSCDSLREQLREWRCFQWWRMDWTPRLPSRHIISELEHLTFVNTDVGRCRAWLRLALNDGLMECYLKLLLQEQARLHEYYQPTALLRDAEEGEFLLSFLQGLTSLSFELSYKSAILNEWTLTPLALSGLCPLSELDPLSTSGAELQRKESLDSISHSSGSEDIEVHHSGHKIRRNQKLTASSLSLDTASSSQLSCSLNSDSCLLQENGSKSPDHCEEPMSCDSDLGTANAEDSDRSLQEVLLEFSKAQVNSVPTNGLSQETEIPTPQASLSLHGLNTSTYLHCEAPAEPLPAQAASGTQDGVHVQEPRPQAPSPLDLQQPVESTSGQQPSSTVSETAREVGQGNGLQKAQAHDGAGLKLVVSSPTSPKNKSWISEDDFYRPSREQPLESASDHPIASYRGTPGSRPGLHRHFSQEPRKNCSLGALDQACVPSPGRRQAQAAPSQGHKSFRVVHRRQMGLSNPFRGLMKLGTVERRGAMGIWKELFCELSPLEFRLYLSNEEHTCVENCSLLRCESVGPAHSDGRFELVFSGKKLALRASSQDEAEDWLDRVREALQKVRPQQEDEWVNVQYPDQPEEPPEAPQGCLSPSDLLSEPAALQGTQFDWSSAQVPEPDAIKESLLYLYMDRTWMPYIFSLSLEALKCFRIRNNEKMLSDSHGVETIRDILPDTSLGGPSFFKIITAKAVLKLQAGNAEEAALWRDLVRKVLASYLETAEEAVTLGGSLDENCQEVLKFATRENGFLLQYLVAIPMEKGLDSQGCFCAGCSRQIGFSFVRPKLCAFSGLYYCDICHQDDASVIPARIIHNWDLTKRPICRQALKFLTQIRAQPLINLQMVNASLYEHVERMHLIGRRREQLKLLGDYLGLCRSGALKELSKRLNHRNYLLESPHRFSVADLQQIADGVYEGFSPKVPSEAAGLRPWGARSPEAASAFRCIDSSRLPSLRKVVPTLFLKCYFMQYTVPSEQGSGPEESLQCIEGIAAV

SEQ ID NO: 318358 - DNA, 80 bp, Artificial Sequence
  derived and/or modified sequence
aatcgaaaggaatgcaatattattgaacagaatcgaaaagaatggaatcaaatggaatggaacagagtggaatggactgc

SEQ ID NO: 318359 - DNA, 3003 bp, Artificial Sequence
  derived and/or modified sequence
atggtggagtgcttcgagagcggcggcaccagactgagcctgagcagcttcaacgtgagctgcgacagcctgagagagcagctgagagagtggagatgcttccagtggtggagaatggactggacccccagactgcccagcagacacatcatcagcgagctggagcacctgaccttcgtgaacaccgacgtgggcagatgcagagcctggctgagactggccctgaacgacggcctgatggagtgctacctgaagctgctgctgcaggagcaggccagactgcacgagtactaccagcccaccgccctgctgagagacgccgaggagggcgagttcctgctgagcttcctgcagggcctgaccagcctgagcttcgagctgagctacaagagcgccatcctgaacgagtggaccctgacccccctggccctgagcggcctgtgccccctgagcgagctggaccccctgagcaccagcggcgccgagctgcagagaaaggagagcctggacagcatcagccacagcagcggcagcgaggacatcgaggtgcaccacagcggccacaagatcagaagaaaccagaagctgaccgccagcagcctgagcctggacaccgccagcagcagccagctgagctgcagcctgaacagcgacagctgcctgctgcaggagaacggcagcaagagccccgaccactgcgaggagcccatgagctgcgacagcgacctgggcaccgccaacgccgaggacagcgacagaagcctgcaggaggtgctgctggagttcagcaaggcccaggtgaacagcgtgcccaccaacggcctgagccaggagaccgagatccccaccccccaggccagcctgagcctgcacggcctgaacaccagcacctacctgcactgcgaggcccccgccgagcccctgcccgcccaggccgccagcggcacccaggacggcgtgcacgtgcaggagcccagaccccaggcccccagccccctggacctgcagcagcccgtggagagcaccagcggccagcagcccagcagcaccgtgagcgagaccgccagagaggtgggccagggcaacggcctgcagaaggcccaggcccacgacggcgccggcctgaagctggtggtgagcagccccaccagccccaagaacaagagctggatcagcgaggacgacttctacagacccagcagagagcagcccctggagagcgccagcgaccaccccatcgccagctacagaggcacccccggcagcagacccggcctgcacagacacttcagccaggagcccagaaagaactgcagcctgggcgccctggaccaggcctgcgtgcccagccccggcagaagacaggcccaggccgcccccagccagggccacaagagcttcagagtggtgcacagaagacagatgggcctgagcaaccccttcagaggcctgatgaagctgggcaccgtggagagaagaggcgccatgggcatctggaaggagctgttctgcgagctgagccccctggagttcagactgtacctgagcaacgaggagcacacctgcgtggagaactgcagcctgctgagatgcgagagcgtgggccccgcccacagcgacggcagattcgagctggtgttcagcggcaagaagctggccctgagagccagcagccaggacgaggccgaggactggctggacagagtgagagaggccctgcagaaggtgagaccccagcaggaggacgagtgggtgaacgtgcagtaccccgaccagcccgaggagccccccgaggccccccagggctgcctgagccccagcgacctgctgagcgagcccgccgccctgcagggcacccagttcgactggagcagcgcccaggtgcccgagcccgacgccatcaaggagagcctgctgtacctgtacatggacagaacctggatgccctacatcttcagcctgagcctggaggccctgaagtgcttcagaatcagaaacaacgagaagatgctgagcgacagccacggcgtggagaccatcagagacatcctgcccgacaccagcctgggcggccccagcttcttcaagatcatcaccgccaaggccgtgctgaagctgcaggccggcaacgccgaggaggccgccctgtggagagacctggtgagaaaggtgctggccagctacctggagaccgccgaggaggccgtgaccctgggcggcagcctggacgagaactgccaggaggtgctgaagttcgccaccagagagaacggcttcctgctgcagtacctggtggccatccccatggagaagggcctggacagccagggctgcttctgcgccggctgcagcagacagatcggcttcagcttcgtgagacccaagctgtgcgccttcagcggcctgtactactgcgacatctgccaccaggacgacgccagcgtgatccccgccagaatcatccacaactgggacctgaccaagagacccatctgcagacaggccctgaagttcctgacccagatcagagcccagcccctgatcaacctgcagatggtgaacgccagcctgtacgagcacgtggagagaatgcacctgatcggcagaagaagagagcagctgaagctgctgggcgactacctgggcctgtgcagaagcggcgccctgaaggagctgagcaagagactgaaccacagaaactacctgctggagagcccccacagattcagcgtggccgacctgcagcagatcgccgacggcgtgtacgagggcttcagccccaaggtgcccagcgaggccgccggcctgagaccctggggcgccagaagccccgaggccgccagcgccttcagatgcatcgacagcagccacctgcccagcctgagaaaggtggtgcccaccctgttcctgaagtgctacttcatgcagtacaccgtgcccagcgagcagggcagcggccccgaggagagcctgcagtgcatcgagggcatcgccgccgtgtag

SEQ ID NO: 318360 - DNA, 2904 bp, Artificial Sequence
  derived and/or modified sequence
atggactggacccccagactgcccagcagacacatcatcagcgagctggagcacctgaccttcgtgaacaccgacgtgggcagatgcagagcctggctgagactggccctgaacgacggcctgatggagtgctacctgaagctgctgctgcaggagcaggccagactgcacgagtactaccagcccaccgccctgctgagagacgccgaggagggcgagttcctgctgagcttcctgcagggcctgaccagcctgagcttcgagctgagctacaagagcgccatcctgaacgagtggaccctgacccccctggccctgagcggcctgtgccccctgagcgagctggaccccctgagcaccagcggcgccgagctgcagagaaaggagagcctggacagcatcagccacagcagcggcagcgaggacatcgaggtgcaccacagcggccacaagatcagaagaaaccagaagctgaccgccagcagcctgagcctggacaccgccagcagcagccagctgagctgcagcctgaacagcgacagctgcctgctgcaggagaacggcagcaagagccccgaccactgcgaggagcccatgagctgcgacagcgacctgggcaccgccaacgccgaggacagcgacagaagcctgcaggaggtgctgctggagttcagcaaggcccaggtgaacagcgtgcccaccaacggcctgagccaggagaccgagatccccaccccccaggccagcctgagcctgcacggcctgaacaccagcacctacctgcactgcgaggcccccgccgagcccctgcccgcccaggccgccagcggcacccaggacggcgtgcacgtgcaggagcccagaccccaggcccccagccccctggacctgcagcagcccgtggagagcaccagcggccagcagcccagcagcaccgtgagcgagaccgccagagaggtgggccagggcaacggcctgcagaaggcccaggcccacgacggcgccggcctgaagctggtggtgagcagccccaccagccccaagaacaagagctggatcagcgaggacgacttctacagacccagcagagagcagcccctggagagcgccagcgaccaccccatcgccagctacagaggcacccccggcagcagacccggcctgcacagacacttcagccaggagcccagaaagaactgcagcctgggcgccctggaccaggcctgcgtgcccagccccggcagaagacaggcccaggccgcccccagccagggccacaagagcttcagagtggtgcacagaagacagatgggcctgagcaaccccttcagaggcctgatgaagctgggcaccgtggagagaagaggcgccatgggcatctggaaggagctgttctgcgagctgagccccctggagttcagactgtacctgagcaacgaggagcacacctgcgtggagaactgcagcctgctgagatgcgagagcgtgggccccgcccacagcgacggcagattcgagctggtgttcagcggcaagaagctggccctgagagccagcagccaggacgaggccgaggactggctggacagagtgagagaggccctgcagaaggtgagaccccagcaggaggacgagtgggtgaacgtgcagtaccccgaccagcccgaggagccccccgaggccccccagggctgcctgagccccagcgacctgctgagcgagcccgccgccctgcagggcacccagttcgactggagcagcgcccaggtgcccgagcccgacgccatcaaggagagcctgctgtacctgtacatggacagaacctggatgccctacatcttcagcctgagcctggaggccctgaagtgcttcagaatcagaaacaacgagaagatgctgagcgacagccacggcgtggagaccatcagagacatcctgcccgacaccagcctgggcggccccagcttcttcaagatcatcaccgccaaggccgtgctgaagctgcaggccggcaacgccgaggaggccgccctgtggagagacctggtgagaaaggtgctggccagctacctggagaccgccgaggaggccgtgaccctgggcggcagcctggacgagaactgccaggaggtgctgaagttcgccaccagagagaacggcttcctgctgcagtacctggtggccatccccatggagaagggcctggacagccagggctgcttctgcgccggctgcagcagacagatcggcttcagcttcgtgagacccaagctgtgcgccttcagcggcctgtactactgcgacatctgccaccaggacgacgccagcgtgatccccgccagaatcatccacaactgggacctgaccaagagacccatctgcagacaggccctgaagttcctgacccagatcagagcccagcccctgatcaacctgcagatggtgaacgccagcctgtacgagcacgtggagagaatgcacctgatcggcagaagaagagagcagctgaagctgctgggcgactacctgggcctgtgcagaagcggcgccctgaaggagctgagcaagagactgaaccacagaaactacctgctggagagcccccacagattcagcgtggccgacctgcagcagatcgccgacggcgtgtacgagggcttcctgaaggccctgatcgagttcgccagccagcacgtgtaccactgcgacctgtgcacccagagaggcttcatctgccagatctgccagcaccacgacatcatcttccccttcgagttcgacaccaccgtgagatgcgccgagtgcaagaccgtgttccaccagagctgccaggccgtggtgaagaagggctgccccagatgcgccagaagaagaaagtaccaggagcagaacatcttcgcctag

SEQ ID NO: 318361 - DNA, 3003 bp, Artificial Sequence
  derived and/or modified sequence
atggtggagtgcttcgagtccggcggcactcgactaagcctcagcagcttcaatgtctcctgtgacagtctccgtgaacaattgcgagagtggcggtgctttcaatggtggcggatggattggacccccagactgccttcccgccatatcatttccgagctagaacacctcacatttgtcaatactgatgtgggtagatgtagggcctggctgcggctggcgctcaatgatggtttgatggagtgttacctcaaattgctgcttcaggagcaggcacggctccacgaatactatcagccaacagccctcctccgcgacgctgaggagggcgagtttctgctctccttcctgcagggtctgacatctctatcttttgagctgtcttacaagtccgccatactcaatgagtggacccttactccattagctctgtccgggttgtgcccgctgagcgaactggaccccctctcaacaagtggggccgaactacagcgcaaagaatccctagatagcataagccacagcagcgggtccgaagacattgaagtgcatcatagtggacataaaatcagaaggaatcaaaaattaactgccagctcactctcccttgacaccgcgtcctcatcacagttgtcctgttcactaaacagcgatagctgtctgctgcaggagaacggatccaagagcccggatcattgtgaggaacctatgagttgcgacagcgatttaggaactgcgaatgcggaagacagcgaccgcagccttcaggaagtgctgcttgagttttcgaaagctcaggtgaactctgtgcccaccaatgggctctctcaggagactgaaatcccaacccctcaggcaagtctgagtcttcatggcctaaacacatccacatacttgcattgcgaggcgcccgccgaacctttgcctgcgcaggccgcatcaggaacccaggatggtgtgcatgtgcaggagcctaggcctcaggctccctcccctctggatttacagcagccggtggagtccacgagtggccagcagccatcaagcaccgtgagcgaaacagcacgcgaagtaggccagggcaacggtctgcagaaggcccaggctcacgacggcgcgggcctgaaattggttgtgtctagtcccaccagccccaagaacaagtcatggatcagtgaagacgatttctatcgaccgagcagagaacaacctctggaaagcgcttccgaccaccctatcgcaagctataggggaacgccaggtagccgcccgggccttcacagacacttttcacaggagccccgtaaaaactgtagcctgggcgcccttgaccaggcctgcgtaccttctcccggccgcaggcaagcccaggcggcaccaagccaaggtcataaatccttccgggttgtgcaccggaggcagatgggactttctaatccctttaggggtctcatgaagcttgggactgtggaacgcaggggagccatgggtatatggaaggagttattttgcgagttgtcacccctcgagtttaggttgtacctatccaacgaagagcacacatgcgtagaaaattgtagtctgttacgttgtgagtctgtcggacctgcccatagcgacggccgttttgagctcgtcttttcaggcaagaaactagcgttgagggctagctctcaggatgaggctgaagactggttagatagggtgagggaggctctccagaaggttcggccgcaacaggaagacgaatgggtgaatgtgcagtacccagatcaaccggaggagcctcccgaagctcctcagggatgcctcagtccttccgacctgttaagtgaacccgcagctctgcaaggaacccagttcgactggagcagcgctcaggtgcctgagcccgacgcaataaaagagagtctgctttatctgtacatggataggacttggatgccttacattttctccctctccctcgaggctctgaaatgctttagaatccggaataacgaaaagatgctttccgattcgcacggcgttgaaaccatccgcgatattctccccgataccagtctggggggccccagcttctttaagatcatcacggcaaaagcagtgttaaagctgcaggcagggaacgcagaagaggccgcattgtggcgtgacttggtcaggaaggtgttagcctcctacctcgaaaccgccgaggaggcagtgacactgggcggctccctggacgaaaattgccaggaagtcctaaaattcgcaacacgagagaacgggttcctgctgcagtacctcgtcgctatccctatggaaaaaggactagatagccagggatgtttctgcgctggctgttcccgccaaataggattcagctttgtgcggccgaaactctgtgccttcagcgggctctactattgcgacatttgccaccaggacgacgcctcggtcatacctgccagaatcatacataattgggacctgactaagcggcctatatgccggcaggcacttaagtttttgacacagataagagcccagcctcttatcaatttgcagatggtaaacgctagcctttacgagcacgtagagcgaatgcacctaattggcagacgtagggaacagctcaagcttttaggtgattacctgggactgtgccgatctggtgccctgaaagaactctccaagaggctcaaccaccgcaattacctcttggaatccccacacagatttagtgtggccgatctacaacagatagccgacggggtgtacgagggctttagtcccaaagtgccatccgaggcggctggactgcgcccatggggcgcaaggtcccctgaggccgcctccgcttttcggtgtatcgacagtagccacctcccaagtctgcggaaggtcgtcccaaccctgttcttaaaatgttacttcatgcagtataccgtcccctctgagcaaggaagtgggccggaggaatccctgcagtgtatagaaggcatcgccgctgtgtag

SEQ ID NO: 318362 - DNA, 2904 bp, Artificial Sequence
  derived and/or modified sequence
atggactggaccccaaggctgcccagtcgccacatcatttcagaattggaacacctgacattcgtgaacactgacgtggggaggtgccgcgcttggctaaggctggcactgaatgatggcctgatggagtgttacttgaagcttctgctgcaggagcaggcccgactgcatgaatactaccagccgacggccctcctgagggacgctgaagagggagaatttctgctgagtttcctgcagggcctgacctctctgtcctttgagctctcctataagtcagccatactgaacgagtggactcttacacccctggctctctccggcctttgtccattaagcgaactcgaccctttgtctacaagtggcgctgagttacaacgaaaggagtccttggacagtatcagccattcatccgggtctgaggatatagaggtccaccattctggccacaagattagaagaaatcagaaactcacagccagttctctgagcctggacactgccagcagcagccagctgtcatgctcattaaactccgattcctgcctgctccaggaaaatggttcaaagtcaccggatcattgtgaagagcccatgtcttgtgatagtgacctcggcaccgccaacgcagaagattctgaccgttcactgcaggaggtgttactggagttctctaaggcacaggtaaatagtgtgcccaccaatggcttatcgcaggagacggaaattcctactccacaggcctcgttatcattgcacgggctgaacacctccacctaccttcactgcgaggctcccgccgaacccctgccagcacaagccgctagtggcacccaggacggggttcacgtgcaggaaccccgcccccaggccccttcaccgctggatctgcagcaacccgtggagtcgacaagcggccagcagccgtcatccactgtgtcagaaaccgctcgggaagtggggcagggaaacggcttgcagaaagctcaggctcatgatggagccggactcaaactggtagtgtcctcaccaaccagccccaaaaacaagagttggatcagtgaagatgatttttatcgccctagccgcgagcagcccctcgaatcggcgagtgaccaccccatcgcgtcttatcgtggtactcctggctcccgccccggcctccaccgccacttctcccaggaacctcgaaaaaattgctcgctgggggcgttagatcaagcctgcgtgccctccccggggcggagacaggcacaggcagccccgtctcagggacacaagtccttccgtgtagtgcatcggcgccagatgggtctctctaaccctttccgcggccttatgaaactgggtacagttgagcggagaggtgctatgggaatctggaaggagttgttttgcgagcttagccccctcgagtttcgtttgtacttgtccaacgaagagcacacctgtgtggaaaactgtagcttactaagatgtgagtccgttggcccagcgcacagtgacgggcgttttgagctagtgttctccggcaagaagcttgccctcagggcaagtagtcaggacgaggcggaagactggctcgacagggtaagagaagctctccaaaaggtgcgcccgcaacaggaggacgaatgggtgaacgtccaataccccgatcagccagaggagccccccgaggctcctcaaggctgtcttagcccaagcgatctgctctctgagcccgctgcattacagggcacccagtttgactggagttccgctcaggtaccagagccagacgccatcaaggaatcattgctatatctctacatggaccgcacctggatgccatacatctttagtcttagcttggaagccctgaagtgtttccgtataagaaacaacgagaaaatgcttagcgactcccacggcgtcgaaaccatcagggacatcctgcccgataccagtctgggagggccatcctttttcaagattatcactgcaaaggcggttctgaagctgcaggccggaaatgctgaagaggccgctctgtggcgcgacctggtgagaaaggtcctcgctagctatctggagactgcagaggaggcagtgaccctggggggatcacttgatgagaactgtcaggaggtgcttaaattcgccacacgggagaacgggttcctactgcagtatctggtcgccattcccatggaaaagggcctcgacagtcagggctgcttctgtgcgggatgtagccggcagatcggcttcagcttcgtacggcccaaattgtgcgccttctccggcctgtactactgcgacatatgtcaccaggacgatgcttccgtgatacccgcccgtattatccataattgggaccttacaaaacggccaatctgccggcaagctctcaagtttctaacacagattcgcgctcagccactcattaaccttcagatggtcaatgcttccttgtatgagcacgtggagcgcatgcacttaatcggtaggcgcagagaacagcttaaactgttaggtgattaccttgggctatgcagaagtggagcgctgaaagaactgagcaagagactcaatcatcggaactacctccttgaatccccccacagattcagcgtggcagacttgcaacagatcgcggatggggtgtacgaaggatttctaaaagctctgatcgaattcgccagccaacatgtgtaccactgtgatctctgtacccagcgcggcttcatctgccaaatctgccaacaccatgatattatctttccttttgagtttgatactactgtcaggtgcgcagagtgcaagactgtttttcaccagagctgccaggctgttgtgaaaaagggatgtcccagatgcgccaggcggaggaagtatcaagagcagaacatctttgcctag

SEQ ID NO: 318363 - DNA, 3003 bp, Artificial Sequence
  derived and/or modified sequence
atggtggagtgctttgaaagtggcggcacccggctgagcctgagcagcttcaacgtgtcctgtgacagcctgcgggagcagctgcgggagtggcgctgcttccagtggtggaggatggactggaccccccggctgcccagccgccacatcatcagcgagctggagcacctgacctttgtgaacacagatgtgggccgctgccgggcctggctgcggctggccctgaatgatggcctgatggagtgctacctgaagctgctgctgcaggagcaggcccggctgcacgagtactaccagcccacagccctgctgagagatgctgaggagggggagttcctgctgtccttcctgcagggcctgaccagcctgagctttgagctgagctacaagagcgccatcctgaatgagtggaccctgacccccctggccctgagcggcctgtgccccctgtctgagctggaccccctgagcaccagcggggctgagctgcagaggaaggagagcctggacagcatcagccacagcagcggctctgaagatattgaggtgcaccacagcggccacaagatcagaagaaaccagaagctgacagccagcagcctgagcctggacacagccagcagcagccagctgagctgcagcctgaacagcgacagctgcctgctgcaggagaatggcagcaagagcccagaccactgtgaggagcccatgagctgtgacagcgacctgggcacagccaatgcagaagattctgacaggagcctgcaggaggtgctgctggagttcagcaaggcccaggtgaacagcgtgcccaccaacggcctgagccaggagacagagatccccaccccccaggccagcctgagcctgcacggcctgaacaccagcacctacctgcactgtgaggccccagctgagcccctgcctgcccaggccgccagcggcacccaggatggagtgcacgtgcaggagccccggccccaggcccccagccccctggacctgcagcagcctgtggagagcaccagcggccagcagcccagcagcacagtgtctgaaacagcccgggaggtgggccagggcaatggcctgcagaaggcccaggcccatgatggagctggcctgaagctggtggtgagcagccccaccagccccaagaacaagtcctggatcagtgaagatgacttctaccggcccagccgggagcagcccctggagagcgccagtgaccaccccatcgccagctaccggggcaccccaggcagccggcccggcctgcaccgccacttcagccaggagcccaggaagaactgcagcctgggcgccctggaccaggcctgtgtgcccagccctggaagacggcaggcccaggccgcccccagccagggccacaagagcttccgggtggtgcaccggcggcagatgggcctgagcaaccccttccggggcctgatgaagctgggcaccgtggagcggcggggggccatgggcatctggaaggagctgttctgtgagctgagccccctggagttccggctgtacctgagcaatgaggagcacacctgtgtggagaactgcagcctgctgcgctgtgagagcgtgggccctgcccacagtgatggccgctttgagctggtgttcagcggcaagaagctggccctgcgggccagcagccaggatgaagctgaggactggctggacagagtgcgggaggccctgcagaaggtgcggccccagcaggaggatgagtgggtgaatgtgcagtacccagaccagcctgaggagcccccagaggccccccagggctgcctgagccccagcgacctgctgtctgagcctgctgccctgcagggcacccagtttgactggagcagcgcccaggtgcctgagccagatgccatcaaggagagcctgctgtacctgtacatggacaggacctggatgccctacatcttcagcctgagcctggaggccctgaagtgcttccgcatcagaaataatgagaagatgctgagtgacagccatggagtggagaccatccgggacatcctgcctgacaccagcctgggcggccccagcttcttcaagatcatcacagccaaggctgtgctgaagctgcaggccggaaatgctgaggaggccgccctgtggagggacctggtgaggaaggtgctggccagctacctggagacagctgaggaggccgtgaccctgggcggcagcctggatgagaactgccaggaggtgctgaagtttgccacccgggagaatggcttcctgctgcagtacctggtggccatccccatggagaagggcctggacagccagggctgcttctgtgccggctgcagccggcagatcggcttctcctttgtgcggcccaagctgtgtgccttcagcggcctgtactactgtgacatctgccaccaggatgatgccagcgtcatcccagcccgcatcatccacaactgggacctgaccaagaggcccatctgccggcaggccctgaagttcctgacccagatccgggcccagcccctcatcaacctgcagatggtgaatgccagcctgtatgagcacgtggagaggatgcacctgattggaagaagaagagagcagctgaagctgctgggggactacctgggcctgtgccgcagcggggccctgaaggagctgagcaagaggctgaaccacaggaactacctgctggagagcccccaccgcttctctgtggccgacctgcagcagattgctgatggagtgtatgagggcttcagccccaaggtgcccagcgaggccgccggcctgcggccctggggcgcccggagccctgaggccgccagcgccttccgctgcatcgacagcagccacctgcccagcctgaggaaggtggtgcccaccctcttcctgaagtgctacttcatgcagtacacagtgcccagcgagcagggcagcggccctgaggagagcctgcagtgcatcgagggcattgctgctgtgtag

SEQ ID NO: 318364 - DNA, 2904 bp, Artificial Sequence
  derived and/or modified sequence
atggactggaccccccggctgcccagccgccacatcatcagcgagctggagcacctgacctttgtgaacacagatgtgggccgctgccgggcctggctgcggctggccctgaatgatggcctgatggagtgctacctgaagctgctgctgcaggagcaggcccggctgcacgagtactaccagcccacagccctgctgagagatgctgaggagggggagttcctgctgtccttcctgcagggcctgaccagcctgagctttgagctgagctacaagagcgccatcctgaatgagtggaccctgacccccctggccctgagcggcctgtgccccctgtctgagctggaccccctgagcaccagcggggctgagctgcagaggaaggagagcctggacagcatcagccacagcagcggctctgaagatattgaggtgcaccacagcggccacaagatcagaagaaaccagaagctgacagccagcagcctgagcctggacacagccagcagcagccagctgagctgcagcctgaacagcgacagctgcctgctgcaggagaatggcagcaagagcccagaccactgtgaggagcccatgagctgtgacagcgacctgggcacagccaatgcagaagattctgacaggagcctgcaggaggtgctgctggagttcagcaaggcccaggtgaacagcgtgcccaccaacggcctgagccaggagacagagatccccaccccccaggccagcctgagcctgcacggcctgaacaccagcacctacctgcactgtgaggccccagctgagcccctgcctgcccaggccgccagcggcacccaggatggagtgcacgtgcaggagccccggccccaggcccccagccccctggacctgcagcagcctgtggagagcaccagcggccagcagcccagcagcacagtgtctgaaacagcccgggaggtgggccagggcaatggcctgcagaaggcccaggcccatgatggagctggcctgaagctggtggtgagcagccccaccagccccaagaacaagtcctggatcagtgaagatgacttctaccggcccagccgggagcagcccctggagagcgccagtgaccaccccatcgccagctaccggggcaccccaggcagccggcccggcctgcaccgccacttcagccaggagcccaggaagaactgcagcctgggcgccctggaccaggcctgtgtgcccagccctggaagacggcaggcccaggccgcccccagccagggccacaagagcttccgggtggtgcaccggcggcagatgggcctgagcaaccccttccggggcctgatgaagctgggcaccgtggagcggcggggggccatgggcatctggaaggagctgttctgtgagctgagccccctggagttccggctgtacctgagcaatgaggagcacacctgtgtggagaactgcagcctgctgcgctgtgagagcgtgggccctgcccacagtgatggccgctttgagctggtgttcagcggcaagaagctggccctgcgggccagcagccaggatgaagctgaggactggctggacagagtgcgggaggccctgcagaaggtgcggccccagcaggaggatgagtgggtgaatgtgcagtacccagaccagcctgaggagcccccagaggccccccagggctgcctgagccccagcgacctgctgtctgagcctgctgccctgcagggcacccagtttgactggagcagcgcccaggtgcctgagccagatgccatcaaggagagcctgctgtacctgtacatggacaggacctggatgccctacatcttcagcctgagcctggaggccctgaagtgcttccgcatcagaaataatgagaagatgctgagtgacagccatggagtggagaccatccgggacatcctgcctgacaccagcctgggcggccccagcttcttcaagatcatcacagccaaggctgtgctgaagctgcaggccggaaatgctgaggaggccgccctgtggagggacctggtgaggaaggtgctggccagctacctggagacagctgaggaggccgtgaccctgggcggcagcctggatgagaactgccaggaggtgctgaagtttgccacccgggagaatggcttcctgctgcagtacctggtggccatccccatggagaagggcctggacagccagggctgcttctgtgccggctgcagccggcagatcggcttctcctttgtgcggcccaagctgtgtgccttcagcggcctgtactactgtgacatctgccaccaggatgatgccagcgtcatcccagcccgcatcatccacaactgggacctgaccaagaggcccatctgccggcaggccctgaagttcctgacccagatccgggcccagcccctcatcaacctgcagatggtgaatgccagcctgtatgagcacgtggagaggatgcacctgattggaagaagaagagagcagctgaagctgctgggggactacctgggcctgtgccgcagcggggccctgaaggagctgagcaagaggctgaaccacaggaactacctgctggagagcccccaccgcttctctgtggccgacctgcagcagattgctgatggagtgtatgagggcttcctgaaggccctgattgaatttgccagccagcacgtgtaccactgtgacctgtgcacccagaggggcttcatctgccagatctgccagcaccacgacatcatcttcccctttgaatttgacaccaccgtgcgctgtgccgagtgcaagacagtgttccaccagagctgccaggccgtggtgaagaagggctgcccccgctgtgcccggcggaggaagtaccaggagcagaacatctttgcctag

SEQ ID NO: 318365 - DNA, 3003 bp, Artificial Sequence
  derived and/or modified sequence
atggtggagtgcttcgagagcggcggcacccggctgagcctgagctcattcaacgtgtcctgcgatagtctccgggaacagttaagggagtggcggtgctttcagtggtggaggatggactggacaccgaggcttcctagccgacatatcatttctgaactggaacacctgacattcgtcaataccgatgtgggaagatgccgcgcctggctgcggctggcacttaatgatggtttaatggaatgttacctgaagctcctcttgcaagagcaggcacggctacacgaatactatcagcccactgctctgctgcgcgatgccgaagaaggcgagttcctattgtccttcctgcagggactgacatcactttcattcgaattaagctataagagtgcaattttgaacgaatggactctaacacccctcgccctgtcaggattatgtccccttagcgaacttgatcctctcagcacctcgggagctgagctgcaacgcaaggagagcctggactcgatttcgcatagctcgggtagcgaagatattgaagttcatcattccggtcacaagattcgccggaatcagaagctgacagcctctagcttgtcactcgatactgcctcttcttcacagctgtcttgcagtttaaattccgattcgtgtttgctccaggaaaatggcagcaagtcccctgaccactgcgaggagcctatgtcttgtgactctgacctggggacggcaaacgccgaggactccgacagatcactgcaagaggttctgctggagtttagcaaagcccaggtgaactccgttccaactaacggactgtcgcaggagaccgaaataccaacccctcaggccagcctgtccctgcatggcctgaacacttcaacatatctgcactgtgaggcccccgccgagcccctcccggcccaggctgcttccggaacccaagacggggtccatgttcaggaaccccggccccaggccccttcccccctagatctgcaacagcccgtggaatctacaagcggccaacaaccatccagcaccgtcagcgaaaccgccagagaagttggccaaggaaacggacttcagaaagcgcaggcccacgacggggctggactcaagttggtggtttctagtcccacatccccgaagaataagtcctggataagtgaggacgacttctaccgtccctcacgagaacagcccctggagtcagcttcggatcaccccattgcttcttacagaggaacccccgggtccagaccagggcttcacaggcatttctctcaggaaccccgaaagaactgtagtctgggagcacttgaccaggcatgtgtccctagccccggtcgtcgacaggcccaggcagccccttctcagggccacaagagtttcagagttgtccatcgaagacaaatgggtctgagcaatccatttcgcggtctcatgaagcttgggaccgtggaacgcagaggcgccatgggcatttggaaagagctcttctgcgagctgtcgcctctggagtttcgactttatctttccaatgaggagcacacctgtgtggagaactgcagccttctgaggtgcgaatccgtaggcccagcccacagtgatggccggttcgagctggtattttctgggaaaaaattagccctgagagcgtcttctcaagatgaggccgaagactggttggaccgggtgagagaagctctgcaaaaagtgcgcccccaacaagaggatgagtgggtgaatgtgcagtaccccgatcagcccgaagagccccctgaggccccacagggctgtctctctccttccgatctgctaagcgagcctgcggcactgcagggcacacagtttgattggtcgagcgcccaggtcccggagcccgatgccataaaggagagcctactgtatctatacatggaccgcacatggatgccctatattttttccctgtctctagaggccctgaagtgctttagaattcgcaacaatgaaaaaatgcttagcgatagccatggagtagagacgatccgcgacatattgcctgatacctccctgggtggacccagcttcttcaaaattattactgctaaagctgtactgaaactccaggcaggtaatgctgaggaggccgccttgtggcgagacttggtacgaaaggtgcttgcttcatacctggagaccgcggaggaggccgtgaccctgggaggctccctcgacgagaattgccaggaagtgctcaagttcgctacccgggagaatgggttcttactccaatatctggtggctattcctatggaaaagggactcgacagtcaggggtgcttttgtgcagggtgcagtaggcagatcgggtttagcttcgtccgaccaaagctgtgtgccttttcgggcttatattattgcgacatctgccaccaagatgacgcaagtgtgatccccgctagaatcattcacaattgggacctgaccaagaggcccatctgcagacaagccctcaaattcttgactcagatacgcgctcagcctctgatcaacctacagatggtgaatgcctcgctatacgaacatgtggagagaatgcatttaattggaagaagaagagagcagttaaagcttctcggtgactatttaggcctgtgtagaagcggagctctgaaagagttgagtaaacgcttgaatcaccgtaattatctgctggagtctccccaccggttttctgtagcggacctgcaacaaattgccgacggggtttacgagggcttctctccgaaagttcccagcgaagctgcaggcctgagaccatggggcgcacgttcacctgaagcagcaagcgccttccgatgtatcgattcttctcacctgccctctttgcgaaaagtggtgcctacattgtttctgaaatgttactttatgcagtatacagtgccaagcgaacaagggtctggtccagaagagagcttgcagtgtatcgaaggaattgcagccgtgtag

SEQ ID NO: 318366 - DNA, 2904 bp, Artificial Sequence
  derived and/or modified sequence
atggactggaccccccggctgcccagccggcacatcatcagcgagctagagcacctaaccttcgtgaacactgacgttggcagatgtcgtgcttggctgagactggccttaaatgacggcttgatggagtgctacctgaagttgctgctgcaggagcaggcgcgcttacatgagtattaccagcccacagccttactaagagacgctgaggaaggcgagtttttgctcagcttcctccaggggctgacttcgctgagcttcgagctcagctacaaaagtgccatcctcaatgaatggacactaacacctctagctttatccgggctctgtccactgtctgagctggacccgttaagcacatctggagccgaactccagagaaaagaaagcctcgattctatctcacactcaagtggcagcgaggatattgaagtccaccactctggacataagatccgcagaaaccaaaagctgactgcttcctctctgtcattggatacagctagctccagccaattaagctgtagcctgaattctgattcctgtctcctgcaagagaacggctcaaagagcccagatcattgcgaggaacccatgtcctgtgactcagatttagggacagctaacgctgaagattcagatcgctcgttacaggaagttctgctggagttttccaaggctcaggttaactcagttcctaccaacgggctgtctcaagagacagaaattccgactccacaggcaagccttagcctgcacggtctaaatacgagtacttatctgcattgtgaagcacccgcagagcctctccccgcccaagccgcatctggcactcaggacggggtgcacgtccaggaacctcggccacaggcaccttcacctcttgatcttcagcagcccgtcgagtccacaagcggtcaacagcccagttctaccgtcagcgaaaccgcgcgcgaagtcggtcagggaaatggcctgcaaaaggctcaggcccacgacggagcagggctgaagctggtggtgagcagtccaacttccccaaagaataagtcatggatcagtgaggatgacttctacagaccctcccgcgaacagcctttggagtccgccagcgatcacccgattgctagctatagaggcacaccagggtctagacctggacttcaccgacacttcagccaggaacccagaaagaactgtagtcttggagccttggaccaggcctgcgtcccgagcccgggccgcaggcaggcgcaggccgcgccttcacaagggcataagagctttagagtggtgcaccggcgccaaatgggtctatctaatccgtttcgagggctgatgaagcttggtactgtggagcgacggggcgcaatgggaatctggaaagagctcttctgcgaactaagtccactggagtttcgactgtacctatcaaatgaagagcatacttgcgtggagaactgcagcctgctacggtgtgagagtgtaggcccagcccacagtgacggccggttcgaactggtgttcagtgggaagaaacttgccctgcgcgccagctcacaggacgaagctgaagactggctggatagggtgcgcgaggctttgcagaaggtgcgcccgcagcaagaggatgaatgggtaaatgttcaatatccggatcaaccagaggaacctcctgaagctccacaaggctgtttgtccccaagcgacttgttaagtgagcctgctgcccttcagggtacccagtttgattggtcatctgcccaggtacccgagccagacgcaataaaagagtcactgctgtatctatatatggacagaacatggatgccttatatttttagcctctcactcgaggccttgaagtgcttcagaatccggaacaacgagaagatgctgtcagacagccatggtgtggagaccatcagggatattttgcctgatacctctctcggtggtccgagttttttcaagattatcacagcaaaagcagttttaaagttgcaagccggtaacgccgaggaggccgcactgtggagggacctggtgaggaaagtgctggcctcgtatcttgagactgctgaggaagcagtcaccctggggggctccctagacgaaaattgccaggaagttctcaaatttgctactcgggagaacggtttcctgctgcaatatctcgtggcgattcccatggaaaaaggccttgactcccaggggtgcttttgcgccggctgttcgcggcagattggatttagtttcgtaagacccaaactatgcgctttctcagggctctactactgcgacatatgccaccaggacgatgcatccgtgatccctgcacgcatcattcacaattgggaccttactaagcggcccatttgtcgccaggctctgaaattcctcacacagatccgcgctcagccattgatcaacctgcagatggttaacgctagcttgtacgagcatgttgagaggatgcacttgattggcaggcgtagagaacagctgaagctgctaggagattatctgggactgtgtcgatccggtgccctgaaagaactgtctaaacgattgaatcacagaaactacctattggaaagtccacaccgcttcagcgtggccgatctccagcagatagctgacggcgtttatgaaggctttcttaaggcattaattgagttcgccagccagcacgtgtaccactgcgacctttgcacgcaacgggggttcatctgccagatctgtcaacaccacgacatcatttttccattcgaattcgacacaacagtccggtgtgcggagtgcaaaacagtgttccaccagagttgtcaggctgttgtgaaaaaaggttgccctcgctgcgcccgtaggcgaaaatatcaggagcaaaatatctttgcctag

SEQ ID NO: 318367 - DNA, 3003 bp, Artificial Sequence
  derived and/or modified sequence
atggtggaatgcttcgaatctggaggtactcggctcagcctttctagcttcaacgtgtcgtgcgattctctaagagaacagctccgtgagtggaggtgcttccagtggtggcgcatggactggacccccagactgccaagccgccatataatctccgagttagagcatctcacatttgtgaatacagatgtaggacgatgccgcgcttggctccggttggcccttaatgacggactgatggaatgttaccttaaacttctgctgcaggagcaggctcgactgcatgagtattatcagccaaccgccctccttcgggacgccgaggagggagagttcctgctgtcatttctccagggtcttacgagcctttcctttgagctgagctataaatcagcaatattgaatgaatggacgttgaccccgctggctctttctggactgtgccccttaagtgagttggatcctctcagtacatccggggctgaactgcagcgcaaagaatccctcgattccatctcccactcttcgggcagcgaggacatagaggttcaccacagcggacataagatcaggcggaaccagaagctaacagccagctcactgtccctcgacaccgcctcaagtagtcagcttagctgctcactgaatagtgacagttgccttctgcaggagaatgggagcaaaagtcccgatcactgcgaggaaccgatgtcatgcgattcagacctgggtacagcaaatgccgaggatagcgaccgcagcctgcaggaggtcttgcttgaattcagtaaggcccaggtgaacagtgtgccaactaatggcctctcgcaggagaccgagatcccaaccccgcaggcaagcctgagtttgcatgggctcaatacttccacatacttgcactgcgaggcacctgctgagcccttacctgcccaggcggctagcggaacccaagacggagtccacgttcaagaacctcgaccacaagccccaagccccctggacttgcagcagcctgtcgagtcgaccagcggacagcagccctccagcacagtaagtgagaccgcacgtgaggttggccagggcaatggccttcagaaggcccaggctcatgatggggcagggttgaagctggttgttagttctccgacttcaccaaaaaacaaatcttggatctctgaagacgacttctaccggccaagtcgagagcagccactcgaaagcgccagcgatcaccccatcgcgagttatcgtggcaccccaggctcccgtccaggccttcaccgtcatttcagtcaggagccgcgtaagaactgtagcctcggcgctctggatcaggcctgtgtgccttcccccggtcgaaggcaagctcaagccgcaccatcacaggggcacaagtcattccgggttgtgcaccgcagacagatgggcctgtcaaatccattccgagggcttatgaagttgggcacagtggagaggcgaggagccatgggcatatggaaagagctgttttgtgaactctctccattggagtttcgtctatacctgtccaacgaggaacatacgtgtgtggagaactgctccttactgcgatgcgagtccgtcggtccggctcattctgatggaagatttgagctggtgttctctggaaagaagttggcgctgagggccagctcccaggatgaggccgaagactggctcgatcgggtccgcgaagccctgcagaaagtgcgccctcagcaggaggatgagtgggttaacgtgcaatatcccgatcagccagaagaaccccctgaggcacctcagggctgcctgtcgccttcagacctcctaagcgagccagctgcgcttcaaggaacccagtttgactggtcctctgcccaagtgcctgagccagacgccattaaggagagtctcttgtacctgtatatggaccgcacctggatgccctatatcttcagtttatctcttgaggcgcttaaatgctttcgcattaggaacaatgagaaaatgcttagcgattctcatggagtggagacgatccgggatatcctgccagatacctctctcggcggacccagctttttcaagatcattacagctaaagcggtgcttaaactgcaggcgggaaatgcagaggaggccgctttgtggcgtgaccttgtgcgcaaagtgcttgcgtcttacctggagactgcagaagaggccgtgacactgggcggttcactcgatgagaattgccaggaagtactgaaatttgccactagggagaatgggtttcttctccagtacttggtcgccatcccgatggagaaggggctcgattcacagggatgcttctgcgcagggtgctcacgtcagataggtttcagctttgtgcggcctaaactgtgcgcttttagtggtctctattattgcgatatatgccaccaggacgacgcatccgtgatcccggcacgcattatccataactgggatttgactaaacgaccaatctgcaggcaggccctgaagttcttgacacagatcagagcacagccactgatcaatctacagatggtgaacgcaagcttgtacgaacatgtggagcgcatgcaccttattggcagacgcagggaacagctgaagcttctgggggattatttaggactgtgtcgctcaggcgctctcaaagagctttctaaaaggctcaaccatcggaattacctgctggagtccccacaccggttctcagtcgccgacctgcagcagattgctgatggagtgtacgaaggtttttctccgaaggtgccaagcgaggccgctgggctaagaccttggggggctcgttccccggaagcagccagcgcatttagatgtatcgactcatcccacctgccctcactgagaaaggtggtccccacactctttctaaagtgttactttatgcagtacaccgtccccagcgaacagggctctgggccagaggagagtctgcagtgcatagaaggcatcgccgcagtatag

SEQ ID NO: 318368 - DNA, 2904 bp, Artificial Sequence
  derived and/or modified sequence
atggattggacccccagactgccctccaggcatatcattagcgagctggaacacttgacattcgtgaatacagatgttggcaggtgccgtgcttggcttcgcttggccctcaatgatggcctgatggagtgctatttgaaactcctcctccaggagcaggctcgtttgcacgaatactatcaaccaactgcccttctgcgggatgcagaggagggagagttcctgctgtcctttctgcaaggtctaacctccttgtcattcgagctgtcatacaagtccgcaatcctgaatgagtggacgctaactcctctcgccctgtctggactgtgccccctctctgaactggaccccctgtccaccagcggagccgagctgcagcgcaaggagtctctagacagcatttcccattccagtggaagtgaggatatcgaagtgcaccatagtggacataaaatccgccgtaaccagaagttaacagcatctagcctgtccctcgatactgcctctagctcccagctgagctgctccttaaatagtgatagttgtctgctacaggagaacggcagtaagtcacccgatcactgcgaagagcctatgtcctgtgattcagatttaggcactgcaaatgccgaagacagcgaccggagtttgcaggaagtcctgcttgaattttcgaaggcacaggttaactccgtgccgacaaacggtctcagccaggaaactgagatccccacgccccaggctagtctatcgctccatgggctgaatactagcacgtacttacattgcgaagcccctgctgagcctctccctgcccaggccgcatcaggtacacaggatggagtgcatgtgcaagaacctaggccccaggccccatcgcccctcgatcttcagcagccagtggagtctacgtccggccagcagccaagctctacagtgagtgagactgcgagggaagtgggccaaggaaacggacttcagaaagctcaggctcacgacggcgcaggccttaaattggtagtctcctctccaacctctccaaaaaacaaatcctggattagcgaggacgacttttacaggccctcccgtgaacagccccttgaaagcgcgtctgaccatcctatcgcctcttaccgaggcactcctggctcccgccctggcctgcatagacacttctcccaggagcctcggaaaaattgctccctgggagccctggaccaggcctgcgtgccctctccagggagaagacaggctcaggctgctccttcacaggggcacaagagctttcgggtcgtgcatcggcgacaaatgggcttatcaaacccgtttcgcggactgatgaagctgggaaccgtggaaaggaggggcgcaatgggcatatggaaggagttattctgcgagctgagccccctcgagttcaggttatatctaagtaacgaagagcacacttgtgttgagaactgctccctgttaaggtgcgagtctgtggggccagctcactccgatggaagattcgaattggtgttcagtgggaaaaaactcgccctgagagccagcagccaggatgaagctgaggattggctcgaccgtgtgcgagaggcactacagaaggtgagaccacagcaggaagatgaatgggttaatgtccaataccccgatcagccagaagagccacccgaggcgcctcagggctgccttagcccttccgacctgctgagtgagcctgctgctttgcagggtacacagtttgactggtcttcggcacaggtgcccgaaccggatgcgatcaaagagtcactgctgtatttgtacatggatagaacctggatgccctatatctttagtctaagtctggaggctctgaagtgcttccgcatccggaacaacgagaagatgctgagtgactctcatggagtcgagaccatcagggatatactgcctgatacctccttaggaggaccgtccttttttaagattataacagcaaaagcggtcctcaaacttcaagccggaaacgcggaggaagcggcactttggagagatctcgttaggaaagtgttagcttcatacctcgaaacggctgaagaggctgtcacgctagggggtagcctcgacgaaaactgccaggaggtgctgaagtttgccacgagggagaatggtttcctccttcagtacctggttgccattcccatggagaaagggctggattcccagggctgcttttgcgccggatgcagtcggcagatcggcttctctttcgtgcggccaaaactgtgtgcgttctcaggtctctattattgcgatatttgtcaccaggacgacgcgagcgtcatccccgctaggatcatccacaactgggacctgacaaaaaggccgatctgcagacaggccctgaaatttctgacacagatcagagcacaacctcttatcaacttacaaatggtgaatgcttctctttatgagcatgttgaaagaatgcatttgatagggagacgccgagagcagttgaaactgttaggtgactatcttggcttgtgtcgctccggcgcactgaaggaactgagcaagagactgaatcaccggaactacctgctggaaagccctcatagattctcagtcgccgacctgcaacagattgctgacggtgtgtacgaagggttccttaaggccctcattgaatttgcctctcagcacgtttaccactgcgatctctgcacacagagggggttcatctgccaaatatgtcagcaccacgacattatttttccttttgagtttgacaccacagtcaggtgcgcggagtgcaaaacggtgtttcatcaatcttgtcaggcggttgttaagaaaggctgcccccgatgtgcgaggcgcagaaagtatcaggagcagaacatatttgcatag

SEQ ID NO: 318369 - DNA, 3118 bp, Artificial Sequence
  derived and/or modified sequence
acacaattcaggcagtggagagaaggccgtggggagtggctgaggagtccctcaagagaagaggttgctgttcactgatggtggagtgttttgagagtggtggaaccaggttatccctttcttcttttaacgtgtcatgtgattctctgagggagcagctgcgtgagtggagatgctttcagtggtggagaatggactggacccccaggctgccatcccgacacatcatctcagagttggagcacctgacgtttgtcaacacggatgtgggccgctgccgggcatggctgcggctggccctgaacgatggcctgatggagtgctacctgaagctgctgctgcaggagcaggcccgcttgcatgagtactaccagcccaccgccctgctccgagatgctgaggagggcgagttcctccttagcttcctgcagggcctcacgtccttgtccttcgaactctcctacaagtctgccatcttaaatgagtggacgctcaccccactggccctgtctgggctttgcccgctttctgagctggaccctctctctacctctggtgcagaactacagcggaaggaatctctggattccatttcgcattcttcaggctctgaagacatcgaagtccatcactcgggccataagatacggaggaaccagaagctgactgcctcctccctcagcctggacacggccagttcatcccagctgtcctgcagcctaaactctgatagctgcttactccaagagaatggctccaagagtccagaccattgtgaggagcccatgtcctgtgactcagacctgggcacagcaaatgctgaggactcagaccggtctctgcaagaggtattgttggaattcagcaaagcccaggtaaactctgtgccaaccaacggactgagccaagaaacggagatccccacaccacaggcctcgctctccctccatggcctcaacaccagcacatacctgcactgtgaggcacctgcagagccccttcctgcccaggcagcctctggaactcaagatggtgtccacgtgcaggagccgcgtccccaggcgcccagccccctggacttacagcagcctgtagagagcacctcaggccagcagccttctagtactgtcagcgagacagccagagaagtgggccaagggaatggcctgcagaaggcccaggctcatgacggagctggtctgaagctggtagtttcctcacccaccagtccgaaaaacaagagctggatctcagaggatgacttctaccggccttcccgggagcaacccctggagagtgcttcagaccacccaatagcttcttacagggggactccagggtcaaggcctggtctccacaggcatttttctcaagaaccaagaaaaaactgctccctgggggcgttagaccaagcgtgtgtaccttccccaggaagaaggcaagcccaggcagccccatcccaggggcataagagcttccgggtggtacaccggagacagatgggactgtccaacccattccggggtctcatgaagctgggcaccgtggagcggcggggggcaatgggcatctggaaggagctcttctgcgagctctccccgctggagttccgcctctacctgagcaacgaggagcacacctgtgtggagaactgctcgctgcttcgctgtgagtctgtggggccagcccatagtgatgggcgctttgagctggtcttctctggcaagaagctggccctgcgcgcctcctcccaggacgaagctgaggactggctggaccgggtgcgggaggccctgcagaaggtccggcctcagcaggaggatgagtgggtgaacgtgcagtacccagaccagcctgaggaaccccccgaggcgccccagggctgcctctctccctcagacctgctctcggagcccgcggccctccagggcacacagtttgactggtcgtccgcccaggttccagagccagatgccatcaaggagtccctgctgtacttgtacatggacaggacctggatgccctatatattttctctgtccttggaggctctgaaatgtttccgcatcaggaacaatgagaagatgctgagtgacagccacggcgtggagaccatccgggacatcctgccagacaccagccttgggggcccatccttcttcaaaatcatcacggccaaggctgtcctgaagctgcaggccggaaacgccgaggaagccgccctgtggagggatctggtccgcaaagtcctggcatcctacttggagacagccgaggaggcggtgaccctgggcgggagcctggatgaaaactgtcaggaggtgctgaaatttgccacccgggagaatggcttcctgctgcagtacctggtggctatccccatggagaaaggccttgactcccaaggctgcttctgcgcaggctgctcccggcagatcggcttctcctttgtacgacccaagctctgtgccttctctggcctctattactgtgacatctgccaccaagacgatgcctcagtgattccggccaggatcatccacaactgggacctcaccaagcgcccgatctgcaggcaggccctgaagtttctgacacagatccgggcccagcccctcatcaacctgcagatggtgaacgcgtctctgtacgagcatgtggagcggatgcacctcattgggaggagacgggagcagctgaagctcctgggggattacctgggcctgtgccggagtggcgccctgaaggagctcagcaagaggctcaaccacaggaattatctcttggaatctccgcataggttcagtgttgctgacctccaacagatcgcagacggggtgtatgaaggattctccccgaaggtgccctcggaggcagcaggtttgaggccctggggggcccgttccccagaagctgccagtgctttcagatgcattgactcttcccacctcccctccctcagaaaggtagtgcccacactatttttaaaatgttattttatgcaatacactgttcctagtgagcagggctctggccctgaggagtctttgcaatgtattgaaggaattgctgccgtgtgagttttgaatgattttgcagtaaagacctgatctttctc

SEQ ID NO: 318370 - DNA, 4995 bp, Artificial Sequence
  derived and/or modified sequence
agaccgcatcgtcggctcggaggctgaggggctgccgcggccgggagcgcccctcgcctcgctcctcgctccgcttggtgtcatgtgattctctgagggagcagctgcgtgagtggagatgctttcagtggtggagaatggactggacccccaggctgccatcccgacacatcatctcagagttggagcacctgacgtttgtcaacacggatgtgggccgctgccgggcatggctgcggctggccctgaacgatggcctgatggagtgctacctgaagctgctgctgcaggagcaggcccgcttgcatgagtactaccagcccaccgccctgctccgagatgctgaggagggcgagttcctccttagcttcctgcagggcctcacgtccttgtccttcgaactctcctacaagtctgccatcttaaatgagtggacgctcaccccactggccctgtctgggctttgcccgctttctgagctggaccctctctctacctctggtgcagaactacagcggaaggaatctctggattccatttcgcattcttcaggctctgaagacatcgaagtccatcactcgggccataagatacggaggaaccagaagctgactgcctcctccctcagcctggacacggccagttcatcccagctgtcctgcagcctaaactctgatagctgcttactccaagagaatggctccaagagtccagaccattgtgaggagcccatgtcctgtgactcagacctgggcacagcaaatgctgaggactcagaccggtctctgcaagaggtattgttggaattcagcaaagcccaggtaaactctgtgccaaccaacggactgagccaagaaacggagatccccacaccacaggcctcgctctccctccatggcctcaacaccagcacatacctgcactgtgaggcacctgcagagccccttcctgcccaggcagcctctggaactcaagatggtgtccacgtgcaggagccgcgtccccaggcgcccagccccctggacttacagcagcctgtagagagcacctcaggccagcagccttctagtactgtcagcgagacagccagagaagtgggccaagggaatggcctgcagaaggcccaggctcatgacggagctggtctgaagctggtagtttcctcacccaccagtccgaaaaacaagagctggatctcagaggatgacttctaccggccttcccgggagcaacccctggagagtgcttcagaccacccaatagcttcttacagggggactccagggtcaaggcctggtctccacaggcatttttctcaagaaccaagaaaaaactgctccctgggggcgttagaccaagcgtgtgtaccttccccaggaagaaggcaagcccaggcagccccatcccaggggcataagagcttccgggtggtacaccggagacagatgggactgtccaacccattccggggtctcatgaagctgggcaccgtggagcggcggggggcaatgggcatctggaaggagctcttctgcgagctctccccgctggagttccgcctctacctgagcaacgaggagcacacctgtgtggagaactgctcgctgcttcgctgtgagtctgtggggccagcccatagtgatgggcgctttgagctggtcttctctggcaagaagctggccctgcgcgcctcctcccaggacgaagctgaggactggctggaccgggtgcgggaggccctgcagaaggtccggcctcagcaggaggatgagtgggtgaacgtgcagtacccagaccagcctgaggaaccccccgaggcgccccagggctgcctctctccctcagacctgctctcggagcccgcggccctccagggcacacagtttgactggtcgtccgcccaggttccagagccagatgccatcaaggagtccctgctgtacttgtacatggacaggacctggatgccctatatattttctctgtccttggaggctctgaaatgtttccgcatcaggaacaatgagaagatgctgagtgacagccacggcgtggagaccatccgggacatcctgccagacaccagccttgggggcccatccttcttcaaaatcatcacggccaaggctgtcctgaagctgcaggccggaaacgccgaggaagccgccctgtggagggatctggtccgcaaagtcctggcatcctacttggagacagccgaggaggcggtgaccctgggcgggagcctggatgaaaactgtcaggaggtgctgaaatttgccacccgggagaatggcttcctgctgcagtacctggtggctatccccatggagaaaggccttgactcccaaggctgcttctgcgcaggctgctcccggcagatcggcttctcctttgtacgacccaagctctgtgccttctctggcctctattactgtgacatctgccaccaagacgatgcctcagtgattccggccaggatcatccacaactgggacctcaccaagcgcccgatctgcaggcaggccctgaagtttctgacacagatccgggcccagcccctcatcaacctgcagatggtgaacgcgtctctgtacgagcatgtggagcggatgcacctcattgggaggagacgggagcagctgaagctcctgggggattacctgggcctgtgccggagtggcgccctgaaggagctcagcaagaggctcaaccacaggaattatctcttggaatctccgcataggttcagtgttgctgacctccaacagatcgcagacggggtgtatgaaggattcctcaaggccctgattgaatttgcctcccagcatgtctaccactgcgacctgtgcacccagcgcggcttcatctgccagatctgccagcaccacgacatcatcttcccctttgagtttgacaccacagtcaggtgtgccgagtgcaagaccgtcttccaccagagctgccaggctgtggtgaagaagggctgcccccgctgtgcccgccggcgcaagtaccaggaacagaacattttcgcctgatgcccatctgctgaccccgctctgaaagccgggggtgagtgtggctcagccatcccggctgggtttgccatcagcccaggatactcaccgtgtcacagctgtgtccccttgtcaggaagaccctcagatgtggccagagcaccggcctcccagagaaagcccaggaagtccccgtggtgtcccctggccctccccccacccctctgctgcaggaggcgtggccaccaccagatgctccctgtctggggcaggcagggccgtttactcactaggccctggctcaccagcgtcccggcgcctccgttagggctgcccaaacactgtggaaaggggacttggggagcattttcaattccacattcctgattaaaaggtctagttttttaaggtgggtttttcccattcatatttcaacagaaagtatttttttattcttgaccctacgtgagtcacccatgaaatccagacattctcacccccagcggatgcacaggagccactcaggcctggcttagaggtagcgggtggctggtgggcaggccactgctgggacagggtctatgggcccacccagtgcctttccttggccctcactgccagtgccaaaccgcccctcagcagggcagggccagtcctggcgaccccggttcctctgtgtcctctttactccccaccccagtgcgtctcgcctgctgagcccaccgctttctcagcgtcagagcccctagctcttctctagcctggggccttggccccattaggagaaggagaaatgactggaaaccagcactgtcagcactttgagccctcctcggtttatggagggtcgccgtcttgcccacccccgatccccgtgcgctcctcacccctctacagacaggggcgctgctgcagatgctccaggcccaccttggtgggtgcccggggtcacactctctgcctgactgacccctgccagggcacagataggcaggaccccagagagggcaggcagccacgccctgcactgtggagaagtgacctggtcctaagctgtgcagggcgtgcgggggaactgccctgtggatgcagccaccacctcacaaagccatgaattcccaaagcatcactgaacttgcccagccgggacactggagactgaagaagttccccggagcaggactgcctttgaaggggccttggggctggggtgggagtctggaattgttttcaaagtgatggtcagaccctccaggcttcggggaaatgtgggtttgctggtctctctgtcgccttcccccacctctcctggacctagcaggccctcagtcctagctgtcttacctgcactcagcttggagtcaggcctcaggtggagagccgcatgtcactgtcagagatgagcccacccccacccttccctgggggcgattagctgctgagtcacccacccagccttggagctggatgcctgtgcagcagaacagaggcaacggtggcaggcaggtggaggctgcgcacagcttctcccggtcatggcacacacctgtgcccagacgccaatgcctcctaagccaggagctgggttatgcaccgccatggcccacattaacgctccaccacaagcccagcctagtcagagccctcattgccccatccctgagtgggcaggagcctggcctggggagggcttcggcctgtgaggattctccccgaaggtgccctcggaggcagcaggtttgaggccctggggggcccgttccccagaagctgccagtgctttcagatgcattgactcttcccacctcccctccctcagaaaggtagtgcccacactatttttaaaatgttattttatgcaatacactgttcctagtgagcagggctctggccctgaggagtctttgcaatgtattgaaggaattgctgccgtgtgagttttgaatgattttgcagtaaagacctgatctttctc

SEQ ID NO: 318371 - DNA, 2904 bp, Artificial Sequence
  derived and/or modified sequence
atggactggactccacgcctcccaagcaggcacattataagtgaactcgagcacctcacattcgtcaataccgatgtcggccgctgtcgagcctggttacggttagcactcaatgacggactgatggagtgttatctgaaactgctcctccaggagcaagccagacttcatgaatactaccagccgaccgctctgctcagggacgccgaggaaggagagtttctcctgtctttcctgcaaggcttaacaagtctgagctttgagctgtcttataaatcggccatacttaacgaatggaccctcacccctctggccctcagtgggctttgcccactgtcggagcttgaccctctgtccacttccggcgcggagctgcaaaggaaggagagcctagacagcatctcccatagctccggctcagaagacatagaagttcatcacagcggtcataagatcaggcgcaatcagaaattaaccgcctctagtctgtcacttgataccgcatcttcctcccagctgagctgttctcttaattccgactcgtgcctgctgcaagaaaatgggagcaagtcacctgaccactgtgaggaacccatgtcctgtgacagtgatctgggaacagctaatgccgaagattcggaccgcagtcttcaggaggtccttttagaattttctaaagcccaagtgaacagcgttccaactaatggcttgagccaggagactgaaatccccactccccaggcaagtctgtctcttcacgggctgaacacgtctacctacctgcattgtgaggctccagcagaacccctacctgcacaggccgctagcgggacacaggatggagtgcacgtccaggaaccccgaccccaagcgcccagcccccttgaccttcagcagccagttgagtccactagtggacaacagcccagtagcacggtgagtgagaccgcccgtgaagtgggccagggtaacgggctccagaaagcgcaagctcatgacggcgccggacttaagttagtggtctcttcgcccacttcaccaaaaaacaaatcttggataagtgaagatgacttctaccggccttcccgggagcagcccttggagagcgccagtgaccaccccattgcttcataccgcgggaccccaggcagtagaccaggtctgcataggcacttttcacaggagcctcgcaaaaactgctccctaggcgctctcgaccaagcctgcgtgccctcacccggcaggcgtcaggcacaggccgctccatcccagggtcacaaaagctttcgcgtggtccaccgcaggcagatgggcttatccaatcctttcaggggtttgatgaagcttggaacagtcgagagaaggggagctatgggaatatggaaggagttgttctgtgagctgtccccccttgagttccgcctctacctgtccaacgaggaacacacctgtgtcgagaactgctcgctgttgagatgcgaatctgtcggtcctgcgcatagtgacggccgattcgaattggttttcagcgggaaaaaacttgcgctgagagcctccagccaggacgaggcggaggattggctagacagggtcagggaggccttgcaaaaggtgcggccacaacaggaggatgagtgggtgaatgtgcagtatccggatcagccagaggaacctcctgaagcccctcaaggttgtctgagtccttccgacctgctaagcgagcccgccgcacttcaggggactcagtttgactggtcctcagctcaagttccagagcctgacgccatcaaggaatctctgctctatctgtatatggacaggacttggatgccatatatattcagccttagtttagaggccctgaagtgttttcgtattcgcaacaacgagaaaatgctcagcgatagccatggtgttgaaacaatccgcgatatcctgcccgacactagtctcggtggcccttctttcttcaagataattaccgcaaaagccgtgctgaaacttcaagccgggaatgcggaagaggccgcactctggagagatctggtaagaaaagtcttagcctcatacctggagactgccgaggaggcagtgacgctcggcgggtccctcgacgaaaattgccaggaggtactgaagtttgccacccgggaaaatggattcctgctccagtacctagtggcaatacctatggagaaagggttagattctcagggttgcttttgcgcaggctgtagccgtcagataggctttagttttgtgcggcccaagctgtgcgcatttagtggtctttattattgcgacatttgccaccaagatgatgcatccgtgattccagctcggattatccataattgggacttgacaaagaggcctatctgcagacaggccttgaagtttctgacgcagatccgagcacagccactcattaatttacagatggtaaatgcgtctttatatgagcatgttgaacggatgcacctgatcggccgcaggagggagcaactgaagctgctaggagattacctgggcttatgcagaagtggggctctgaaagaactcagcaagaggctgaaccatcgcaattacctgcttgaatcacctcaccggttcagcgtcgcggatctgcagcagattgccgatggagtttatgaagggtttctcaaggctctgatcgagttcgcatcccaacacgtgtaccattgtgatctgtgtacacaaagaggtttcatctgccaaatctgtcaacaccacgatatcatttttccctttgagttcgacacgacggtgcgctgtgccgaatgtaagaccgttttccaccagagttgtcaggctgtagtgaaaaaaggctgtccgaggtgtgccagaagacgcaaataccaggaacagaacattttcgcatag

SEQ ID NO: 318372 - DNA, 3003 bp, Artificial Sequence
  derived and/or modified sequence
atggtggagtgttttgaaagtgggggaacgagactctcactgtccagctttaacgtgtcatgtgactccttgagagagcaactacgggagtggagatgcttccagtggtggaggatggactggaccccaaggctgcccagtcgccacatcatcagcgaactcgagcacctgactttcgttaataccgatgtggggcggtgcagggcctggcttagacttgcattgaacgatgggctgatggagtgctatctgaaactcttgctccaggaacaggctcggctccacgaatattaccagcccaccgccctgcttagagacgccgaggagggtgagttccttctgtcatttttgcaaggcctgacatccctgagcttcgagctcagctataagagcgcaattctcaatgagtggactctgacgccattggccctgagtggactctgccctctgtctgagctggatcctctaagtacttccggtgccgagctccagagaaaggagtccctggatagtatctcccacagcagcggcagcgaggacatcgaagtgcaccactccggccataagatcaggagaaatcagaagctgacagcctccagtctcagtctcgatacggcttcgtcaagtcagttgagttgtagcctgaattccgactcctgcctgctgcaagagaacggcagtaagtcacccgaccactgcgaggagcctatgtcatgtgacagcgacttgggcacggccaacgcagaagattcagacaggagcctccaggaggttctactcgagttttcaaaggctcaagtcaacagcgtacctaccaacggactcagtcaggagaccgagatacctaccccacaggcatcactgagcctgcacggcttgaatactagcacctacctacactgtgaagcgcctgctgaacctcttccagcccaggcggcttctggcactcaggacggagtgcacgtgcaagagccccgccctcaagccccttccccactcgatctccaacagcccgttgaatccactagcggccaacagcctagcagcacggtgtcagagacagcaagagaagttggccaaggcaacggactgcagaaagcccaggctcacgacggggctggcctgaaattggtagtgtctagtcctactagccccaagaataagtcttggatttctgaagacgacttttatcggcctagtcgcgagcaacccctggagtcagcatccgatcaccccatcgcttcctacagaggtacccccggctccagacctgggctgcaccgccactttagtcaggagccccggaaaaattgtagcctgggagcgcttgaccaggcctgtgttccctcccccggccgacgccaggctcaggccgctccttctcaaggtcacaaaagttttagagtagttcacaggcgccagatggggctgtcaaacccgtttcgaggactgatgaaactcggaactgtcgaacggcgaggcgccatgggaatatggaaggagttgttctgcgagctgtctcctctcgagtttcgcctatatctctccaacgaagagcacacctgcgtcgagaactgttcactcttgcgctgcgaatctgtcggcccagcccattctgacggacgctttgagctggtgtttagcgggaagaagctagcacttcgggcgtccagtcaggatgaagccgaagactggcttgatagggttagagaggcgcttcagaaagttaggccacaacaggaggatgagtgggtaaatgtccagtatcctgatcagcccgaagagccccccgaagctccacagggttgtttgtctccttcggacctgctatctgagccagcagccctccagggcacgcagttcgactggagctctgctcaggtccccgagccggatgccataaaagagagtctgctgtacctttacatggacaggacctggatgccctacatcttttccttgagcctggaggcattaaaatgtttcagaatccgcaataacgaaaaaatgttgagcgactcgcacggtgtagaaacaatacgtgatattctgccagatacatctctaggaggtccctccttttttaagattataacagctaaggccgttctgaagctccaggccggcaatgccgaagaggctgccctgtggcgggacctggtgcgcaaggtcttggcctcttatctagagacagctgaagaggcagtgaccctgggaggtagcctggacgagaactgtcaggaagttctgaaattcgcaacccgtgagaacggcttccttctgcaatacttggtggcaatcccgatggaaaagggactggacagtcagggttgtttttgcgccggttgtagccggcaaatcggcttctcttttgtgaggcctaagctgtgcgcctttagcggactctattactgcgacatctgccaccaggatgacgcttctgtgatcccagcacgcatcatccacaattgggatctaactaagcggcctatctgccggcaagccctcaagttcctgacacagattagagctcagcccctgattaacctgcaaatggtgaacgccagcctctacgaacatgtggagcgcatgcacctgattggacgtcgtcgggagcagctgaagttgttaggggactacctcggcctttgcagaagtggagcattaaaggagctttcaaagcgcttaaaccatagaaattatctcctggaatctccccaccgtttttccgtggctgacttacagcagatcgccgacggtgtgtacgagggcttctcccctaaagtgccctctgaggcggccggcttacgcccatggggggccaggagtcccgaggccgcaagtgcattcagatgtattgattcttcaaggttaccctctctgcggaaggtggtgccgactctgttcctgaaatgttacttcatgcagtatacagtgccctcagagcagggctctggtcccgaggaaagcctacagtgtattgaaggaatagccgcggtctag

SEQ ID NO: 318373 - DNA, 3003 bp, Artificial Sequence
  derived and/or modified sequence
atggtggagtgctttgaaagtggcggcacccggctgagcctgagcagcttcaacgtgtcctgtgacagcctgcgggagcagctgcgggagtggcgctgcttccagtggtggaggatggactggaccccccggctgcccagccgccacatcatcagcgagctggagcacctgacctttgtgaacacagatgtgggccgctgccgggcctggctgcggctggccctgaatgatggcctgatggagtgctacctgaagctgctgctgcaggagcaggcccggctgcacgagtactaccagcccacagccctgctgagagatgctgaggagggggagttcctgctgtccttcctgcagggcctgaccagcctgagctttgagctgagctacaagagcgccatcctgaatgagtggaccctgacccccctggccctgagcggcctgtgccccctgtctgagctggaccccctgagcaccagcggggctgagctgcagaggaaggagagcctggacagcatcagccacagcagcggctctgaagatattgaggtgcaccacagcggccacaagatcagaagaaaccagaagctgacagccagcagcctgagcctggacacagccagcagcagccagctgagctgcagcctgaacagcgacagctgcctgctgcaggagaatggcagcaagagcccagaccactgtgaggagcccatgagctgtgacagcgacctgggcacagccaatgcagaagattctgacaggagcctgcaggaggtgctgctggagttcagcaaggcccaggtgaacagcgtgcccaccaacggcctgagccaggagacagagatccccaccccccaggccagcctgagcctgcacggcctgaacaccagcacctacctgcactgtgaggccccagctgagcccctgcctgcccaggccgccagcggcacccaggatggagtgcacgtgcaggagccccggccccaggcccccagccccctggacctgcagcagcctgtggagagcaccagcggccagcagcccagcagcacagtgtctgaaacagcccgggaggtgggccagggcaatggcctgcagaaggcccaggcccatgatggagctggcctgaagctggtggtgagcagccccaccagccccaagaacaagtcctggatcagtgaagatgacttctaccggcccagccgggagcagcccctggagagcgccagtgaccaccccatcgccagctaccggggcaccccaggcagccggcccggcctgcaccgccacttcagccaggagcccaggaagaactgcagcctgggcgccctggaccaggcctgtgtgcccagccctggaagacggcaggcccaggccgcccccagccagggccacaagagcttccgggtggtgcaccggcggcagatgggcctgagcaaccccttccggggcctgatgaagctgggcaccgtggagcggcggggggccatgggcatctggaaggagctgttctgtgagctgagccccctggagttccggctgtacctgagcaatgaggagcacacctgtgtggagaactgcagcctgctgcgctgtgagagcgtgggccctgcccacagtgatggccgctttgagctggtgttcagcggcaagaagctggccctgcgggccagcagccaggatgaagctgaggactggctggacagagtgcgggaggccctgcagaaggtgcggccccagcaggaggatgagtgggtgaatgtgcagtacccagaccagcctgaggagcccccagaggccccccagggctgcctgagccccagcgacctgctgtctgagcctgctgccctgcagggcacccagtttgactggagcagcgcccaggtgcctgagccagatgccatcaaggagagcctgctgtacctgtacatggacaggacctggatgccctacatcttcagcctgagcctggaggccctgaagtgcttccgcatcagaaataatgagaagatgctgagtgacagccatggagtggagaccatccgggacatcctgcctgacaccagcctgggcggccccagcttcttcaagatcatcacagccaaggctgtgctgaagctgcaggccggaaatgctgaggaggccgccctgtggagggacctggtgaggaaggtgctggccagctacctggagacagctgaggaggccgtgaccctgggcggcagcctggatgagaactgccaggaggtgctgaagtttgccacccgggagaatggcttcctgctgcagtacctggtggccatccccatggagaagggcctggacagccagggctgcttctgtgccggctgcagccggcagatcggcttctcctttgtgcggcccaagctgtgtgccttcagcggcctgtactactgtgacatctgccaccaggatgatgccagcgtcatcccagcccgcatcatccacaactgggacctgaccaagaggcccatctgccggcaggccctgaagttcctgacccagatccgggcccagcccctcatcaacctgcagatggtgaatgccagcctgtatgagcacgtggagaggatgcacctgattggaagaagaagagagcagctgaagctgctgggggactacctgggcctgtgccgcagcggggccctgaaggagctgagcaagaggctgaaccacaggaactacctgctggagagcccccaccgcttctctgtggccgacctgcagcagattgctgatggagtgtatgagggcttcagccccaaggtgcccagcgaggccgccggcctgcggccctggggcgcccggagccctgaggccgccagcgccttccgctgcatcgacagcagccggctgcccagcctgaggaaggtggtgcccaccctcttcctgaagtgctacttcatgcagtacacagtgcccagcgagcagggcagcggccctgaggagagcctgcagtgcatcgagggcattgctgctgtgtag

SEQ ID NO: 318374 - DNA, 2904 bp, Artificial Sequence
  derived and/or modified sequence
atggactggaccccccggctgcccagccggcacatcatcagcgagctcgaacatttaacttttgtcaacacagatgtgggtcgctgtcgggcctggctccgactggcactgaacgacggtttgatggagtgctacctgaaactcttgctccaggagcaggctcgtctccacgagtattaccaaccaaccgctctcttgagagatgctgaggaaggggaatttctgttgtccttcctccagggactgacgtccttatcttttgaactatcttacaaatccgctatcctgaacgagtggacgctgactccgctcgctctgtccgggttgtgtcctctgagcgaacttgacccgttgagcacctccggcgctgaactgcagagaaaggaatccctagacagtatctcacacagtagcgggtcagaagatatcgaagtccatcactcagggcataagattcgtcggaatcagaagttgactgcctcctccctctcattggatacagcgtcatcctcccagctgtcctgcagcttaaattcggatagctgcctcctccaggagaacggctccaaatccccagatcactgcgaggaacccatgtcatgcgacagcgatcttggcacagccaacgcagaagacagtgatcgtagtcttcaggaggtcctgctggagtttagtaaagcccaagtaaactctgtaccaactaacgggctctcccaggaaaccgagatccccacacctcaagccagcctctccctccatggactgaacacatccacatatctgcactgcgaagctccagccgaacctttgcctgcccaagccgcttccggaacacaagacggagttcatgtgcaggaacctcgtccacaggccccatcaccgctcgatctgcagcaacctgtggagtccacatcgggccagcagccatcatccaccgtcagcgaaacagcccgcgaggttgggcaggggaacggcctgcaaaaggcacaggcccacgacggcgccggcctcaagctcgtggtgtcaagcccaacaagccccaaaaataaatcttggatctctgaggatgatttttatcgtccaagtcgcgaacagcccctggaatctgcaagcgaccaccccatagcctcataccggggtacccccggctcaaggccgggtcttcacagacactttagtcaggaaccaaggaaaaattgctcactcggggctctggatcaggcatgtgtcccaagtcctggaagaagacaggcccaagccgctcctagtcagggacacaaatcatttagggtcgtgcatcgacggcagatgggtttatcaaatccattccggggcctgatgaagctcgggaccgtggagaggaggggagccatgggaatttggaaggagctcttttgcgagttgtccccactggagttccgcctgtatctgtcaaatgaagagcacacgtgtgtggaaaattgctcgctcttacggtgcgagtccgtcggacctgcccacagcgacggtcgcttcgaactggtgtttagtgggaagaagttggccctgcgcgccagctcccaggacgaggcagaggattggctggatagagtgagggaggccttgcagaaagtccgcccccagcaggaggacgaatgggtaaacgtgcagtatccagaccagccagaggaacccccagaagccccacagggctgtctgtcccctagcgacttgctatcagaacctgctgcccttcaggggacacaatttgactggtcctcagctcaggtgcctgaacctgacgcaatcaaagaatcccttttgtacttgtatatggaccggacgtggatgccctatatatttagcctctccttggaggccctcaagtgcttccgcatcagaaacaacgagaagatgctgtccgattcccacggggtcgaaacgatacgggacatattgcctgatacgtctctgggcggaccctcctttttcaagatcatcacagctaaggcagtactaaagcttcaggcaggcaatgccgaggaggctgccttatggagggatcttgttagaaaggtcctcgcctcctatctggaaaccgccgaggaggccgtcactctcggagggtctctcgacgaaaattgccaagaagtcctcaagtttgcgacacgggaaaatggcttcctgctgcagtacctggtggccataccgatggagaagggcctggattcccaggggtgtttctgtgctggatgcagccggcaaatcggcttttcctttgtgcggcctaagctctgcgcatttagtgggttgtactactgcgatatttgccaccaggacgacgcctctgtgattccagctcgaataatccacaattgggacctgacgaaacgccccatctgccgacaggcgctgaaattcctcacacagatcagagctcagcccctcattaatctccaaatggtcaacgcatctctgtacgagcacgtcgaaagaatgcacttgatcggcagacgtcgcgaacagctgaaattactgggggattacctggggctgtgtcggtccggtgccctgaaagaactgagtaaacgactaaatcaccgcaactacttacttgaatccccacaccggttctccgtggctgaccttcaacagatagcagatggcgtatatgaagggtttttgaaagctctcatcgaattcgcaagccagcatgtttatcactgtgacctttgtacgcagagaggatttatttgtcagatctgtcagcaccacgacataatctttccctttgagttcgatactactgtaagatgcgcagagtgtaagaccgttttccatcagtcctgccaagcagtggtgaaaaaaggatgcccccggtgtgctcgacgcaggaagtaccaggaacagaacatctttgcttag

SEQ ID NO: 318375 - DNA, 3003 bp, Artificial Sequence
  derived and/or modified sequence
atggtggagtgcttcgagagcggcggcacccggctgagcctgagctcatttaacgtttcatgtgactccctccgtgaacaattgagagaatggcgttgtttccagtggtggcggatggactggacgccgaggctgccctcacggcacattatctcagaactggaacacctcaccttcgtgaataccgacgtcgggaggtgccgcgcatggctgcggctggcactgaacgatgggctcatggaatgctatttaaagttgttactccaagaacaagcccgcctgcatgaatactaccaaccgacagccctcctgcgagacgccgaggaaggagagtttttattgagctttcttcagggactgacctcacttagcttcgaattgtcctataagtctgcaatcttgaacgagtggacactgacaccattggcacttagtggcctgtgtccactgagcgaattggatcctttatctacctccggcgcggagctgcagcgcaaggaatcactcgattcaataagccactcttcaggcagcgaagacatcgaagtgcaccactccggtcacaaaatcagacgaaatcagaaactgacagctagctctctgagcctggatactgcgtcctccagccagctgagctgttccctgaatagtgactcttgtctcttacaggaaaatggtagcaagagccccgaccattgtgaggaaccgatgtcatgtgattccgatttgggaactgccaatgcagaagactcagatagatcactgcaggaagtgctgctggaattttctaaagctcaggtaaattccgttcccaccaacggcctctcacaggagacagaaatccccactccacaagcttctctcagtctccacggcttaaacacatctacctatctgcattgtgaggccccagccgaaccactaccagctcaggccgctagcggaacccaggatggtgtccacgtccaggagcctcgccctcaggccccttcgccgctcgatctgcaacagccagtcgagtccaccagcgggcagcagcctagtagcaccgtttcggaaactgccagagaagtcggccagggtaatggactgcaaaaagctcaagcgcacgatggagcgggcctgaagctagtggtgtcctcccctacttctccgaagaataaatcttggatctccgaagatgacttttatcggccctctagggagcaacccttggagagtgcaagcgatcatcctattgccagttacagggggacacccggttcaaggcccgggctacataggcacttctcccaggagccccgaaaaaattgtagcctcggcgcccttgaccaagcctgtgtccccagtcctggaagacgccaggctcaagccgctccctcccaaggccataaaagctttagagtggtacataggcgacaaatggggctcagtaaccccttccgcggactcatgaagttaggcacagtagaacggcgaggcgctatgggcatttggaaagagctgttttgtgaattgtctcctctggaatttcgactgtacctatccaatgaggagcacacgtgtgttgaaaattgctcactactgcgttgtgaatccgtgggaccagcccacagcgatggcaggttcgaactggtattttctggaaagaagttagcgctgagagcttcctctcaggacgaggccgaggactggcttgatcgtgtgcgggaggccctacaaaaagtccggccgcagcaagaggacgagtgggtcaacgtgcaatatcccgaccagccggaggagccaccggaagcaccccaaggctgcttgtcccctagtgacctgctgtccgagcctgccgccttgcagggaactcaattcgactggtcttccgcacaggttccggagcctgatgctatcaaggaatctttgttatacctttacatggacagaacatggatgccatatatattctccctctcgttggaggcacttaaatgctttcgcatcaggaataatgaaaaaatgctgagcgatagtcacggggtggagacaattcgagacatactcccggatacctccctgggtggaccttctttctttaaaatcatcaccgcaaaggccgtgctcaaacttcaagccggcaacgccgaggaagctgcactctggcgtgatcttgtccgtaaggtgttagctagctacctggagacggccgaggaggcagtaacattgggcggcagcctggatgagaattgccaagaggtactcaaatttgctaccagagaaaacgggtttttgctacagtaccttgtggccataccaatggaaaagggcttggatagccagggatgtttttgtgccggctgtagcaggcaaattggattttcttttgtgaggcctaaattatgcgctttcagcgggctgtactactgcgacatttgtcatcaagacgatgcctcagtcatacccgccaggataatacacaactgggacctgactaagcggccaatatgtaggcaggctctcaaattccttactcaaatccgagcacagcctctaatcaatctgcagatggtcaacgcatctctgtatgagcacgtggagcggatgcatttaattggacggcggagagaacagctgaaacttctcggagactaccttggactatgtaggagtggtgctctgaaggagttgtcaaagaggctcaatcaccgaaattacctgctggagtccccccacagattttcggtcgccgatctgcagcagatcgccgacggggtgtatgaggggttcagccctaaagtacctagcgaggccgctgggttgcgcccgtggggggcacggagtcctgaggctgcatccgccttccggtgtatcgatagctctcgcttaccctcactgcggaaggtcgtacccactctgtttctgaagtgctatttcatgcagtacactgtgcctagtgagcagggctcgggacccgaggaaagcctgcaatgcatcgaaggcatcgcagccgtgtag

SEQ ID NO: 318376 - DNA, 4995 bp, Artificial Sequence
  derived and/or modified sequence
agaccgcatcgtcggctcggaggctgaggggctgccgcggccgggagcgcccctcgcctcgctcctcgctccgcttggtgtcatgtgattctctgagggagcagctgcgtgagtggagatgctttcagtggtggagaatggactggacccccaggctgccatcccgacacatcatctcagagttggagcacctgacgtttgtcaacacggatgtgggccgctgccgggcatggctgcggctggccctgaacgatggcctgatggagtgctacctgaagctgctgctgcaggagcaggcccgcttgcatgagtactaccagcccaccgccctgctccgggatgctgaggagggcgagttcctccttagcttcctgcagggcctcacgtccttgtccttcgaactctcctacaagtctgccatcttaaatgagtggacgctcaccccattggccctgtctgggctttgcccgctttctgagctggaccctctctctacctctggtgcagaactacagcggaaggaatctctggattccatttcccattcttcaggctctgaagacatcgaagtccatcactcgggccataagatacggaggaaccagaagctgactgcctcctccctcagcctggacacggccagttcatcccagctgtcctgcagcctaaactctgatagctgcttactccaagagaatggctccaagagtccagaccattgcgaggagcccatgtcctgtgactcagacctgggcacagcaaatgctgaggactcagaccggtctctgcaagaggtattgttggaattcagcaaagcccaggtaaactctgtgccaaccaacggactgagccaagaaacagagatccccacaccacaggcctcgctctccctccatggcctcaacaccagcacatacctgcactgtgaggcacctgcagagccccttcctgcccaggcagcctctggaactcaagatggtgtccacgtgcaggagccgcgtccccaggcgcccagccccctggacttacagcagcctgtagagagcacctcaggccagcagccttctagtactgtcagcgagacagccagagaagtgggccaagggaatggcctgcagaaggcccaggctcatgacggagctggtctgaagctggtagtttcctcacccaccagtccgaaaaacaagagctggatctcagaggatgacttctaccggccttcccgggagcaacccctggagagtgcttcagaccacccaatagcttcttacagggggactccagggtcaaggcctggtctccacaggcatttttctcaagaaccaagaaaaaactgctccctgggggcgttagaccaagcgtgtgtaccttccccaggaagaaggcaagcccaggcagccccatcccaggggcataagagcttccgggtggtacaccggagacagatgggactgtccaacccattccggggtctcatgaagctgggcaccgtggagcggcggggggcaatgggcatctggaaggagctcttctgcgagctctccccgctggagttccgcctctacctgagcaacgaggagcacacctgtgtggagaactgctcgctgcttcgctgtgagtctgtggggccagcccatagtgatgggcgctttgagctggtcttctctggcaagaagctggccctgcgcgcctcctcccaggacgaagctgaggactggctggaccgggtgcgggaggccctgcagaaggtccggcctcagcaggaggatgagtgggtgaacgtgcagtacccagaccagcctgaggaaccccccgaggcgccccagggctgcctctctccctcagacctgctctcggagcccgcggccctccagggcacacagtttgactggtcgtccgcccaggttccagagccagatgccatcaaggagtccctgctgtacttgtacatggacaggacctggatgccctatatattttctctgtccttggaggctctgaaatgtttccgcatcaggaacaatgagaagatgctgagtgacagccacggcgtggagaccatccgggacatcctgccagacaccagccttgggggcccatccttcttcaaaatcatcacggccaaggctgtcctgaagctgcaggccggaaacgccgaggaagccgccctgtggagggatctggtccgcaaagtcctggcatcctacttggagacagccgaggaggcggtgaccctgggcgggagcctggatgaaaactgtcaggaggtgctgaaatttgccacccgggagaatggcttcctgctgcagtacctggtggctatccccatggagaaaggccttgactcccaaggctgcttctgcgcaggctgctcccggcagatcggcttctcctttgtacgacccaagctctgtgccttctctggcctctattactgtgacatctgccaccaagacgatgcctcagtgattccggccaggatcatccacaactgggacctcaccaagcgcccgatctgcaggcaggccctgaagtttctgacacagatccgggcccagcccctcatcaacctgcagatggtgaacgcgtctctgtacgagcatgtggagcggatgcacctcattgggaggagacgggagcagctgaagctcctgggggattacctgggcctgtgccggagtggcgccctgaaggagctcagcaagaggctcaaccacaggaattatctcttggaatctccgcataggttcagtgttgctgacctccaacagatcgcagacggggtgtatgaaggattcctcaaggccctgattgaatttgcctcccagcatgtctaccactgcgacctgtgcacccagcgcggcttcatctgccagatctgccagcaccacgacatcatcttcccctttgagtttgacaccacagtcaggtgtgccgagtgcaagaccgtcttccaccagagctgccaggctgtggtgaagaagggctgcccccgctgtgcccgccggcgcaagtaccaggaacagaacattttcgcctgatgcccatctgctgaccccgctctgaaagccgggggtgagtgtggctcagccatcccggctgggtttgccatcagcccaggatactcaccgtgtcacagctgtgtccccttgtcaggaagaccctcagatgtggccagagcaccggcctcccagagaaagcccaggaagtccccgtggtgtcccctggccctccccccacccctctgctgcaggaggcgtggccaccaccagatgctccctgtctggggcaggcagggccgtttactcaccaggccctggctcaccagcgtcccggcgcctccgttagggctgcccaaacactgtggaaaggggacttggggagcattttcaattccacattcctgattaaaaggtctagttttttaaggtgggtttttcccattcatatttcaacagaaagtatttttttattcttgaccctacgtgagtcacccatgaaatccagacattctcacccccagcggatgcacaggagccactcaggcctggcttagaggtagcgggtggctggtgggcaggccactgctgggacagggtctatgggcccacccagtgcctttccttggccctcactgccagtgccaaaccgcccctcagcagggcagggccagtcctggcgaccccggttcctctgtgtcctctttactccccaccccagtgcgtctcgcctgctgagcccaccgctttctcagcgtcagagcccctagctcttctctagcctggggccttggccccattaggagaaggagaaatgactggaaaccagcactgtcagcactttgagccctcctcggtttatggagggtcgccgtcttgcccacccccgatccccgtgcgctcctcacccctctacagacaggggcgctgctgcagatgctccaggcccaccttggtgggtgcccggggtcacactctctgcctgactgacccctgccagggcacagataggcaggaccccagagagggcaggcagccacgccctgcactgtggagaagtgacctggtcctaagctgtgcagggcgtgcgggggaactgccctgtggatgcagccaccacctcacaaagccatgaattcccaaagcatcactgaacttgcccagccgggacactggagactgaagaagttccccggagcaggactgcctttgaaggggccttggggctggggtgggagtctggaattgttttcaaagtgatggtcagaccctccaggcttcggggaaatgtgggtttgctggtctctctgtcgccttcccccacctctcctggacctagcaggccctcagtcctagctgtcttacctgcgctcagcttggagtcaggcctcaggtggagagccgcatgtcactgtcagagatgagcccacccccacccttccctgggggcgattagctgctgagtcacccacccagccttggagctggatgcctgtgcagcagaacagaggcaacggtggcaggcaggtggaggctgcgcacagcttctcccggtcatggcacacacctgtgcccagacgccaatgcctcctaagccaggagctgggttatgcaccgccatggcccacattaacgctccaccacaagcccagcctagtcagagccctcattgccccatccctgagtgggcaggagcctggcctggggagggcttgggcctgtgaggattctccccgaaggtgccctcggaggcagcaggtttgaggccctggggggcccgttccccagaagctgccagtgctttcagatgcattgactcttcccgcctcccctccctcagaaaggtagtgcccacactatttttaaaatgttattttatgcaatacactgttcctagtgagcagggctctggccctgaggagtctttgcaatgtattgaaggaattgctgccgtgtgagttttgaatgattttgcagtaaagacctgatctttctc

SEQ ID NO: 318377 - DNA, 3118 bp, Artificial Sequence
  derived and/or modified sequence
acacaattcaggcagtggagagaaggccgtggggagtggctgaggagtccctcaagagaagaggttgctgttcactgatggtggagtgttttgagagtggtggaaccaggttatccctttcttcttttaacgtgtcatgtgattctctgagggagcagctgcgtgagtggagatgctttcagtggtggagaatggactggacccccaggctgccatcccgacacatcatctcagagttggagcacctgacgtttgtcaacacggatgtgggccgctgccgggcatggctgcggctggccctgaacgatggcctgatggagtgctacctgaagctgctgctgcaggagcaggcccgcttgcatgagtactaccagcccaccgccctgctccgggatgctgaggagggcgagttcctccttagcttcctgcagggcctcacgtccttgtccttcgaactctcctacaagtctgccatcttaaatgagtggacgctcaccccattggccctgtctgggctttgcccgctttctgagctggaccctctctctacctctggtgcagaactacagcggaaggaatctctggattccatttcccattcttcaggctctgaagacatcgaagtccatcactcgggccataagatacggaggaaccagaagctgactgcctcctccctcagcctggacacggccagttcatcccagctgtcctgcagcctaaactctgatagctgcttactccaagagaatggctccaagagtccagaccattgcgaggagcccatgtcctgtgactcagacctgggcacagcaaatgctgaggactcagaccggtctctgcaagaggtattgttggaattcagcaaagcccaggtaaactctgtgccaaccaacggactgagccaagaaacagagatccccacaccacaggcctcgctctccctccatggcctcaacaccagcacatacctgcactgtgaggcacctgcagagccccttcctgcccaggcagcctctggaactcaagatggtgtccacgtgcaggagccgcgtccccaggcgcccagccccctggacttacagcagcctgtagagagcacctcaggccagcagccttctagtactgtcagcgagacagccagagaagtgggccaagggaatggcctgcagaaggcccaggctcatgacggagctggtctgaagctggtagtttcctcacccaccagtccgaaaaacaagagctggatctcagaggatgacttctaccggccttcccgggagcaacccctggagagtgcttcagaccacccaatagcttcttacagggggactccagggtcaaggcctggtctccacaggcatttttctcaagaaccaagaaaaaactgctccctgggggcgttagaccaagcgtgtgtaccttccccaggaagaaggcaagcccaggcagccccatcccaggggcataagagcttccgggtggtacaccggagacagatgggactgtccaacccattccggggtctcatgaagctgggcaccgtggagcggcggggggcaatgggcatctggaaggagctcttctgcgagctctccccgctggagttccgcctctacctgagcaacgaggagcacacctgtgtggagaactgctcgctgcttcgctgtgagtctgtggggccagcccatagtgatgggcgctttgagctggtcttctctggcaagaagctggccctgcgcgcctcctcccaggacgaagctgaggactggctggaccgggtgcgggaggccctgcagaaggtccggcctcagcaggaggatgagtgggtgaacgtgcagtacccagaccagcctgaggaaccccccgaggcgccccagggctgcctctctccctcagacctgctctcggagcccgcggccctccagggcacacagtttgactggtcgtccgcccaggttccagagccagatgccatcaaggagtccctgctgtacttgtacatggacaggacctggatgccctatatattttctctgtccttggaggctctgaaatgtttccgcatcaggaacaatgagaagatgctgagtgacagccacggcgtggagaccatccgggacatcctgccagacaccagccttgggggcccatccttcttcaaaatcatcacggccaaggctgtcctgaagctgcaggccggaaacgccgaggaagccgccctgtggagggatctggtccgcaaagtcctggcatcctacttggagacagccgaggaggcggtgaccctgggcgggagcctggatgaaaactgtcaggaggtgctgaaatttgccacccgggagaatggcttcctgctgcagtacctggtggctatccccatggagaaaggccttgactcccaaggctgcttctgcgcaggctgctcccggcagatcggcttctcctttgtacgacccaagctctgtgccttctctggcctctattactgtgacatctgccaccaagacgatgcctcagtgattccggccaggatcatccacaactgggacctcaccaagcgcccgatctgcaggcaggccctgaagtttctgacacagatccgggcccagcccctcatcaacctgcagatggtgaacgcgtctctgtacgagcatgtggagcggatgcacctcattgggaggagacgggagcagctgaagctcctgggggattacctgggcctgtgccggagtggcgccctgaaggagctcagcaagaggctcaaccacaggaattatctcttggaatctccgcataggttcagtgttgctgacctccaacagatcgcagacggggtgtatgaaggattctccccgaaggtgccctcggaggcagcaggtttgaggccctggggggcccgttccccagaagctgccagtgctttcagatgcattgactcttcccgcctcccctccctcagaaaggtagtgcccacactatttttaaaatgttattttatgcaatacactgttcctagtgagcagggctctggccctgaggagtctttgcaatgtattgaaggaattgctgccgtgtgagttttgaatgattttgcagtaaagacctgatctttctc

SEQ ID NO: 318378 - DNA, 2904 bp, Artificial Sequence
  derived and/or modified sequence
atggattggacccctcgcctaccttcccgtcatataatctcagaactggaacatcttacctttgtcaacacggatgttggccgatgtcgcgcttggctcaggttagcgctgaacgacgggctcatggagtgctatctcaaactgctgctccaggaacaggccaggctgcatgagtactatcaacccaccgccctccttcgggacgctgaggagggagagttcctgctgtcgttcctgcaggggttgaccagcctctcatttgaattaagctacaagagtgctattctgaatgaatggacattgacccccctagctctctccgggctttgtccactgtctgagttggatcccctgagcacttctggggcagagttgcagcgaaaagagagtctcgattcaattagtcattcatccggttcagaggatatcgaagtgcaccacagcggccacaaaataaggaggaatcaaaaactgacagcatcttctctgagccttgataccgcttcttcctcacagctctcatgctccttgaactcagactcctgcctgctccaggagaacggctccaagtcacccgatcattgcgaggagcctatgtcctgtgattccgacctcgggactgcaaacgctgaagatagtgatagaagtcttcaggaggtgctgctcgaattctcaaaggcacaggtgaattctgtgccaactaatggcctgtctcaggagactgagatcccaaccccccaggccagtcttagcttacacggacttaatacatctacatacctgcactgcgaggcccctgccgaacccctgccagcccaggctgcttctggaacacaggacggcgtccacgtgcaggagccacggcctcaagcgcctagtcctctcgatttgcagcagcctgtcgaatccactagcggccagcagccatcttcaaccgtctccgaaactgcgcgagaagtaggtcagggcaacggattgcagaaggcacaggcgcacgacggtgccggactgaaactagtggttagttctcctactagccccaaaaataaatcttggatatctgaggacgacttctatcgcccaagccgagaacaaccactagagtccgctagcgaccatcccatagcgtcttaccgaggaacacccggatctcgccctggcttacaccgccatttcagtcaggagccgcgtaaaaactgcagccttggcgctcttgaccaggcctgtgtcccatcacctggacgacgtcaagcccaggcagccccatcccaaggacataagagctttcgtgtagtgcaccgcagacagatggggctgtccaacccattcaggggcctgatgaagctgggtacagtcgaacgtagaggggcaatgggcatttggaaggagctgttttgcgagctgtcccccctggagttccgcctttacttgagcaacgaagagcacacatgtgtagaaaactgttccctgctgcggtgcgagagcgtggggccagcacattctgatgggaggtttgagctggtattctccggcaaaaaactggcactgcgggcttcttcacaggatgaggcggaagattggcttgacagggtgcgagaagcactccagaaagtcagaccccagcaggaggacgaatgggtgaacgttcaatacccagatcaacctgaggagcctccagaggcgcctcagggttgtttgtctccttccgacttactttctgaaccagcagctctgcaaggaacacagttcgattggagcagtgcgcaggttccggagcccgatgcgatcaaagagtcactgctctatctctacatggatcgcacgtggatgccgtatatattcagcctatccttggaggctctgaagtgttttcgcataagaaataacgagaagatgctgtctgactctcacggcgtcgaaacgatccgggacattcttcctgatacaagcttaggtggtccttcattcttcaaaatcataacggcgaaggcagtccttaagcttcaggccggtaacgcagaggaggccgcactgtggcgcgatctggtgcggaaagttcttgccagctacctagagacagccgaagaggcagttactctgggtgggagcctggacgagaactgtcaggaggtcctgaaattcgctacaagagaaaacggtttccttctgcagtacttggtggctattcctatggagaagggacttgattcccagggatgtttctgcgcaggctgctcacggcagatcggctttagttttgtgaggccgaagctgtgtgcattctcaggcctatactattgcgatatatgtcatcaggatgatgcgagcgttatccccgctcgcatcattcataactgggacttgacgaagagaccgatctgcagacaggctctaaagttcctcacacagataagggcccaaccactaatcaacttgcagatggtaaatgcctctttgtacgagcacgttgaacgcatgcacctcataggaagacgaagagaacagttaaaactcctgggagactatctcgggctctgcaggagtggcgctcttaaggagttgtctaagagactgaatcacaggaactacctgcttgaaagtccacatagattttcagtggcggacctccaacaaattgccgacggtgtgtatgagggatttctgaaagctttgattgagtttgccagccagcatgtttatcattgcgacttatgcactcagcgtggtttcatttgccaaatttgccagcaccacgacatcatctttccctttgagttcgacaccacagtgagatgcgccgaatgcaagacagtgtttcaccagtcttgtcaggccgtggtgaagaagggttgtcctcgatgtgccagacggcgtaagtaccaggaacagaacatcttcgcctag

SEQ ID NO: 318379 - DNA, 3003 bp, Artificial Sequence
  derived and/or modified sequence
atggtggaatgtttcgagtctggaggaactaggcttagcctgtcctcttttaacgtatcatgcgattcgctgagggagcagctccgagagtggaggtgctttcagtggtggcgcatggattggactcctaggctgccctctcggcatatcatctcagaactcgagcacctcacctttgtcaacacggatgtggggaggtgtcgggcttggcttcgacttgcattgaatgacggtctaatggagtgctatttaaagctcctgttacaagaacaggcgagactacacgaatactatcaacccacggctcttctccgggacgcagaagagggggagtttttactgtcttttctgcagggccttacttccctgtcattcgagctgagctacaagtcggccatcctgaacgagtggactttgaccccattggcactttcggggttgtgccctcttagcgagcttgatcctctctccacttctggcgcagagctacagaggaaagaatcgctcgacagcatcagtcacagctccggctcggaagacatcgaggtacaccacagtggtcacaaaatccgcaggaaccagaaattaactgctagctccctttcgctcgacaccgcctcttctagtcagctgagttgttcgctgaactcagattcgtgcctgcttcaggagaacggcagcaaatcaccagaccattgcgaggagcctatgtcatgtgatagcgatctgggcacggcaaatgccgaggatagcgaccgaagtctccaggaagtcctgttggagttttctaaagctcaagtgaatagtgtccccaccaatggactttcccaagagaccgagatacctaccccgcaagcctcactgtcactccacggattaaatacctctacgtacctgcattgcgaggcacccgcagagccactccctgcacaagccgctagtggaacgcaggacggagtgcatgtgcaggaacccagacctcaagctccctcgcccttagacctgcagcagccagtggagagcacctctgggcaacagccctcttcgaccgtgtccgagacagccagagaagtaggtcaaggcaatggtctccagaaggctcaagcgcatgatggtgcaggacttaaattagtcgtaagctctcctaccagcccaaagaataaatcatggatttcggaggatgatttttacagaccttcccgtgaacagccactggaatccgcttctgatcacccaattgccagctaccgaggcactcctggttcacgcccaggcctgcacagacacttttcccaggaaccccgaaagaactgttcgctgggagcactcgatcaagcatgtgtgccttcacccggacggagacaagctcaggccgctcctagccaggggcacaaaagctttcgcgtggtccatcgcagacagatgggtctgtctaatcctttccgtggtctgatgaaattggggaccgtggaacgccgaggggctatgggtatctggaaggagctgttctgtgaactcagccccctggaattcagattgtatctaagcaatgaggaacatacctgcgtggagaactgcagtttgctccgctgcgagtccgtcgggcctgcccacagcgacggaagattcgaactcgtgttctcagggaaaaagctggctctccgcgcatcttcacaggatgaggcagaggattggctggatcgtgttagagaggcacttcagaaagtccgaccacagcaggaggatgagtgggttaacgtgcagtacccagatcagccagaagagcccccagaagccccacaggggtgcctatctcccagcgacctgttgtccgagccagccgcactacagggcactcaatttgactggagctctgcccaagtcccagaacccgacgctattaaggagtcactcttgtatttatatatggatagaacttggatgccctatatcttctccttatctctggaggcgttgaaatgctttcggattagaaacaatgagaaaatgttgagcgactctcacggtgtggagactataagggacatactccctgacacctcattagggggaccttcctttttcaagattattacggcaaaggctgttctgaaactccaggcagggaatgccgaggaggctgccttgtggagagacttggttcgcaaggtgctggcgtcttatttagaaacagccgaggaggctgtaactttgggaggatcattggatgagaattgtcaggaggtgctgaaattcgccactcgcgagaacggtttcctgctccagtatttggtggccatcccaatggagaagggtctcgattcccagggctgtttttgtgctggatgcagcagacaaattggcttctcgttcgtacgacctaaactctgcgcgttcagcggcctctactattgcgacatttgtcaccaggatgacgcaagcgtaattcccgcacgcataatccacaactgggatcttacaaagcgacccatctgtaggcaggcactgaaattcttaactcaaattagagcccagccattaataaatttacaaatggtgaatgcctctctgtacgagcacgtagaacgtatgcacctcatagggaggcgtcgggagcagctcaagttgctaggtgattaccttggtctatgcagatctggggctctgaaggaattgtccaaacgacttaatcatcggaattatctgctagagtccccccaccgttttagcgttgccgacctccagcagatcgctgacggtgtttacgagggctttagccccaaagtgccaagtgaggccgcaggattaagaccgtggggagcccgatcccctgaagcagcatccgcgttccgatgcatcgattcgagccggctgccaagcctgcgaaaggtggtgccgactttgtttcttaaatgctattttatgcaatatacagtgccctccgaacagggatccggtcccgaggaatctcttcagtgcatcgaaggcatagccgcagtttag

SEQ ID NO: 318380 - DNA, 3003 bp, Artificial Sequence
  derived and/or modified sequence
atggtggagtgcttcgagagcggcggcaccagactgagcctgagcagcttcaacgtgagctgcgacagcctgagagagcagctgagagagtggagatgcttccagtggtggagaatggactggacccccagactgcccagcagacacatcatcagcgagctggagcacctgaccttcgtgaacaccgacgtgggcagatgcagagcctggctgagactggccctgaacgacggcctgatggagtgctacctgaagctgctgctgcaggagcaggccagactgcacgagtactaccagcccaccgccctgctgagagacgccgaggagggcgagttcctgctgagcttcctgcagggcctgaccagcctgagcttcgagctgagctacaagagcgccatcctgaacgagtggaccctgacccccctggccctgagcggcctgtgccccctgagcgagctggaccccctgagcaccagcggcgccgagctgcagagaaaggagagcctggacagcatcagccacagcagcggcagcgaggacatcgaggtgcaccacagcggccacaagatcagaagaaaccagaagctgaccgccagcagcctgagcctggacaccgccagcagcagccagctgagctgcagcctgaacagcgacagctgcctgctgcaggagaacggcagcaagagccccgaccactgcgaggagcccatgagctgcgacagcgacctgggcaccgccaacgccgaggacagcgacagaagcctgcaggaggtgctgctggagttcagcaaggcccaggtgaacagcgtgcccaccaacggcctgagccaggagaccgagatccccaccccccaggccagcctgagcctgcacggcctgaacaccagcacctacctgcactgcgaggcccccgccgagcccctgcccgcccaggccgccagcggcacccaggacggcgtgcacgtgcaggagcccagaccccaggcccccagccccctggacctgcagcagcccgtggagagcaccagcggccagcagcccagcagcaccgtgagcgagaccgccagagaggtgggccagggcaacggcctgcagaaggcccaggcccacgacggcgccggcctgaagctggtggtgagcagccccaccagccccaagaacaagagctggatcagcgaggacgacttctacagacccagcagagagcagcccctggagagcgccagcgaccaccccatcgccagctacagaggcacccccggcagcagacccggcctgcacagacacttcagccaggagcccagaaagaactgcagcctgggcgccctggaccaggcctgcgtgcccagccccggcagaagacaggcccaggccgcccccagccagggccacaagagcttcagagtggtgcacagaagacagatgggcctgagcaaccccttcagaggcctgatgaagctgggcaccgtggagagaagaggcgccatgggcatctggaaggagctgttctgcgagctgagccccctggagttcagactgtacctgagcaacgaggagcacacctgcgtggagaactgcagcctgctgagatgcgagagcgtgggccccgcccacagcgacggcagattcgagctggtgttcagcggcaagaagctggccctgagagccagcagccaggacgaggccgaggactggctggacagagtgagagaggccctgcagaaggtgagaccccagcaggaggacgagtgggtgaacgtgcagtaccccgaccagcccgaggagccccccgaggccccccagggctgcctgagccccagcgacctgctgagcgagcccgccgccctgcagggcacccagttcgactggagcagcgcccaggtgcccgagcccgacgccatcaaggagagcctgctgtacctgtacatggacagaacctggatgccctacatcttcagcctgagcctggaggccctgaagtgcttcagaatcagaaacaacgagaagatgctgagcgacagccacggcgtggagaccatcagagacatcctgcccgacaccagcctgggcggccccagcttcttcaagatcatcaccgccaaggccgtgctgaagctgcaggccggcaacgccgaggaggccgccctgtggagagacctggtgagaaaggtgctggccagctacctggagaccgccgaggaggccgtgaccctgggcggcagcctggacgagaactgccaggaggtgctgaagttcgccaccagagagaacggcttcctgctgcagtacctggtggccatccccatggagaagggcctggacagccagggctgcttctgcgccggctgcagcagacagatcggcttcagcttcgtgagacccaagctgtgcgccttcagcggcctgtactactgcgacatctgccaccaggacgacgccagcgtgatccccgccagaatcatccacaactgggacctgaccaagagacccatctgcagacaggccctgaagttcctgacccagatcagagcccagcccctgatcaacctgcagatggtgaacgccagcctgtacgagcacgtggagagaatgcacctgatcggcagaagaagagagcagctgaagctgctgggcgactacctgggcctgtgcagaagcggcgccctgaaggagctgagcaagagactgaaccacagaaactacctgctggagagcccccacagattcagcgtggccgacctgcagcagatcgccgacggcgtgtacgagggcttcagccccaaggtgcccagcgaggccgccggcctgagaccctggggcgccagaagccccgaggccgccagcgccttcagatgcatcgacagcagcagactgcccagcctgagaaaggtggtgcccaccctgttcctgaagtgctacttcatgcagtacaccgtgcccagcgagcagggcagcggccccgaggagagcctgcagtgcatcgagggcatcgccgccgtgtag

SEQ ID NO: 318381 - protein, 179 aa, Artificial Sequence
  derived and/or modified sequence
MDWTPRLPSRHIISELEHLTFVNTDVGRCRAWLRLALNDGLMECYLKLLLQEQARLQLQRKESLDSISHSSGSEDIEVHHSGHKIRRNQKLTASSLSLDTASSSQLSCSLNSDSCLLQENGSKSPDHCEEPMSCDSDLGTANAEDSDRSLQEKTRAGSQRMTSTGLPGSNPWRVLQTTQ

SEQ ID NO: 318382 - protein, 284 aa, Artificial Sequence
  derived and/or modified sequence
MLSVVENGLDPQAAIPVIKKKLVGSVKALQKQYVSLDTVVTSEDGDANTMCSALEAVFIHGLHAKHIRAEAGGKRKKSAHQKPLPQPVFWPLLKAVTHKHIISELEHLTFVNTDVGRCRAWLRLALNDGLMECYLKLLLQEQARLQLQRKESLDSISHSSGSEDIEVHHSGHKIRRNQKLTASSLSLDTASSSQLSCSLNSDSCLLQENGSKSPDHCEEPMSCDSDLGTANAEDSDRSLQDIKIFSWAQWLTPVIPALWEAEAGGSQRQQIETFLANTVKPHLY

SEQ ID NO: 318383 - protein, 284 aa, Artificial Sequence
  derived and/or modified sequence
MLSVVENGLDPQAAIPVIKKKLVGSVKALQKQYVSLDMVVTSEDGDANTMCSALEAVFIHGLHTKHIRAEAGGKRKKSAHQKPLPQPVFWPLLKAVTPKHIISELEHLTFVNMDVGRCRAWLRLALNNGLMECYLKLLLQEQARLQLQRKESLDSISHSSGSEDIEVHHSGHKIRRNQKPTASSLSLDTASSSQLSCSLNSDSCLLQENGSKSPDHCEEPMSYDSDLGTANAEDSDQSLQDIKIFSWAQWLTPVIPALWEAEAGGSQSQEIETFLANTVKPHLY

SEQ ID NO: 318384 - protein, 171 aa, Artificial Sequence
  derived and/or modified sequence
MDWTPRLPSRHIISELEHLTFVNMDVGRCRAWLRLALNNGLMECYLKLLLQEQARLQLQRKESLDSISHSSGSEDIEVHHSGHKIRRNQKPTASSLSLDTASSSQLSCSLNSDSCLLQENGSKSPDHCEEPMSYDSDLGTANAEDSDQSLQEKTRAGSQRMTSTGLPGSNP

SEQ ID NO: 318385 - DNA, 540 bp, Artificial Sequence
  derived and/or modified sequence
atggactggacccccagactgcccagcagacacatcatcagcgagctggagcacctgaccttcgtgaacaccgacgtgggcagatgcagagcctggctgagactggccctgaacgacggcctgatggagtgctacctgaagctgctgctgcaggagcaggccagactgcagctgcagagaaaggagagcctggacagcatcagccacagcagcggcagcgaggacatcgaggtgcaccacagcggccacaagatcagaagaaaccagaagctgaccgccagcagcctgagcctggacaccgccagcagcagccagctgagctgcagcctgaacagcgacagctgcctgctgcaggagaacggcagcaagagccccgaccactgcgaggagcccatgagctgcgacagcgacctgggcaccgccaacgccgaggacagcgacagaagcctgcaggagaagaccagagccggcagccagagaatgaccagcaccggcctgcccggcagcaacccctggagagtgctgcagaccacccagtag

SEQ ID NO: 318386 - DNA, 855 bp, Artificial Sequence
  derived and/or modified sequence
atgctgagcgtggtggagaacggcctggacccccaggccgccatccccgtgatcaagaagaagctggtgggcagcgtgaaggccctgcagaagcagtacgtgagcctggacaccgtggtgaccagcgaggacggcgacgccaacaccatgtgcagcgccctggaggccgtgttcatccacggcctgcacgccaagcacatcagagccgaggccggcggcaagagaaagaagagcgcccaccagaagcccctgccccagcccgtgttctggcccctgctgaaggccgtgacccacaagcacatcatcagcgagctggagcacctgaccttcgtgaacaccgacgtgggcagatgcagagcctggctgagactggccctgaacgacggcctgatggagtgctacctgaagctgctgctgcaggagcaggccagactgcagctgcagagaaaggagagcctggacagcatcagccacagcagcggcagcgaggacatcgaggtgcaccacagcggccacaagatcagaagaaaccagaagctgaccgccagcagcctgagcctggacaccgccagcagcagccagctgagctgcagcctgaacagcgacagctgcctgctgcaggagaacggcagcaagagccccgaccactgcgaggagcccatgagctgcgacagcgacctgggcaccgccaacgccgaggacagcgacagaagcctgcaggacatcaagatcttcagctgggcccagtggctgacccccgtgatccccgccctgtgggaggccgaggccggcggcagccagagacagcagatcgagaccttcctggccaacaccgtgaagccccacctgtactag

SEQ ID NO: 318387 - DNA, 540 bp, Artificial Sequence
  derived and/or modified sequence
atggactggacaccccggttaccgtcacggcatattatcagcgaactcgagcatttgacgtttgttaacaccgacgtgggccggtgtcgggcctggttgcgcctggccctgaatgacggactgatggagtgctacctgaaattgttattacaggaacaggctcgcctccagttgcaacgaaaagaaagtctcgattctatcagtcacagtagcgggtccgaagacattgaggttcatcattctggacacaagatccgccgcaatcagaaattaacagccagctctctgtctcttgataccgcatcctcttcccagctcagttgctcactgaactccgattcctgcttactgcaggagaatggaagcaaatcaccagaccactgtgaggagccaatgtcctgtgactccgatttgggaacagctaacgctgaggactcagaccggtctcttcaagaaaaaacaagagcgggctctcaacgtatgacaagtactggactgccaggttcgaatccctggcgcgtgctgcagactacccagtag

SEQ ID NO: 318388 - DNA, 855 bp, Artificial Sequence
  derived and/or modified sequence
atgctcagcgtagtcgagaatggactcgacccacaggcggcaatcccggtgatcaagaagaagctcgtcgggtctgtaaaggccctccagaagcaatacgtgagcctcgatactgtcgttactagtgaagacggggacgctaacacaatgtgtagtgcactggaggccgtcttcatccacggtctgcacgccaaacacattcgggccgaggcaggcggaaagcgcaaaaaatccgcccaccagaagcccttaccccagcccgtcttttggccactgctcaaggctgtgacacataagcatatcatttctgagctggagcacctaacttttgtgaatacagacgtcggtcggtgcagggcttggctccgcctagccctgaacgacgggctcatggagtgctatcttaagttgcttttgcaggaacaggcccgcctccagctccagaggaaggaatcccttgactctatctctcatagttcggggagtgaggacattgaggttcaccactccggccacaagatacgccgcaaccagaaactgaccgcgtctagtttgtccctcgacaccgctagtagttctcagctgagctgctcccttaacagcgactcatgtttactgcaagagaatgggtctaaatctccagatcattgcgaggaaccgatgtcctgcgattcagaccttggcacagccaatgccgaggattcggaccggagtctacaggacataaaaattttttcctgggcacagtggctgaccccggtgataccagccctatgggaggccgaggctgggggcagccagcgccagcagattgaaacctttctcgcaaatacagttaagccacatctttattag

SEQ ID NO: 318389 - DNA, 540 bp, Artificial Sequence
  derived and/or modified sequence
atggactggaccccccggctgcccagccgccacatcatcagcgagctggagcacctgacctttgtgaacacagatgtgggccgctgccgggcctggctgcggctggccctgaatgatggcctgatggagtgctacctgaagctgctgctgcaggagcaggcccggctgcagctgcagaggaaggagagcctggacagcatcagccacagcagcggcagcgaggacatcgaggtgcaccacagcggccacaagatcagaagaaaccagaagctgacagccagcagcctgagcctggacacagccagcagcagccagctgagctgcagcctgaacagcgacagctgcctgctgcaggagaatggcagcaagagcccagaccactgtgaggagcccatgagctgtgacagcgacctgggcacagccaatgctgaggacagcgacaggagcctgcaggagaagacccgggccggcagccagaggatgaccagcacaggcctgcccggcagcaacccctggagggtgctgcagaccacccagtag

SEQ ID NO: 318390 - DNA, 855 bp, Artificial Sequence
  derived and/or modified sequence
atgctgtctgtggtggagaatggcctggacccccaggccgccatccctgtgatcaagaagaagctggtgggctctgtgaaggccctgcagaagcagtatgtgtccctggacacagtggtgaccagtgaagatggagatgccaacaccatgtgcagcgccctggaggccgtgttcatccacggcctgcacgccaagcacatccgggcagaggccggcggcaagaggaagaagagcgcccaccagaagcccctgccccagcctgtgttctggcccctgctgaaggctgtgacccacaagcacatcatcagcgagctggagcacctgacctttgtgaacacagatgtgggccgctgccgggcctggctgcggctggccctgaatgatggcctgatggagtgctacctgaagctgctgctgcaggagcaggcccggctgcagctgcagaggaaggagagcctggacagcatcagccacagcagcggctctgaagatattgaggtgcaccacagcggccacaagatcagaagaaaccagaagctgacagccagcagcctgagcctggacacagccagcagcagccagctgagctgcagcctgaacagcgacagctgcctgctgcaggagaatggcagcaagagcccagaccactgtgaggagcccatgagctgtgacagcgacctgggcacagccaatgcagaagattctgacaggagcctgcaggacatcaagatcttctcctgggcccagtggctgacccctgtgatcccagccctgtgggaggccgaggccggcggcagccagaggcagcagatcgagaccttcctggccaacacagtgaagccccacctgtactag

SEQ ID NO: 318391 - DNA, 540 bp, Artificial Sequence
  derived and/or modified sequence
atggactggaccccccggctgcccagccggcacatcatcagcgagctggagcacctcacattcgtcaatactgatgtgggacgctgtagagcctggctgagactggccctcaacgatggcctcatggagtgctacctcaagctcctgctgcaagaacaggctcggctgcagctgcaacgaaaagaatccctagattctatctcacattccagtggctctgaggatatcgaggttcaccatagcggtcacaagattcgcagaaaccagaaattgaccgcatccagcttatccctggacaccgccagtagttcccagttgagttgcagcctcaactccgattcctgtctccttcaagagaacggaagcaagtcccctgatcactgtgaagaacctatgagttgtgacagcgaccttggcaccgccaacgcggaagactccgataggagcctacaggaaaaaacacgagccggatcgcaaaggatgacaagcactggtctgccggggagcaatccatggagagtcctccaaacaactcagtag

SEQ ID NO: 318392 - DNA, 855 bp, Artificial Sequence
  derived and/or modified sequence
atgctgagcgtggtggagaacggcctggacccccaggccgccatccccgtgatcaagaaaaagctcgtgggaagtgtaaaagcgttacagaaacagtacgtgtcacttgacactgttgtgacatcagaggatggagatgctaatacaatgtgttcagctctggaagctgtcttcatacacggcctgcacgcaaagcacatccgggcagaagcaggggggaagaggaaaaaaagcgctcatcaaaagccactgcctcagccggtgttttggcctttgctgaaagcagtgactcacaagcacatcattagcgaactagaacatcttacctttgtaaacacagatgtcggcagatgtagagcctggttgaggttggcgctgaacgacggcctaatggagtgctacctcaagcttttactccaggagcaagcccgcctgcagctacagcgtaaagaatccctggacagcatctcacacagcagcggttcagaggacattgaggtgcatcactctggacataaaatccggaggaaccagaaattgaccgccagcagtctaagcctagatactgcctcaagcagtcaactcagttgcagtttaaacagcgactcttgccttcttcaggagaacggctcaaaatctcccgaccactgtgaagaacccatgtcttgcgactctgatctgggcacggcaaatgcagaggactcagatcgtagtcttcaggacataaagattttttcctgggctcagtggctaactccagtcatacctgccctctgggaagcagaagcaggaggaagtcaaagacaacaaatagagacttttctggcaaataccgtaaaacctcacctgtactag

SEQ ID NO: 318393 - DNA, 540 bp, Artificial Sequence
  derived and/or modified sequence
atggactggacccctcgccttccctcacgtcacattatctctgagctggaacacctaactttcgtcaatacggacgtgggtagatgcagagcatggctccggttagcactgaatgacggtctcatggaatgctatctcaagcttcttctccaggaacaggctagactccaattgcagcgtaaggagagtctggacagtatatcccattcttctgggtctgaagacatcgaggtgcaccatagtggacataaaatcagaagaaatcagaaactcaccgcctcttcccttagcctggacaccgcatcttcctcacaacttagttgttcactcaactcagactcttgcctcttacaggaaaacggttccaaatcgccagaccactgtgaggagcccatgtcttgtgacagtgacttgggaactgccaacgccgaggactccgatcgttctctgcaggagaaaacgagagccggatcgcaacgaatgacatccacaggacttcccggatcaaacccttggcgtgtcctacagaccacacagtag

SEQ ID NO: 318394 - DNA, 855 bp, Artificial Sequence
  derived and/or modified sequence
atgctgtcggtggtcgagaatgggctagatccgcaggctgcgattccagtgatcaaaaaaaagcttgtgggttctgtgaaggccctgcagaaacagtacgtgagcctggatacagtggtaacttccgaggatggcgatgccaacaccatgtgctcagcgctagaggctgtgtttattcatggactacatgctaagcacattagagcagaggcgggtggcaagcggaagaaaagtgcacatcaaaagcctctgccgcagcccgtcttttggcccttgctcaaggcagtgacgcataagcatatcatctccgaactggaacaccttacgtttgtgaacactgatgtgggcaggtgtcgggcttggctgagattagccctaaacgatggcctcatggaatgttatctaaaattgttactgcaggaacaggccagacttcagctgcagcgtaaggaaagccttgactcaatttcacacagctctggttcagaggacatcgaggttcaccattctgggcataagatccggagaaaccagaagttgacggcctcaagcctctccctcgatacagcatcaagcagccagttgtcctgttcattgaactctgactcctgcttacttcaggaaaatggctccaaatcgcctgaccattgcgaggaaccgatgagctgtgattccgatctaggaactgccaacgccgaggattcagataggagcttacaggacatcaagattttttcttgggcacagtggttgacaccggtgatacccgcactatgggaggccgaggccggtgggagtcaacgacagcagattgaaacgttcctggctaacacagtgaagccccacctgtactag

SEQ ID NO: 318395 - DNA, 1025 bp, Artificial Sequence
  derived and/or modified sequence
aacgtgatggcgtcaggggccggggcgccgcttcctgttgtcagtggccgagagaccgcatcgtcggctcggaggctgaggggctgccgcggccgggagcgcccctcgcctcgctcctcgctccgcttggtgtcatgtgattctctgagggagcagctgcgtgagtggagatgctttcagtggtggagaatggactggacccccaggctgccatcccggtcatcaagaagaagctggtgggatccgtgaaggccttgcagaagcagtacgtgtccctggacacggtggtcactagtgaagacggagatgccaacaccatgtgcagcgccctggaggccgtatttatccatggcctgcacgccaagcacatccgagctgaggccggaggaaaaaggaagaaaagtgcccaccagaagcctctgccccagcctgtcttctggcccctcctgaaagctgtcacccacaaacacatcatctcagagttggagcacctgacgtttgtcaacacggatgtgggccgctgccgggcatggctgcggctggccctgaacgatggcctgatggagtgctacctgaagctgctgctgcaggagcaggcccgcttgcaactacagcggaaggaatctctggattccatttcgcattcttcaggctctgaagacatcgaagtccatcactcgggccataagatacggaggaaccagaagctgactgcctcctccctcagcctggacacggccagttcatcccagctgtcctgcagcctaaactctgatagctgcttactccaagagaatggctccaagagtccagaccattgtgaggagcccatgtcctgtgactcagacctgggcacagcaaatgctgaggactcagaccggtctctgcaagatataaagattttcagctgggcgcagtggctcacgcctgtaatcccagcactttgggaggccgaggcgggcggatcacaaaggcaacagatcgagacctttctggctaacacggtgaaaccccatctctactaa

SEQ ID NO: 318396 - DNA, 855 bp, Artificial Sequence
  derived and/or modified sequence
atgctgagcgtggtggagaacggcctggacccccaggccgccatccccgtgatcaagaagaagctggtgggcagcgtgaaggccctgcagaagcagtacgtgagcctggacatggtggtgaccagcgaggacggcgacgccaacaccatgtgcagcgccctggaggccgtgttcatccacggcctgcacaccaagcacatcagagccgaggccggcggcaagagaaagaagagcgcccaccagaagcccctgccccagcccgtgttctggcccctgctgaaggccgtgacccccaagcacatcatcagcgagctggagcacctgaccttcgtgaacatggacgtgggcagatgcagagcctggctgagactggccctgaacaacggcctgatggagtgctacctgaagctgctgctgcaggagcaggccagactgcagctgcagagaaaggagagcctggacagcatcagccacagcagcggcagcgaggacatcgaggtgcaccacagcggccacaagatcagaagaaaccagaagcccaccgccagcagcctgagcctggacaccgccagcagcagccagctgagctgcagcctgaacagcgacagctgcctgctgcaggagaacggcagcaagagccccgaccactgcgaggagcccatgagctacgacagcgacctgggcaccgccaacgccgaggacagcgaccagagcctgcaggacatcaagatcttcagctgggcccagtggctgacccccgtgatccccgccctgtgggaggccgaggccggcggcagccagagccaggagatcgagaccttcctggccaacaccgtgaagccccacctgtactag

SEQ ID NO: 318397 - DNA, 516 bp, Artificial Sequence
  derived and/or modified sequence
atggactggacccccagactgcccagcagacacatcatcagcgagctggagcacctgaccttcgtgaacatggacgtgggcagatgcagagcctggctgagactggccctgaacaacggcctgatggagtgctacctgaagctgctgctgcaggagcaggccagactgcagctgcagagaaaggagagcctggacagcatcagccacagcagcggcagcgaggacatcgaggtgcaccacagcggccacaagatcagaagaaaccagaagcccaccgccagcagcctgagcctggacaccgccagcagcagccagctgagctgcagcctgaacagcgacagctgcctgctgcaggagaacggcagcaagagccccgaccactgcgaggagcccatgagctacgacagcgacctgggcaccgccaacgccgaggacagcgaccagagcctgcaggagaagaccagagccggcagccagagaatgaccagcaccggcctgcccggcagcaacccctag

SEQ ID NO: 318398 - DNA, 855 bp, Artificial Sequence
  derived and/or modified sequence
atgttatctgtcgttgaaaatggcttggacccgcaagcagctatccccgtgatcaaaaaaaaactggtgggctctgtgaaggcactgcagaaacagtacgtctcactcgatatggtagtcacatctgaggacggtgatgcaaacactatgtgctcagcactggaagcagttttcatccacggcctgcatactaagcacatcagggccgaggctgggggcaaacggaagaagtctgcacatcaaaagcccctcccacaacccgtgttctggccccttctcaaagcagtcacacctaagcacattatttctgagctagagcatctgacgttcgtgaacatggatgtgggacgatgtcgggcttggctgcgtctcgcattgaacaacggcctaatggaatgctatctcaaactgttgctacaggagcaagctcggctgcagctccagcgaaaggaatcgcttgatagcatcagtcattccagtggctctgaagacatcgaggtacaccactcgggccataagattcgacggaaccagaagcccacagcttcctcgttatcgctggatacagcctcatcgagtcagctgtcctgctctctgaatagcgatagctgtttactgcaggagaatgggtcaaagtcacccgaccactgtgaggagcctatgtcttacgactctgatctcggcactgcaaatgcggaggactctgatcagtctctgcaggatatcaagatctttagctgggcccaatggttgactcccgttataccagccttgtgggaagccgaggctggcggctctcagtcccaagaaatcgagacttttctggccaacaccgttaagcctcatctttattag

SEQ ID NO: 318399 - DNA, 516 bp, Artificial Sequence
  derived and/or modified sequence
atggactggaccccccgactaccatctaggcacattatcagtgagcttgaacatctcacattcgtcaatatggacgtcggacgctgtagggcctggctgagactagcactaaacaacggattaatggaatgttaccttaagctgttactacaggaacaggccagactgcagttgcagaggaaggaatcattagactccattagtcactcttctggctctgaggacattgaggtgcaccactcaggacacaaaatacggcgcaatcagaagccgacagctagctccctgtctctagatacagcctcgtcaagtcaactgtcatgttccctgaactctgatagttgcctactgcaggaaaatggctcaaagagccctgaccattgcgaggagcccatgagctatgattcggatctgggcacggccaatgctgaggacagcgaccaaagcctacaggaaaagacaagggctggatctcagcggatgacaagcacagggctaccgggctccaacccctag

SEQ ID NO: 318400 - DNA, 855 bp, Artificial Sequence
  derived and/or modified sequence
atgctgtctgtggtggagaatggcctggacccccaggccgccatccctgtgatcaagaagaagctggtgggctctgtgaaggccctgcagaagcagtatgtgtccctggacatggtggtgaccagtgaagatggagatgccaacaccatgtgcagcgccctggaggccgtgttcatccacggcctgcacaccaagcacatccgggcagaggccggcggcaagaggaagaagagcgcccaccagaagcccctgccccagcctgtgttctggcccctgctgaaggctgtgacccccaagcacatcatcagcgagctggagcacctgacctttgtgaacatggatgtgggccgctgccgggcctggctgcggctggccctgaacaacggcctgatggagtgctacctgaagctgctgctgcaggagcaggcccggctgcagctgcagaggaaggagagcctggacagcatcagccacagcagcggctctgaagatattgaggtgcaccacagcggccacaagatcagaagaaaccagaagcccacagccagcagcctgagcctggacacagccagcagcagccagctgagctgcagcctgaacagcgacagctgcctgctgcaggagaatggcagcaagagcccagaccactgtgaggagcccatgtcctatgacagcgacctgggcacagccaatgcagaagattctgaccagagcctgcaggacatcaagatcttctcctgggcccagtggctgacccctgtgatcccagccctgtgggaggccgaggccggcggcagccagagccaggagattgagaccttcctggccaacacagtgaagccccacctgtactag

SEQ ID NO: 318401 - DNA, 516 bp, Artificial Sequence
  derived and/or modified sequence
atggactggaccccccggctgcccagccgccacatcatcagcgagctggagcacctgacctttgtgaacatggatgtgggccgctgccgggcctggctgcggctggccctgaacaacggcctgatggagtgctacctgaagctgctgctgcaggagcaggcccggctgcagctgcagaggaaggagagcctggacagcatcagccacagcagcggcagcgaggacatcgaggtgcaccacagcggccacaagatcagaagaaaccagaagcccacagccagcagcctgagcctggacacagccagcagcagccagctgagctgcagcctgaacagcgacagctgcctgctgcaggagaatggcagcaagagcccagaccactgtgaggagcccatgtcctatgacagcgacctgggcacagccaatgctgaggacagcgaccagagcctgcaggagaagacccgggccggcagccagaggatgaccagcacaggcctgcccggcagcaacccctag

SEQ ID NO: 318402 - DNA, 855 bp, Artificial Sequence
  derived and/or modified sequence
atgctgagcgtggtggagaacggcctggacccccaggccgccatcccagtcataaaaaaaaaactggttggaagcgttaaggctttgcagaagcaatatgtgtcactcgatatggtggtaacctccgaagacggcgatgccaacacaatgtgtagcgcactggaggctgtttttattcacggactccacacgaagcacattcgcgctgaagccggcggaaagagaaagaagagcgcacaccagaaaccactgccccagcccgtattctggccgttgttaaaggcggtgacccccaaacatataatctcagagttagagcatctgacattcgtcaacatggacgttgggaggtgccgggcttggttgcgcctggccctcaacaacggactgatggagtgctacctgaaacttctgctgcaagaacaggcccggttacagctgcagaggaaagaaagtttggatagcattagccatagcagtggtagcgaggatatcgaggtgcaccacagtgggcacaagattaggagaaaccaaaaacctactgcgagtagtctgagtctggacaccgcgagctctagccagcttagctgttccttaaactctgattcatgcctactccaggagaacggaagcaaaagccctgaccattgcgaagagccaatgtcctacgattccgacttggggacagccaacgccgaagactctgaccagagtcttcaggatatcaagatttttagctgggctcagtggttgactccagtgatacccgccctgtgggaggcagaagccggcggctctcagtcccaggagattgagactttcctggctaataccgtaaaaccgcacctgtattag

SEQ ID NO: 318403 - DNA, 516 bp, Artificial Sequence
  derived and/or modified sequence
atggactggaccccccggctgcccagccggcacatcatcagcgagctcgaacatctcaccttcgtgaatatggacgtcggacggtgcagggcctggctgcggctcgccttgaataatgggcttatggagtgttatttgaagttgctgctgcaagaacaggccaggctacagctgcagagaaaggaatccctcgacagcatctctcacagttctgggtccgaggatatagaggtccaccactccggccacaaaatacgcaggaatcagaagccaacagcatcgtccctgagtttagataccgccagctcatctcaattgagctgttcattaaattccgactcttgtctgctgcaggaaaatggtagcaagtctccggatcactgcgaggaacccatgtcttacgactctgaccttgggacagcaaatgcagaggatagcgatcagagtctccaagagaagacgagggccggatcgcagaggatgacctccacaggtctgcccggatccaatccctag

SEQ ID NO: 318404 - DNA, 855 bp, Artificial Sequence
  derived and/or modified sequence
atgttatccgtggtggaaaacgggttggacccacaggcagcaattcccgttatcaaaaagaaattggtggggtcagtcaaagccttgcagaaacagtatgttagtctcgacatggtggtgaccagtgaggatggcgacgctaatacaatgtgtagcgccctggaggctgtatttattcacggtcttcacacgaaacacatccgggcagaggccggaggcaagaggaagaaatccgcgcatcagaagcctctgccacagccagtcttttggcctctgctgaaggcagtgactcctaagcacatcatcagcgagctagaacatcttacattcgtgaacatggatgttgggagatgtcgcgcttggctgcggctggctttgaacaacggccttatggaatgttacttgaagcttctgctacaggaacaggcaagactccagctgcaacgaaaggaatctctggacagcatctcccatagtagcggttctgaagatatcgaggtgcaccacagcggccacaagatccggcgaaatcaaaaaccaaccgctagttcacttagccttgataccgccagctctagccagttgtcatgtagcctcaattcagatagttgtcttctgcaggaaaatggatccaagtcacctgatcattgcgaagaacccatgtcgtacgatagcgacctgggaacggccaacgcggaagatagcgaccagagcctccaggatattaagatttttagctgggcacagtggctaaccccagtgattcccgcattatgggaggcagaagcaggcggaagccaatcacaggagatagagacatttcttgctaacacggtcaagcctcatctctactag

SEQ ID NO: 318405 - DNA, 516 bp, Artificial Sequence
  derived and/or modified sequence
atggattggacccctcgtctgccttcccgacatatcatttcagaattggagcatttgaccttcgtgaatatggacgtcggccgttgtcgcgcttggctcaggctcgccctcaacaatgggctgatggaatgttatctcaagctgcttctgcaggaacaggcacgattgcagctccagagaaaggagtctttggactcaatctcccattcttctggtagtgaagacatcgaagtccaccactccggtcacaaaatccgaaggaaccagaaacccaccgccagcagcttgagcctcgataccgcctctagttcccagttatcctgctccctgaattccgactcctgcctcctacaggaaaacggttctaaatccccagaccactgtgaagagcctatgtcatacgactcagatctcggaaccgccaatgccgaagacagtgatcagtccctacaggagaagacgcgggctggaagccagcgcatgacttcgaccgggctgccgggaagtaatccatag

SEQ ID NO: 318406 - DNA, 1558 bp, Artificial Sequence
  derived and/or modified sequence
atcgtcggctcggaggctgaggggctgccgcagccgggagcccccctcgcctcgctcctcgctccgcttggtgtcatgtgattctctgagggagcagctgcgtgagtggagatgctttcagtggtggagaatggactggacccccaggctgccatcccggtcatcaagaagaagctggtgggatccgtgaaagccttgcaaaagcagtacgtgtccctggacatggtggtcactagtgaagacggagatgccaacaccatgtgcagcgccctggaggccgtatttatccatggcctgcacaccaagcacatccgagctgaggccggaggaaaaaggaagaaaagtgcccaccagaagcctctgccccagcctgtcttctggcccctcctgaaagctgtcacccccaaacacatcatctcagagttggagcacctgacgtttgtcaacatggatgtgggccgctgccgggcatggctgcggctggccctgaacaatggcctgatggagtgctacctgaagctgctgctgcaggagcaggcccgcttgcaactacagcggaaggaatctctggattccatttcccattcttcaggctctgaagacatcgaagtccatcactcgggccataagatacggaggaaccagaagccgactgcctcctccctcagcctggacacggccagttcatcccagctgtcctgcagcctaaactctgatagctgcttactccaagagaatggctccaagagtccagaccattgcgaggagcccatgtcctatgactcagacctgggcacagcaaatgctgaggactcagaccagtctctgcaagatataaagattttcagctgggcgcagtggctcacgcctgtaatcccagcactttgggaggccgaggcaggcggatcacaaagtcaagagatcgagacctttctggctaacacggtgaaacctcatctctactaaaaatacaaaaaattagccgggcgtggtggcgggcgcctgaagtcccagctactcaggaggctgaggcaggagaatggtgtggacccgggaggcggagcttgcagtgagctgagattgtgccactacactccagcctgggtgacagagtgagactctgtcccaaaaaaaaaaacaagatttttaaaatgtcttccttatttattactttctctcctacaaaggcagtatatacacactgttctatatcttgttttggagaagatcttttcatatcagagcttcttcattcttttatttttattttttatagagacgggggtctcactgtgttgcccaggctggtcttgaactcctgggctcaagagatcttcctgcctcaggctcccaaattgctggggattacaggcgtgagccactgcgctcagcctcattctttttttttctattgcatattgttctagtgtatcaatgtaccttagtttacttaatcagcccagtatttaatgggtgctggggcctgtgttttcataaataaccttgtgtatgtggtcttttagttctgcgtagctatctctgttccataaactcccag

SEQ ID NO: 318407 - DNA, 994 bp, Artificial Sequence
  derived and/or modified sequence
ggcgatgcctaccacctagaactggattgtgcgctccatttctttcacctcaaagctggccgccaccgctgccacctgctcagagtgaaataatgaaggtggtcaacctgaagcaagccattttgcaagcctggaaggagcgctggagtgactaccaatgggcaatcaacatgaagaaattctttcctaaaggagccacctgggatattctcaacctggcagatgcgttactagagcaggccatgattggaccatcccccaatcctctcatcttgtcctacctgaagtatgccattagttcccagatggtgtcctactcttctgtcctcacagccatcagtaagtttgatgacttttctcgggacctgtgtgtccaggcattgctggacatcatggacatgttttgtgaccgtctgagctgtcacggcaaagcagaggaatgcatcggactgtgccgagcccttcttagcgccctccactggctgctgcgctgcacggcagcctctgcagagcggctgcgggaggggctggaggccggcactccagccgctggggagaagcagcttgccatgtgccttcagcgcctggagaaaaccctcagcagcaccaagaaccgggccctgctgcacatcgccaaactagaggaggcctcattgcacacatcccagggacttgggcagggtggcacccgagccaatcaaccaacagcttcttggactgccatcgagcattctctcttgaaacttggagagatcctggccaatctcagcaacccgcagctccggagtcaggccgagcagtgtggcaccctcattaggagcatccccacgatgctgtctgtgcatgcggagcagatgcacaagaccggcttccccactgtccacgccgtgatcctgctcgagggcaccatgaacctgacaggcgagacgcagtccctggtggagcagctgacgatggtgaagcgcatgcagcatatccccaccccactttttgt

SEQ ID NO: 318408 - protein, 287 aa, Artificial Sequence
  derived and/or modified sequence
  misc_feature (1)..(1): Xaa can be any naturally occurring amino acid
XNLIKELLKETRKEHTLRAVELLYSIFCLDMQQVTLVLLGHILPGLLTDSSKWHSLMDPPGTALAKLAVWCALSSYSSHKGQASTRQKKRHREDIEDYISLFPLDDVQPSKLMRLLSSNEDDANILSSPRSSLGSPCTSYLRWVKVGLGHPRGAPLLHSAGCFPALHLLRPTADRSMSSSLSASQLHTVNMRDPLNRVLANLFLLISSILGSRTAGPHTQFVQWFMEECVDCLEQGGRGSVLQFMPFTTVSELVKVSAMSSPKVVLAITDLSLPLGRQVAAKAIAAL

SEQ ID NO: 318409 - protein, 251 aa, Artificial Sequence
  derived and/or modified sequence
MKKFFPKGATWDILNLADALLEQAMIGPSPNPLILSYLKYAISSQMVSYSSVLTAIMEILNAWENGVLAFESIQKITDNIKGKVCSLAVCAVAWLVAHVRMLGLDEREKSLQMIRQLAGPLFSENTLQFYNERVVIMNSILERMCADVLQQTATQIKFPSTGVDTMPYWNLLPPKRPIKEVLTDIFAKVLEKGWVDSRSIHIFDTLLHMGGVYWFCNNLIKELLKETRKEHTLRAVELLYSIFCLDMQQVT

SEQ ID NO: 318410 - protein, 301 aa, Artificial Sequence
  derived and/or modified sequence
MKVVNLKQAILQAWKERWSDYQWAINMKKFFPKGATWDILNLADALLEQAMIGPSPNPLILSYLKYAISSQMVSYSSVLTAISKFDDFSRDLCVQALLDIMDMFCDRLSCHGKAEECIGLCRALLSALHWLLRCTAASAERLREGLEAGTPAAGEKQLAMCLQRLEKTLSSTKNRALLHIAKLEEASLHTSQGLGQGGTRANQPTASWTAIEHSLLKLGEILANLSNPQLRSQAEQCGTLIRSIPTMLSVHAEQMHKTGFPTVHAVILLEGTMNLTGETQSLVEQLTMVKRMQHIPTPLFV

SEQ ID NO: 318411 - protein, 147 aa, Artificial Sequence
  derived and/or modified sequence
MKKFFPKGATWDILNLADALLEQAMIGPSPNPLILSYLKYAISSQMVSYSSVLTAISKFDDFSRDLCVQALLDIMDMFCDRLSCHGKAEECIGLCRALLSALHFMPFTTVSELVKVSAMSSPKVVLAITDLSLPLGRQVAAKAIAAL

SEQ ID NO: 318412 - DNA, 906 bp, Artificial Sequence
  derived and/or modified sequence
atgaaggtggtaaacctcaagcaggccattctgcaggcctggaaggagagatggagtgactatcagtgggcaattaacatgaaaaaattctttccaaagggcgccacctgggatatcttaaacctggccgacgcccttttggagcaggctatgatcggaccctcgccgaatccgctgattctgtcttatctgaagtacgcaatctcctcccagatggtgtcatattcatcagttctaactgccatctccaaatttgatgatttctcccgggacctctgtgtgcaggctctgctcgatattatggacatgttttgtgaccgtttgtcatgtcacgggaaggcagaggagtgtataggcctgtgtcgggcactcctgagcgccctgcactggctgctgcggtgtacagctgcctccgctgagcggctccgagagggcctggaggcaggaacacctgccgcaggagaaaagcaactggccatgtgcttgcaaaggctcgagaaaacactgtcttccaccaagaatcgagccctgctgcatatagcaaagctcgaggaggcttcccttcacacctcacagggcctcggtcaggggggaacccgcgccaaccagcccaccgcatcgtggacagccatcgaacactccctcctgaaactgggtgagattctggcaaatctctcaaaccctcagctgaggagtcaagcagaacagtgcgggaccctgatacgcagcatcccgacaatgctatctgtgcacgctgaacagatgcataagaccggcttccctactgtacacgctgtgattttactggaaggcaccatgaacctgactggggagactcaatctttggttgagcagctcacgatggtgaagcgaatgcaacacatccccactccgctgtttgtgtag

SEQ ID NO: 318413 - DNA, 756 bp, Artificial Sequence
  derived and/or modified sequence
atgaagaagttcttcccaaaaggcgccacgtgggacattctgaacctggcggacgctttattggaacaggccatgattggtccgagccctaacccactcattctatcctatttgaagtacgccattagtagtcagatggtgtcttatagttcggtccttactgccatcatggagattctgaatgcgtgggaaaacggagtcctcgcgttcgaatccattcagaaaattaccgataatattaaaggaaaagtctgttccctggccgtttgcgcagtggcctggttagtagcccacgtgagaatgctgggtctagacgagcgtgagaagtccctgcagatgatacggcaactggctggaccattattctctgagaatactcttcagttttacaacgaacgggtagttattatgaactctatcttggaacgaatgtgcgccgacgtgctgcagcaaaccgccactcagatcaagttcccttccactggggtggataccatgccttattggaatctgctacctcccaaacgccccatcaaggaggttttaaccgacatttttgccaaggttttggagaaaggttgggtggactctcgaagcatccacatcttcgatactttattgcacatgggaggagtttactggttttgcaataatctcattaaggagctgctgaaagagactcggaaggaacacacgttgagagctgttgagctgttgtattctatcttttgcctcgatatgcagcaagtcacctag

SEQ ID NO: 318414 - DNA, 444 bp, Artificial Sequence
  derived and/or modified sequence
atgaaaaagttctttccaaaaggagcgacatgggatatactgaacctcgcggatgcattactcgagcaggcaatgattgggccaagtcctaatccattgatcctgtcttacctgaaatacgcaataagctcacagatggtgtcttactccagtgtgctaaccgccatctctaagttcgacgactttagccgcgacttgtgtgtccaggcattgctggatattatggacatgttttgcgatcggttatcatgtcatggaaaagctgaagagtgtatcgggctgtgtagggcactcctcagcgcacttcacttcatgccctttaccaccgtttccgagctggtgaaggtgagcgctatgtcaagtcccaaggtcgtgcttgccatcacagatctgtccctaccccttgggcgtcaggtagccgctaaagccatagcagcgctctag

SEQ ID NO: 318415 - DNA, 906 bp, Artificial Sequence
  derived and/or modified sequence
atgaaggtggtgaacctgaagcaggccatcctgcaggcctggaaggagcgctggagcgactaccagtgggccatcaacatgaagaagttcttccccaagggggccacctgggacatcctgaacctggctgatgccctgctggagcaggccatgattggccccagccccaaccccctcatcctgagctacctgaagtatgccatcagcagccagatggtgtcctacagctctgtgctgacagccatcagcaagtttgatgacttcagccgggacctgtgtgtgcaggccctgctggacatcatggacatgttctgtgaccggctgagctgccacggcaaggccgaggagtgcatcggcctgtgccgggccctgctgagcgccctgcactggctgctgcgctgcacagctgccagcgctgagcggctgcgggagggcctggaggccggcaccccagctgctggggagaagcagctggccatgtgcctgcagaggctggagaagaccctgagcagcaccaagaacagagccctgctgcacatcgccaagctggaggaggccagcctgcacaccagccagggcctgggccagggcggcacccgggccaaccagcccacagcctcctggacagccatcgagcacagcctgctgaagctgggggagatcctggccaacctgagcaacccccagctgcggagccaggccgagcagtgtggcaccctcatccgcagcatccccaccatgctgtctgtgcacgccgagcagatgcacaagacaggcttccccaccgtgcatgctgtgatcctgctggagggcaccatgaacctgaccggggagacccagagcctggtggagcagctgaccatggtgaagaggatgcagcacatccccacccccctgtttgtgtag

SEQ ID NO: 318416 - DNA, 756 bp, Artificial Sequence
  derived and/or modified sequence
atgaagaagttcttccccaagggggccacctgggacatcctgaacctggctgatgccctgctggagcaggccatgattggccccagccccaaccccctcatcctgagctacctgaagtatgccatcagcagccagatggtgtcctacagctctgtgctgacagccatcatggagatcctgaatgcctgggagaatggagtgctggcctttgagagcatccagaagatcacagacaacatcaagggcaaggtgtgcagcctggccgtgtgtgctgtggcctggctggtggcccacgtgaggatgctgggcctggatgagcgggagaagagcctgcagatgatccggcagctggccggccccctcttcagcgagaacaccctgcagttctacaatgaaagagtggtgatcatgaacagcatcctggagaggatgtgtgctgatgtgctgcagcagacagccacccagatcaagttccccagcactggagtggacaccatgccctactggaacctgctgccccccaagaggcccatcaaggaggtgctgacagacatctttgccaaggtgctggagaagggctgggtggacagccgcagcatccacatctttgacaccctgctgcacatgggcggcgtgtactggttctgcaacaacctgatcaaggagctgctgaaggagaccaggaaggagcacaccctgcgggctgtggagctgctgtacagcatcttctgcctggacatgcagcaggtgacctag

SEQ ID NO: 318417 - DNA, 444 bp, Artificial Sequence
  derived and/or modified sequence
atgaagaagttcttccccaagggggccacctgggacatcctgaacctggctgatgccctgctggagcaggccatgattggccccagccccaaccccctcatcctgagctacctgaagtatgccatcagcagccagatggtgtcctacagctctgtgctgacagccatcagcaagtttgatgacttcagccgggacctgtgtgtgcaggccctgctggacatcatggacatgttctgtgaccggctgagctgccacggcaaggccgaggagtgcatcggcctgtgccgggccctgctgagcgccctgcacttcatgcccttcaccaccgtgtctgagctggtgaaggtgtctgccatgagcagccccaaggtggtgctggccatcacagacctgagcctgcccctgggccggcaggtggccgccaaggccatcgccgccctgtag

SEQ ID NO: 318418 - DNA, 906 bp, Artificial Sequence
  derived and/or modified sequence
atgaaggtggtgaacctgaagcaggccatcctgcaggcctggaaggaacggtggagcgactatcagtgggcaataaatatgaaaaagttttttcccaaaggcgcgacttgggacatccttaacttagctgacgcactgctggaacaggcaatgatcgggccttctccaaatcctctgatacttagctaccttaaatatgccattagtagccagatggttagttacagcagtgtgcttaccgccatatctaaattcgatgacttttcacgcgatttatgcgttcaggcactccttgacatcatggacatgttctgcgacagactgagttgtcacgggaaagctgaagaatgtatcggcctgtgcagagccctgcttagtgccctgcactggctgctgcgttgcactgccgccagcgctgaaagactgcgggaagggcttgaggccggtaccccagcagcaggcgagaagcagttggccatgtgtctgcaacggcttgagaagacccttagcagcacgaagaacagagcgctgctccatattgccaagttagaggaggcaagcctacatacatctcagggacttggccagggcggtacccgcgccaatcagcccactgcctcctggacagccatagaacattcgctcctgaagttgggtgagatcctggcgaatctcagcaacccccaactgcgctcccaggcagagcaatgcggaaccctgatacgaagcatccccaccatgcttagtgtgcacgccgaacagatgcacaaaacagggttcccaaccgtgcatgctgtgattctgctggaagggaccatgaatcttactggggaaacgcagagtttggtagaacagctaactatggtaaagcgcatgcagcacatcccgacccctttgtttgtctag

SEQ ID NO: 318419 - DNA, 756 bp, Artificial Sequence
  derived and/or modified sequence
atgaagaagttcttccccaagggcgccacctgggacatcctgaacctggcggacgctttgttggagcaggcgatgattggcccgagtccgaatccattgatcctgtcatacctgaagtacgcaattagcagtcagatggtgtcctacagttccgttctcaccgccatcatggaaattctgaatgcatgggagaacggcgtgctggcatttgaaagtatacagaaaattaccgataatattaaaggcaaagtgtgcagtcttgccgtctgcgctgtagcctggctcgtagcacacgtgagaatgttagggctcgacgagagggagaaatcccttcaaatgattcgacagcttgctggtcccctcttttctgaaaatactttacaattctataatgaaagagtagtgattatgaatagcatcctggaaaggatgtgcgccgacgttctacaacagaccgccacacagatcaagttccccagtacgggcgtcgacactatgccatactggaatctgctgcctcccaagcggcctatcaaagaggtacttacagatatctttgctaaagtgctggagaagggttgggttgactccagatcaattcacattttcgacactcttctgcacatgggcggcgtgtactggttctgtaacaatctcatcaaggaactgctcaaagaaaccaggaaggagcacaccctgcgggcggttgagttgctgtattcaatcttctgtctcgacatgcaacaggtgacctag

SEQ ID NO: 318420 - DNA, 444 bp, Artificial Sequence
  derived and/or modified sequence
atgaagaagttcttccccaagggcgccacctgggacatcctgaacttggctgatgctctgttagaacaggcaatgattgggccctcgcccaatccactcattctctcgtatcttaagtatgcaatttcgtcccagatggtcagttatagtagcgtcctcacagctatttcaaagttcgatgacttctcgcgggacctgtgtgtccaggccctcctggatatcatggacatgttttgcgacaggttgagctgtcatggaaaggccgaggagtgtatcgggctgtgtcgcgcattgctgtcagcactgcactttatgccctttactaccgtgtccgagctggtcaaggttagcgcaatgtcttctcccaaagtggttcttgccatcacggacctgagcctccccctcggaaggcaggttgccgctaaagccattgctgcgctgtag

SEQ ID NO: 318421 - DNA, 906 bp, Artificial Sequence
  derived and/or modified sequence
atgaaggtggtgaaccttaagcaagcgattctgcaagcttggaaagagcgatggagtgactatcaatgggcaataaacatgaagaaattcttccccaagggcgcaacatgggacattttgaacctggccgacgctctcctggagcaggcgatgattggtccttcccctaatccgctcatccttagttacctgaaatacgcaatcagctcccagatggtttcctattctagtgtgttgaccgccatttctaaattcgacgattttagtcgcgacctgtgcgtacaggctctgctggacatcatggacatgttctgcgaccgactcagttgtcatgggaaagctgaagagtgtatcggactttgcagagctcttctgagtgccctgcactggcttttacggtgtacagccgcatccgcagaacgattgcgagaaggactcgaagcgggaaccccagctgccggtgaaaagcagctggctatgtgcctccaaaggctagaaaaaaccctgtccagcacgaagaatcgggctctgcttcatattgctaagttagaagaggcctccctgcacacaagccagggcctcggtcagggtgggactcgagctaatcagcctacggcctcttggacagcaattgagcacagcctgctgaaactgggggaaatcctcgcgaacctatctaatccccagctgagatcccaggctgagcagtgtggcaccctgataaggtcaatacctactatgctgagtgtgcacgccgagcaaatgcacaagaccggctttcccacagtccacgcagtgatcctcctggaggggaccatgaatctgactggggagactcagagtctggtggagcaactgactatggtgaagaggatgcagcacatccctaccccactcttcgtttag

SEQ ID NO: 318422 - DNA, 756 bp, Artificial Sequence
  derived and/or modified sequence
atgaaaaaattctttcctaagggcgctacctgggatatactcaatttagcggacgctctgctggaacaggcaatgatagggccttcccctaaccccctcatactgagctacctgaaatacgccattagctcacagatggtgagctatagcagcgttctcacagccatcatggaaatattgaatgcctgggaaaacggtgtgcttgccttcgaatcaatccagaagatcacagacaacattaaaggaaaggtctgcagtttggccgtctgtgcggtcgcctggttagttgcacacgtgagaatgctcgggctggacgaacgagagaaaagcctacagatgatcagacaactggctgggcctctattttccgaaaacacacttcagttctacaacgaacgggtggtcataatgaattcaatccttgaaagaatgtgcgcagacgtactacaacagacagcaacccagatcaaatttccctccaccggtgtcgataccatgccgtactggaacctgcttccacccaagagacccataaaagaagtattgactgatatctttgcaaaggtgttggaaaaaggatgggtagattctcgatcaatacatatcttcgacactctcctgcacatggggggagtgtattggttctgcaacaatctcataaaggaattactaaaggagacccggaaagaacatactctccgcgcagtggagctgctgtactctatattttgcctcgacatgcagcaggtaacctag

SEQ ID NO: 318423 - DNA, 444 bp, Artificial Sequence
  derived and/or modified sequence
atgaagaagttcttccccaaaggagccacatgggacatccttaatttggccgacgcactcctagaacaggccatgattgggcctagccccaatcctctcatcctttcataccttaaatatgctatctccagccaaatggtgagttacagcagtgtgctcaccgccatctccaaattcgacgatttttcacgggacctatgcgtccaagcactcttagacatcatggacatgttttgcgaccgactgtcttgccacggcaaagctgaggaatgcatcggcttgtgccgggcattgctttccgctctgcactttatgccttttacaactgtgtcagagctggttaaagtgagcgccatgagctctccgaaggtcgtccttgctataaccgatctgtcgctccctctgggacggcaagtggcagccaaagcaatcgccgctctgtag

SEQ ID NO: 318424 - DNA, 906 bp, Artificial Sequence
  derived and/or modified sequence
atgaaggtggtgaacctgaagcaggccatcctgcaggcctggaaggagagatggagcgactaccagtgggccatcaacatgaagaagttcttccccaagggcgccacctgggacatcctgaacctggccgacgccctgctggagcaggccatgatcggccccagccccaaccccctgatcctgagctacctgaagtacgccatcagcagccagatggtgagctacagcagcgtgctgaccgccatcagcaagttcgacgacttcagcagagacctgtgcgtgcaggccctgctggacatcatggacatgttctgcgacagactgagctgccacggcaaggccgaggagtgcatcggcctgtgcagagccctgctgagcgccctgcactggctgctgagatgcaccgccgccagcgccgagagactgagagagggcctggaggccggcacccccgccgccggcgagaagcagctggccatgtgcctgcagagactggagaagaccctgagcagcaccaagaacagagccctgctgcacatcgccaagctggaggaggccagcctgcacaccagccagggcctgggccagggcggcaccagagccaaccagcccaccgccagctggaccgccatcgagcacagcctgctgaagctgggcgagatcctggccaacctgagcaacccccagctgagaagccaggccgagcagtgcggcaccctgatcagaagcatccccaccatgctgagcgtgcacgccgagcagatgcacaagaccggcttccccaccgtgcacgccgtgatcctgctggagggcaccatgaacctgaccggcgagacccagagcctggtggagcagctgaccatggtgaagagaatgcagcacatccccacccccctgttcgtgtag

SEQ ID NO: 318425 - DNA, 756 bp, Artificial Sequence
  derived and/or modified sequence
atgaagaagttcttccccaagggcgccacctgggacatcctgaacctggccgacgccctgctggagcaggccatgatcggccccagccccaaccccctgatcctgagctacctgaagtacgccatcagcagccagatggtgagctacagcagcgtgctgaccgccatcatggagatcctgaacgcctgggagaacggcgtgctggccttcgagagcatccagaagatcaccgacaacatcaagggcaaggtgtgcagcctggccgtgtgcgccgtggcctggctggtggcccacgtgagaatgctgggcctggacgagagagagaagagcctgcagatgatcagacagctggccggccccctgttcagcgagaacaccctgcagttctacaacgagagagtggtgatcatgaacagcatcctggagagaatgtgcgccgacgtgctgcagcagaccgccacccagatcaagttccccagcaccggcgtggacaccatgccctactggaacctgctgccccccaagagacccatcaaggaggtgctgaccgacatcttcgccaaggtgctggagaagggctgggtggacagcagaagcatccacatcttcgacaccctgctgcacatgggcggcgtgtactggttctgcaacaacctgatcaaggagctgctgaaggagaccagaaaggagcacaccctgagagccgtggagctgctgtacagcatcttctgcctggacatgcagcaggtgacctag

SEQ ID NO: 318426 - DNA, 444 bp, Artificial Sequence
  derived and/or modified sequence
atgaagaagttcttccccaagggcgccacctgggacatcctgaacctggccgacgccctgctggagcaggccatgatcggccccagccccaaccccctgatcctgagctacctgaagtacgccatcagcagccagatggtgagctacagcagcgtgctgaccgccatcagcaagttcgacgacttcagcagagacctgtgcgtgcaggccctgctggacatcatggacatgttctgcgacagactgagctgccacggcaaggccgaggagtgcatcggcctgtgcagagccctgctgagcgccctgcacttcatgcccttcaccaccgtgagcgagctggtgaaggtgagcgccatgagcagccccaaggtggtgctggccatcaccgacctgagcctgcccctgggcagacaggtggccgccaaggccatcgccgccctgtag

SEQ ID NO: 318427 - DNA, 864 bp, Artificial Sequence
  derived and/or modified sequence
taaaacctcataaaagagcttctcaaggagacaagaaaggagcacacactccgcgctgtcgagttactatatagcatattttgtctggacatgcagcaggtaactttggtgcttctgggccacatcttgcccggactcttaaccgattcttctaagtggcactccctcatggacccgcctggcactgcgctggctaaattagcggtttggtgcgctcttagcagttactcttcccacaaaggtcaggctagcacccgccagaagaagaggcaccgcgaagatattgaggactacatatcactgttcccactggacgatgttcagccgagcaaactgatgcgactcctcagctccaacgaagatgacgctaatatcctgtcatcacctaggtccagtctcggctctccttgtactagttatctccgatgggtaaaagtcggactaggccaccccagaggtgcccctctgctacattcggcggggtgctttcctgctctgcacttgctgagacccactgcggacagaagcatgagtagtagtctcagtgcaagccagttacacaccgtcaacatgcgtgatccactgaatcgcgttctggctaatcttttcttgctaatttcttcaatccttgggagtcgaaccgcagggccccatactcagtttgtccagtggtttatggaggagtgcgtggattgtctggagcagggcggtaggggctccgtgctgcagtttatgccattcaccaccgtctctgagctcgtgaaggtgtcagctatgagctcgcccaaggtcgtgctcgccatcacagatctcagcttaccgctcggtagacaggtggcggcaaaggcaatagccgcgctgtag

SEQ ID NO: 318428 - DNA, 864 bp, Artificial Sequence
  derived and/or modified sequence
tgaaacctgatcaaggagctgctgaaggagaccaggaaggagcacaccctgcgggctgtggagctgctgtacagcatcttctgcctggacatgcagcaggtgaccctggtgctgctgggccacatcctgcccggcctgctgacagacagcagcaagtggcacagcctgatggaccccccaggcacagccctggccaagctggccgtgtggtgtgccctgagcagctacagcagccacaagggccaggccagcacccggcagaagaagaggcacagagaagatattgaggactacatcagcctcttccccctggatgatgtgcagcccagcaagctgatgaggctgctgagcagcaatgaagatgatgccaacatcctgagcagccccaggagcagcctgggcagcccctgcaccagctacctgcgctgggtgaaggtgggcctgggccaccccaggggggcccccctgctgcacagcgctggctgcttccctgccctgcacctgctgcggcccacagctgaccgctccatgagcagcagcctgagcgccagccagctgcacacagtgaacatgagggaccccctgaacagagtgctggccaacctcttcctgctgatcagcagcatcctgggcagcaggacagctggcccccacacccagtttgtgcagtggttcatggaggagtgtgtggactgcctggagcagggcggccggggctctgtgctgcagttcatgcccttcaccaccgtgtctgagctggtgaaggtgtctgccatgagcagccccaaggtggtgctggccatcacagacctgagcctgcccctgggccggcaggtggccgccaaggccatcgccgccctgtag

SEQ ID NO: 318429 - DNA, 888 bp, Artificial Sequence
  derived and/or modified sequence
caacctgattaaggagctgctgaaggagacgcggaaggagcacacgctgcgggcagtggagctgctctactccatcttctgcctggacatgcagcaagtgaccctggtcctgctgggccacatcctacctggcctgctcactgactcctccaagtggcacagcctcatggaccccccgggcactgctcttgccaagctggccgtgtggtgtgccctcagttcctactcctcccacaagggacaggcgtccacccgccagaagaagagacaccgcgaagacattgaggattatatcagcctcttccccctggacgatgtgcagccttcgaagttgatgcgactgctgagctctaatgaggacgatgccaacatcctttcgagccccaggtcttctctgggctctccatgtaccagttacctccgatgggtgaaggtcgggttggggcatccccggggagcaccacttttgcactcggcaggctgtttcccagcgctccatctgctccgtcccacagcagaccgatccatgagcagctccctctcagcctctcagctccacacggtcaacatgcgggaccctctgaaccgagtcctggccaacctgttcctgctcatctcctccatcctggggtctcgcaccgctggcccccacacccagttcgtgcagtggttcatggaggagtgtgtggactgcctggagcagggtggccgtggcagcgtcctgcagttcatgcccttcaccaccgtgtcggaactggtgaaggtgtcagccatgtccagccccaaggtggttctggccatcacggacctcagcctgcccctgggccgccaggtggctgctaaagccattgctgcactctgaggggcttggcatggccgcagtggggg

SEQ ID NO: 318430 - DNA, 864 bp, Artificial Sequence
  derived and/or modified sequence
tgaaacctgatcaaggagctgctgaaggagacccggaaggagcacacgctgcgcgcagtcgaacttctttactcgatcttctgtctggacatgcagcaggtcactctagtgctccttggtcatatcttgcctgggcttctcacagatagctccaagtggcactcgttaatggatcctccaggcacagcactggccaaattggctgtctggtgcgccctctcttcctacagctcacataagggacaggcttcaaccaggcaaaagaaacggcatcgagaggacatcgaagattacatcagcttgttcccattggacgatgtgcaaccctccaagctgatgaggctgctctcttcaaacgaagatgatgcaaatatcctgagttctccacgaagtagcctcggttccccatgcacttcatatctccgctgggtcaaggtgggactgggtcaccctagaggtgcaccgttacttcattctgccgggtgttttccagctcttcaccttctgcgccctacagcggaccggagtatgagctccagcctctctgcttctcagcttcacacggttaatatgcgtgaccccttgaatcgagtcctggctaaccttttcttgctgattagttccattctaggatctagaacagccggtccacatacgcagtttgtgcaatggtttatggaggaatgcgtcgattgtttggagcaaggtggccgaggctcagttcttcaatttatgccgttcacaaccgtctcagagctggtgaaggttagcgccatgtctagccccaaagttgttctagcaattacagacctcagcttaccactgggtaggcaggtggcggcaaaggccatagcagctctgtag

SEQ ID NO: 318431 - DNA, 864 bp, Artificial Sequence
  derived and/or modified sequence
taaaatctcatcaaggaactcctcaaggaaacccggaaggagcataccttaagagccgtagagctgctgtatagtatattttgtcttgatatgcagcaggtcaccctagtcctcctcggacatatacttcctggcctgttgacggactcgagcaagtggcatagtctcatggacccccctgggacagcacttgccaagttagcggtgtggtgcgctctcagctcatattcatcccataaagggcaggccagtacaaggcagaaaaagcgccaccgcgaggacattgaggactacatcagtctcttccccctggacgatgtccagccttctaagctcatgcggctgctgtctagtaacgaagatgacgcaaacatcctatccagccccaggagctccctgggcagtccatgtactagctacctccgctgggttaaggtcggactcggtcatcccagaggcgcacccctcctgcatagtgctggctgtttccccgcattgcacctcttgcgcccaactgccgacaggtccatgtcaagcagcctgagtgccagccagctgcatacagtgaatatgcgtgacccccttaacagggtcttagccaatctattcctgctgatatcctcgattcttgggagccgcacagcgggtcctcatacccagtttgttcaatggtttatggaagagtgcgtcgactgtttagagcaggggggacgtggatctgtgctgcagttcatgccgttcacaactgtgagtgagctcgtcaaggtctcagcgatgtcctccccaaaggttgtgctggcaattaccgatctgtcactccctttagggagacaggttgctgccaaggctattgcagctctgtag

SEQ ID NO: 318432 - DNA, 864 bp, Artificial Sequence
  derived and/or modified sequence
tgaaacctgatcaaggagctgctgaaggagaccagaaaggagcacaccctgagagccgtggagctgctgtacagcatcttctgcctggacatgcagcaggtgaccctggtgctgctgggccacatcctgcccggcctgctgaccgacagcagcaagtggcacagcctgatggacccccccggcaccgccctggccaagctggccgtgtggtgcgccctgagcagctacagcagccacaagggccaggccagcaccagacagaagaagagacacagagaggacatcgaggactacatcagcctgttccccctggacgacgtgcagcccagcaagctgatgagactgctgagcagcaacgaggacgacgccaacatcctgagcagccccagaagcagcctgggcagcccctgcaccagctacctgagatgggtgaaggtgggcctgggccaccccagaggcgcccccctgctgcacagcgccggctgcttccccgccctgcacctgctgagacccaccgccgacagaagcatgagcagcagcctgagcgccagccagctgcacaccgtgaacatgagagaccccctgaacagagtgctggccaacctgttcctgctgatcagcagcatcctgggcagcagaaccgccggcccccacacccagttcgtgcagtggttcatggaggagtgcgtggactgcctggagcagggcggcagaggcagcgtgctgcagttcatgcccttcaccaccgtgagcgagctggtgaaggtgagcgccatgagcagccccaaggtggtgctggccatcaccgacctgagcctgcccctgggcagacaggtggccgccaaggccatcgccgccctgtag

SEQ ID NO: 318433 - protein, 540 aa, Artificial Sequence
  derived and/or modified sequence
MELLTFRDVAIEFSPEEWKCLDPAQQNLYRDVMLENYRNLVSLAVYSYYNQGILPEQGIQDSFKKATLGRYGSCGLENICLWKNWESIGEGEGQKECYNLCSQYLTTSHNKHLTVKGDKEYRIFQKKPQFLSAAPTEPCIPMNKYQHKFLKSVFCNKNQINFNHDSNISKHHSTHFLENYYNCNECEKVFYQSSKLIFPENIHIQKKPYNSNECGETSDPFSKLTQHQRIYIGESSQRCNKKCIIVFSQSHLKGHKIINTGEKSVKYKERGKAFTRGLHLGHQKIHTGEKPYKCKKCDKAFNKSSHLAQHQRIHTGEKPFKCKECGKAFNRGSYLTQHQRIHTGERAFKCEECGKAFNRGSYLTQHQRIHTGEKPFRCKECGKAFNRSSYVTQHQRMHTGEKPFKCKECGKAFNRASHLTQHQRIHTGEKHFKCKECGKAFNRGSHLTRHQRIHTGEKSFKCEECGKAFIWGSHLTQHQRVHTGEKFFKCKECGKAFTRSSHLTQHQRIHTGEKPFKCKECGKAFNRRSTLTQHQIIHTR

SEQ ID NO: 318434 - DNA, 6810 bp, Artificial Sequence
  derived and/or modified sequence
aatcaggcgcgcagccagggaggaaggggcggcttccggaatctggcgcggcctttgtctcacttcagccagagcgcggggttagggcttcattgccttgtgtcctctgctccgggagacttcggtgattctgccactcactccgtcgctctgtgacctgctggcattgaatgatttatagctaagactccaggacacccctgaagccgagaaatggaactcttaacattcagggatgtggccatagaattctctccagaagagtggaaatgcctagaccctgcccaacagaatttatatagagatgtgatgttggagaactacagaaacctcgtctccctggctgtgtattcttattacaaccaaggcattttaccagagcaaggcatacaagattcattcaaaaaagcaacactgggaagatatgggagctgtggccttgaaaatatatgcttatggaaaaactgggaaagtataggtgaaggtgaaggacaaaaggaatgttataatctatgtagccaatatttgacaactagtcataacaaacatttaactgtgaaaggagacaaagaatatagaatatttcagaagaagcctcagtttctgtcagctgctcctacagaaccatgtattcctatgaataaatatcaacataaatttttgaaatctgtcttttgtaataaaaatcagataaattttaaccatgactcaaatattagtaaacatcatagtactcattttctagaaaactattacaattgtaatgaatgtgaaaaagtattttaccaatcctcaaagcttattttccctgaaaatatccatattcaaaaaaagccttacaactctaatgaatgtggtgaaacttctgacccattctcaaagcttactcaacatcaaagaatttatattggagagagctcacaaagatgtaataaaaaatgtataatagtctttagtcaatcacatctaaagggacataagataattaacactggagaaaaatcagtgaaatataaagaacgtggcaaagcttttaccaggggcttacatcttggacatcagaaaattcatactggagagaaaccttacaaatgtaaaaaatgtgacaaagcctttaacaagagttcacaccttgctcaacatcagagaatccatactggagagaagcctttcaagtgtaaggaatgtggcaaagcttttaacagaggctcataccttactcaacatcagagaatccatactggagagagagctttcaaatgtgaagaatgtggcaaagcctttaacagggggtcataccttactcaacaccagagaatccataccggagagaaacctttcagatgtaaggaatgtggcaaagcctttaatagaagctcatacgttactcagcatcagagaatgcatactggagagaaacctttcaagtgtaaggaatgtggcaaagcttttaacagagcttcacaccttactcaacatcagagaatccatactggagagaaacacttcaaatgtaaagaatgtggcaaagcctttaacaggggctcacaccttactcgacatcaaagaatccatactggagagaagtctttcaaatgtgaagaatgtggcaaagcttttatctggggctcacaccttactcaacatcagagagtccatactggagagaaattcttcaaatgtaaagaatgtggcaaagcttttaccaggagctcacaccttactcaacatcagagaattcatactggagagaaacctttcaaatgtaaagaatgtggcaaagcttttaacagacgctcaacccttactcaacatcaaataattcataccaggtagaaaccctgcaagtgtaaagaatgtgctaaaaccctaaactggtgctcacaccttactcaacattagaaaatcaatactggatagaaatcccatatgtgtaatgatttttgaaacatcaaaatgaagattaaataaaaattagaagtgtcactttagaaagaactaaggtgctagcacttccgtaaattactctgaatcagtgtgtttattataacaaataattcaaactcaattagataattaaattgtatgtttaaaaagagggacgacattgatggagaggcataattatattcaatgttcacttatttttgtaatcacagtattcatgattgagaaagtattattgatgtaattaaattcaaattaaccttttttttccccactgtggttgattattgctgtctctgacatgagagtcccttctacgttaggtaggcatcattcacatgtctcattcacatgtcatcattcacatgtctcatgacgtcattcacaagtttcccatggaagactaagagcattggcatataggatgtatgatgaaatctaaatggagttgctctttttgtttgacttacaacactgaatataagtcatatatgagttaggtgttcagaatattattgttctgcattaaagtgtgagacagaaacactctgagttttagatatgaatagttttaccaactacccattaaaaggtcttgctagtccattaatattctaatgtatcttcatagcagcaagttagaagtcctgaatgttactgtgataacaataaagaaatcacaaatatcagagagtggtgcaaataacttctctctggtagaacatagattattaattcaatcctctaaatacttaggctcagtttaagaaaagagagaacacatttttttaacataggtcatggtatcagaataagaatgctttttgaatgtttgcagtctgtaattttgatgattgaggaaactggattttgaaatgctttattcagtctgtaaacttaatttttttttaagaataaaatgaaatgtcttttaatttgttaacactgttgcttattgaataatgtcttatcctgacaaaaatgttaacttattccaccttgctcaagattccaggtagtaaatggtaatgatatactatcgggtatgtctagttcatgctgtctttagcatttttttacccttagtggtattaaactccaaatagtttggagaatgttgattccataagttattacttgttactctaacaagttccccaaggtgtgttgagtagttaattagcccttagctatttttaccaaacattaggttattaatttaaaattgtttgtttttaatgtaggtgtttactgctatgaatttctctgaacagtttgctgcatctcatgtttcgatatgtcataacttcattttcatttatctgaaaatattttccagtttcattttttctttaacacattaattaggagtatttttaatttccatatatttgtgagttccccccattttctgcattcatttatttttaatttccttttactaaagtcagggaaaatactttggattattttgatcctgttaattttattgacgttttcctgctgtatggcctagcatatggtctatcctggagaatgatttatgtgtacttctaattttgagtggaaaattctataaatttgagaattctatcagttcatatttgtttacagtgttcaagtgttatgttttcctgttgatcttcccactttttctgcccattatttacattggagtatagaagtttctatacttctgataaactccaaataatggatttgattatttaatctatttatagcctgtaatattatcagtatagttgaatttgcatcattttgctttctatttttatgtctcacgtatttttctttattcttcctttactgctttcttattactttccatataatcttttaatttatataattgttcatgtttttgaagttacttccttgttttctctagcccttatataccttatcagaatctgctttatatttatattaattccaatgagatataaaatattaccactatatagcttttttcccccaatttggattgaatttttaaaatattgtcttaatttagttttattgttttattaaaaaagctaaacttaacaaaattggttgtatattagtttaggtgaggttgttttgtaatgagaaaataatttacaacatatagagaataaattattattattttaaaaagtactctacattttgtatccttaccatttcctttgatagtttaaaattgtaattctctaaataagagatatattcataaatgtgacttgtaaatgttgaaatttatatgtttgctttttctgcattcagtaagggtagtagtttccagcatctgtgcctctttaaagtgaaagacaggggcaggcgtagtggctaatgcctgtaatcccagcacttcgggaggcccaggtgggtggatcacctgaggtcaggagttcgagactagcctagccaacttagtaaaaccctctctctaccaaaaatacaaaaaattagctgggtgtggtggtgggctcctgtaatcccagctacttgggaggctgagacaggaaaatcacttaaacctgagaggtggaggttgcagtgagccaagatcatgtcactgcactgcagcctgggcagcagagtgagactccatctctaaataagtaaattcagcctgggcaacatgtgagactccatctctaaataaataaataaatgaatgaatgaatgataggatggaattaaaatagtttgaaaacacaaattaacaaaatggtgttgacaaagattgttcatttgtggtctaccagggcataaaattctcaaaaaacataatcagtaggaaacctctttattcctgaatattagagaatattatatgtcttaaaattattcatgttgaaaagctctgcctttcatgcatttaggagaaaaagtagagggcaggaggtttatgtagactctggtctgtgcctgatttggggaatggaaagactcgacagaagaggccaggtcagccaagcagggctctgttgcgtgcaagattaactgctggtttgtctttgcagagctccacacagaacatcatcaaagaactgatggacacttcatctccctgggtgaggggcaggtgtaccatgctgtcatggccattcctgcctcgattggggtgtgggtgtagagatggtctctataaccagggcccagacatggctgagaaggccttctgccaggactccaccttgatgactcacaggactttgtgccttggctttccctattgagtgacccacagttttaatccaagggaccctgagtctgtttccttccttcagccccaccatttcaccccagcactgttcaggtgtacaatcggctttcacatatttgtaagaatatctaggaaaattatttatattttactttcacttcatgttatgaccatgagtgtttttgcatttgctagggctcattgttttaattggcccccctttatccctctgagtgcggaaataaatcagccctaaatctggatgagacctgcaggtggactccatcagtgcaggcgtggtggggcagcaggaggagcccgtggtgcccaccttccagagctgccacctcttttacctcctcatgttccttcctgtgcacctagagagagttcacccccacccaacagctcctggacctgctgcccaaaaggtaagtgctccatccctccacagcacaagggggactcagccacctattatctgtgtcttgggaaagtcccttcacatttgtgggcttcagtttgcttctttggaactggggttctaagaagcctaacatgatatgattgtttcaagaactaaatgagataagctatggaaagtacttcagacttggccttgtagaaagcactgctgagggaatagattggttattcatattataaaactatttaaaactctagaaaactatagtaagatataagattataaaaatatcaaaactaagatattgacagtaatagaattaacctactcatctatttgcattttaccagattaattttttcttatgtgtgtgtgttctgtgcaattttattacatgtgtaggttcacctaccagaagattaactcgttttcctcttataaccacatccgcttcccttctccccaccatacccactctgattctgattctttgaaaccattaatttctatttctgcaaatttgtcattccaataatgttatataaatgaaatcataacctgtgcaaccttttgtaattggcccttttccttcagcataattccttggagattcatctaaattggtttatgttttagtttgttccttttgttattgctgtgggttttcatgtgtggatgttaccatgaaatactgtgtgtaacccttcactctttcaagaacatatttgttgttttcagtcagtgtgtggctattatgaataaaagtgctatgtacattcatgtactaggtttcatatgaatacatgttttcattactctggaaaatatttccagcatacaattcctggctcatagggtagttacaagtttaattttaatagaaactagcactctgttatccagagtgactatcattttacattcccatcatcaatgaatttctgttttttcaaatcctcttagccatactgactgatatgtattgatatcacattgttttaatgtacatttttctaaaggataataatgttgaactttatttaatgttctcatatgacatctgcctattatctctgatgaaatgtttattcatgtctgcatgttttctaattgtatttgttttcttgcaagttttgagagttctgtttatattctggttactagctcacataggcaataaataagttttttttccacaaag

SEQ ID NO: 318435 - DNA, 1623 bp, Artificial Sequence
  derived and/or modified sequence
atggagctgctgaccttcagagacgtggccatcgagttcagccccgaggagtggaagtgcctggaccccgcccagcagaacctgtacagagacgtgatgctggagaactacagaaacctggtgagcctggccgtgtacagctactacaaccagggcatcctgcccgagcagggcatccaggacagcttcaagaaggccaccctgggcagatacggcagctgcggcctggagaacatctgcctgtggaagaactgggagagcatcggcgagggcgagggccagaaggagtgctacaacctgtgcagccagtacctgaccaccagccacaacaagcacctgaccgtgaagggcgacaaggagtacagaatcttccagaagaagccccagttcctgagcgccgcccccaccgagccctgcatccccatgaacaagtaccagcacaagttcctgaagagcgtgttctgcaacaagaaccagatcaacttcaaccacgacagcaacatcagcaagcaccacagcacccacttcctggagaactactacaactgcaacgagtgcgagaaggtgttctaccagagcagcaagctgatcttccccgagaacatccacatccagaagaagccctacaacagcaacgagtgcggcgagaccagcgaccccttcagcaagctgacccagcaccagagaatctacatcggcgagagcagccagagatgcaacaagaagtgcatcatcgtgttcagccagagccacctgaagggccacaagatcatcaacaccggcgagaagagcgtgaagtacaaggagagaggcaaggccttcaccagaggcctgcacctgggccaccagaagatccacaccggcgagaagccctacaagtgcaagaagtgcgacaaggccttcaacaagagcagccacctggcccagcaccagagaatccacaccggcgagaagcccttcaagtgcaaggagtgcggcaaggccttcaacagaggcagctacctgacccagcaccagagaatccacaccggcgagagagccttcaagtgcgaggagtgcggcaaggccttcaacagaggcagctacctgacccagcaccagagaatccacaccggcgagaagcccttcagatgcaaggagtgcggcaaggccttcaacagaagcagctacgtgacccagcaccagagaatgcacaccggcgagaagcccttcaagtgcaaggagtgcggcaaggccttcaacagagccagccacctgacccagcaccagagaatccacaccggcgagaagcacttcaagtgcaaggagtgcggcaaggccttcaacagaggcagccacctgaccagacaccagagaatccacaccggcgagaagagcttcaagtgcgaggagtgcggcaaggccttcatctggggcagccacctgacccagcaccagagagtgcacaccggcgagaagttcttcaagtgcaaggagtgcggcaaggccttcaccagaagcagccacctgacccagcaccagagaatccacaccggcgagaagcccttcaagtgcaaggagtgcggcaaggccttcaacagaagaagcaccctgacccagcaccagatcatccacaccagatag

SEQ ID NO: 318436 - DNA, 1623 bp, Artificial Sequence
  derived and/or modified sequence
atggagctgttaacattccgtgacgtcgctatcgagttttctcctgaagaatggaagtgcctcgatcccgctcagcagaatctctaccgggatgtgatgctcgagaactataggaaccttgtctcactggctgtgtactcctactacaaccagggcatcctcccagaacagggaattcaggactcattcaaaaaagccaccctgggacgatacggttcatgtggactggagaatatttgtctgtggaaaaactgggaaagtataggggagggcgaaggacagaaagagtgctacaacttgtgttcacagtatctgaccacatctcacaacaaacacctgaccgttaagggggataaggagtacaggatttttcagaaaaagccccagttcctgagtgccgctcccaccgagccctgtatccccatgaataagtatcaacacaagttcctgaaatccgtcttctgcaacaagaatcagatcaactttaaccatgacagcaacatcagtaaacaccatagtacccactttctggagaactactacaattgcaacgaatgcgaaaaggtgttctatcaatcatctaaactcatttttccagagaacatccatatccagaaaaaaccttataattctaatgagtgtggcgaaaccagcgatcctttcagtaaattgacgcagcaccagaggatatatatcggagagagtagtcagaggtgtaataaaaaatgcatcattgttttttcgcagagtcacctgaaggggcacaaaattattaacacaggcgaaaagtccgtgaagtacaaagagagaggcaaggcctttactcgaggcctgcaccttggccaccagaaaatccatactggagaaaaaccttacaagtgtaagaaatgcgacaaggcctttaataagagctcccacctggctcagcaccagagaatacatacaggggaaaagcccttcaagtgtaaggaatgcggcaaagcattcaatcgtggctcgtatttgacccagcaccaaaggatccacactggggagcgggcatttaaatgcgaggagtgcgggaaggccttcaataggggatcctacttaacccaacaccagcggatacatactggggagaaaccattccggtgtaaagagtgcggcaaggcgttcaaccgaagctcttatgttactcaacatcaacggatgcacaccggtgagaaacccttcaagtgcaaagaatgcggaaaggccttcaacagggcttcgcatctcacacagcaccaaagaattcacactggcgagaaacatttcaaatgtaaagagtgtggcaaagcgtttaatcggggcagccaccttacacgccaccagcgaatccataccggcgaaaagagctttaagtgcgaagagtgtggaaaagccttcatttggggaagccacttgacccagcatcagagagtgcataccggggagaagttctttaaatgtaaggaatgtggtaaagcctttactcgatccagtcatctcacgcagcaccagagaatccacaccggggaaaagccgtttaagtgtaaggaatgcggcaaggcgttcaataggcgctcaactttgacccagcatcagattattcatacgagatag

SEQ ID NO: 318437 - DNA, 1623 bp, Artificial Sequence
  derived and/or modified sequence
atggaactgttgaccttcagggacgtggctattgagttctctccggaggaatggaagtgccttgaccccgcccagcagaatctgtaccgagatgttatgttggagaattaccggaatttagtcagtctcgctgtctactcctactacaatcaggggatcctgcccgagcaggggatccaggacagctttaaaaaggctacactgggccgttatgggtcctgtggtctggagaacatttgcttgtggaaaaactgggaatctattggcgagggcgaaggtcagaaagaatgttacaacctttgcagtcagtaccttacgacatcccacaacaaacatctcaccgtgaagggagataaagaatacagaatctttcagaagaagccccaattcctgagtgctgcacccacggagccttgcatcccaatgaataaataccagcacaaatttctgaagtccgtgttctgtaacaaaaatcagattaacttcaaccacgactcgaatatatcaaaacaccacagtacccactttctagagaactattacaactgtaacgaatgcgagaaggtgttctatcagagtagcaaactcatttttcccgaaaatattcacatccaaaagaagccctacaactctaatgaatgtggcgagacctccgatcccttttcaaagctcactcaacaccagagaatatatattggtgaatctagccaaaggtgtaataagaagtgcatcattgtcttctcccagagccacttgaaaggccacaaaattatcaacactggagagaagagcgtcaaatacaaagagcgcggcaaggcctttactcgggggctccacttgggccatcagaagattcacaccggtgagaagccgtacaaatgcaaaaaatgtgataaagccttcaacaagtccagccatcttgctcaacaccagagaatccatactggggagaaaccctttaagtgcaaggagtgcggcaaggccttcaaccgagggtcatacctgactcaacatcagcggatacacactggcgagagagcatttaagtgtgaggaatgtggtaaggcctttaataggggctcctacctgactcaacaccagcgcattcatacaggagaaaagcctttccgatgtaaagagtgcggtaaagcctttaacagatccagctatgtgacccaacaccagcgaatgcacacaggagagaagcccttcaagtgcaaggagtgtgggaaagccttcaaccgcgccagccatttaacacaacaccagaggatccatacaggcgagaagcacttcaagtgtaaagaatgcggcaaggcatttaacagaggctcccacctgactcggcaccaacgcatacatactggcgagaaatcctttaagtgtgaggagtgcgggaaagcttttatttggggttctcacctcacccagcaccagcgagtccacactggcgaaaaattcttcaagtgcaaggaatgcggaaaggcatttacacgttcctcacatctgacgcaacatcagcgtatccacacgggggaaaaacctttcaagtgtaaagagtgcggcaaggccttcaatcgccggtcaacactcacccagcaccagattatccacacaagatag

SEQ ID NO: 318438 - DNA, 1623 bp, Artificial Sequence
  derived and/or modified sequence
atggagctgctgaccttcagagatgtggccatcgagttcagccctgaggagtggaagtgcctggaccctgcccagcagaacctgtacagagatgtgatgctggagaactacagaaacctggtgtccctggccgtgtacagctactacaaccagggcatcctgcctgagcagggcatccaggacagcttcaagaaggccaccctgggccgctatggcagctgtggcctggagaacatctgcctgtggaagaactgggagagcatcggggagggggagggccagaaggagtgctacaacctgtgcagccagtacctgaccaccagccacaacaagcacctgactgtgaagggggacaaggagtaccgcatcttccagaagaagccccagttcctgtctgctgcccccacagagccctgcatccccatgaacaagtaccagcacaagttcctgaagagcgtcttctgcaacaagaaccagatcaacttcaaccacgacagcaacatcagcaagcaccacagcacccacttcctggagaactactacaactgcaatgaatgtgagaaggtgttctaccagagcagcaagctgatcttccctgagaacatccacatccagaagaagccctacaacagcaatgaatgtggggagaccagtgaccccttcagcaagctgacccagcaccagaggatctacatcggggagagcagccagcgctgcaacaagaagtgcatcatcgtgttcagccagagccacctgaagggccacaagatcatcaacacaggagagaagtctgtgaagtacaaggagcggggcaaggccttcacccggggcctgcacctgggccaccagaagatccacactggagagaagccctacaagtgcaagaagtgtgacaaggccttcaacaagagcagccacctggcccagcaccagaggatccacactggagagaagcccttcaagtgcaaggaatgtgggaaggccttcaacagaggcagctacctgacccagcaccagaggatccacactggagagcgggccttcaagtgtgaggagtgtgggaaggccttcaacagaggcagctacctgacccagcaccagaggatccacactggagagaagcccttccgctgcaaggaatgtgggaaggccttcaacagaagcagctatgtgacccagcaccagaggatgcacactggagagaagcccttcaagtgcaaggaatgtgggaaggccttcaacagagccagccacctgacccagcaccagaggatccacactggagagaagcacttcaagtgcaaggaatgtgggaaggccttcaacagaggcagccacctgaccaggcaccagaggatccacactggagagaagagcttcaagtgtgaggagtgtgggaaggccttcatctggggcagccacctgacccagcaccagagggtgcacactggagagaagttcttcaagtgcaaggaatgtgggaaggccttcaccaggagcagccacctgacccagcaccagaggatccacactggagagaagcccttcaagtgcaaggaatgtgggaaggccttcaacagaagaagcaccctgacccagcaccagatcatccacaccaggtag

SEQ ID NO: 318439 - DNA, 1623 bp, Artificial Sequence
  derived and/or modified sequence
atggagctgctgaccttccgggacgtggccatcgagttcagccccgaagaatggaaatgcctcgatcctgcacagcaaaacctttacagggacgtgatgctcgagaactatcgaaatctggtcagcctggccgtttactcatattacaatcaggggattctcccggagcagggaatccaagacagttttaaaaaggccacactgggcaggtatggctcatgcggcttggaaaacatctgcctgtggaagaactgggagtctataggcgaaggggaggggcaaaaggagtgttataacctctgctcccaatacctgactacatcccataacaaacacctgaccgttaaaggagacaaagagtatagaattttccaaaaaaagccccagtttttaagcgccgcccccactgagccctgtatccctatgaacaaatatcagcacaagtttctgaaatctgtattttgcaataaaaaccaaatcaacttcaaccatgacagcaacatctcaaaacatcatagcacgcacttcttggaaaattactataactgtaatgaatgcgaaaaagtgttctatcaatctagcaaactgatattcccagagaacatccatatccagaaaaaaccttacaactcaaatgaatgcggagaaactagtgaccccttcagtaagttaacccagcaccagcgaatttatattggagaatcatcgcagcgctgtaacaaaaagtgcattattgtcttcagtcagtctcacctcaaaggtcacaaaatcataaataccggcgaaaagagcgtcaagtacaaggaaaggggaaaggcttttaccagggggctgcatctgggacaccagaaaatccacacaggggaaaagccctacaagtgtaagaagtgcgacaaggccttcaataaatcctctcatttggcccagcatcagaggatccacaccggggagaaaccctttaaatgcaaggagtgcggcaaagccttcaataggggctcctacctgacacagcatcaaaggatccacacaggggagagagcctttaaatgcgaagagtgcgggaaagctttcaacagggggagctaccttacccaacaccagaggattcataccggtgaaaagccctttaggtgcaaagagtgtggaaaggcatttaatagaagtagctatgtgacccagcatcagcgcatgcataccggtgagaaaccttttaagtgcaaagagtgcggtaaggcattcaacagggcttcccatttgactcagcatcaacgcatacataccggcgagaagcacttcaagtgcaaggagtgcggcaaagcatttaatagggggagccatctgacacggcaccagcgcatccacacaggggagaaatcgtttaaatgtgaggaatgtgggaaggcttttatctggggctcccatctgactcagcaccaacgcgtccacaccggagagaagttcttcaaatgcaaagagtgtgggaaggccttcacgcgatcaagtcatcttacccagcatcagaggatacacaccggagagaaacccttcaaatgcaaagaatgcggaaaagcattcaaccggcgctcaacattaacccagcaccagattatccacacgcgctag

SEQ ID NO: 318440 - DNA, 1623 bp, Artificial Sequence
  derived and/or modified sequence
atggagctgctgaccttccgggacgtggccatcgagttcagccccgaagaatggaaatgcttggacccagcgcagcaaaacctttatcgtgacgtaatgctggagaattacagaaatcttgtttccttagccgtgtacagctactacaaccagggaatcctgcctgagcaagggatccaagacagcttcaaaaaggcgacactcggaagatatggctcctgcggcctggaaaatatctgtctgtggaaaaattgggagtctataggcgagggcgaaggacaaaaagaatgctataacctgtgttcgcaatacctgaccaccagccataataagcacctcaccgtcaagggcgataaagagtacaggatcttccagaagaagccccagtttctcagcgcagctcccacggaaccctgtataccgatgaataaataccagcacaaatttctgaaatcagttttctgtaataagaatcaaatcaattttaaccacgactctaacatctccaagcatcattctacccattttcttgagaattattataactgtaacgagtgcgaaaaagttttctatcagtcatccaaactcatatttcctgagaacatccatatccagaagaagccttataatagcaatgaatgcggggaaacctctgaccccttcagcaagcttacccagcatcagcgaatttatatcggtgagagtagtcaaaggtgcaacaaaaagtgcataattgtgtttagtcagtcacaccttaaaggacacaaaatcatcaatactggagagaaatccgtaaagtataaggagcgaggaaaggcctttaccagggggctgcacttaggacatcagaagatacatacgggagagaaaccctataagtgcaaaaaatgtgacaaagccttcaacaagtctagtcacctggcacaacatcagaggattcatacgggtgagaagccctttaagtgcaaggaatgcggcaaagcattcaatcgcggaagttatctgacccagcatcagcggattcacactggcgagcgcgcttttaagtgcgaggagtgcggcaaagcatttaatagaggatcgtatctcacccagcatcagcgcattcacactggggagaaaccattccgctgtaaggagtgcgggaaagcctttaatcgatctagctacgttactcagcatcagagaatgcataccggtgagaagccattcaaatgcaaagagtgcgggaaggcgtttaaccgggcttcacatctgacacagcaccagcgaattcataccggtgaaaaacatttcaagtgcaaagagtgcggcaaagcctttaacagaggttcgcatctcactcgacaccagcggatccataccggtgagaagtcctttaagtgcgaagaatgcggcaaggcatttatctggggaagccatttaacccaacaccagcgcgtccatactggcgagaagttcttcaagtgcaaggagtgcggtaaggcatttactcgatcatcacacctgacccagcatcaacggatccacaccggtgagaagccttttaagtgtaaggaatgcggaaaggcctttaacaggcggtccaccctgacgcaacaccaaattattcacacaagatag

SEQ ID NO: 318441 - DNA, 1623 bp, Artificial Sequence
  derived and/or modified sequence
atggagttgctcacctttcgcgatgtcgccatcgagttttctcctgaagaatggaagtgtctggatcccgctcagcagaacttatacagagatgtgatgctggaaaattaccgaaacctggtgtcactggcggtttattcctactacaatcaggggatactgcccgagcaaggtatacaagattcgttcaagaaagctaccctgggcagatatggcagctgtggactggagaacatctgcttgtggaagaactgggaatcgatcggagaaggcgaaggacagaaggagtgttacaatctctgttcccagtacctaacaacctcgcacaataaacatctcacagtgaagggcgataaggaatacaggattttccagaagaagccccagttcctgtcagccgcacccacagaaccctgcatacccatgaataagtaccagcataagtttctgaagagcgtgttttgcaacaaaaaccagattaatttcaatcacgattccaacatcagcaaacatcactctacccacttcctggagaattattacaactgtaacgagtgcgaaaaagtgttttatcagtcttctaaattaatctttcccgagaacatccatatccagaaaaaaccgtataatagtaatgagtgcggggagacgtcagacccattcagcaagctcactcagcaccagcgcatctacattggagaaagctcccaaaggtgcaataaaaagtgcatcatcgtattttctcagagtcatcttaaggggcacaaaattatcaatacaggagagaaatcagtgaagtataaggaacggggtaaagcattcaccagaggtcttcatctgggtcaccagaagattcacactggggaaaagccctacaagtgcaaaaaatgcgacaaagcgtttaataaatctagtcacctcgctcaacaccagagaatccacacgggggagaaaccttttaaatgcaaggagtgtggaaaggccttcaaccggggtagctatctgactcagcatcaaaggattcacaccggggagcgagccttcaagtgcgaggagtgcggcaaagcctttaatcgagggtcctaccttacacagcatcaacgcatccacactggcgagaagccttttagatgtaaggaatgtggtaaagcttttaaccgttcttcatatgtaactcagcaccagcgtatgcatacaggggagaagccgtttaagtgtaaggaatgtggcaaagcgtttaaccgcgcaagccacctgacccagcaccagcgcatacacacgggggaaaagcactttaaatgtaaggagtgcgggaaagccttcaatcggggatcacacctgactaggcatcagagaatccacaccggagaaaagagctttaagtgcgaggagtgcggcaaagcctttatatggggcagccatctgactcagcaccaacgggttcacactggagagaaattttttaagtgcaaagaatgtggaaaggcattcacccggtcttcccatctgacccagcaccaaagaatacatacgggcgaaaaaccctttaaatgcaaggagtgtggtaaggcctttaaccgacgcagtactctaacccagcaccagatcatccacactcggtag

SEQ ID NO: 318442 - DNA, 1623 bp, Artificial Sequence
  derived and/or modified sequence
atggagttgttgacctttcgcgatgtggccatcgaattcagtccagaggagtggaaatgcttagaccccgctcaacaaaacctgtaccgggacgtaatgctggaaaattaccgcaatctcgtgtctttggcagtctactcttattataaccagggcatattgccggaacaggggattcaagattcctttaaaaaggcgacgctgggacgctatggcagctgtggactcgagaatatttgcctctggaagaattgggaatccattggcgaaggcgagggccagaaagaatgctacaatctgtgttcacagtatctgaccacttcccacaacaagcacttgacagtaaaaggtgataaagaatacagaatattccagaagaaaccccaatttctttccgctgctcctacagaaccttgtattcctatgaacaagtaccagcataaattcctcaaaagcgtgttttgcaacaagaaccagattaattttaatcacgattccaatatctctaagcatcattcaacacacttcctggaaaactactataattgtaacgaatgtgagaaggtcttctatcaatcatcaaagcttatcttcccagagaatatccacattcagaaaaagccctataactctaatgaatgtggggagacttcagacccgttctccaaattgacacagcatcagcgaatttacatcggtgagtctagtcagcgctgtaacaagaaatgcattatcgtgttttcacagagccacctgaaaggacataagattataaataccggcgagaagtccgtgaagtacaaggagaggggtaaagctttcactagagggctacatcttggacaccagaagatccacactggggagaaaccatacaaatgcaagaaatgcgataaggcgttcaataagtcatcacatttggcccagcaccagaggatacatacaggggaaaagcctttcaaatgcaaggaatgtggaaaagccttcaataggggctcctaccttacacagcaccagcgcattcacaccggcgaacgtgcatttaagtgcgaggaatgcgggaaagcctttaatcggggtagctacctgactcaacatcagcggatccatacaggtgaaaagcccttccgttgtaaggaatgcggcaaggccttcaataggtcatcttatgtgacccagcatcagaggatgcacaccggggaaaagccatttaagtgtaaagagtgcggcaaggcatttaatagagcgtcccatctgacgcaacatcagcgaatccacactggtgagaaacacttcaaatgcaaagagtgcggaaaagcttttaaccggggatcacatcttactcggcaccagcgcattcatactggcgaaaaatccttcaagtgtgaagagtgcggaaaggcattcatttggggcagccacttgactcagcaccagagggtccatactggcgaaaagttttttaaatgtaaggaatgtgggaaggccttcactcgttcaagtcatctgacccaacatcaaagaatccacactggcgagaagccttttaaatgtaaagagtgcggcaaagcattcaacagacggtcaaccctcacacaacatcagatcatacacacaaggtag

SEQ ID NO: 318443 - DNA, 1972 bp, Artificial Sequence
  derived and/or modified sequence
cacttcagccagagcgcggggttagggcttcattgccttgtgtcctctgctccgggagacttcggtgattctgccactcactccgtcgctctgtgacctgctggcattgaatgatttatagctaagactccaggacacccctgaagccgagaaatggaactcttaacattcagggatgtggccatagaattctctccagaagagtggaaatgcctagaccctgcccaacagaatttatatagagatgtgatgttggagaactacagaaacctcgtctccctggctgtgtattcttattacaaccaaggcattttaccagagcaaggcatacaagattcattcaaaaaagcaacactgggaagatatgggagctgtggccttgaaaatatatgcttatggaaaaactgggaaagtataggtgaaggtgaaggacaaaaggaatgttataatctatgtagccaatatttgacaactagtcataacaaacatttaactgtgaaaggagacaaagaatatagaatatttcagaagaagcctcagtttctgtcagctgctcctacagaaccatgtattcctatgaataaatatcaacataaatttttgaaatctgtcttttgtaataaaaatcagataaattttaaccatgactcaaatattagtaaacatcatagtactcattttctagaaaactattacaattgtaatgaatgtgaaaaagtattttaccaatcctcaaagcttattttccctgaaaatatccatattcaaaaaaagccttacaactctaatgaatgtggtgaaacttctgacccattctcaaagcttactcaacatcaaagaatttatattggagagagctcacaaagatgtaataaaaaatgtataatagtctttagtcaatcacatctaaagggacataagataattaacactggagaaaaatcagtgaaatataaagaacgtggcaaagcttttaccaggggcttacatcttggacatcagaaaattcatactggagagaaaccttacaaatgtaaaaaatgtgacaaagcctttaacaagagttcacaccttgctcaacatcagagaatccatactggagagaagcctttcaagtgtaaggaatgtggcaaagcttttaacagaggctcataccttactcaacatcagagaatccatactggagagagagctttcaaatgtgaagaatgtggcaaagcctttaacagggggtcataccttactcaacaccagagaatccataccggagagaaacctttcagatgtaaggaatgtggcaaagcctttaatagaagctcatacgttactcagcatcagagaatgcatactggagagaaacctttcaagtgtaaggaatgtggcaaagcttttaacagagcttcacaccttactcaacatcagagaatccatactggagagaaacacttcaaatgtaaagaatgtggcaaagcctttaacaggggctcacaccttactcgacatcaaagaatccatactggagagaagtctttcaaatgtgaagaatgtggcaaagcttttatctggggctcacaccttactcaacatcagagagtccatactggagagaaattcttcaaatgtaaagaatgtggcaaagcttttaccaggagctcacaccttactcaacatcagagaattcatactggagagaaacctttcaaatgtaaagaatgtggcaaagcttttaacagacgctcaacccttactcaacatcaaataattcataccaggtagaaaccctgcaagtgtaaagaatgtgctaaaaccctaaactggtgctcacaccttactcaacattagaaaatcaatactggatagaaatcccatatgtgtaatgatttttgaaacatcaaaatgaagattaaataaaaattagaagtgtcactttagaaagaactaaggtgctagcacttccgtaaattactctgaa

SEQ ID NO: 318444 - protein, 311 aa, Artificial Sequence
  derived and/or modified sequence
RWQLGGAATAAAGGARVWRPLPASRSSFPPPSPRLDPGEFEGKSPCGGTCEQPYLSLPLRYFFSPRKVVPAGCEQAPGGAPKEGFGDSDSESKPDQEAEPQEAAGAQGRAGAPVPEPPKEEQQQALEQFAAAAAHSTPVRREVTDKEQEFAARAAKQLEYQQLEDDKLSQKSSSSKLSRSPLKIVKKPKSMQCKVILLDGSEYTCDVEKRSRGQVLFDKVCEHLNLLEKDYFGLTYRDAENQKNWLDPAKEIKKQVRSGAWHFSFNVKFYPPDPAQLSEDITRYYLCLQLRDDIVSGRLPCSFVTLALLGS

SEQ ID NO: 318445 - protein, 384 aa, Artificial Sequence
  derived and/or modified sequence
MKHQTNISELKRTFLETSTDTAVTNEWEKRLSTSPVRLAARQEDAPMIEPLVPEETKEETEISEKVIFLQQGSAPFLESQTKQSSGEKLMDGSEIFSLLESARKPTEFIGGVTSTSQSWVQKMETKTESSGIETEPTVHHLPLSTEKVVQETVLVEERRVVHASGDASYSAGDSGDAAAQPAFTGIKGKEGSALTEGAKEEGGEEVAKAVLEQEETAAASRERQEEQSAAIHISETLEQKPHFESSTVKTETISFGSVSPGGVKLEISTKEVPVVHTETKTITYESSQVDPGTDLEPGVLMSAQTITSETTSTTTTTHITKTVKGGISETRIEKRIVITGDADIDHDQALAQAIKEAKEQHPDMSVTKVVVHKETEITPEDGED

SEQ ID NO: 318446 - protein, 392 aa, Artificial Sequence
  derived and/or modified sequence
MKHQTNISELKRTFLETSTDTAVTNEWEKRLSTSPVRLAARQEDAPMIEPLVPEEPSVIKKMQEGDSADSVVTSRQIIFQKTVPSTLETKQSSGEKLMDGSEIFSLLESARKPTEFIGGVTSTSQSWVQKMETKTESSGIETEPTVHHLPLSTEKVVQETVLVEERRVVHASGDASYSAGDSGDAAAQPAFTGIKGKEGSALTEGAKEEGGEEVAKAVLEQEETAAASRERQEEQSAAIHISETLEQKPHFESSTVKTETISFGSVSPGGVKLEISTKEVPVVHTETKTITYESSQVDPGTDLEPGVLMSAQTITSETTSTTTTTHITKTVKGGISETRIEKRIVITGDADIDHDQALAQAIKEAKEQHPDMSVTKVVVHKETEITPEDGED

SEQ ID NO: 318447 - DNA, 1179 bp, Artificial Sequence
  derived and/or modified sequence
atgaaacatcagaccaacatatctgaactcaagcggaccttcctggaaacaagtactgataccgccgtgactaacgagtgggagaagcgcctgtctacatctcctgtgcgacttgcagcaagacaggaagatgcacctatgatagagcccctggtgcccgaagaacccagcgtgatcaaaaaaatgcaggagggagatagtgccgatagtgtggtgaccagccgccagattatcttccagaagaccgtgccttctactctggagacaaagcagtcctcaggtgaaaaactgatggatggtagtgaaatcttctcgctgctggaaagcgctagaaagccaacggagtttatcgggggagttacttccacatcacaaagttgggtgcagaagatggagacaaagacggaatccagcggaattgaaacagaaccgaccgtgcatcacctgcccctaagtaccgagaaagtcgtgcaggagacggtgttagtcgaggaacgtcgggttgtgcatgcttctggcgacgcgtcgtattctgccggagattccggcgacgcagctgcccagccagctttcactggaatcaaaggcaaggaaggatctgctctgaccgagggagccaaggaagagggcggggaagaggtggcaaaagctgtccttgaacaagaagagactgcagccgccagtagggagcggcaggaggagcagagtgccgctattcatatctcggagacactggagcaaaaaccacatttcgagtcatctacagtcaagacagagaccatttctttcggctctgtttcccctggcggcgtaaagctcgagattagcactaaggaagtgcctgtcgtgcatacagagaccaagactatcacctacgaaagttcccaggtggaccccggaacggatctggagcctggcgtgttaatgagtgcgcagacgatcacaagcgagacaaccagtaccacaacaacaacccatatcacgaaaactgtcaagggcggcattagcgagactagaattgagaaacggattgtaatcaccggtgatgccgacatcgaccacgaccaggcactcgcccaagctataaaagaggctaaagaacagcatccagatatgtccgtgacaaaagtagtggtgcataaggaaacagagattacccctgaggatggggaggattag

SEQ ID NO: 318448 - DNA, 1179 bp, Artificial Sequence
  derived and/or modified sequence
atgaagcaccagaccaacatcagcgagctgaagaggaccttcctggagaccagcacagacacagctgtgaccaatgagtgggagaagaggctgagcaccagccctgtgcggctggccgcccggcaggaggatgcccccatgattgagcccctggtgcctgaggagcccagcgtcatcaagaagatgcaggagggggacagcgctgacagcgtggtgaccagccggcagatcatcttccagaagacagtgcccagcaccctggagaccaagcagagcagtggagagaagctgatggatggcagcgagatcttcagcctgctggagagcgccaggaagcccacagagttcatcggcggcgtgaccagcaccagccagagctgggtgcagaagatggagaccaagacagagagcagcggcatcgagacagagcccaccgtgcaccacctgcccctgagcacagagaaggtggtgcaggagaccgtgctggtggaggagcggcgggtggtgcacgccagcggagatgccagctacagcgctggggacagcggagatgctgctgcccagcctgccttcaccggcatcaagggcaaggagggcagcgccctgacagaaggagccaaggaggagggcggggaggaggtggccaaggctgtgctggagcaggaggagacagctgctgccagccgggagcggcaggaggagcagagcgctgccatccacatcagcgagaccctggagcagaagccccactttgagagcagcacagtgaagacagagaccatcagctttggatctgtgtcccctgggggcgtgaagctggagatcagcaccaaggaggtgcctgtggtgcacacagagaccaagaccatcacctatgagagcagccaggtggaccctggaacagacctggagcccggggtgctgatgtctgcccagaccatcaccagcgagaccaccagcaccaccaccaccacccacatcaccaagacagtgaagggcggcatcagcgagacccgcatcgagaagagaattgtcatcactggagatgctgacatcgaccatgaccaggccctggcccaggccatcaaggaggccaaggagcagcacccagacatgtctgtgaccaaggtggtggtgcacaaggagacagagatcaccccagaagatggagaagattag

SEQ ID NO: 318449 - DNA, 1179 bp, Artificial Sequence
  derived and/or modified sequence
atgaagcaccagaccaacatcagcgagctgaagcggaccttcctggaaaccagcactgatacggccgttaccaacgagtgggaaaagagactcagcacatcacctgtccgcttagccgcccggcaggaggatgctccaatgattgaacccctggtacctgaggaaccctctgtcattaaaaagatgcaggaaggcgacagtgccgattccgtagttacttctcggcaaataattttccaaaaaactgtaccctctacattggagacgaaacagagcagcggcgaaaaactgatggatggaagcgaaatcttctccctcttggagtccgcccgtaaacccaccgagtttatcggaggcgtgacaagtacctctcaatcctgggtgcagaagatggagactaagaccgagtcatctggaattgaaaccgaacccactgtgcaccatctgcctctgtcgaccgaaaaagttgttcaagagaccgtcctggtagaagaacggcgcgtggtgcacgcctctggggatgcctcgtactctgccggagactcaggtgatgctgccgcccaaccggcctttactggaattaaaggcaaagagggatccgccctgacagaaggcgccaaggaagaggggggagaggaggtcgcgaaggcagtgctcgaacaggaagaaaccgcagccgccagccgggagcggcaggaggagcagagtgccgccattcatatctcagaaaccttagagcagaagcctcacttcgaatcgtccaccgtaaagaccgaaaccattagctttgggagtgtctcccctggaggcgtgaagctggagatctccactaaggaagtccccgtggttcacaccgaaacaaaaacaatcacatacgagagctctcaagtcgatcccggcactgacctcgagcccggggtgttgatgagtgcacagaccataacatcggaaaccacatcgacaacaaccacaacacacatcacaaaaacagtgaaaggtggaatttccgaaactagaatcgagaagagaatagtgataaccggcgacgccgacatcgaccatgaccaggcgctggctcaggctattaaagaggccaaagagcaacatcctgacatgtccgttaccaaggtggttgtgcataaagagacagaaatcacgccggaggacggggaagattag

SEQ ID NO: 318450 - DNA, 1179 bp, Artificial Sequence
  derived and/or modified sequence
atgaaacatcagaccaatatctcagagttgaagcgcacatttctggaaacttccaccgacaccgctgtcaccaacgaatgggaaaaacgcctctctacctctcctgtccgcttagctgccagacaggaagatgccccaatgatcgagccattggttcctgaggaaccctctgtgatcaaaaagatgcaggagggagattccgcagacagcgtcgtgacctcgagacagatcatattccagaagacagttccttccacactcgaaactaagcagtcctccggtgagaaactcatggatgggagtgagatcttttctcttttggagagcgctaggaaaccaactgaatttatagggggagtcacatcaaccagccagtcttgggtgcagaagatggagaccaagacagaatcatctggaatagaaacagagccaaccgtgcatcacctgcccctctccactgagaaagtcgtgcaggaaactgtgctggtggaagagaggcgtgtggtgcatgcttcaggggatgccagttattctgcaggggatagtggcgacgcggcagcccagcccgcatttactggcattaaagggaaagaaggaagtgcccttacggaaggcgctaaggaggagggcggagaggaagtcgcaaaggctgtcctggagcaagaagagactgccgcagcaagtcgggaaagacaggaggagcagtccgctgcaatacatatttctgaaactctggagcagaaaccccattttgaaagttctacagtgaagactgagacaattagttttggctctgtgagtcctggcggtgtgaagctggaaatctctactaaggaggtcccggtggtgcataccgagactaaaacgattacgtatgagtcgagtcaggtggatccaggaaccgaccttgaacccggtgtgcttatgagtgctcagacgatcacgtccgaaaccaccagcaccaccacgaccacacacatcaccaagaccgtcaagggtggaatctccgaaactcggattgagaaacgaattgtgattaccggggatgccgatattgatcacgaccaggccctggctcaggctataaaagaagccaaggagcagcaccctgatatgtctgtgaccaaagtggtggtgcataaggaaactgagattacacccgaagatggcgaagactag

SEQ ID NO: 318451 - DNA, 1179 bp, Artificial Sequence
  derived and/or modified sequence
atgaagcaccagaccaacatcagcgagctgaagagaaccttcctggagaccagcaccgacaccgccgtgaccaacgagtgggagaagagactgagcaccagccccgtgagactggccgccagacaggaggacgcccccatgatcgagcccctggtgcccgaggagcccagcgtgatcaagaagatgcaggagggcgacagcgccgacagcgtggtgaccagcagacagatcatcttccagaagaccgtgcccagcaccctggagaccaagcagagcagcggcgagaagctgatggacggcagcgagatcttcagcctgctggagagcgccagaaagcccaccgagttcatcggcggcgtgaccagcaccagccagagctgggtgcagaagatggagaccaagaccgagagcagcggcatcgagaccgagcccaccgtgcaccacctgcccctgagcaccgagaaggtggtgcaggagaccgtgctggtggaggagagaagagtggtgcacgccagcggcgacgccagctacagcgccggcgacagcggcgacgccgccgcccagcccgccttcaccggcatcaagggcaaggagggcagcgccctgaccgagggcgccaaggaggagggcggcgaggaggtggccaaggccgtgctggagcaggaggagaccgccgccgccagcagagagagacaggaggagcagagcgccgccatccacatcagcgagaccctggagcagaagccccacttcgagagcagcaccgtgaagaccgagaccatcagcttcggcagcgtgagccccggcggcgtgaagctggagatcagcaccaaggaggtgcccgtggtgcacaccgagaccaagaccatcacctacgagagcagccaggtggaccccggcaccgacctggagcccggcgtgctgatgagcgcccagaccatcaccagcgagaccaccagcaccaccaccaccacccacatcaccaagaccgtgaagggcggcatcagcgagaccagaatcgagaagagaatcgtgatcaccggcgacgccgacatcgaccacgaccaggccctggcccaggccatcaaggaggccaaggagcagcaccccgacatgagcgtgaccaaggtggtggtgcacaaggagaccgagatcacccccgaggacggcgaggactag

SEQ ID NO: 318452 - DNA, 1656 bp, Artificial Sequence
  derived and/or modified sequence
gaaggctgaggaggagcgggacgaggaagaggacaaacggaggaagggggaagaagtcacgcccatctcggccatccggcacgagggaaagactgacagtgagcgcacggacaccgcagccgacggggagaccactgccactgaggagctagaaaaaactcaagatgacctgatgaaacatcaaaccaacattagcgagctgaaaagaaccttcttagaaacctcaacagacactgccgtaacgaatgaatgggagaagaggctttccacctcccccgtgcgactggccgccaggcaggaggatgcccccatgatcgaaccacttgtccctgaagagccaagtgtgataaagaaaatgcaggaaggagactctgctgactctgtggttacttctcgtcaaataattttccagaaaactgtcccatcaaccctagagactaagcagtcttctggggaaaagctcatggatggctctgaaatcttcagtttattagagtctgcgcgaaaaccaacagaattcataggaggggttacttctacttctcaaagctgggttcagaaaatggaaaccaagacggagtccagtggaatagagacggaacccaccgtgcaccacctgccgcttagcactgagaaggtggtgcaggagaccgtgttggtggaggagcggcgtgtggtgcacgcgagtggggatgcttcttactcggcgggagacagcggggatgctgcagcacagcccgcattcacaggcattaaagggaaagagggctctgccttgacggagggggctaaagaggaaggaggggaggaggtcgctaaagctgtcctggaacaggaagagacagccgctgcttcccgtgagcgacaagaggagcagagtgcagccatccacatttcagaaactttggaacaaaaacctcattttgagtcctcaacggtgaagacggaaaccatcagttttggcagtgtttcaccgggaggagtaaagctagaaatttccacgaaggaagtgccagtagttcacaccgaaaccaaaaccatcacatatgaatcatcacaggtcgatccaggcacagatctggagccaggcgtgctgatgagtgcacagacgatcacatctgaaaccaccagtaccaccaccactacgcacatcaccaaaactgtgaaagggggcatttcagagacaagaattgagaagcgaatagtcatcacgggggatgcagacattgaccatgaccaggcgctggctcaggcaattaaagaggccaaagagcagcaccctgacatgtcagtgaccaaagtagtggtccataaagagacagagatcacaccagaagatggagaggattgaccagaggaataacttagcttgcacatgaatgcagtcatgcaaaccgttaggaaaaccagagcctatatggagttccctcttctaacccaactgacttgtatctgtccgtggaaaatttcagtccagaagaattgaccttgaccattaataaagacactggcagagagatcttcccataataaagcaatctgattcagcatcactaaaccgataatgcatgaagcaacgataaaattacaaaagagcagcatttttaattttcacaaaatgtctcagttttcagctatacctgcacgttcataacc

SEQ ID NO: 318453 - DNA, 1155 bp, Artificial Sequence
  derived and/or modified sequence
atgaaacatcagactaacatttcggagttgaagcggacctttctggagacatcaaccgatactgccgttaccaacgaatgggagaagcgcctgagcacttccccggtacgactggcagcccgccaagaggatgcacccatgatcgagcctctggtgcccgaggagactaaggaagagaccgagatctctgaaaaagttatctttctccagcagggatctgctccctttctggagagtcagacgaagcaatcttcgggagaaaagttgatggatggatccgagatcttctcactgctagaatctgcacggaagccgaccgagttcataggcggagtgaccagcacttctcagagttgggtacagaaaatggagacaaagacggagagttcaggcatagagaccgagcctacagtgcatcatctaccattgagcacagaaaaagtggtacaggagaccgtgctcgtcgaggaaaggcgcgtggtgcacgccagcggcgacgcaagctatagcgctggggacagtggtgatgctgccgcccagcccgccttcaccggaattaaaggaaaggaaggcagcgccctgacagagggagcgaaagaagaaggcggagaggaagtggcaaaggctgttttagaacaagaggagaccgcagctgcctcacgagagcgtcaggaagaacagtccgcagccattcacatctccgagaccctcgagcagaagcctcatttcgagagttccacggtgaagaccgagaccatcagttttgggtcagtgagtcctgggggggttaagctggagatttccactaaggaagtgcccgtcgtccacacagaaacgaaaactataacgtatgagtcttctcaggtggaccccggcaccgatctcgagccaggtgtcctgatgtcggctcagaccatcacatcggaaacaacatctaccaccacaaccactcatattacaaaaactgtcaagggggggataagtgagacgagaatcgaaaaacgtatagtgatcactggagatgccgacattgatcacgaccaagccctggcccaggctataaaggaggccaaggagcagcaccccgatatgtccgttactaaggtcgttgtgcacaaagagaccgagataactccggaagacggagaggattag

SEQ ID NO: 318454 - DNA, 1155 bp, Artificial Sequence
  derived and/or modified sequence
atgaagcaccagaccaacatcagcgagctgaagaggaccttcctggagaccagcacagacacagctgtgaccaatgagtgggagaagaggctgagcaccagccctgtgcggctggccgcccggcaggaggatgcccccatgattgagcccctggtgcctgaggagaccaaggaggagacagagatcagcgagaaggtgatcttcctgcagcagggcagcgcccccttcctggagagccagaccaagcagagcagtggagagaagctgatggatggcagcgagatcttcagcctgctggagagcgccaggaagcccacagagttcatcggcggcgtgaccagcaccagccagagctgggtgcagaagatggagaccaagacagagagcagcggcatcgagacagagcccaccgtgcaccacctgcccctgagcacagagaaggtggtgcaggagaccgtgctggtggaggagcggcgggtggtgcacgccagcggagatgccagctacagcgctggggacagcggagatgctgctgcccagcctgccttcaccggcatcaagggcaaggagggcagcgccctgacagaaggagccaaggaggagggcggggaggaggtggccaaggctgtgctggagcaggaggagacagctgctgccagccgggagcggcaggaggagcagagcgctgccatccacatcagcgagaccctggagcagaagccccactttgagagcagcacagtgaagacagagaccatcagctttggatctgtgtcccctgggggcgtgaagctggagatcagcaccaaggaggtgcctgtggtgcacacagagaccaagaccatcacctatgagagcagccaggtggaccctggaacagacctggagcccggggtgctgatgtctgcccagaccatcaccagcgagaccaccagcaccaccaccaccacccacatcaccaagacagtgaagggcggcatcagcgagacccgcatcgagaagagaattgtcatcactggagatgctgacatcgaccatgaccaggccctggcccaggccatcaaggaggccaaggagcagcacccagacatgtctgtgaccaaggtggtggtgcacaaggagacagagatcaccccagaagatggagaagattag

SEQ ID NO: 318455 - DNA, 1155 bp, Artificial Sequence
  derived and/or modified sequence
atgaagcaccagaccaacatcagcgagctgaagcggaccttcctggagacatctaccgatacagccgtgaccaacgagtgggaaaaaagactaagcacgtccccagttcgtcttgccgcccgccaggaggacgctccaatgattgaaccactggtgccagaagaaacgaaggaagaaaccgaaatctctgagaaagtgatttttttgcagcagggcagcgcgccctttttggaaagccagacaaaacagagctcaggcgagaaattgatggacgggagcgaaatcttttccctgctcgaatctgcccgtaagcctacagagttcatcggaggggtgacaagtactagccagtcttgggtacagaaaatggagacgaagaccgagtcctcaggcatcgagactgagcccacggtacaccacttaccactaagcaccgagaaggtcgtccaggagactgtgctcgttgaggagagacgagttgtgcacgcctccggtgatgcaagctacagcgccggtgattccggagatgccgccgctcagcccgccttcactggcatcaaggggaaagaaggatctgctctgactgagggcgcgaaggaagaggggggtgaagaagtagcaaaagccgtgctcgagcaggaagagactgctgcggcttctagagagcgccaggaggaacagagcgctgccattcacatctccgaaaccctggagcagaagcctcactttgagtcctcaactgtcaaaactgagaccatctcttttggaagtgtgtcaccggggggagtgaaattagaaataagtacaaaggaggtgcccgtggtccacacagagaccaagacgatcacctacgagtcatcacaggtggatcctggcaccgatctggaaccaggggtgctgatgagcgcccagactataacttcagagaccactagcacaacgacaactacacatattacaaaaaccgtgaagggtggaatcagtgaaacaagaatcgagaagaggatagtgatcactggagatgcagacattgaccatgaccaggcactggcccaggcaattaaggaggcaaaggagcagcaccctgatatgtcggtcaccaaagttgtagtgcacaaggaaacggagatcacaccggaagacggagaggattag

SEQ ID NO: 318456 - DNA, 1155 bp, Artificial Sequence
  derived and/or modified sequence
atgaagcatcagacaaatatttctgaactgaaacgaacattcttggaaacctcaaccgacacagcggttaccaatgagtgggagaagcgcctgagtaccagtccggttcggctggccgcaagacaggaagatgcgccaatgatcgaaccactggtgccagaagagaccaaggaggaaacagaaatcagcgagaaagtgatcttccttcaacagggatctgccccttttctagaaagtcagactaagcaatccagcggagagaagttgatggatgggagtgaaatctttagcctcctcgagtccgcgcgaaaaccaactgagttcatcggcggtgtaacaagtaccagccaaagttgggtgcagaagatggaaaccaagacagagtcaagtggtattgagacagagccaacagttcaccatctccctctgtcaacagaaaaagtggtgcaagaaaccgttctggtcgaggaacggagagttgtccacgcttccggtgacgcaagctattccgctggtgacagtggagatgctgctgctcagcctgctttcacaggtatcaaggggaaagaagggtcagccctgacggaaggagccaaggaggagggaggagaggaggtggctaaggccgttttggagcaagaagaaacagccgctgcctcaagagagcgccaggaggaacaatccgccgcaatccacattagtgaaacccttgaacagaaaccacacttcgagagttctacagtcaagacggaaaccatcagcttcggttctgtctcgccgggaggagtgaaactggagatttcaaccaaggaagtccctgtggtacacaccgaaacgaagaccataacatacgagagctctcaagttgacccgggaaccgacctggaaccaggcgttctgatgtccgcccagactatcaccagtgaaaccacatcaaccaccaccaccactcatatcaccaagaccgtaaaggggggtatcagcgagacacgtatcgaaaagcgcatcgtgatcactggggatgcagacattgatcatgatcaggccctcgctcaggctataaaagaagccaaggagcagcatcctgatatgagcgtcacgaaagttgtggttcataaggagactgagataacccctgaggacggcgaggactag

SEQ ID NO: 318457 - DNA, 1155 bp, Artificial Sequence
  derived and/or modified sequence
atgaagcaccagaccaacatcagcgagctgaagagaaccttcctggagaccagcaccgacaccgccgtgaccaacgagtgggagaagagactgagcaccagccccgtgagactggccgccagacaggaggacgcccccatgatcgagcccctggtgcccgaggagaccaaggaggagaccgagatcagcgagaaggtgatcttcctgcagcagggcagcgcccccttcctggagagccagaccaagcagagcagcggcgagaagctgatggacggcagcgagatcttcagcctgctggagagcgccagaaagcccaccgagttcatcggcggcgtgaccagcaccagccagagctgggtgcagaagatggagaccaagaccgagagcagcggcatcgagaccgagcccaccgtgcaccacctgcccctgagcaccgagaaggtggtgcaggagaccgtgctggtggaggagagaagagtggtgcacgccagcggcgacgccagctacagcgccggcgacagcggcgacgccgccgcccagcccgccttcaccggcatcaagggcaaggagggcagcgccctgaccgagggcgccaaggaggagggcggcgaggaggtggccaaggccgtgctggagcaggaggagaccgccgccgccagcagagagagacaggaggagcagagcgccgccatccacatcagcgagaccctggagcagaagccccacttcgagagcagcaccgtgaagaccgagaccatcagcttcggcagcgtgagccccggcggcgtgaagctggagatcagcaccaaggaggtgcccgtggtgcacaccgagaccaagaccatcacctacgagagcagccaggtggaccccggcaccgacctggagcccggcgtgctgatgagcgcccagaccatcaccagcgagaccaccagcaccaccaccaccacccacatcaccaagaccgtgaagggcggcatcagcgagaccagaatcgagaagagaatcgtgatcaccggcgacgccgacatcgaccacgaccaggccctggcccaggccatcaaggaggccaaggagcagcaccccgacatgagcgtgaccaaggtggtggtgcacaaggagaccgagatcacccccgaggacggcgaggactag

SEQ ID NO: 318458 - DNA, 1647 bp, Artificial Sequence
  derived and/or modified sequence
aagaaggctgaggaggagcgggacgaggaagaggacaaacggaggaagggggaagaagtcacgcccatctcggccatccggcacgagggaaagactgacagtgagcgcacggacaccgcagccgacggggagaccactgccactgaggagctagaaaaaactcaagatgacctgatgaaacatcaaaccaacattagcgagctgaaaagaaccttcttagaaacctcaacagacactgccgtaacgaatgaatgggagaagaggctttccacctcccccgtgcgactggccgccaggcaggaggatgcccccatgatcgaaccacttgtccctgaagagaccaaagaagaaacagagatttctgaaaaagttatatttttgcagcaaggaagcgctccattccttgagtctcagactaagcagtcttctggggaaaagctcatggatggctctgaaatcttcagtttattagagtctgcgcgaaaaccaacagaattcataggaggggttacttctacttctcaaagctgggttcagaaaatggaaaccaagacggagtccagtggaatagagacggaacccaccgtgcaccacctgccgcttagcactgagaaggtggtgcaggagaccgtgttggtggaggagcggcgtgtggtgcacgcgagtggggatgcttcttactcggcgggagacagcggggatgctgcagcacagcccgcattcacaggcattaaagggaaagagggctctgccttgacggagggggctaaagaggaaggaggggaggaggtcgctaaagctgtcctggaacaggaagagacagccgctgcttcccgtgagcgacaagaggagcagagtgcagccatccacatttcagaaactttggaacaaaaacctcattttgagtcctcaacggtgaagacggaaaccatcagttttggcagtgtttcaccgggaggagtaaagctagaaatttccacgaaggaagtgccagtagttcacaccgaaaccaaaaccatcacatatgaatcatcacaggtcgatccaggcacagatctggagccaggcgtgctgatgagtgcacagacgatcacatctgaaaccaccagtaccaccaccactacgcacatcaccaaaactgtgaaagggggcatttcagagacaagaattgagaagcgaatagtcatcacgggggatgcagacattgaccatgaccaggcgctggctcaggcaattaaagaggccaaagagcagcaccctgacatgtcagtgaccaaagtagtggtccataaagagacagagatcacaccagaagatggagaggattgaccagaggaataacttagcttgcacatgaatgcagtcatgcaaaccgttaggaaaaccagagcctatatggagttccctcttctaacccaactgacttgtatctgtccgtggaaaatttcagtccagaagaattgaccttgaccattaataaagacactggcagagagatcttcccataataaagcaatctgattcagcatcactaaaccgataatgcatgaagcaacgataaaattacaaaagagcagcatttttaattttcacaaaatgtctcagttttcagctatacctgcacgttcataaccaacaatataaacc

SEQ ID NO: 318459 - protein, 883 aa, Artificial Sequence
  derived and/or modified sequence
MTTESGSDSESKPDQEAEPQEAAGAQGRAGAPVPEPPKEEQQQALEQFAAAAAHSTPVRREVTDKEQEFAARAAKQLEYQQLEDDKLSQKSSSSKLSRSPLKIVKKPKSMQCKVILLDGSEYTCDVEKRSRGQVLFDKVCEHLNLLEKDYFGLTYRDAENQKNWLDPAKEIKKQVRSGAWHFSFNVKFYPPDPAQLSEDITRYYLCLQLRDDIVSGRLPCSFVTLALLGSYTVQSELGDYDPDECGSDYISEFRFAPNHTKELEDKVIELHKSHRGMTPAEAEMHFLENAKKLSMYGVDLHHAKDSEGVEIMLGVCASGLLIYRDRLRINRFAWPKVLKISYKRNNFYIKIRPGEFEQFESTIGFKLPNHRAAKRLWKVCVEHHTFFRLLLPEAPPKKFLTLGSKFRYSGRTQAQTRRASALIDRPAPYFERSSSKRYTMSRSLDGASVNENHEIYMKDSMSAAEVGTGQYATTKGISQTNLITTVTPEKKAEEERDEEEDKRRKGEEVTPISAIRHEGKTDSERTDTAADGETTATESDQEEDAELKAQELEKTQDDLMKHQTNISELKRTFLETSTDTAVTNEWEKRLSTSPVRLAARQEDAPMIEPLVPEETKQSSGEKLMDGSEIFSLLESARKPTEFIGGVTSTSQSWVQKMETKTESSGIETEPTVHHLPLSTEKVVQETVLVEERRVVHASGDASYSAGDSGDAAAQPAFTGIKGKEGSALTEGAKEEGGEEVAKAVLEQEETAAASRERQEEQSAAIHISETLEQKPHFESSTVKTETISFGSVSPGGVKLEISTKEVPVVHTETKTITYESSQVDPGTDLEPGVLMSAQTITSETTSTTTTTHITKTVKGGISETRIEKRIVITGDADIDHDQE

SEQ ID NO: 318460 - DNA, 936 bp, Artificial Sequence
  derived and/or modified sequence
cgctggcagttgggcggcgcagcgactgctgccgctggcggagctcgggtctggcgaccactccccgcctcccgttcctcctttcctcccccttccccgagattggatcccggggagtttgaaggaaagtctccctgtggggggacctgtgaacagccttacctgtcgcttcccctccgctacttctttagcccaaggaaagtggttccagcaggctgcgaacaagcaccaggaggcgccccaaaagaagggttcggtgattcagattccgagtcgaagccggaccaggaggctgagcctcaggaagccgcgggcgcacaaggaagggccggtgcacctgtgcccgagccaccgaaggaggagcagcagcaagctcttgagcagtttgcagcagcggcagctcacagcactccggtccgccgcgaagttaccgataaagaacaggagttcgccgcgcgagccgcgaagcaactggaatatcagcagctggaggacgataagctgagccagaagtcatcatcctccaagctatctcgaagccctcttaaaatcgtgaaaaagcctaaaagtatgcagtgtaaggttattctgctggatgggagcgagtatacttgcgacgttgaaaaaaggagccgcggacaggtactgtttgataaagtgtgcgaacatctcaatctgctcgagaaagattactttggcctcacgtaccgcgatgcggagaatcagaagaactggctcgaccctgccaaagagataaaaaagcaggtgagaagcggggcttggcactttagtttcaatgtgaagttctatcctcctgacccagctcagttatctgaggacataacaagatattacctgtgcctgcagctacgcgatgatatcgtatcagggcggcttccctgctcattcgtcaccctggctctcctaggcagctag

SEQ ID NO: 318461 - DNA, 936 bp, Artificial Sequence
  derived and/or modified sequence
cgctggcagctgggcggggccgccacagctgctgctgggggcgcccgggtgtggaggcccctgcctgccagccgcagcagcttccccccacccagcccccggctggaccctggagaatttgagggcaagagcccctgtggcggcacctgtgagcagccctacctgagcctgcccctgcgctacttcttcagccccaggaaggtggtgcctgctggctgtgagcaggcccctggaggagcccccaaggagggctttggagacagcgacagcgagagcaagccagaccaggaggccgagccccaggaggccgccggggcccagggccgggccggggcccctgtgcctgagccccccaaggaggagcagcagcaggccctggagcagtttgctgctgctgctgcccacagcacccctgtgcggcgggaggtgacagacaaggagcaggagtttgctgcccgggccgccaagcagctggagtaccagcagctggaggatgacaagctgagccagaagagcagcagcagcaagctgagccgcagccccctgaagatcgtgaagaagcccaagtccatgcagtgcaaggtgatcctgctggatggcagcgagtacacctgtgatgtggagaagaggagccggggccaggtgctgtttgacaaggtgtgtgagcacctgaacctgctggagaaggactacttcggcctgacctacagagatgctgagaaccagaagaactggctggaccctgccaaggagatcaagaagcaggtgcgcagcggggcctggcacttctccttcaacgtgaagttctaccccccagaccctgcccagctgtctgaggacatcacccgctactacctgtgcctgcagctgagagatgacatcgtgtctggccgcctgccctgcagctttgtgaccctggccctgctgggcagctag

SEQ ID NO: 318462 - DNA, 936 bp, Artificial Sequence
  derived and/or modified sequence
cggtggcagctgggcggcgccgccaccgccgccgccggcggcgcccgggtatggcggcccttgcccgcttcaaggtcgtccttcccgccaccctcccctcgattggacccaggggaattcgagggaaagagtccttgcggaggaacgtgcgagcagccatatttaagtctcccacttaggtacttcttcagccccaggaaagtcgtcccagccggatgtgagcaagcccccgggggcgccccgaaagagggattcggcgatagcgactccgagtctaagcccgaccaagaggcggaaccccaggaggccgccggcgctcagggcagagctggggctcctgtgcccgaaccccctaaagaggagcaacagcaggcactggagcagttcgcagcagctgccgcacacagcacgcccgtccggagggaggtgaccgacaaagaacaggagtttgcggcgagggcagcaaaacaacttgagtaccagcaactcgaggatgataagttaagccaaaaaagttcttccagcaaactgagtcgatccccgctcaagattgtgaagaagcccaagtcaatgcagtgtaaagtaattctcctggatggctctgaatatacctgtgacgtggaaaaaaggtcccggggtcaagtgctcttcgacaaggtgtgcgagcatcttaatcttctcgaaaaggactactttggactcacctatagggacgctgagaaccagaagaactggctggacccagctaaagagattaaaaagcaggtccgatccggggcttggcatttctcgtttaacgtcaaattttaccctcctgacccggcccagttgtctgaggatataactcggtactacctctgcctacagctcagagatgacatagttagcggaaggctgccttgcagttttgtcactctcgctctactcggctcatag

SEQ ID NO: 318463 - DNA, 936 bp, Artificial Sequence
  derived and/or modified sequence
cggtggcagcttggtggggctgctacggctgcagcaggcggagctcgcgtctggcgtcccttgcccgctagcaggagctccttcccacctccctctcctcgcctggatcctggagagttcgagggaaagtctccatgtggtggaacatgcgagcagccctatttgagtttacctttaaggtactttttttcacccagaaaagttgtgccggctggttgcgagcaggcgccaggaggcgctcctaaggaggggtttggggatagcgacagcgagtctaagccagaccaggaagcagagcctcaagaggccgctggggctcagggacgagccggtgcacctgtgccagaacctccaaaggaagagcagcaacaggctcttgagcagttcgcggcagccgcagcccattccacacccgtgcgtcgagaggtcaccgacaaagagcaggaattcgcggctcgcgctgccaagcaactggaataccagcaactcgaggatgataaactaagtcaaaagagttcctctagcaaactgtcccggtccccactgaagatcgttaagaagccaaaatccatgcagtgcaaggtaatcctactggatggctccgagtacacttgcgacgttgagaagaggtctcgcggtcaggtgctgttcgataaggtatgcgagcaccttaacctgctggagaaagattacttcggattgacatatcgggatgccgaaaaccagaaaaactggctcgacccggctaaggagatcaagaaacaagtgagaagtggagcgtggcattttagctttaacgtaaaattttatccacccgaccctgcacagttgagcgaggacatcacacggtactatctgtgtctccagctcagagatgacatcgttagtgggaggcttccatgcagcttcgtcacgctggcactgctaggcagttag

SEQ ID NO: 318464 - DNA, 936 bp, Artificial Sequence
  derived and/or modified sequence
agatggcagctgggcggcgccgccaccgccgccgccggcggcgccagagtgtggagacccctgcccgccagcagaagcagcttccccccccccagccccagactggaccccggcgagttcgagggcaagagcccctgcggcggcacctgcgagcagccctacctgagcctgcccctgagatacttcttcagccccagaaaggtggtgcccgccggctgcgagcaggcccccggcggcgcccccaaggagggcttcggcgacagcgacagcgagagcaagcccgaccaggaggccgagccccaggaggccgccggcgcccagggcagagccggcgcccccgtgcccgagccccccaaggaggagcagcagcaggccctggagcagttcgccgccgccgccgcccacagcacccccgtgagaagagaggtgaccgacaaggagcaggagttcgccgccagagccgccaagcagctggagtaccagcagctggaggacgacaagctgagccagaagagcagcagcagcaagctgagcagaagccccctgaagatcgtgaagaagcccaagagcatgcagtgcaaggtgatcctgctggacggcagcgagtacacctgcgacgtggagaagagaagcagaggccaggtgctgttcgacaaggtgtgcgagcacctgaacctgctggagaaggactacttcggcctgacctacagagacgccgagaaccagaagaactggctggaccccgccaaggagatcaagaagcaggtgagaagcggcgcctggcacttcagcttcaacgtgaagttctacccccccgaccccgcccagctgagcgaggacatcaccagatactacctgtgcctgcagctgagagacgacatcgtgagcggcagactgccctgcagcttcgtgaccctggccctgctgggcagctag

SEQ ID NO: 318465 - protein, 330 aa, Artificial Sequence
  derived and/or modified sequence
MPKSGFTKPIQSENSDSDSNMVEKPYGRKSKDKIASYSKTPKIERSDVSKEMKEKSSMKRKLPFTISPSRNEERDSDTDSDPGHTSENWGERLISSYRTYSEKEGPEKKKTKKEAGNKKSTPVSILFGYPLSERKQMALLMQMTARDNSPDSTPNHPSQTTPAQKKTPSSSSRQKDKVNKRNERGETPLHMAAIRGDVKQVKELISLGANVNVKDFAGWTPLHEACNVGYYDVAKILIAAGADVNTQGLDDDTPLHDSASSGHRDIVKLLLRHGGNPFQANKHGERPVDVAETEELELLLKREVPLSDDDESYTGSSYQFAGNAKLSGAS

SEQ ID NO: 318466 - DNA, 993 bp, Artificial Sequence
  derived and/or modified sequence
atgccgaaatctggttttaccaagcccatccaatccgagaattccgattccgatagtaacatggtggagaaaccttatggaaggaagagtaaagataaaattgccagttactcaaaaacaccgaaaattgagcgcagtgacgtttcaaaggagatgaaagaaaaatcttcaatgaaaaggaagctgcccttcactatatcgccctcgaggaatgaggagcgcgactccgacacagattcggatcccggacacacatcagagaactggggcgagcgcttgatcagctcttatcggacctacagtgaaaaggaggggccagaaaagaaaaagaccaagaaagaggcaggcaataagaagagtacacccgtatccatcttattcggctaccccttgtccgagcgcaaacagatggcactgctcatgcagatgacagcacgcgataacagccctgactccactccaaaccatccatcgcagacaacccccgcccaaaaaaagacgccgagcagttcttcaaggcagaaggacaaagttaataagcgtaacgaacgcggagaaaccccactgcatatggccgcaattcgtggcgatgtgaagcaagtcaaagagcttatctctctgggcgctaatgtgaatgtcaaagacttcgccggttggactcccctgcacgaggcttgtaacgttggctattatgacgtcgccaaaattcttatcgctgccggagctgatgtaaacacccagggcctcgatgatgatacacctttacacgattccgcaagctccggccacagagacattgtcaaactcttgcttaggcacggcggcaatccgttccaagccaataaacacggagaacgccctgtggatgtggccgaaactgaagaactggagctactgctcaaacgggaagtgccgttatcggatgacgatgaaagctatacagggtccagctaccagttcgctgggaatgccaaactgagtggggcctcctag

SEQ ID NO: 318467 - DNA, 993 bp, Artificial Sequence
  derived and/or modified sequence
atgcccaagagcggcttcaccaagcccatccagagtgaaaattctgacagcgacagcaacatggtggagaagccctacggcaggaagagcaaggacaagatcgccagctacagcaagacccccaagattgaaagaagtgatgtgtccaaggagatgaaggagaagagctccatgaagaggaagctgcccttcaccatcagccccagcagaaatgaggagcgggacagcgacacagacagcgaccccggccacaccagcgagaactggggcgagcggctcatcagcagctaccgcacctacagcgagaaggagggccctgagaagaagaagaccaagaaggaggccggcaacaagaagagcacccctgtgtccatcctgtttggctaccccctgtctgagaggaagcagatggccctgctgatgcagatgacagcccgggacaacagcccagacagcacccccaaccaccccagccagaccaccccagcccagaagaagacccccagcagcagcagccggcagaaggacaaggtgaacaagagaaatgaaagaggagagacccccctgcacatggccgccatcagaggagatgtgaagcaggtgaaggagctgatcagcctgggcgccaacgtgaatgtgaaggactttgctggctggacccccctgcacgaggcctgcaatgtgggctactatgatgtggccaagatcctgattgctgctggagcagatgtgaacacccagggcctggatgatgacacccccctgcatgacagcgccagcagcggccaccgggacatcgtgaagctgctgctgcggcatggaggcaaccccttccaggccaacaagcatggagagaggcctgtggatgtggccgagacagaggagctggagctgctgctgaagcgggaggtgcccctgagtgatgatgatgagagctacacaggcagcagctaccagtttgctggaaatgccaagctgagcggggccagctag

SEQ ID NO: 318468 - DNA, 993 bp, Artificial Sequence
  derived and/or modified sequence
atgcccaagagcggcttcaccaagcccatccagagcgagaacagcgatagtgattccaatatggtggaaaagccctacggtcggaagtccaaggataaaattgcatcctattcaaagacgccaaagatcgagaggagtgacgtgagcaaggagatgaaagagaaaagttcgatgaaaaggaaactgcccttcactatcagcccttccagaaatgaggaacgcgattctgatacagactccgatcccgggcacacatcagaaaactggggggaaaggctgatttcaagttatagaacatactctgaaaaagagggccccgaaaaaaagaagaccaagaaggaggccggcaacaaaaaatctacaccagtgtccattctcttcggctatcccctgtctgagcgcaaacagatggctttgttaatgcaaatgaccgctagggataattccccggacagcaccccaaaccatccaagtcagacaacacccgcccagaagaagactccaagctctagtagtcgccagaaggataaagtcaacaagcgcaatgaacgcggggaaacgccattgcatatggcggccatcagaggggacgtcaagcaggtcaaggagctgataagcctgggtgcaaatgtgaatgtaaaagactttgccggttggactccactccatgaagcttgcaacgtgggttactacgacgtagctaaaatactcatcgccgctggagctgacgttaatacccagggcctcgacgacgatacgcccctgcacgattcagcaagctcaggacacagggacatcgtcaagctccttctgcggcacggcggaaatcctttccaggccaacaaacacggcgaaaggccagtggatgttgctgagacagaagagttagagttattgcttaaacgcgaggttcctctgtctgacgatgatgagtcctacaccgggtcttcgtaccagttcgctggcaatgctaagctctcaggggctagctag

SEQ ID NO: 318469 - DNA, 1313 bp, Artificial Sequence
  derived and/or modified sequence
gaggaggctgtggtgagagacggaccgagaccggagatgttttcaagcccggctccggcggctttacaggcggctgcagcggcgacgaagacaacgacagcgacggctacgccgaagcactcgttccgggggtgaagcctcctgcgccggccttgcctcggatccaggatgagaagactgataaaagaagaagctagctgaacagctgtaaaatgcccaaatctgggttcacaaaaccaattcagagtgaaaattctgacagtgacagcaatatggtagagaaaccatatggaagaaagagtaaagacaagattgcatcctacagcaaaactccaaaaattgaacgaagtgatgtgagcaaggagatgaaagagaaatcatccatgaaacgtaaacttccttttactattagcccatcaagaaatgaagaacgagattcagacacagattcagatccaggacatacaagtgaaaattggggggagagacttatatcttcttacaggacatactcagagaaagaaggtccagaaaagaagaagacaaaaaaggaagctggaaataagaaatccacaccagttagcattctttttggttatccactctctgagcgaaaacagatggcacttcttatgcagatgacagcaagagacaacagtccagattccacaccaaatcatccatcacaaacaacgcctgcccaaaagaaaactcccagttcttcatctcgacagaaagataaagttaataaaagaaatgaacgtggtgaaactcctttacacatggctgctattcgaggagatgtgaaacaagttaaagaattaataagtttaggggcaaatgtgaatgtgaaagattttgcaggttggacaccactgcatgaagcttgcaatgttggatattacgatgttgctaagatacttatagcagctggagcagatgttaacacacaaggattagatgatgacactccactccatgattctgctagtagtgggcacagagatatagtaaagctgttacttcgtcacggtggaaatccatttcaagctaataaacatggggagcgtccagtggatgtagcagaaacagaggagttggagttgctactaaaaagagaggtgcctttatctgatgatgatgaaagttacacaggatccagctaccaatttgcaggaaatgccaagctcagcggagcaagttgaactataccaagtgtatgcaatcagcaaattccagattgtgagaaagccaaacagccttggttctttaacagatattttgtgtggaaaagaaacagaagaagaccatgt

SEQ ID NO: 318470 - DNA, 993 bp, Artificial Sequence
  derived and/or modified sequence
atgcccaaatcagggttcaccaaaccgattcaaagcgaaaattctgacagtgattccaatatggtggaaaaaccctacgggaggaagagtaaagacaaaatagcatcttattcaaagacaccgaagatagagcgaagcgatgtttcaaaagaaatgaaggagaagtcctctatgaaaaggaagctgccctttacaataagtcctagtagaaatgaagagcgggattctgatactgattcagatcccggacatacctccgagaactggggggagcgattaatctcaagttatcgcacttattcagagaaagaaggtcccgagaagaaaaagaccaaaaaggaggccggaaataaaaagagcacccccgtgagtatcctcttcggataccctctttccgagcgtaaacagatggctttattgatgcaaatgacagcacgggacaatagcccagatagtacccccaaccatccttcccagacgaccccagcccagaagaagactcccagctcctcatctagacagaaagataaagtcaacaaacgtaacgaaaggggtgaaacacctctgcacatggctgctattagaggggatgtcaagcaggtgaaggaattaatctctcttggcgctaacgtgaacgttaaagattttgccggttggacccccttgcacgaagcatgtaatgtcgggtactacgatgtggccaaaatactcattgctgctggtgcagacgtgaatactcaagggctggatgatgacaccccgctccacgattctgcctcctctggccatagggacattgtgaaactcctcttgagacatggtggcaaccctttccaggcgaataagcatggcgaaagaccagttgacgtggctgagactgaggaactcgagctgctgctgaagagagaagtacctctcagtgatgacgatgaatcatacactggaagttcgtaccaatttgccggtaacgcgaagttatcaggagcatcatag

SEQ ID NO: 318471 - DNA, 993 bp, Artificial Sequence
  derived and/or modified sequence
atgcccaagagcggcttcaccaagcccatccagagcgagaacagcgacagcgacagcaacatggtggagaagccctacggcagaaagagcaaggacaagatcgccagctacagcaagacccccaagatcgagagaagcgacgtgagcaaggagatgaaggagaagagcagcatgaagagaaagctgcccttcaccatcagccccagcagaaacgaggagagagacagcgacaccgacagcgaccccggccacaccagcgagaactggggcgagagactgatcagcagctacagaacctacagcgagaaggagggccccgagaagaagaagaccaagaaggaggccggcaacaagaagagcacccccgtgagcatcctgttcggctaccccctgagcgagagaaagcagatggccctgctgatgcagatgaccgccagagacaacagccccgacagcacccccaaccaccccagccagaccacccccgcccagaagaagacccccagcagcagcagcagacagaaggacaaggtgaacaagagaaacgagagaggcgagacccccctgcacatggccgccatcagaggcgacgtgaagcaggtgaaggagctgatcagcctgggcgccaacgtgaacgtgaaggacttcgccggctggacccccctgcacgaggcctgcaacgtgggctactacgacgtggccaagatcctgatcgccgccggcgccgacgtgaacacccagggcctggacgacgacacccccctgcacgacagcgccagcagcggccacagagacatcgtgaagctgctgctgagacacggcggcaaccccttccaggccaacaagcacggcgagagacccgtggacgtggccgagaccgaggagctggagctgctgctgaagagagaggtgcccctgagcgacgacgacgagagctacaccggcagcagctaccagttcgccggcaacgccaagctgagcggcgccagctag

SEQ ID NO: 318472 - protein, 438 aa, Artificial Sequence
  derived and/or modified sequence
MVNVPELLLGQSPSRNDTKIINSEEAQSVNPSSVDENIDSETEKDSLICESKQILPSKTPLPSALDEYEFKDDDDEEINKMIDDRHILRKEQRKENEPEAEKTHLFAKQEKAFYPKSFKSKKQKPSRVLYSSTESSDEEALQNKKISTSCSVIPETSNSDMQTKKEYVVSGEHKQKGKVKRKLKNQNKNKENQELKQEKEGKENTRITNLTVNTGLDCSEKTREEGNFRKSFSPKDDTSLHLFHISTGKSPKHSCGLSEKQSTPLKQEHTKTCLSPGSSEMSLQPDLVRYDNTESEFLPESSSVKSCKHKEKSKHQKDFHLEFGEKSNAKIKDEDHSPTFENSDCTLKKMDKEGKTLKKHKLKHKEREKEKHKKEIEGEKEKYKTKDSAKELQRSVEFDREFWKENFFKSDETEDLFLNMEHESLTLEKIKIGKKHQR

SEQ ID NO: 318473 - DNA, 1317 bp, Artificial Sequence
  derived and/or modified sequence
atggtaaatgtacctgaactcctactcggacagtcaccgagtcggaacgacaccaagattatcaattcagaagaagcacagagcgtgaacccgagttcagtcgacgaaaacatcgattccgaaactgagaaggattctttgatatgtgaaagcaaacagatcctgcctagcaaaacgccgctcccttccgccctggatgagtatgaattcaaagatgacgatgacgaagaaatcaataagatgatcgatgatcgacacattctgagaaaggagcaaagaaaagaaaatgagcctgaggctgaaaagactcatttatttgctaagcaggaaaaagccttctaccctaagtcctttaagtccaagaaacagaaaccctcccgtgttctttattcgtctacggaaagtagcgacgaggaggcactgcagaacaaaaaaatttccacttcttgctccgttattcctgaaacaagcaactcagacatgcagacaaagaaagaatacgtggtgtccggagagcataagcagaagggtaaagtgaagagaaaactaaagaaccagaataagaataaagaaaaccaggaactgaaacaggagaaggagggaaaggagaatacacgcattacaaacttaacagtgaatactgggctcgactgttcagagaaaactcgagaagaaggcaactttcgaaagtcattctcccctaaggatgacacaagccttcatctcttccatatttcaaccggaaagtcccctaagcactcgtgcggccttagcgagaagcagagcacccctctgaagcaggaacacacaaaaacgtgtttatctccaggctcttctgaaatgtcactccagcctgaccttgtccgctacgacaacaccgaatctgaatttttacccgaatcctcctcagtgaagagctgtaagcataaggaaaagagcaagcatcagaaagacttccaccttgagttcggagaaaaatctaatgcgaaaatcaaagacgaagaccactctccgaccttcgaaaatagtgattgtactctaaagaagatggacaaagaaggcaagacacttaaaaagcacaagcttaaacataaagaacgcgaaaaagaaaagcataaaaaggagatcgaaggtgagaaggagaagtataagactaaggatagcgccaaggagctgcaacgatctgtcgaatttgatcgggagttctggaaagagaattttttcaagagcgacgaaaccgaggatctcttcctcaatatggagcatgaatccttaaccctggagaaaattaagattggtaaaaagcatcagcggtag

SEQ ID NO: 318474 - DNA, 372 bp, Artificial Sequence
  derived and/or modified sequence
accgaggatctctttcttaatatggaacacgaatcactcaccctcgagaaaaagagtaagttggaaaaaaatatcaaagacgataagtctaccaaggagaagcatgtgagcaaagagagaaacttcaaggaggagcgagataagatcaagaaggagtctgagaagtccttcagagagggcatgtctgctatcgaagagagcatcggcctccacttggttgagaaagaaatcgatattgagaaacaggaaaaacacataaaggagtccaaggagaaacctgagaaaaggagtcagattaaagagaaagatatcgagaagatggaacgaaagacatttgagaagggcacatcgtacattagaattacacagtag

SEQ ID NO: 318475 - DNA, 1317 bp, Artificial Sequence
  derived and/or modified sequence
atggtgaatgtgcctgagctgctgctgggccagagccccagcagaaatgacaccaagatcatcaacagcgaggaggcccagagcgtgaaccccagctctgtggatgagaacatcgacagcgagacagagaaggacagcctcatctgtgagagcaagcagatcctgcccagcaagacccccctgcccagcgccctggatgaatatgagttcaaggatgatgatgatgaggagatcaacaagatgattgatgacagacacatcctgaggaaggagcagaggaaagaaaatgaacctgaggccgagaagacccacctgtttgccaagcaggagaaggccttctaccccaagagcttcaagagcaagaagcagaagcccagccgggtgctgtacagcagcacagagagcagtgatgaggaggccctgcagaacaagaagatcagcaccagctgcagcgtcatccctgagaccagcaacagcgacatgcagaccaagaaggagtatgtggtgtctggagagcacaagcagaagggcaaggtgaagaggaagctgaagaaccagaacaagaacaaggagaaccaggagctgaagcaggagaaggagggcaaggagaacacccgcatcaccaacctgactgtgaacacaggcctggactgcagcgagaagacccgggaggagggcaacttcaggaagagcttcagccccaaggatgacaccagcctgcacctgttccacatcagcacaggcaagagccccaagcacagctgtggcctgtctgagaagcagagcacccccctgaagcaggagcacaccaagacctgcctgagccctggcagcagcgagatgagcctgcagcctgacctggtgcgctatgacaacacagaaagtgagttcctgcctgagagcagctctgtgaagagctgcaagcacaaggagaagagcaagcaccagaaggacttccacctggagtttggagagaagagcaatgccaagatcaaggatgaggaccacagccccacctttgaaaattctgactgcaccctgaagaagatggacaaggagggcaagaccctgaagaagcacaagctgaagcacaaggagcgggagaaggagaagcacaagaaggagattgaaggagagaaggagaagtacaagaccaaggacagcgccaaggagctgcagaggtctgtggagtttgaccgggagttctggaaggagaacttcttcaagagtgatgaaacagaggacctcttcctgaacatggagcacgagagcctgaccctggagaagatcaagattggcaagaagcaccagaggtag

SEQ ID NO: 318476 - DNA, 372 bp, Artificial Sequence
  derived and/or modified sequence
acagaggacctcttcctgaacatggagcacgagagcctgaccctggagaagaagagcaagctggagaagaacatcaaggatgacaagagcaccaaggagaagcacgtgtccaaggagaggaacttcaaggaggagcgggacaagatcaagaaggagagcgagaagagcttccgggagggcatgtctgccatcgaggagagcatcggcctgcacctggtggagaaggagattgatattgagaagcaggagaagcacatcaaggagagcaaggagaagccagagaagaggagccagatcaaggagaaggacatcgagaagatggagaggaagacctttgagaagggcaccagctacatccgcatcacccagtag

SEQ ID NO: 318477 - DNA, 1317 bp, Artificial Sequence
  derived and/or modified sequence
atggtgaacgtgcccgagctgctgctgggccagagccccagccggaacgacacaaaaattattaattccgaggaagcgcagagcgtcaacccatcttcagttgacgaaaacatagactctgaaactgagaaggacagcttgatctgtgaatctaaacaaattctgccttccaaaactcctcttccgtcagcactggacgagtacgagttcaaggacgatgatgacgaagagatcaacaagatgattgatgacaggcatattctacgcaaggaacagcgtaaggagaatgagcccgaggccgagaaaactcatctatttgccaagcaggaaaaggcgttttatccgaaatctttcaaatctaaaaagcagaagcctagccgggtgttatactccagtacagaatcttcggacgaagaggccttgcaaaacaagaagatatctacctcatgctctgtgattcccgaaaccagcaacagcgatatgcagacaaaaaaggagtacgtggtctctggggagcataaacaaaaggggaaagtgaaacggaagctaaagaatcagaacaagaacaaagaaaaccaggagcttaaacaggagaaagagggcaaggaaaatacacggatcactaacttgaccgtgaacacagggcttgactgctcagagaagacaagagaggagggcaatttcaggaagtctttttcaccaaaagatgatacatcgctgcacctcttccacattagtacaggaaagtcccctaaacatagctgtggactctctgagaagcaaagtacgcctctcaaacaagaacacactaaaacatgtttgtctcccgggagttccgagatgagcctgcaaccagatctggtgcgctatgataacaccgaaagtgaattcctacccgagtctagcagcgtgaaaagctgcaaacacaaggagaagagtaaacatcagaaggattttcatttagagttcggcgagaaatctaacgcaaagatcaaggatgaagatcattcccctacatttgagaactccgattgcacgctgaagaagatggacaaagagggtaaaaccctgaaaaaacataaactaaaacacaaagaacgcgagaaggaaaaacataagaaggaaatcgagggcgagaaggaaaaatacaaaactaaggactccgcgaaggaattacagcgaagtgtggagtttgatcgcgagttctggaaggagaacttttttaagtctgacgagaccgaagatctgttcctgaatatggaacacgaatccctcaccctggaaaagatcaagatcggcaaaaaacaccagcgttag

SEQ ID NO: 318478 - DNA, 372 bp, Artificial Sequence
  derived and/or modified sequence
accgaggacctgttcctgaacatggagcacgagagcctgaccctggaaaagaagagtaagctggagaaaaacattaaggatgataagtccacaaaggagaagcatgtttccaaggagcgtaacttcaaggaagaaagagataaaattaaaaaagagagcgagaagagcttccgggaggggatgagcgcgattgaggagtctattggcctacatctagtcgaaaaagagattgacatcgagaagcaagaaaaacacattaaagagtctaaggagaagccagaaaagagatcccaaataaaggaaaaggacatagagaagatggaaaggaaaacctttgagaaagggacatcttacatcaggatcactcagtag

SEQ ID NO: 318479 - DNA, 2241 bp, Artificial Sequence
  derived and/or modified sequence
ttgcaatgttggatattacgatgttgctaagatacttatagcagctggagcagatgttaacacacaaggattagatgatgacactccactccatgattctgctagtagtgggcacagagatatagtaaagctgttacttcgtcacggtggaaatccatttcaagctaataaacatggggagcgtccagtggatgtagcagaaacagaggagttggagttgctactaaaaagagaggtgcctttatctgatgatgatgaaagttacacagaatatttattttccacatggtgaatgtgcctgaattattgcttggtcaaagtccctcaaggaatgatacaaaaatcatcaattccgaagaggctcaatctgtaaatccttctagtgttgatgaaaatattgactctgaaacagagaaagactctctcatctgtgaaagtaaacagatacttcccagtaaaacacctcttccatctgcccttgatgagtatgagttcaaagatgatgatgatgaagaaattaataagatgattgatgataggcatattcttaggaaagaacaacgaaaagaaaatgaacctgaagcagaaaaaactcatttatttgcaaaacaggagaaagccttctatcctaaatcatttaaaagtaaaaaacaaaagccatctagggtcttatattcaagtactgaaagttctgatgaagaagctcttcagaataaaaagatttctacttcatgttccgtcatccctgaaacatcaaattctgatatgcaaaccaaaaaggaatatgtagtttcaggtgaacacaaacagaaaggcaaagttaaaagaaaattgaaaaatcagaataaaaataaagagaaccaagagctaaagcaagaaaaggaaggaaaagaaaatacaagaataacaaacttgacagtaaatactggactagattgttcagaaaagaccagagaggaggggaactttaggaaatcttttagcccaaaagatgatacttcattacatttatttcatatttccactggtaaatctcccaaacattcttgtggattaagtgaaaaacagtcaacaccactaaaacaagaacatactaaaacatgtttatcaccaggaagttctgaaatgtcattacagcctgatcttgttcggtatgataatacagaatctgaattcttgccagaaagttcaagtgtaaaatcttgtaagcataaggaaaaaagcaaacatcagaaagatttccacttagaatttggtgaaaaatcaaatgccaaaataaaggatgaagatcatagtccaacatttgaaaattcagattgcacactgaaaaaaatggataaagaaggtaaaacattaaaaaaacataaattgaagcataaagagagggaaaaagaaaagcataaaaaagaaattgaaggtgaaaaggaaaaatacaaaactaaggatagtgccaaagaactgcagaggagtgtggaatttgatagagaattttggaaagagaatttttttaaaagtgatgaaactgaagatctctttttaaatatggaacatgaatccttaacattagaaaaaatcaaaattggaaaaaaacatcaaagatgataaatcaaccaaggaaaagcatgtgtcaaaagagaggaactttaaagaggaacgagacaagattaaaaaggaaagcgagaaatcttttagggaggaaaaaataaaagatctaaaagaagagagagaaaacatacccacagataaagactcagaatttacttctttgggtatgagtgccattgaggaatctatagggcttcatttagtggaaaaggaaatagacattgaaaaacaagaaaagcatataaaggaaagtaaagaaaaacctgagaagcgatctcaaattaaagaaaaggacattgagaagatggaaagaaaaacctttgaaaaagaaaagaagataaaacatgagcataagtcagaaaaagacaaattagatcttagtgaatgtgttgataaaataaaagaaaaggacaagctatattcgcatcacacagaaaaatgccataaagaaggtgagaagagcaaaaatactgctgctattaaaaaaactgacgacagagagaaaagtagagaaaagatggataggaaacatgacaaagaaaagcctgaaaaagagaggcatctagcagaaagcaaagaaaagcacttgatggagaaaaaaaataaacaatcagataatagtgaatacagtaaatc

SEQ ID NO: 318480 - DNA, 1317 bp, Artificial Sequence
  derived and/or modified sequence
atggtgaatgtgcctgaacttcttctcggacagtctccctctcggaacgacaccaagatcattaatagcgaagaagcccagtccgtcaacccctcctctgtggatgagaatatagattctgaaacagaaaaggattctctgatctgtgagtccaagcagatattgccatcaaaaacacccctgccgagcgctcttgatgagtatgagtttaaagatgacgatgatgaggagataaacaaaatgatagatgatcggcacattcttaggaaggaacagcggaaggagaacgagcctgaagctgagaaaacgcaccttttcgccaaacaggagaaagccttctaccccaaatccttcaaatccaagaagcagaagccatcccgagtcttgtacagttctaccgagagttctgacgaagaagccttgcaaaacaagaagattagtaccagttgtagcgttattccagaaactagcaactccgacatgcagaccaaaaaggagtacgtggtgtcaggagaacacaagcagaaaggaaaagtgaagcggaaactgaagaaccagaataagaacaaggaaaaccaggagctgaaacaggagaaggaagggaaagagaacactaggattaccaacctcaccgttaatacgggtctggactgctctgagaagaccagggaggaaggcaattttaggaagtctttctcaccgaaagacgacacctccctgcacctttttcacatctcaaccgggaaatcaccaaagcatagctgtggacttagcgagaaacagtctacccccttaaagcaagagcacaccaaaacctgtttgtcacccggttcttctgagatgtctctgcagccagacttggtgaggtacgataacaccgagagtgaatttctccctgagtccagcagcgtaaagagctgcaagcataaagagaagtccaagcatcagaaggattttcaccttgagttcggggaaaaaagcaatgccaagatcaaggacgaagatcactctcctactttcgaaaatagcgactgcaccctcaagaaaatggataaggagggcaaaacattaaagaagcataagctgaagcataaggaacgcgagaaggaaaaacataagaaggaaatcgaaggggagaaggaaaaatataagacaaaagatagcgctaaagaactgcagaggtctgtggaattcgacagagagttttggaaggaaaactttttcaagtctgacgaaaccgaagatctgttcctcaatatggagcacgagtcgctgacgttggagaagatcaaaatcggaaagaagcaccagaggtag

SEQ ID NO: 318481 - DNA, 372 bp, Artificial Sequence
  derived and/or modified sequence
actgaagacttgttcctgaatatggaacatgagtccttgacattggagaaaaaaagcaagctggagaagaatataaaggacgacaaatccactaaggaaaagcacgtcagcaaggagcgaaattttaaagaggaaagggacaaaattaagaaagagtccgagaaatcttttagagaagggatgtctgcaatagaagagagcattgggctacatcttgtcgaaaaagaaatagatatcgagaagcaggaaaagcacattaaagaatctaaagaaaagcctgagaaaagatcacagatcaaggagaaggatattgaaaagatggaacgcaaaacctttgagaaaggaacaagttacatccgcattacacagtag

SEQ ID NO: 318482 - DNA, 1317 bp, Artificial Sequence
  derived and/or modified sequence
atggtgaacgtgcccgagctgctgctgggccagagccccagcagaaacgacaccaagatcatcaacagcgaggaggcccagagcgtgaaccccagcagcgtggacgagaacatcgacagcgagaccgagaaggacagcctgatctgcgagagcaagcagatcctgcccagcaagacccccctgcccagcgccctggacgagtacgagttcaaggacgacgacgacgaggagatcaacaagatgatcgacgacagacacatcctgagaaaggagcagagaaaggagaacgagcccgaggccgagaagacccacctgttcgccaagcaggagaaggccttctaccccaagagcttcaagagcaagaagcagaagcccagcagagtgctgtacagcagcaccgagagcagcgacgaggaggccctgcagaacaagaagatcagcaccagctgcagcgtgatccccgagaccagcaacagcgacatgcagaccaagaaggagtacgtggtgagcggcgagcacaagcagaagggcaaggtgaagagaaagctgaagaaccagaacaagaacaaggagaaccaggagctgaagcaggagaaggagggcaaggagaacaccagaatcaccaacctgaccgtgaacaccggcctggactgcagcgagaagaccagagaggagggcaacttcagaaagagcttcagccccaaggacgacaccagcctgcacctgttccacatcagcaccggcaagagccccaagcacagctgcggcctgagcgagaagcagagcacccccctgaagcaggagcacaccaagacctgcctgagccccggcagcagcgagatgagcctgcagcccgacctggtgagatacgacaacaccgagagcgagttcctgcccgagagcagcagcgtgaagagctgcaagcacaaggagaagagcaagcaccagaaggacttccacctggagttcggcgagaagagcaacgccaagatcaaggacgaggaccacagccccaccttcgagaacagcgactgcaccctgaagaagatggacaaggagggcaagaccctgaagaagcacaagctgaagcacaaggagagagagaaggagaagcacaagaaggagatcgagggcgagaaggagaagtacaagaccaaggacagcgccaaggagctgcagagaagcgtggagttcgacagagagttctggaaggagaacttcttcaagagcgacgagaccgaggacctgttcctgaacatggagcacgagagcctgaccctggagaagatcaagatcggcaagaagcaccagagatag

SEQ ID NO: 318483 - DNA, 372 bp, Artificial Sequence
  derived and/or modified sequence
accgaggacctgttcctgaacatggagcacgagagcctgaccctggagaagaagagcaagctggagaagaacatcaaggacgacaagagcaccaaggagaagcacgtgagcaaggagagaaacttcaaggaggagagagacaagatcaagaaggagagcgagaagagcttcagagagggcatgagcgccatcgaggagagcatcggcctgcacctggtggagaaggagatcgacatcgagaagcaggagaagcacatcaaggagagcaaggagaagcccgagaagagaagccagatcaaggagaaggacatcgagaagatggagagaaagaccttcgagaagggcaccagctacatcagaatcacccagtag

SEQ ID NO: 318484 - protein, 976 aa, Artificial Sequence
  derived and/or modified sequence
MHSLALQNTLHERTWSDEKNLMQQELRSLKQNIFLFYVKLRWLLKHWRQGKQMEEEGEEFTEGEHPETLSRLGELGVQGGHQADGPDHDSDRGCGFPVGEHSPHSRVQIGDHSLRLQTADRGQPHKQVVENQQLFSAFKALLEDFRAELREDERARLRLQQQYASDKAAWDVEWAVLKCRLEQNCCGYPRINIEEETLGFTRLPAGSTVKTLKSLGLQRLELEEKTENKLGELGSSAESKGALKKEREVHQKLLADSHSLVMDLRWQIHHSEKNWNREKVELLDRLDRDRQEWERQKKEFLWRIEQGSLRMPRPVAMWPCADADSIPFEDRPLSKLKESDRCSASENLYLDALSLDDEPEEPPAHRPEREFRNRLPEEEENHKGNLQRAVSVSSMSEFQRLMDISPFLPEKGLPSTSSKEDVTPPLSPDDLKYIEEFNKSWDYTPNRGHNGGGPDLWADRTEVGRAGHEDSTEPFPDSSWYLTTSVTMTTDTMTSPEHCQKQPLRSHVLTEQSGLRVLHSPPAVRRVDSITAAGGEGPFPTSRARGSPGDTKGGPPEPMLSRWPCTSPRHSRDYVEGARRPLDSPLCTSLGFASPLHSLEMSKNLSDDMKEVAFSVRNAICSGPGELQVKDMACQTNGSRTMGTQTVQTISVGLQTEALRGSGVTSSPHKCLTPKAGGGATPVSSPSRSLRSRQVAPAIEKVQAKFERTCCSPKYGSPKLQRKPLPKADQPNNRTSPGMAQKGYSESAWARSTTTRESPVHTTINDGLSSLFNIIDHSPVVQDPFQKGLRAGSRSRSAEPRPELGPGQETGTNSRGRSPSPIGVGSEMCREEGGEGTPVKQDLSAPPGYTLTENVARILNKKLLEHALKEERRQAAHGPPGLHSDSHSLGDTAEPGPMEELPCSALAPSLEPCFSRPERPANRRPPSRWAPHSPTASQPQSPGDPTSLEEHGGEEPPEEQPHRDASLHGLSQYNSL

SEQ ID NO: 318485 - DNA, 2931 bp, Artificial Sequence
  derived and/or modified sequence
atgcacagcctggccctgcagaacaccctgcacgagagaacctggagcgacgagaagaacctgatgcagcaggagctgagaagcctgaagcagaacatcttcctgttctacgtgaagctgagatggctgctgaagcactggagacagggcaagcagatggaggaggagggcgaggagttcaccgagggcgagcaccccgagaccctgagcagactgggcgagctgggcgtgcagggcggccaccaggccgacggccccgaccacgacagcgacagaggctgcggcttccccgtgggcgagcacagcccccacagcagagtgcagatcggcgaccacagcctgagactgcagaccgccgacagaggccagccccacaagcaggtggtggagaaccagcagctgttcagcgccttcaaggccctgctggaggacttcagagccgagctgagagaggacgagagagccagactgagactgcagcagcagtacgccagcgacaaggccgcctgggacgtggagtgggccgtgctgaagtgcagactggagcagaactgctgcggctaccccagaatcaacatcgaggaggagaccctgggcttcaccagactgcccgccggcagcaccgtgaagaccctgaagagcctgggcctgcagagactggagctggaggagaagaccgagaacaagctgggcgagctgggcagcagcgccgagagcaagggcgccctgaagaaggagagagaggtgcaccagaagctgctggccgacagccacagcctggtgatggacctgagatggcagatccaccacagcgagaagaactggaacagagagaaggtggagctgctggacagactggacagagacagacaggagtgggagagacagaagaaggagttcctgtggagaatcgagcagggcagcctgagaatgcccagacccgtggccatgtggccctgcgccgacgccgacagcatccccttcgaggacagacccctgagcaagctgaaggagagcgacagatgcagcgccagcgagaacctgtacctggacgccctgagcctggacgacgagcccgaggagccccccgcccacagacccgagagagagttcagaaacagactgcccgaggaggaggagaaccacaagggcaacctgcagagagccgtgagcgtgagcagcatgagcgagttccagagactgatggacatcagccccttcctgcccgagaagggcctgcccagcaccagcagcaaggaggacgtgaccccccccctgagccccgacgacctgaagtacatcgaggagttcaacaagagctgggactacacccccaacagaggccacaacggcggcggccccgacctgtgggccgacagaaccgaggtgggcagagccggccacgaggacagcaccgagcccttccccgacagcagctggtacctgaccaccagcgtgaccatgaccaccgacaccatgaccagccccgagcactgccagaagcagcccctgagaagccacgtgctgaccgagcagagcggcctgagagtgctgcacagcccccccgccgtgagaagagtggacagcatcaccgccgccggcggcgagggccccttccccaccagcagagccagaggcagccccggcgacaccaagggcggcccccccgagcccatgctgagcagatggccctgcaccagccccagacacagcagagactacgtggagggcgccagaagacccctggacagccccctgtgcaccagcctgggcttcgccagccccctgcacagcctggagatgagcaagaacctgagcgacgacatgaaggaggtggccttcagcgtgagaaacgccatctgcagcggccccggcgagctgcaggtgaaggacatggcctgccagaccaacggcagcagaaccatgggcacccagaccgtgcagaccatcagcgtgggcctgcagaccgaggccctgagaggcagcggcgtgaccagcagcccccacaagtgcctgacccccaaggccggcggcggcgccacccccgtgagcagccccagcagaagcctgagaagcagacaggtggcccccgccatcgagaaggtgcaggccaagttcgagagaacctgctgcagccccaagtacggcagccccaagctgcagagaaagcccctgcccaaggccgaccagcccaacaacagaaccagccccggcatggcccagaagggctacagcgagagcgcctgggccagaagcaccaccaccagagagagccccgtgcacaccaccatcaacgacggcctgagcagcctgttcaacatcatcgaccacagccccgtggtgcaggaccccttccagaagggcctgagagccggcagcagaagcagaagcgccgagcccagacccgagctgggccccggccaggagaccggcaccaacagcagaggcagaagccccagccccatcggcgtgggcagcgagatgtgcagagaggagggcggcgagggcacccccgtgaagcaggacctgagcgccccccccggctacaccctgaccgagaacgtggccagaatcctgaacaagaagctgctggagcacgccctgaaggaggagagaagacaggccgcccacggcccccccggcctgcacagcgacagccacagcctgggcgacaccgccgagcccggccccatggaggagctgccctgcagcgccctggcccccagcctggagccctgcttcagcagacccgagagacccgccaacagaagaccccccagcagatgggccccccacagccccaccgccagccagccccagagccccggcgaccccaccagcctggaggagcacggcggcgaggagccccccgaggagcagccccacagagacgccagcctgcacggcctgagccagtacaacagcctgtag

SEQ ID NO: 318486 - DNA, 6065 bp, Artificial Sequence
  derived and/or modified sequence
gagtgttttcagaagtgggaatagcaggcgaggtcttgaggcctgaagaagcaaagcgtcgcttagtcaatgctgagatgcgtcttgtggaacagaatttttgggacatttgcaggatgagttagatgaactccgtgctgagatggaagagatgagagacagttatttagaggaagatgtttaccagctgcaggaacttcggcgagaactggaccgcgctaataaaaactgccgaatcctgcagtaccgtcttcggaaagccgagcagaaaagcctgaaagtggctgagacgggtcaggtggatggtgagcttattcgaagcctggagcaggacttgaaggtagccaaagatgtatctgtcagattgcaccacgaacttaagacggtggaggaaaagcgcgctaaagctgaggatgaaaacgaaactctccgacagcagatgattgaagtggaaatatccaaacaggccctccagaatgagctggagagactgaaagagagttccctaaaaagaagaagcactcgggaaatgtacaaggagaagaaaacctttaaccaggatgacagtgccgatttgaggtgccagctccagtttgccaaagaggaagccttcctgatgcgcaaaaagatggccaagctaggaagggagaaggacgagctggagcaggagctccagaagtacaagtccctctatggggatgtggacagtcccctgcccacgggggaagcaggcgggccccccagcacccgggaggccgagctgaagctgcggctaaagctggtggaggaggaagccaacatcttgggccggaagatcgtggagctggaggtggagaaccgtggcctcaaggcagagatggaggacatgcggggccagcaggagcgggagggcccgggtcgggaccacgcacccagcattcctacctcacccttcggtgactccctggagtcctccactgagctccgccgccacctgcagtttgtagaagaggaagcggagttgctccggaggtccatctccgagatcgaagaccacaaccggcaactgacccacgagctcagcaagtttaagtttgagcctccccgggagccgggctggctaggagagggtgcaagtcctggtgccgggggtggggcccccctgcaggaggagctgaagtcagccaggctgcagatcagcgagctcagcggcaaggtgctcaaactgcagcacgagaaccacgcgctgctgtccaacatccagcgctgcgacctggcagcccacctggggctgcgtgcccccagtccccgggacagcgatgccgagagtgatgcgggcaagaaggagagtgatggggaggagagccgcctgccccagcccaagcgggaagggcctgttggcggggagagtgactcggaggaaatgtttgagaagacgtcgggcttcgggagcgggaagccatcggaggccagcgagccatgccccacggagctcctgaaggcccgggaggactctgagtacctagtgaccctaaaacacgaggcccagcggctagagcggacggtggagcgcctcatcacggacaccgacagcttcctccatgatgcggggctgcggggtggtgcgcccttaccggggcctggcctccagggcgaagaggagcagggtgagggggaccagcaggagccccagctgctggggaccatcaacgccaagatgaaggctttcaagaaagagctgcaggccttcctggagcaggtgaaccgcattggggatggcctatcccccttgccccacctcacagagtcctctagcttcctctccactgtgacttccgtgtcccgggactcccccatcgggaacctggggaaggagctgggcccagacttgcagtccagactgaaagagcagctggagtggcagctcgggccggcccgaggggacgagcgggagagcctgcgcctccgagccgcgcgggagctgcaccgccgcgcagacggggacaccgggagccacgggctgggaggccagacctgcttcagcctggagctcaggggcccccccgttttacctgagcagagtgtatccatagaggagctacagggtcagctcgtgcaggcggccagactgcatcaagaggagacagagacatttacaaacaagatccataagatggaggaggagcacctctatgccttgaggtggaaagaactggaaatgcacagcctggctttgcaaaacaccctccatgagcgaacctggagtgatgagaagaatctgatgcagcaggagctccggtccttgaagcagaacattttcctcttctacgtcaaactcaggtggctgctgaaacactggcggcaagggaagcagatggaggaggaaggagaggagttcactgagggtgaacatccagagaccctctccaggctcggggagcttggagtccaggggggtcaccaggcggatggcccagaccacgacagtgaccgaggctgtggctttccagtgggggagcactccccacactcccgggtgcagattggagatcacagcttgcggctgcagaccgcggacaggggacagccccacaaacaggtggtggaaaaccagcagctgttcagcgccttcaaggccttgctggaggacttccgtgcggagctgcgggaggatgagcgtgcccgactacggctgcagcagcaatatgccagcgacaaggcggcctgggacgtggagtgggccgtgctcaagtgccgtctggaacagaattgttgtggatatcccagaattaacattgaggaggagactttaggcttcaccaggctgccagctgggtccacggtaaaaacgttgaagagccttgggttgcagagattggagctggaagagaagactgagaacaagttgggagaactaggctcctccgctgagagcaagggggccttgaagaaggagagagaggtgcaccagaagctcctggcagacagtcacagcctggtcatggacctgcgctggcagatccatcacagcgagaagaactggaaccgggagaaggtggaacttctcgaccgcctggacagagatcggcaggagtgggagcggcagaagaaggaattcttgtggaggatagagcagggaagcctccgcatgccccgtccagtggccatgtggccttgtgcagatgctgactccatcccgtttgaagaccggccgctgtccaagctgaaggagtcggacaggtgctcggccagtgagaatctctacctggatgccttgtccctggatgacgagccagaagagccaccagcccacaggcccgagagggagttcaggaaccgcctccctgaggaagaagaaaatcacaaaggaaatcttcaaagggcggtgtccgtgtcctccatgtctgagttccagcgtctaatggacatctcccccttcctgcctgagaagggcctgccgtccaccagcagcaaggaggatgtcaccccacccctgtctccagacgacctcaagtacatcgaggagttcaacaagagctgggactacacacccaacaggggccacaatggtggggggccggacctttgggccgacaggaccgaggtggggcgggcagggcacgaggacagcacagagcctttccccgactcctcctggtacctaaccacaagtgtcaccatgaccacggacaccatgaccagcccagagcactgccagaagcagccactgcggagccacgtcctcaccgagcagtcggggttgcgcgtgttacacagcccgcctgccgtgcgcagggtcgacagcatcacggcggcaggtggtgagggtccctttcccacaagcagagccagagggagcccgggagacaccaagggaggccctccagaacccatgctcagcaggtggccttgcacctcccccaggcactcccgggactatgtggagggggcacggcgcccccttgatagtcccctctgtacctccctggggtttgcctccccactgcacagcctggagatgtccaagaacttgagtgatgacatgaaggaggtggccttctctgtcaggaatgccatctgctccggccctggcgagctgcaagtcaaggacatggcctgccagaccaatgggtcccggacgatggggacccagactgttcagaccatcagtgtgggcttgcagactgaagccctgcgtggcagcggtgtcaccagcagcccccacaagtgtctcactccaaaggctgggggcggtgctacacccgtgtcgtctccttcccggagccttaggagcagacaggtggcccctgccatcgagaaggtgcaggccaagtttgaacgcacatgctgctcccccaagtatggttctcccaagctgcagaggaagcccctccccaaagccgaccagccaaataacaggacgtcaccagggatggcccagaaagggtacagtgagtcagcctgggcccgctccaccaccacaagggagagccccgtgcacaccaccattaatgatggcctctccagcctcttcaacatcattgaccacagccccgtggtgcaggaccccttccagaaggggctgcgggccggcagtcggtctcgctcagcagagccccgaccagagctgggcccaggccaggaaacaggcaccaattcccgaggaaggtcgcctagccccattggggtggggtcagagatgtgcagggaggaagggggagagggcacgccagtgaagcaggacttatctgctccccctggctacacgctcactgagaacgtggcccggatcctcaacaagaagctgctggaacatgccttaaaggaggagaggaggcaggctgcccacgggcccccgggtctccacagtgacagccactcgctgggggacacagccgagccagggcccatggaggaactaccttgttctgcactagctccatccctagagccctgcttctccaggcccgagagaccagcaaaccgtcgccctccgtcccgttgggccccacattcccccactgcctcacagcctcagtcacccggagacccgacgtccttggaggagcatggtggcgaggagccgcccgaggagcagccacaccgagatgcaagcttgcatggattatcacagtataattcactgtaatttgcataaccacaccatcaccatgaacaaaactctgcccaacaggagagatctagttttctcaaggtcaaagaatgttttttaaaaacacaaagctgctgaatgttcaacctgtgaaactgagatgtttctagaatgaaacagtaaatgtgcctgtaataacttaatttttttcatagctcagaaaactatttttgtctccatcttttttacacacagtatattaaacgaaaaggtaaataaggtataaatagatttaaaaaataaaagttttaaaaaatgtacattttaagagattctgaacaccctcgctgtcaatacctgactgcctctgttaaatttgcactgttacattttggttcagtttatttccatgttgaattagagtggattaagttaattttattttgtcagtgttactgttttttacgaattttttaatgcttcagactgtctgattcagtgaactttttgtagtgaaaaagccatgaagccagtagacaagacagatattctgtatgctggaggggatacaggatgattttgaaaaggtacaaagtcctcagtgggcttagaaaattcactgtatgatccttatattatcctacttggcttgcacgtcttcgggtgcatgtatataccgctactgtgtcctcgccatcacctaaatgtgactcagtctgttccactgtaatatgttgtgaatttccttgtactgtacttttattgttggtcttcttgcatcgatgatccaacagcaacaccatttttaaattattgtgaaaagattaactggcaatgtacagagtttactcaaagttttcttaagggaaaacactacaaaaagtcacaaggataccaaatggaaacacatgatgatgcctctgggtctgtatgagaccgtgatgaagtagaaataaagcccttctgagatggc

SEQ ID NO: 318487 - DNA, 2931 bp, Artificial Sequence
  derived and/or modified sequence
atgcacagtttggcattgcagaatactctgcacgagaggacttggtccgacgagaagaatctgatgcaacaggaactccggagcctgaagcagaacatcttcctcttctacgtgaaactccggtggctgttgaagcactggcgccagggaaaacagatggaagaagaaggagaggaatttacagaaggtgagcaccccgaaacgctgagtcgcctgggagagctcggcgttcaaggagggcatcaagccgacggccccgatcacgactccgaccgtggatgtgggttccccgtgggtgagcattccccccactctagggtgcagattggcgatcactctttaaggctacagacagccgacaggggccagcctcataagcaggtggttgagaaccagcagctcttttccgccttcaaggccctgcttgaagatttccgggccgaactgcgtgaagacgagcgggccagattgcgtttgcagcagcagtacgctagcgataaagccgcctgggacgttgaatgggccgtgctgaaatgccgcttggaacaaaattgctgtggttaccccaggatcaatattgaggaggaaacactgggcttcacaagactgcccgccggcagcaccgttaagaccctgaaatccttagggctccagcggttagaactggaggagaaaaccgaaaataagcttggggagctcggcagtagcgccgagagcaagggagctctaaagaaggagcgagaagtccatcaaaagctgctggcagattcccatagcctagttatggaccttaggtggcagatccatcatagcgagaagaattggaacagggagaaagttgagctgttagatagactggaccgcgataggcaagagtgggaacgtcaaaagaaggagtttctgtggcgaattgagcaggggtcactgcgaatgccccggcccgtggctatgtggccctgcgccgatgctgacagtataccttttgaggaccgcccactgagcaagctgaaggagagcgatcgctgtagtgcatccgagaacctgtatctggatgccctgtctctcgatgacgagcctgaggagccccctgcacacaggcccgagcgggagttccgaaacaggctgcccgaagaggaagagaaccacaaaggtaacttacaaagagctgtgagcgtgtccagcatgtccgagtttcaacgtctcatggatattagccctttccttcctgaaaagggtctgccctctacctctagtaaggaagacgttacacctcccctatccccagatgacctcaagtacatagaggaattcaataaatcctgggattacacccccaacagaggccacaacgggggcggacccgatctgtgggccgataggaccgaagtcggacgggccggacacgaagacagcactgaaccgttcccagattcaagttggtacctgaccacttcagtgacaatgaccaccgacactatgacatcacccgagcactgtcagaagcaacccctgcgttctcacgtactgacggagcagtctgggctccgagtactgcactcaccgcctgctgtcaggcgtgtggactccatcacagctgcgggcggcgaaggcccctttcccactagtcgggcaagagggtcccctggcgatactaagggtggcccacctgaacccatgcttagccggtggccttgcacctcgcctcgccactccagagattatgtggaaggagctcgacgccccttggactcacctttgtgcacaagcctagggttcgccagtcctctgcacagccttgaaatgtccaaaaatctgagcgacgatatgaaagaggtggctttcagtgttaggaacgccatctgttccggtcctggcgaattacaggttaaggacatggcctgtcagaccaacgggtcgagaacgatggggacccagactgtacagaccatcagtgtaggcctgcagaccgaggctttgaggggatcaggcgtcactagttctcctcataaatgtttgacacctaaagccggcggcggcgctacgcccgtctcaagtcccagcaggagcctgcgtagccgccaggtggcacctgccatagagaaggtgcaggcaaaatttgagcgcacatgctgtagcccaaagtatggcagccccaagctccagaggaagccactgcccaaggccgaccagcccaataacagaacaagccccgggatggcacaaaagggctactctgagtctgcttgggctaggtctaccacgacaagggagagtcctgttcatacaactatcaatgatgggctgagctcactgtttaacatcatagatcactcacccgtagtccaggaccctttccagaaaggcctcagggcaggaagccggtctcgtagtgctgaacctaggcctgagctgggtcctgggcaggaaaccggcactaattcccggggccgctctcctagtccaattggagtcggctctgaaatgtgtagagaagaaggtggtgaaggcacgcccgtgaagcaagacctgagcgctccaccgggctacaccctgacagagaatgtggcacggatcctgaacaagaagctgctggagcacgctttgaaagaagaaagacggcaagccgcccacggaccacccggactacacagtgactcacactctctcggcgacacagctgaacctggcccaatggaagaactgccatgttcagccctggctccgagcctggaaccttgtttttcccgtcccgaacgacccgccaataggaggccaccatcccgatgggcgccccattcacctactgcctcgcaaccacagtctcccggggatccaactagcctggaggaacatggaggggaggaaccgccagaagagcagccacacagagatgcatccctgcacggcctcagtcagtataacagcttgtag

SEQ ID NO: 318488 - DNA, 2931 bp, Artificial Sequence
  derived and/or modified sequence
atgcacagcctggccctgcagaacaccctgcacgagaggacctggagcgatgagaagaacctgatgcagcaggagctgcggagcctgaagcagaacatcttcctgttctacgtgaagctgcgctggctgctgaagcactggaggcagggcaagcagatggaggaggagggggaggagttcacagaaggagagcaccctgagaccctgagccggctgggggagctgggcgtgcagggcggccaccaggctgatggccctgaccatgacagcgaccggggctgcggcttccctgtgggggagcacagcccccacagccgggtgcagattggagaccacagcctgcggctgcagacagctgaccggggccagccccacaagcaggtggtggagaaccagcagctgttcagcgccttcaaggccctgctggaggacttccgggcagagctgagagaagatgagcgggcccggctgcggctgcagcagcagtatgccagtgacaaggccgcctgggatgtggagtgggccgtgctgaagtgccgcctggagcagaactgctgcggctacccccgcatcaacatcgaggaggagaccctgggcttcacccggctgcctgctggcagcacagtgaagaccctgaagagcctgggcctgcagaggctggagctggaggagaagacagagaacaagctgggggagctgggcagcagcgctgagagcaagggggccctgaagaaggagcgggaggtgcaccagaagctgctggccgacagccacagcctggtgatggacctgcgctggcagatccaccacagcgagaagaactggaaccgggagaaggtggagctgctggaccggctggaccgggaccggcaggagtgggagcggcagaagaaggagttcctgtggagaattgagcagggcagcctgaggatgcccaggcctgtggccatgtggccctgtgctgatgctgacagcatcccctttgaagatcggcccctgagcaagctgaaggagagtgaccgctgcagcgccagcgagaacctgtacctggatgccctgagcctggatgatgagcctgaggagcccccagcccacaggcctgagcgggagttcaggaaccggctgcctgaggaggaggagaaccacaagggcaacctgcagagagctgtgtctgtgtcctccatgtctgagttccagaggctgatggacatcagccccttcctgcctgagaagggcctgcccagcaccagcagcaaggaggatgtgaccccacccctgagcccagatgacctgaagtacatcgaggagttcaacaagtcctgggactacacccccaacagaggccacaacggcggcggccctgacctgtgggccgacagaacagaggtgggccgggccggccacgaggacagcacagagcccttcccagacagctcctggtacctgaccacctctgtgaccatgaccacagacaccatgaccagccctgagcactgccagaagcagcccctgcggagccacgtgctgacagagcagagcggcctgcgggtgctgcacagccccccagctgtgagaagagtggacagcatcacagctgctggaggagagggccccttccccaccagccgggcccggggcagccctggggacaccaagggcggccccccagagcccatgctgagccgctggccctgcaccagccccaggcacagccgggactatgtggagggcgcccggcggcccctggacagccccctgtgcaccagcctgggctttgccagccccctgcacagcctggagatgagcaagaacctgagtgatgacatgaaggaggtggccttctctgtgagaaatgccatctgcagcggccctggagagctgcaggtgaaggacatggcctgccagaccaacggcagcaggaccatgggcacccagacagtgcagaccatctctgtgggcctgcagacagaggccctgcggggcagcggcgtgaccagcagcccccacaagtgcctgacccccaaggccggcggcggggccacccctgtgagcagccccagccgcagcctgcggagccggcaggtggccccagccatcgagaaggtgcaggccaagtttgagaggacctgctgcagccccaagtatggcagccccaagctgcagaggaagcccctgcccaaggctgaccagcccaacaacagaaccagccctggcatggcccagaagggctacagcgagagcgcctgggcccggagcaccaccacccgggagagccctgtgcacaccaccatcaatgatggcctgagcagcctcttcaacatcatcgaccacagccctgtggtgcaggaccccttccagaagggcctgcgggccggcagccgcagccgctctgctgagcccaggcctgagctgggccctggccaggagaccggcaccaacagccggggccgcagccccagccccatcggcgtgggcagcgagatgtgccgggaggagggcggggagggcacccctgtgaagcaggacctgagcgcccctcctggctacaccctgacagaaaatgtggcccgcatcctgaacaagaagctgctggagcacgccctgaaggaggagcggcggcaggccgcccacggccccccaggcctgcacagcgacagccacagcctgggggacacagctgagcccggccccatggaggagctgccctgcagcgccctggcccccagcctggagccctgcttcagcaggcctgagaggcctgccaacagaagaccacccagccgctgggccccccacagccccacagccagccagccccagagccctggggaccccaccagcctggaggagcacggcggggaggagcccccagaggagcagccccacagagatgccagcctgcacggcctgagccagtacaacagcctgtag

SEQ ID NO: 318489 - DNA, 2931 bp, Artificial Sequence
  derived and/or modified sequence
atgcacagcctggccctgcagaacaccctgcacgagcggacctggagtgacgagaagaatctcatgcaacaggaattgagaagcctaaagcaaaatatcttcttgttctacgtgaagctgcggtggctgctcaagcactggcggcagggcaagcagatggaagaggaaggcgaggagttcaccgaaggcgagcaccccgagacgctgtctagacttggtgaactgggagtgcagggcggacaccaagcagacgggcccgatcatgatagcgaccggggttgtggctttcccgttggcgaacatagcccccatagtagggtgcagatcggggaccattctttgaggctacagaccgctgataggggccagccacacaagcaagtagtggagaaccagcaactgttttcagcattcaaagctctgcttgaagattttagagccgaactgcgcgaagatgaacgggctaggcttagactgcaacagcagtacgcctctgacaaggcagcctgggacgtggagtgggctgtcctgaagtgtcggcttgagcagaactgctgtggatatccacgaatcaatattgaagaagaaacccttggctttactagattgccggcagggtccaccgttaaaacactgaaaagcctaggcctgcagaggctcgaactggaagaaaaaaccgaaaataagctaggtgagctcggctcatctgccgaaagtaaaggagccttaaaaaaagagcgcgaggtgcatcaaaaactgctcgccgattcacactccctagtgatggacctgcgctggcaaatacatcattcggaaaagaactggaatagggagaaagtggagctgcttgacagactcgacagggatcgtcaggagtgggaaaggcagaaaaaggagtttctttggcggatcgaacagggcagcttacgaatgccgagacctgtcgccatgtggccctgcgcggacgccgactcaatccctttcgaagacagacctctgtcaaaactgaaggagagcgataggtgttctgctagcgaaaacctttatctggacgcgcttagtcttgacgatgaacctgaggagccgcccgcgcataggcctgaaagggaattcagaaatagactgccggaggaagaagagaaccacaagggaaatttgcagcgagccgtcagcgtgtcgtcaatgagcgagttccagaggctgatggatatctctccctttctgccagaaaaggggctgccctccacttcttctaaggaagacgtcacaccgccactgagcccagacgatcttaagtacattgaagaattcaacaaaagctgggattacacacctaacagaggacacaacggaggcggccccgatctctgggctgaccggactgaagtcggacgcgccggacacgaagactccaccgaaccttttcccgactcttcctggtaccttacaacctccgtgacgatgaccacagatactatgacctcaccggagcattgtcaaaagcaacctctccggtctcacgtgttaactgagcagtccggactgcgcgttttgcatagcccccccgcagtccggcgcgtcgattcaattactgctgccggtggggagggaccattcccaaccagccgggcccgcgggagtccgggagacaccaaaggaggcccgcccgagcccatgctctcacgctggccttgtacctcgccacgccattcccgggattatgtggagggcgcccgccggcctctggatagccctttgtgcacatcccttggatttgcctctcctctgcacagtctggaaatgtctaaaaacctctcagacgacatgaaagaagttgcgttttccgtgcggaacgcaatctgcagcggacctggcgaattacaggtgaaggacatggcgtgtcaaacaaacggtagcaggactatggggactcagacggtacaaactatctctgtcgggctgcagacagaggcgctgcggggttctggggttacttcatccccacacaaatgtctgacaccaaaggccggcggaggggctacccctgttagtagcccatcacgctccttacgatcgcgacaagttgcgccggcaatcgagaaggtgcaggccaaatttgagcgaacttgttgctctccgaagtatgggtccccaaaattgcaaagaaaaccactccccaaagccgatcaaccaaacaataggacctctcccggaatggcgcagaaagggtactcagaatcagcctgggcacgatcaaccacaaccagagagtctcctgtgcatacaaccatcaatgacgggctgagttccctcttcaacatcatcgatcacagccccgttgtgcaggacccatttcagaagggtctgagagccggaagccgcagtcgttccgctgagcctcgccccgagctcggaccgggacaggaaactgggacgaactctcgaggcagatctccaagtcccatcggagtgggctctgaaatgtgtagagaggaaggcggagagggcactcctgtcaagcaggacctcagcgcgcccccgggttacaccttgactgagaacgtagcacgtatccttaataagaagctgctcgaacacgcactcaaagaagaaagacgccaggcggctcacggcccccctggtttgcactcagactcccacagcctgggggacaccgctgaacccggccctatggaagagctcccatgctccgccctggccccttccctggagccttgctttagccgcccagaaaggcccgcaaatcgccgtccgccatccagatgggcaccacatagcccaaccgcatcccagccgcagagtccaggggacccgacctcccttgaagaacacggaggggaagaaccgcctgaggaacaacctcatagagacgcctcacttcacggtctgagtcagtacaactctctctag

SEQ ID NO: 318490 - DNA, 2931 bp, Artificial Sequence
  derived and/or modified sequence
atgcattctctcgccctccaaaatactctgcatgagagaacctggtcagacgaaaagaacctgatgcagcaggaacttcgctccctgaaacagaatatcttcctgttctatgtgaagctgcggtggctccttaagcattggcggcagggaaaacagatggaggaggagggcgaggagttcactgagggagagcatcccgaaactttgtcgcggttgggcgaactgggggtgcaggggggacatcaggcggacggtcctgaccacgattccgatcgaggttgcggctttcccgttggcgagcacagtccccactcccgggttcagattggggatcactccttgcgacttcagacagcagaccgtggccagccacataaacaggtcgtggagaatcagcagttgttttccgcctttaaagccctgctcgaggacttccgggcagaactacgagaggacgaaagggctcggctccgtctgcagcagcagtatgcatccgacaaggccgcttgggatgtcgagtgggccgtgttaaaatgtcggttggagcagaattgctgtggatacccgcgaattaacatcgaagaagagactctgggattcacgcgcctgcctgcagggagtaccgtcaagactctgaaatcactcggattacagcggttagagctggaagagaagaccgaaaataagctcggagagcttggcagtagtgcagaatctaagggggcactgaaaaaggaacgcgaggtgcaccagaagttgctcgctgacagccattcactcgttatggaccttcggtggcagattcaccactctgaaaaaaattggaaccgggagaaagtggagcttctggaccgactcgacagagaccggcaggagtgggaaagacagaagaaggagttcttgtggaggatcgagcaagggtccctgcgtatgccgaggcccgtagctatgtggccctgtgccgacgctgactccatcccgttcgaggatcgaccgctgagcaagctaaaagagtcggaccgctgtagtgcaagcgagaatttgtatctggatgcactctctctggatgacgagccagaggagcccccagcacaccgtccagaacgcgaattccggaacagattacctgaagaggaagagaatcataaaggcaatcttcagcgtgccgtcagtgtcagcagcatgtctgaattccaacgcctgatggatataagcccatttctgcccgaaaaaggactcccgtctacgagctccaaggaagacgtaactcctccccttagtcccgacgatcttaaatatattgaggagtttaataaaagttgggactacacgccaaatagaggtcataatggtggtggcccagacctgtgggcagaccggaccgaagtcgggcgagctggacatgaggacagcacagaacctttccccgatagctcatggtatctcacaaccagcgtaactatgactacagacaccatgacttctcccgaacactgtcagaagcagccgctcaggtctcatgtattgactgagcagtccggactccgagtgctccacagcccccctgctgttcggcgtgtagactccataaccgccgctgggggagaagggccttttccaacaagccgcgcaagaggcagccctggagataccaagggcggacctccggagcccatgcttagcagatggccgtgcacatctccacgccacagccgggactatgtggagggagctcggaggcctttggattctcccctgtgcaccagcctcggattcgcttcacccctgcacagcctggagatgtcaaagaatctgagcgacgatatgaaggaggtggccttttctgttcggaatgcgatctgtagcggccctggtgagttacaagtaaaggacatggcgtgccagacaaatggttcaaggactatgggcactcaaaccgttcagacaattagcgtgggtttgcagaccgaggcgctacggggaagtggagtaaccagctcccctcacaaatgcctgactcctaaagctggaggtggcgcaactccagtgagctcaccatctcggtcccttcggtcacgacaagtggcacctgctatcgaaaaggttcaagccaaattcgaaagaacctgttgcagccctaagtatggcagccccaaactgcagcgtaagccactgccgaaagcggaccagccaaataacagaacctctcccggaatggctcagaagggctattcagagtccgcttgggcccgtagcacgactacgagggagtccccagttcatactaccattaacgacggcttaagctctctctttaacattattgaccacagtccagttgttcaagatccttttcaaaaagggctaagggccggaagtaggtcccgatccgcagaacccaggcctgaactcggtccaggacaagaaaccgggaccaactcacggggaaggtccccttccccaatcggcgtcggcagcgagatgtgtagggaagagggtggagagggaactcccgtcaagcaggacctgagtgctcccccaggctatacacttacagaaaacgtggctcggatcttaaacaagaaactccttgagcacgcactgaaggaagaacgtcgacaggcagcacatggaccaccagggcttcatagtgactcccatagtctcggggatactgcagagcctggtcctatggaggaattgccctgctccgctcttgcacctagcctggagccatgtttctcacgacctgaacgcccagcaaaccgacggcctccaagcaggtgggctccccatagtccaaccgctagccagcctcaatccccaggggacccaacttccctggaagagcacggcggtgaagagcccccagaggagcagccacaccgagatgcttccctacacggcctctctcaatacaattcactgtag

SEQ ID NO: 318491 - DNA, 6093 bp, Artificial Sequence
  derived and/or modified sequence
gagtgttttcagaagtgggaatagcaggcgaggtcttgaggcctgaagaagcaaagcgtcgcttagtcaatgctgagatgcgtcttgtggaacagaatttttgggacatttgcaggatgagttagatgaactccgtgctgagatggaagagatgagagacagttatttagaggaagatgtttaccagctgcaggaacttcggcgagaactggaccgcgctaataaaaactgccgaatcctgcagtaccgtcttcggaaagccgagcagaaaagcctgaaagtggctgagacgggtcaggtggatggtgagcttattcgaagcctggagcaggacttgaaggtagccaaagatgtatctgtcagattgcaccacgaacttaagacggtggaggaaaagcgcgctaaagctgaggatgaaaacgaaactctccgacagcagatgattgaagtggaaatatccaaacaggccctccagaatgagctggagagactgaaagagagttccctaaaaagaagaagcactcgggaaatgtacaaggagaagaaaacctttaaccaggatgacagtgccgatttgaggtgccagctccagtttgccaaagaggaagccttcctgatgcgcaaaaagatggccaagctaggaagggagaaggacgagctggagcaggagctccagaagtacaagtccctctatggggatgtggacagtcccctgcccacgggggaagcaggcgggccccccagcacccgggaggccgagctgaagctgcggctaaagctggtggaggaggaagccaacatcttgggccggaagatcgtggagctggaggtggagaaccgtggcctcaaggcagagatggaggacatgcggggccagcaggagcgggagggcccgggtcgggaccacgcacccagcattcctacctcacccttcggtgactccctggagtcctccactgagctccgccgccacctgcagtttgtagaagaggaagcggagttgctccggaggtccatctccgagatcgaagaccacaaccggcaactgacccacgagctcagcaagtttaagtttgagcctccccgggagccgggctggctaggagagggtgcaagtcctggtgccgggggtggggcccccctgcaggaggagctgaagtcagccaggctgcagatcagcgagctcagcggcaaggtgctcaaactgcagcacgagaaccacgcgctgctgtccaacatccagcgctgcgacctggcagcccacctggggctgcgtgcccccagtccccgggacagcgatgccgagagtgatgcgggcaagaaggagagtgatggggaggagagccgcctgccccagcccaagcgggaagggcctgttggcggggagagtgactcggaggaaatgtttgagaagacgtcgggcttcgggagcgggaagccatcggaggccagcgagccatgccccacggagctcctgaaggcccgggaggactctgagtacctagtgaccctaaaacacgaggcccagcggctagagcggacggtggagcgcctcatcacggacaccgacagcttcctccatgatgcggggctgcggggtggtgcgcccttaccggggcctggcctccagggcgaagaggagcagggtgagggggaccagcaggagccccagctgctggggaccatcaacgccaagatgaaggctttcaagaaagagctgcaggccttcctggagcaggtgaaccgcattggggatggcctatcccccttgccccacctcacagagtcctctagcttcctctccactgtgacttccgtgtcccgggactcccccatcgggaacctggggaaggagctgggcccagacttgcagtccagactgaaagagcagctggagtggcagctcgggccggcccgaggggacgagcgggagagcctgcgcctccgagccgcgcgggagctgcaccgccgcgcagacggggacaccgggagccacgggctgggaggccagacctgcttcagcctggagctcaggggcccccccgttttacctgagcagagtgtatccatagaggagctacagggtcagctcgtgcaggcggccagactgcatcaagaggagacagagacatttacaaacaagatccataagatggaggaggagcacctctatgccttgaggtggaaagaactggaaatgcacagcctggctttgcaaaacaccctccatgagcgaacctggagtgatgagaagaatctgatgcagcaggagctccggtccttgaagcagaacattttcctcttctacgtcaaactcaggtggctgctgaaacactggcggcaagggaagcagatggaggaggaaggagaggagttcactgagggtgaacatccagagaccctctccaggctcggggagcttggagtccaggggggtcaccaggcggatggcccagaccacgacagtgaccgaggctgtggctttccagtgggggagcactccccacactcccgggtgcagattggagatcacagcttgcggctgcagaccgcggacaggggacagccccacaaacaggtggtggaaaaccagcagctgttcagcgccttcaaggccttgctggaggacttccgtgcggagctgcgggaggatgagcgtgcccgactacggctgcagcagcaatatgccagcgacaaggcggcctgggacgtggagtgggccgtgctcaagtgccgtctggaacagctggaagagaagactgagaacaagttgggagaactaggctcctccgctgagagcaagggggccttgaagaaggagagagaggtgcaccagaagctcctggcagacagtcacagcctggtcatggacctgcgctggcagatccatcacagcgagaagaactggaaccgggagaaggtggaacttctcgaccgcctggacagagatcggcaggagtgggagcggcagaagaaggaattcttgtggaggatagagcagttgcagaaagagaacagtccccggagaggtggcagtttcctctgtgatcaaaaagacggcaacgttcgcccctttccccaccagggaagcctccgcatgccccgtccagtggccatgtggccttgtgcagatgctgactccatcccgtttgaagaccggccgctgtccaagctgaaggagtcggacaggtgctcggccagtgagaatctctacctggatgccttgtccctggatgacgagccagaagagccaccagcccacaggcccgagagggagttcaggaaccgcctccctgaggaagaagaaaatcacaaaggaaatcttcaaagggcggtgtccgtgtcctccatgtctgagttccagcgtctaatggacatctcccccttcctgcctgagaagggcctgccgtccaccagcagcaaggaggatgtcaccccacccctgtctccagacgacctcaagtacatcgaggagttcaacaagagctgggactacacacccaacaggggccacaatggtggggggccggacctttgggccgacaggaccgaggtggggcgggcagggcacgaggacagcacagagcctttccccgactcctcctggtacctaaccacaagtgtcaccatgaccacggacaccatgaccagcccagagcactgccagaagcagccactgcggagccacgtcctcaccgagcagtcggggttgcgcgtgttacacagcccgcctgccgtgcgcagggtcgacagcatcacggcggcaggtggtgagggtccctttcccacaagcagagccagagggagcccgggagacaccaagggaggccctccagaacccatgctcagcaggtggccttgcacctcccccaggcactcccgggactatgtggagggggcacggcgcccccttgatagtcccctctgtacctccctggggtttgcctccccactgcacagcctggagatgtccaagaacttgagtgatgacatgaaggaggtggccttctctgtcaggaatgccatctgctccggccctggcgagctgcaagtcaaggacatggcctgccagaccaatgggtcccggacgatggggacccagactgttcagaccatcagtgtgggcttgcagactgaagccctgcgtggcagcggtgtcaccagcagcccccacaagtgtctcactccaaaggctgggggcggtgctacacccgtgtcgtctccttcccggagccttaggagcagacaggtggcccctgccatcgagaaggtgcaggccaagtttgaacgcacatgctgctcccccaagtatggttctcccaagctgcagaggaagcccctccccaaagccgaccagccaaataacaggacgtcaccagggatggcccagaaagggtacagtgagtcagcctgggcccgctccaccaccacaagggagagccccgtgcacaccaccattaatgatggcctctccagcctcttcaacatcattgaccacagccccgtggtgcaggaccccttccagaaggggctgcgggccggcagtcggtctcgctcagcagagccccgaccagagctgggcccaggccaggaaacaggcaccaattcccgaggaaggtcgcctagccccattggggtggggtcagagatgtgcagggaggaagggggagagggcacgccagtgaagcaggacttatctgctccccctggctacacgctcactgagaacgtggcccggatcctcaacaagaagctgctggaacatgccttaaaggaggagaggaggcaggctgcccacgggcccccgggtctccacagtgacagccactcgctgggggacacagccgagccagggcccatggagaaccaaactgtcttgctaactgccccctggggactctagccctgcccgcctcacgctgaactaccttgttctgcactagctccatccctagagccctgcttctccaggcccgagagaccagcaaaccgtcgccctccgtcccgttgggccccacattcccccactgcctcacagcctcagtcacccggagacccgacgtccttggaggagcatggtggcgaggagccgcccgaggagcagccacaccgagatgcaagcttgcatggattatcacagtataattcactgtaatttgcataaccacaccatcaccatgaacaaaactctgcccaacaggagagatctagttttctcaaggtcaaagaatgttttttaaaaacacaaagctgctgaatgttcaacctgtgaaactgagatgtttctagaatgaaacagtaaatgtgcctgtaataacttaatttttttcatagctcagaaaactatttttgtctccatcttttttacacacagtatattaaacgaaaaggtaaataaggtataaatagatttaaaaaataaaagttttaaaaaatgtacattttaagagattctgaacaccctcgctgtcaatacctgactgcctctgttaaatttgcactgttacattttggttcagtttatttccatgttgaattagagtggattaagttaattttattttgtcagtgttactgttttttacgaattttttaatgcttcagactgtctgattcagtgaactttttgtagtgaaaaagccatgaagccagtagacaagacagatattctgtatgctggaggggatacaggatgattttgaaaaggtacaaagtcctcagtgggcttagaaaattcactgtatgatccttatattatcctacttggcttgcacgtcttcgggtgcatgtatataccgctactgtgtcctcgccatcacctaaatgtgactcagtctgttccactgtaatatgttgtgaatttccttgtactgtacttttattgttggtcttcttgcatcgatgatccaacagcaacaccatttttaaattattgtgaaaagattaactggcaatgtacagagtttactcaaagttttcttaagggaaaacactacaaaaagtcacaaggataccaaatggaaacacatgatgatgcctctgggtctgtatgagaccgtgatgaagtagaaataaagcccttctgagatggca

SEQ ID NO: 318492 - protein, 381 aa, Artificial Sequence
  derived and/or modified sequence
MGCLGGNSKTTEDQGVDEKERREANKKIEKQLQKERLAYKATHRLLLLGAGESGKSTIVKQMRILHVNGFNPEEKKQKILDIRKNVKDAIVTIVSAMSTIIPPVPLANPENQFRSDYIKSIAPITDFEYSQEFFDHVKKLWDDEGVKACFERSNEYQLIDCAQYFLERIDSVSLVDYTPTDQDLLRCRVLTSGIFETRFQVDKVNFHMFDVGGQRDERRKWIQCFNDVTAIIYVAACSSYNMVIREDNNTNRLRESLDLFESIWNNRWLRTISIILFLNKQDMLAEKVLAGKSKIEDYFPEYANYTVPEDATPDAGEDPKVTRAKFFIRDLFLRISTATGDGKHYCYPHFTCAVDTENIRRVFNDCRDIIQRMHLKQYELL

SEQ ID NO: 318493 - DNA, 1146 bp, Artificial Sequence
  derived and/or modified sequence
atgggatgtctgggagggaattcaaagacaactgaggaccagggggtcgatgagaaggaaagaagggaagccaataagaaaatcgagaagcagctccaaaaagagaggctggcctacaaggccacccaccgcctgctgctcctcggggccggtgagtctgggaagtcaacaatcgttaaacagatgagaatactgcatgtcaacggctttaaccctgaagaaaagaaacaaaaaattctggacatcagaaagaacgtgaaagacgccatcgtaacaattgtgtcggccatgtccacgatcatcccaccagttcctcttgctaatcctgagaaccagttccgttcagactatattaaaagcatagcccccatcactgacttcgaatatagccaggaattttttgatcacgttaagaagctctgggacgatgagggggtaaaagcctgttttgagcgctctaatgagtaccagctcattgattgtgcccagtatttcctggagcggatcgattcagtgtcactggtcgactatacaccaacagatcaggacctcctgaggtgccgggtgttaacttctggtatcttcgagacccgctttcaggttgacaaggtgaattttcatatgttcgatgtggggggtcaaagggacgagagaagaaaatggattcaatgttttaacgacgtcacggctattatctatgtcgcagcttgctctagctacaacatggtaattagagaagataacaatactaacagactgagggagtctctggacctgttcgagagcatttggaataacaggtggttgaggacaataagtatcattttattcctcaacaagcaggacatgctggctgaaaaagtgctggccggcaagtctaagattgaggattactttcccgagtatgccaattatactgtccccgaagatgcaaccccagatgctggagaagatccaaaggttacacgagccaagttcttcattagagacctcttccttcgaatctccactgcgactggtgacggtaaacattactgctacccgcacttcacctgcgccgtcgacacagagaacattcgacgggtatttaacgactgtcgggatatcatccagagaatgcatctgaaacagtatgagctcctttag

SEQ ID NO: 318494 - DNA, 1146 bp, Artificial Sequence
  derived and/or modified sequence
atgggctgccttggtggcaatagcaagaccacggaggaccagggagtcgacgaaaaggagagaagagaggcaaacaaaaagattgaaaaacaattgcagaaagaaagactggcctacaaggcaacccaccggctgctgctgctgggggccggagagtccggaaaatcgactatcgtcaagcagatgagaatcctccacgttaacggatttaatcctgaggagaaaaaacaaaagatactggatattcgcaagaacgtgaaggacgcaattgtgactattgtgagcgcgatgagcacaatcataccccccgtgccccttgcaaacccagagaatcaattcaggtcagactacattaaaagtattgctccaatcacggatttcgagtatagccaagaatttttcgatcacgtgaagaaactatgggatgatgaaggcgtgaaggcttgctttgaacggtccaacgagtatcaactgatcgactgcgcccagtatttcctggagaggatagactcagtgtctctcgtggattatacccccactgaccaggacctcttacgttgcagggtgttgacatcaggaattttcgagacgcgctttcaggtggataaagtcaacttccacatgttcgacgtgggcgggcaacgagatgaacgaaggaagtggattcagtgcttcaatgatgtcactgccatcatctatgtcgccgcatgctcctcatataacatggtcatcagggaagacaataatactaatcgactaagggaatcccttgatttattcgagtctatctggaataacagatggcttaggactatctcgataattttgttcctaaataagcaggatatgttggctgagaaggtactcgcaggcaagagtaaaatcgaagactacttccctgaatatgccaattatactgtgcccgaagacgccacacctgacgctggcgaggacccaaaagttacccgggctaaatttttcatacgcgacctattcttgcgcatctctacagcgactggggatggcaagcactattgttacccacactttacctgcgcagtggacacagagaatatcaggcgcgtctttaacgattgccgggatatcatccagcgcatgcatctgaaacagtacgaacttctttag

SEQ ID NO: 318495 - DNA, 1146 bp, Artificial Sequence
  derived and/or modified sequence
atgggctgcttgggtggcaattctaagacaaccgaggatcagggcgtggatgaaaaagagaggagagaggctaacaaaaagattgagaagcagcttcagaaagagcgcttagcatataaagccactcataggctgctgttgctcggtgctggggagtctggcaagtccaccattgtgaaacagatgaggattttgcacgtgaacggctttaaccccgaggagaaaaagcagaagatccttgacatccgcaaaaacgtcaaagacgctatcgtcaccattgtttcggcaatgagtacgattatcccccccgtcccattggctaatcctgaaaatcaatttcgttctgattatatcaagagtattgcaccaattacagatttcgaatactcccaagagttctttgaccacgtcaagaagttatgggacgacgaaggcgtgaaggcctgtttcgaacggtccaatgaatatcagctcatcgactgtgctcagtatttcctggagagaatagattccgtgtcactagtcgattatacccctacggatcaggacctgctacgatgtcgggtgctgacatccggcatttttgaaacccgattccaggtcgataaggtgaactttcatatgtttgatgtgggtggacagagggacgaacgccgtaagtggatccagtgcttcaatgatgttactgctataatctatgtggccgcctgctccagttataacatggtcattagagaagacaacaacaccaataggttgcgggaatcactcgatctgtttgaatcaatttggaacaacaggtggctgaggactattagcatcatcctgttcttgaacaagcaggacatgctagccgaaaaagtgttggctggcaagtcgaagatcgaagactactttccagagtacgcaaattatactgtccctgaagacgcaacccctgatgcgggagaggaccccaaagtgacaagggcaaagttcttcatccgtgacttattcctgaggattagcacagctaccggggatggtaaacactattgctatccacattttacatgtgcagtagatacagagaacatacgacgtgtttttaatgactgtcgagatattatacaaagaatgcacttgaagcaatacgagctcttatag

SEQ ID NO: 318496 - DNA, 963 bp, Artificial Sequence
  derived and/or modified sequence
atgagaattctccatgtcaacggctttaaccccgaagaaaagaaacaaaagatcttggacatcaggaagaatgtaaaagatgccatagtcacgattgtgagcgctatgtcgacaatcatccctcctgttcccctggctaatccagaaaatcaatttcgttcagactacatcaagagtattgcaccaatcactgacttcgagtactcccaggagttctttgaccacgtcaagaagttgtgggacgacgagggggtcaaagcttgtttcgaacggagtaacgagtaccagctcattgactgtgcgcagtactttctagaacgcattgattcagtctcactggtggactatacaccaactgatcaggacctcttacggtgtcgggtgctcaccagtggcatttttgagactagatttcaggtggacaaggtgaactttcatatgttcgatgtgggcggtcaacgagatgaacgacggaaatggatccagtgtttcaatgatgttactgcaataatttacgtagctgcctgcagttcatacaacatggtgattcgcgaagataataacacaaatagattacgcgaatcgctcgacctttttgagagtatctggaacaacagatggcttcgaacaatctccattatcctgttcctcaacaagcaagatatgctcgccgagaaggttttggcaggtaagagtaagatcgaagactactttcctgaatacgccaactacactgtcccagaagacgccactcctgatgcgggcgaggacccaaaagtgactcgcgcaaaattcttcatccgggaccttttcttacgtatcagtactgcaaccggcgacggcaaacactattgctatcctcacttcacctgcgccgtggacaccgaaaacataaggagggtatttaacgactgcagagacataatccagagaatgcatctgaaacaatacgagctgctgtag

SEQ ID NO: 318497 - DNA, 3402 bp, Artificial Sequence
  derived and/or modified sequence
tcttcgcccgccaggagcagggacgcgtccgagccaacacggggcgcgcgcccagacgcactttcccggctcggggtgcaagagagccaggcggccgcggcgcagcggaggggctgcgggcccggaacccaggccggtcagcgtcaggaaagagaggagccgtcgcaggagccgcacacgtctccaactctctattgctttttgcgcacattcctaacttcctgacgtccatcccagcgggcaggcatggggtgtttgggcggcaacagcaagacgacggaagaccagggcgtcgatgaaaaagaacgacgcgaggccaacaaaaagatcgagaagcagttgcagaaagagcgcctggcttacaaggctacccaccgcctgctgctcctgggggctggtgagtctgggaaaagcactatcgtcaaacagatgaggatcctgcacgtcaatgggtttaatcccgaggaaaagaaacagaaaattctggacatccggaaaaatgttaaagatgctatcgtgacaattgtttcagcaatgagtactataatacctccagttccgctggccaaccctgaaaaccaatttcgatcagactacatcaagagcatagcccctatcactgactttgaatattcccaggaattctttgaccatgtgaaaaaactttgggacgatgaaggcgtgaaggcatgctttgagagatccaacgaataccagctgattgactgtgcacaatacttcctggaaagaatcgacagcgtcagcttggttgactacacacccacagaccaggacctcctcagatgcagagttctgacatctgggatttttgagacacgattccaagtggacaaagtaaacttccacatgtttgatgttggtggccagagggatgagaggagaaaatggatccagtgctttaacgatgtcacagctatcatttacgtcgcagcctgcagtagctacaacatggtgattcgagaagataacaacaccaacaggctgagagagtccctggatctttttgaaagcatctggaacaacaggtggttacggaccatttctatcatcttgttcttgaacaaacaagatatgctggcagaaaaagtcttggcagggaaatcaaaaattgaagactatttcccagaatatgcaaattatactgttcctgaagacgcaacaccagatgcaggagaagatcccaaagttacaagagccaagttctttatccgggacctgtttttgaggatcagcacggccaccggtgacggcaaacattactgctacccgcacttcacctgcgccgtggacacagagaacatccgcagggtgttcaacgactgccgcgacatcatccagcggatgcacctcaagcagtatgagctcttgtgaggatgctgccgccaccctgcgacggagcggcgccccggactgcctgactgccagccccatgccatggtaggaggcagagtctctagttccatctcgctgccgtctgtcccgttctgtgtcgaccaccaagcctctggctacctctgtcccctcaggtttggttgtgtagcttctgttgtcattgaatacggcctcccgcagcatcccacccccaaaccaccgactctcattgccgacactgcagcagaatctctccgggtgggagccccattattcattctccctttattgattcatcgaggagaacttggtagatggggagaaaacacagttggtttttttttccacgttatcaaccgtgactgcaagagcgttcgtgcagtgccctgagccacggccgtctctgattctccctttatgaagctgcaggctgacgagagatggtcccttcccattggccttagcccaagacttggagtcgaccccaagcgacagagtgaccagaaacccttttacagtcacattcagagtcgctgctggcctcaggcatttgaattagagctactttgagcctcttaggcagaaaacctaccacattcactactgcaaaatgtgtcctgtctaaaaatgattctctaaactttccctatacttaggcatagtcttctttcttagattctctttgttgttgtccctattgctggtttattacactgtacagaccacaaaatgtaatattcttttgtataactactaaagaaaaatccttgtagatctttgtgccttcaccatggctatctatacctgtacatgaaatgtgtttgtattgtgctgaagagcttaatgtcaacattacctgctgcttactctgaaaaaaggaatgaatggtagctgtagaatttaggatattttatcaggttggcactttataaaatactccctgatttaaaaaattgtaagttatacacgttaatcatccacattctatcgacaatgtaccaacatcacaagctgttgcaaccacctgctgttacttctctgagctgtaaaaacctgaactcaattcaggggtacaaattgcaatctaatcttttcagggaaccagggatttttttctctctctctagacaatatgtttcctcattagtctgctaatgaaacacttcttcaagttccccaagtgggaacaggtccatcattcccttagtcaaaactttggacacaggctacgtcatacaagtaagcaaacagtaagagaaaaacaaaatgtggccaggcgcggtggctcacgcctgtaatcccagcactttgggaggccgaggcaggcggatcacgaggccaggagatcaagaccatcctggctaacatggcgaaaccctgtctctaccaaaaatacaaaaattagccaggcgtggtggcgggcacctgtaatctcagctactcgagaggctgaggcaggagaatctcttgaacctgggaggtggagattgcagtgagccgaggtcgtgccatcgcactccagcctggacatcaaagtgagactcaggccaaaaaaaaaaaaaaaaaaaaccttgacgtgtcaatgtttgtgtctggcctaggagaatgaggatgacagcttcacttgccttttgaagaagaaacattacaaaaccttaatctgaagtataaagtcaaaagatacggctctttctcacacttgcaagacttacaaatacagcctcaaacattatgacacaccaacaatatctagaaagtaagaactggtgtagcaatgatgcttcatattctagctgtagccacagagttgagggtagtttttgtaggtctaaaataataatctataaagatgtccaaagttaaattttcaacaatacaaatctagagaagtgacagcctacattacttcattattactcttcttttagtctttagtctttaatattttaaagtttactctataaatcagcattttgtaatcctttataaactcatccagatttaaatgct

SEQ ID NO: 318498 - DNA, 2087 bp, Artificial Sequence
  derived and/or modified sequence
aaacaattctcgtgtaaaaaggcattttactccgcgcgtcttccttacagccatttagttgggagtttgcggtgggcagggggagggagaagaaacgcctgctctgaatcggaaaacaccgaagagaccagaccatctctttcagcagcaggaaagagaggagccgtcgcaggagccgcacacgtctccaactctctattgctttttgcgcacattcctaacttcctgacgtccatcccagcgggcaggcatggggtgtttgggcggcaacagcaagacgacggaagaccagggcgtcgatgaaaaagaacgacgcgaggccaacaaaaagatcgagaagcagttgcagaaagagcgcctggcttacaaggctacccaccgcctgctgctcctgggggctggtgagtctgggaaaagcactatcgtcaaacagatgaggatcctgcacgtcaatgggtttaatcccgaggaaaagaaacagaaaattctggacatccggaaaaatgttaaagatgctatcgtgacaattgtttcagcaatgagtactataatacctccagttccgctggccaaccctgaaaaccaatttcgatcagactacatcaagagcatagcccctatcactgactttgaatattcccaggaattctttgaccatgtgaaaaaactttgggacgatgaaggcgtgaaggcatgctttgagagatccaacgaataccagctgattgactgtgcacaatacttcctggaaagaatcgacagcgtcagcttggttgactacacacccacagaccaggacctcctcagatgcagagttctgacatctgggatttttgagacacgattccaagtggacaaagtaaacttccacatgtttgatgttggtggccagagggatgagaggagaaaatggatccagtgctttaacgatgtcacagctatcatttacgtcgcagcctgcagtagctacaacatggtgattcgagaagataacaacaccaacaggctgagagagtccctggatctttttgaaagcatctggaacaacaggtggttacggaccatttctatcatcttgttcttgaacaaacaagatatgctggcagaaaaagtcttggcagggaaatcaaaaattgaagactatttcccagaatatgcaaattatactgttcctgaagacgcaacaccagatgcaggagaagatcccaaagttacaagagccaagttctttatccgggacctgtttttgaggatcagcacggccaccggtgacggcaaacattactgctacccgcacttcacctgcgccgtggacacagagaacatccgcagggtgttcaacgactgccgcgacatcatccagcggatgcacctcaagcagtatgagctcttgtgaggatgctgccgccaccctgcgacggagcggcgccccggactgcctgactgccagccccatgccatggtaggaggcagagtctctagttccatctcgctgccgtctgtcccgttctgtgtcgaccaccaagcctctggctacctctgtcccctcaggtttggttgtgtagcttctgttgtcattgaatacggcctcccgcagcatcccacccccaaaccaccgactctcattgccgacactgcagcagaatctctccgggtgggagccccattattcattctccctttattgattcatcgaggagaacttggtagatggggagaaaacacagttggtttttttttccacgttatcaaccgtgactgcaagagcgttcgtgcagtgccctgagccacggccgtctctgattctccctttatgaagctgcaggctgacgagagatggtcccttcccattggccttagcccaagacttggagtcgaccccaagcgacagagtgaccagaaacccttttacagtcacattcagagtcgctgctggcctcaggcatttgaattagagctactttgagcctcttaggcagaaaacctaccacattcactactgcaaaatgtgtcctgtctaaaaatgattctctaaactttccctatacttaggcatagtcttctttcttagattctctttgttgttg

SEQ ID NO: 318499 - DNA, 1285 bp, Artificial Sequence
  derived and/or modified sequence
agtctagaagctgagcagaacaaaggcggtgtgactgcaggaaagagaggagccgtcgcaggagccgcacacgtctccaactctctattgctttttgcgcacattcctaacttcctgacgtccatcccagcgggcaggcatggggtgtttgggcggcaacagcaagacgacggaagaccagggcgtcgatgaaaaagaacgacgcgaggccaacaaaaagatcgagaagcagttgcagaaagagcgcctggcttacaaggctacccaccgcctgctgctcctgggggctggtgagtctgggaaaagcactatcgtcaaacagatgaggatcctgcacgtcaatgggtttaatcccgaggaaaagaaacagaaaattctggacatccggaaaaatgttaaagatgctatcgtgacaattgtttcagcaatgagtactataatacctccagttccgctggccaaccctgaaaaccaatttcgatcagactacatcaagagcatagcccctatcactgactttgaatattcccaggaattctttgaccatgtgaaaaaactttgggacgatgaaggcgtgaaggcatgctttgagagatccaacgaataccagctgattgactgtgcacaatacttcctggaaagaatcgacagcgtcagcttggttgactacacacccacagaccaggacctcctcagatgcagagttctgacatctgggatttttgagacacgattccaagtggacaaagtaaacttccacatgtttgatgttggtggccagagggatgagaggagaaaatggatccagtgctttaacgatgtcacagctatcatttacgtcgcagcctgcagtagctacaacatggtgattcgagaagataacaacaccaacaggctgagagagtccctggatctttttgaaagcatctggaacaacaggtggttacggaccatttctatcatcttgttcttgaacaaacaagatatgctggcagaaaaagtcttggcagggaaatcaaaaattgaagactatttcccagaatatgcaaattatactgttcctgaagacgcaacaccagatgcaggagaagatcccaaagttacaagagccaagttctttatccgggacctgtttttgaggatcagcacggccaccggtgacggcaaacattactgctacccgcacttcacctgcgccgtggacacagagaacatccgcagggtgttcaacgactgccgcgacatcatccagcggatgcacctcaagcagtatgagctcttgtga

SEQ ID NO: 318500 - DNA, 1038 bp, Artificial Sequence
  derived and/or modified sequence
aaaagagactgaaggggagactggacagactgcaaagggctggaggccacattaaaagtgtggactttaccccatgggaaggaggaagcgcaggagtcatgagaaatgatggttcaggcagagattagagcataaagcagggaggtggggaaagccaagaggaacacgctcttggatgacgagtcaccatgaatcactgatcacctgggacatggttcagctgcacatgctgacgcagtgggtctgccagtgacgccgatatgctgcgagtctgggaaccccttttaaggagcagggaatcttaactctggctgtgcattacaactgcctggtactttgtcaccaccttcctggaaagaatcgacagcgtcagcttggttgactacacacccacagaccaggacctcctcagatgcagagttctgacatctgggatttttgagacacgattccaagtggacaaagtaaacttccacatgtttgatgttggtggccagagggatgagaggagaaaatggatccagtgctttaacgatgtcacagctatcatttacgtcgcagcctgcagtagctacaacatggtgattcgagaagataacaacaccaacaggctgagagagtccctggatctttttgaaagcatctggaacaacaggtggttacggaccatttctatcatcttgttcttgaacaaacaagatatgctggcagaaaaagtcttggcagggaaatcaaaaattgaagactatttcccagaatatgcaaattatactgttcctgaagacgcaacaccagatgcaggagaagatcccaaagttacaagagccaagttctttatccgggacctgtttttgaggatcagcacggccaccggtgacggcaaacattactgctacccgcacttcacctgcgccgtggacacagagaacatccgcagggtgttcaacgactgccgcgacatcatccagcggatgcacctcaagcagtatgagctcttgtgaggatgctgccgccaccctgcgacggagcggcgccccg

SEQ ID NO: 318501 - DNA, 1146 bp, Artificial Sequence
  derived and/or modified sequence
atgggctgcctgggcggcaacagcaagaccacagaggaccagggcgtggatgagaaggagcggcgggaggccaacaagaagattgagaagcagctgcagaaggagcggctggcctacaaggccacccaccggctgctgctgctgggcgctggggagagcggcaagagcaccatcgtgaagcagatgaggatcctgcacgtgaatggcttcaaccctgaggagaagaagcagaagatcctggacatcaggaagaatgtgaaggatgccatcgtgaccatcgtgtctgccatgagcaccatcatcccccctgtgcccctggccaaccctgagaaccagttcagaagtgactacatcaagagcatcgcccccatcacagactttgagtacagccaggagttctttgaccacgtgaagaagctgtgggatgatgaaggagtgaaggcctgctttgagaggagcaatgagtaccagctgattgactgtgcccagtacttcctggagagaattgattctgtgtccctggtggactacacccccacagaccaggacctgctgcgctgccgggtgctgaccagcggcatctttgagacccgcttccaggtggacaaggtgaacttccacatgtttgatgtgggcggccagagagatgagaggaggaagtggatccagtgcttcaatgatgtgacagccatcatctacgtggccgcctgcagcagctacaacatggtgatccgggaggacaacaacaccaaccggctgcgggagagcctggacctgtttgagagcatctggaacaaccgctggctgcggaccatcagcatcatcctcttcctgaacaagcaggacatgctggccgagaaggtgctggccggcaagagcaagattgaggactacttcccagaatatgccaactacacagtgcctgaagatgccaccccagatgctggggaggaccccaaggtgacccgggccaagttcttcatccgggacctcttcctgcgcatcagcacagccactggagatggcaagcactactgctacccccacttcacctgtgctgtggacacagagaacatccggcgggtcttcaatgactgccgggacatcatccagaggatgcacctgaagcagtatgagctgctgtag

SEQ ID NO: 318502 - DNA, 963 bp, Artificial Sequence
  derived and/or modified sequence
atgaggatcctgcacgtgaatggcttcaaccctgaggagaagaagcagaagatcctggacatcaggaagaatgtgaaggatgccatcgtgaccatcgtgtctgccatgagcaccatcatcccccctgtgcccctggccaaccctgagaaccagttcagaagtgactacatcaagagcatcgcccccatcacagactttgagtacagccaggagttctttgaccacgtgaagaagctgtgggatgatgagggcgtgaaggcctgctttgagaggagcaatgagtaccagctgattgactgtgcccagtacttcctggagagaattgacagcgtgtccctggtggactacacccccacagaccaggacctgctgcgctgccgggtgctgaccagcggcatctttgagacccgcttccaggtggacaaggtgaacttccacatgtttgatgtgggcggccagagagatgaaagaaggaagtggatccagtgcttcaatgatgtgacagccatcatctacgtggccgcctgcagcagctacaacatggtgatccgggaggacaacaacaccaaccggctgcgggagagcctggacctgtttgagagcatctggaacaaccgctggctgcggaccatcagcatcatcctcttcctgaacaagcaggacatgctggccgagaaggtgctggccggcaagagcaagattgaggactacttcccagaatatgccaactacacagtgcctgaagatgccaccccagatgctggggaggaccccaaggtgacccgggccaagttcttcatccgggacctcttcctgcgcatcagcacagccactggagatggcaagcactactgctacccccacttcacctgtgctgtggacacagagaacatcagaagagtcttcaatgactgccgggacatcatccagaggatgcacctgaagcagtatgagctgctgtag

SEQ ID NO: 318503 - DNA, 1146 bp, Artificial Sequence
  derived and/or modified sequence
atgggctgcctgggcggcaacagcaagaccaccgaggaccagggcgttgatgaaaaggaacgtagagaggcgaataaaaagatcgaaaaacagcttcaaaaggagcggctggcgtataaggccactcaccgattgctcttgctgggcgccggggaatcgggtaaatcgacgatcgtgaagcaaatgcgaattctgcacgttaacggcttcaatccggaggagaagaaacagaagatcctggacatacgcaagaacgtgaaggacgctattgtaactatcgtttccgccatgtcaactatcatccccccagtgccgctagcaaaccctgagaaccagtttcggagtgactacatcaagagtatcgcgccaattactgatttcgagtactcccaggagtttttcgatcacgttaagaagctatgggatgacgagggggttaaagcttgtttcgagaggagtaatgagtatcaactgatcgattgtgctcagtacttccttgagcggatcgactcggtaagcctggttgattatacaccaacagatcaggatctgcttaggtgtcgggtcttgacctcaggcatcttcgaaacccgcttccaggtagataaagtgaacttccacatgttcgatgtcggtggacagcgagacgagcgccgcaagtggattcagtgcttcaacgacgtaacagctattatttatgtcgccgcctgttccagctataatatggttattcgagaggacaataacacaaatagactaagagagagcctggatctgtttgaatctatctggaataaccgctggctgagaaccatctcaatcatcctattcctcaacaagcaggacatgctggccgagaaggtcctcgccggcaaaagcaagattgaagactattttcccgagtacgcaaattacacggttcccgaggacgctacaccagatgcaggagaggatccaaaggtgaccagggcaaaatttttcatccgagatcttttcctgcgtattagtacggctacaggagacggtaagcattactgttatccccactttacgtgtgcagtggataccgagaacattaggagggtcttcaacgactgtcgagatattatccagaggatgcatctcaaacaatacgagcttctttag

SEQ ID NO: 318504 - DNA, 1146 bp, Artificial Sequence
  derived and/or modified sequence
atgggctgcctgggcggcaacagcaagaccaccgaggaccagggcgtggacgaaaaagagaggagagaggcaaacaagaagatcgaaaagcagctgcagaaagaaagactggcgtataaagcgacccaccggctcctgcttctcggtgccggcgagtcagggaaatcaacaatcgtcaagcaaatgcgcattttgcacgtgaatggtttcaatcccgaagaaaagaagcagaagatcctggacatccgcaagaatgtcaaggatgctatcgttaccatcgtgagcgccatgagtacaatcatcccccccgttccactggccaaccccgaaaatcagtttagatccgactacattaagtccatcgcgccaatcaccgatttcgagtatagccaggaatttttcgatcatgtgaagaaactgtgggatgacgaaggcgtaaaagcttgtttcgagcggtccaatgaatatcagcttatcgactgcgctcagtacttcctggagaggattgattccgtcagcctggtggactatactccgaccgatcaggacttgctgaggtgcagagtactgaccagcgggattttcgagaccaggtttcaggtggataaagtgaactttcatatgtttgatgtggggggacagagagatgagaggcgtaagtggatccagtgtttcaacgatgtgaccgcaatcatttacgtggcggcctgctcctcgtataacatggttattcgcgaggacaacaacaccaaccgactgcgggagtccttagacttgtttgagtcaatttggaataataggtggctgagaaccatctctataattctcttcctgaacaaacaggatatgttggcagagaaggtgttggccggcaagtcaaagatcgaggattatttccctgagtatgctaactacaccgttccagaagatgctacacccgacgccggggaagaccccaaggtgacaagagccaaatttttcattcgagacctgttcctcaggatatccacagctacaggcgacggcaagcactactgttatccgcactttacctgtgccgtggatacagagaacattaggcgagtattcaatgattgcagggatataatccagaggatgcacctcaagcagtatgaactcctgtag

SEQ ID NO: 318505 - DNA, 1146 bp, Artificial Sequence
  derived and/or modified sequence
atgggctgcctgggcggcaacagcaagaccaccgaggaccagggcgtggatgagaaagagagaagggaagcaaacaaaaagattgagaagcagctccagaaagagaggcttgcttataaggctacacatcgcctgctcctgttgggagccggggagagtggcaaaagcactattgtgaagcagatgcgcatcctgcacgttaacgggtttaaccccgaggagaagaagcagaaaatcctcgacattcgcaaaaacgtcaaagacgccattgtgaccatcgtgtcagccatgagcactatcatcccgccagtccccctggccaatcccgaaaaccaatttcgctccgattatatcaaaagtatcgcccccattaccgacttcgagtacagtcaggaattctttgatcacgtcaaaaaactgtgggacgacgagggggtgaaggcttgctttgaacggtcaaacgagtaccagcttatcgattgcgctcaatattttctagagcgcattgattctgtgtctcttgtagattacactcccaccgaccaggatttgctcaggtgtcgagtattgacatcaggaatctttgagactcgatttcaggttgataaggtcaacttccatatgttcgatgtggggggacaacgcgatgagcgtcgcaaatggatccagtgctttaatgacgtgactgccatcatctatgtcgccgcctgtagttcatataacatggtgatacgggaggataacaatacaaaccgtctacgcgaaagcctagaccttttcgaatcaatctggaacaataggtggctaaggaccatatccataatcctgtttctgaacaagcaggatatgctcgccgagaaagttttagctgggaaaagtaagattgaagactactttcctgagtacgccaactacactgtgcccgaagacgctacccctgacgccggggaggaccctaaggtgactcgagccaagttcttcattagggaccttttcctgcgtatcagcacagctacaggggatgggaagcactactgctatcctcactttacttgtgccgtggacacagagaacatcaggagggtttttaatgattgcagggatattattcaacggatgcacctgaagcagtacgagctcctctag

SEQ ID NO: 318506 - DNA, 963 bp, Artificial Sequence
  derived and/or modified sequence
atgcggatcctgcacgtgaacggcttcaaccccgaggagaagaagcagaagatcctcgatataaggaagaacgtgaaagatgctatcgtaacgatcgtttctgctatgtccactatcattcctccagtccctctggccaatcctgaaaatcaatttaggagcgattacataaagtcaattgcacctattaccgatttcgaatattcacaagagttcttcgaccatgtgaagaaactttgggatgacgagggtgtgaaagcatgctttgagcgatccaacgagtaccagctcatcgactgcgcacaatacttcttggaacgtatcgactctgtgagcttggtcgactataccccaaccgaccaggacctcctgcggtgccgagtgctgacatcgggaattttcgaaaccaggtttcaagtcgacaaggtcaatttccatatgttcgatgtcggcggacagagagatgaacgccgaaaatggatccagtgcttcaacgatgtgaccgctattatttatgttgctgcatgtagctcctacaatatggtcatcagggaggataataataccaaccggcttagggaatcacttgatctgttcgagtccatatggaataaccgttggctgcgaactatatcaataatcttgttccttaacaaacaggacatgctggccgaaaaagtcctggcaggaaagtcaaaaatcgaggactattttccagagtacgcgaactacacagtccccgaggacgccacgcccgacgctggcgaggacccgaaggtcacacgggcaaaattttttatccgagacttgttcctgagaatatctacagcgactggagacggaaagcattattgctatccccacttcacctgtgccgtcgacacggagaacataaggcgtgtcttcaacgattgtcgggacatcatacagcgtatgcacttgaagcagtacgagctgctctag

SEQ ID NO: 318507 - DNA, 1146 bp, Artificial Sequence
  derived and/or modified sequence
atgggctgccttggcggaaattccaagacaacggaggaccagggcgtggacgagaaggaacggcgagaggccaacaaaaagattgagaagcaactgcaaaaggagcgactggcctataaggcgacgcacaggttgcttctcctgggagccggagagagcggtaaatctacaattgtcaaacaaatgcgaatcctgcatgttaacgggtttaatccggaagagaagaagcaaaaaattctggatattcgtaagaacgttaaggatgctattgtgactatagtctccgctatgagcaccattatcccccctgtgccccttgccaaccccgaaaatcagtttagaagtgattatattaagagcattgcccctatcacagacttcgagtacagccaagaatttttcgaccacgtcaagaaactgtgggacgatgagggagtgaaagcctgctttgaacggagtaatgagtatcaactaatagattgcgcccagtactttttagaacgaattgacagtgtgagtctggtcgattacacccccacagaccaggaccttcttaggtgcagagtactaacgtccggcatcttcgagacaaggttccaggtcgacaaagttaacttccatatgttcgatgtggggggacaacgggacgagcgccgtaagtggatacagtgtttcaacgacgtaactgctatcatatacgtggctgcttgtagctcatacaacatggtaatacgggaggataacaacactaacaggctccgcgagtccctggatttgttcgagtccatctggaataaccgttggctcagaaccatctctattatcttgttcctgaacaagcaggacatgctggcggaaaaagtgttagcaggaaagtctaaaatcgaggactacttcccagaatacgccaattatacggttccggaagacgcgacccctgatgctggggaggaccctaaggttacccgcgctaagttctttatccgcgacctcttcctgagaatctcaaccgccactggcgatggaaaacattattgctatcctcattttacatgcgctgtggatactgaaaatatcaggagagttttcaatgactgtcgcgacatcatccagagaatgcatctgaagcagtatgaacttctatag

SEQ ID NO: 318508 - DNA, 1146 bp, Artificial Sequence
  derived and/or modified sequence
atgggatgccttggcggtaattcaaagaccaccgaggatcaaggcgttgatgaaaaggagaggagggaagcgaacaagaaaattgaaaagcagctgcagaaggagagattggcctacaaggctactcatagactgctccttctgggagcgggtgagtcaggcaagtccacaattgtcaaacagatgcggatcctgcacgtcaacggatttaaccctgaagagaaaaaacaaaagatcttagatatcagaaagaacgttaaagatgcaattgtcacgatagtgtccgccatgagtaccattatccccccagtgcctcttgcaaacccggaaaaccagtttcgtagcgattacattaagagcattgcccctatcaccgacttcgagtactcccaggaattttttgaccatgtcaaaaaattatgggacgatgagggggtgaaggcttgcttcgagcgctctaatgagtaccaactgatagactgcgcacagtactttctggagaggatagactccgtgtcactggtcgattacacaccaaccgatcaggatctactacgctgccgcgtactgacttctgggattttcgagacccgcttccaggtggacaaggttaacttccatatgttcgatgtggggggtcagagggatgagaggcgcaaatggatccaatgcttcaacgacgtgaccgcaattatttatgtggctgcatgttcatcatacaatatggtcattcgcgaagacaacaatactaaccgccttcgcgaaagtctggatctgtttgaatcgatttggaacaatcgttggctgcgaacaataagtatcatcctgttcctgaacaaacaggacatgttagctgagaaggtgctggccggaaagtcaaagatcgaggattacttcccagagtacgccaactatacggtccctgaggatgcaacccctgacgctggagaggaccccaaggtcacacgggcaaagttcttcattcgcgacctctttttgcggatcagtactgctactggagacgggaagcactattgttaccctcactttacatgcgccgtagacaccgagaatatccgccgagtgtttaatgactgcagagatatcattcagcggatgcatttgaagcagtacgagcttctgtag

SEQ ID NO: 318509 - DNA, 1146 bp, Artificial Sequence
  derived and/or modified sequence
atgggctgtctgggcggaaattcaaagacaaccgaggaccaaggcgtcgatgagaaagagcgtcgcgaagcaaacaagaagattgagaaacagctgcagaaggaaaggcttgcctacaaagcaacacacaggctacttctgctgggcgctggcgaaagtggcaagagcacaatcgtgaagcagatgagaatcctgcacgtgaacggcttcaatccagaggagaagaaacagaagatcctagatatcagaaagaacgtcaaagatgcaatcgttactattgtgagcgcaatgagcacaatcatcccacctgtgcccctcgcaaacccagagaaccagtttcggtcagactatatcaaatccatcgcccctataacagacttcgagtattctcaggagtttttcgaccacgtgaaaaaactgtgggatgatgagggcgtgaaggcatgctttgaacggtctaacgagtatcagctcattgattgcgcacaatactttctcgagagaatcgactcagtctccttggtggactacactccaactgatcaagatctgctccggtgtagggtcctcacgtctggaattttcgaaactcgatttcaggtcgataaagtgaattttcacatgtttgacgtcgggggtcaacgcgatgaaaggagaaaatggattcaatgcttcaatgacgtgacagccatcatctatgtggccgcttgctcatcctacaacatggtcatcagggaagataataataccaatagactccgggagtcactggacctgtttgagagcatatggaacaaccgctggcttagaacaatatcgatcattttgtttctgaataagcaggatatgctggctgagaaggtgctggctgggaaatctaaaattgaggactatttcccagagtatgctaattacaccgttccagaggacgccactcccgacgccggagaagaccctaaagtgaccagagccaagttctttattcgggatctgttcctgcgcatctcgactgcgactggcgacggtaagcactactgctacccacacttcacgtgcgctgttgacaccgagaacataaggagagtattcaacgactgccgggacataatacagcggatgcatctcaagcaatacgagttactctag

SEQ ID NO: 318510 - DNA, 963 bp, Artificial Sequence
  derived and/or modified sequence
atgcggattctgcatgtgaatggctttaatcccgaagagaagaagcagaagatcctagatattaggaagaatgtgaaagatgccatcgtaacgattgtgtccgcgatgagtaccattatacccccagttccgctggctaatccagaaaatcagtttcgtagtgactatataaaatcaattgctccaatcacggattttgaatactcacaagagttttttgatcacgtgaaaaaactatgggacgatgagggcgtaaaggcttgctttgaaagaagtaatgagtatcagttaatcgattgcgcacagtattttctagaaaggatcgactccgtgtctttggtggactataccccaacagaccaggacctgcttagatgccgggtgctgacctctgggatctttgaaacccgcttccaggtggataaagtgaacttccatatgttcgacgtgggcggtcagcgggacgagcggcgaaaatggattcaatgcttcaacgacgtgaccgccatcatctacgttgcagcctgttcgtcatataacatggttatacgagaagacaataacaccaatcggctgcgggaatcactcgacctgtttgagagcatctggaacaataggtggttaagaactatctcaatcattctttttctgaacaagcaggacatgctcgctgagaaggtactggctggcaaatcgaaaatcgaagattattttccagagtatgctaattatactgtgcctgaggatgcaacgcctgatgcaggggaagatcccaaggtaactcgcgcaaaattctttatcagagatctttttttaagaatatccaccgctaccggcgacggaaagcactattgttacccccactttacatgcgcagtggatacagagaatatccggagagttttcaatgactgcagagacataatccagcggatgcatctaaagcaatacgagttgctttag

SEQ ID NO: 318511 - DNA, 1146 bp, Artificial Sequence
  derived and/or modified sequence
atgggctgcctgggcggcaacagcaagaccaccgaggaccagggcgtggacgagaaggagagaagagaggccaacaagaagatcgagaagcagctgcagaaggagagactggcctacaaggccacccacagactgctgctgctgggcgccggcgagagcggcaagagcaccatcgtgaagcagatgagaatcctgcacgtgaacggcttcaaccccgaggagaagaagcagaagatcctggacatcagaaagaacgtgaaggacgccatcgtgaccatcgtgagcgccatgagcaccatcatcccccccgtgcccctggccaaccccgagaaccagttcagaagcgactacatcaagagcatcgcccccatcaccgacttcgagtacagccaggagttcttcgaccacgtgaagaagctgtgggacgacgagggcgtgaaggcctgcttcgagagaagcaacgagtaccagctgatcgactgcgcccagtacttcctggagagaatcgacagcgtgagcctggtggactacacccccaccgaccaggacctgctgagatgcagagtgctgaccagcggcatcttcgagaccagattccaggtggacaaggtgaacttccacatgttcgacgtgggcggccagagagacgagagaagaaagtggatccagtgcttcaacgacgtgaccgccatcatctacgtggccgcctgcagcagctacaacatggtgatcagagaggacaacaacaccaacagactgagagagagcctggacctgttcgagagcatctggaacaacagatggctgagaaccatcagcatcatcctgttcctgaacaagcaggacatgctggccgagaaggtgctggccggcaagagcaagatcgaggactacttccccgagtacgccaactacaccgtgcccgaggacgccacccccgacgccggcgaggaccccaaggtgaccagagccaagttcttcatcagagacctgttcctgagaatcagcaccgccaccggcgacggcaagcactactgctacccccacttcacctgcgccgtggacaccgagaacatcagaagagtgttcaacgactgcagagacatcatccagagaatgcacctgaagcagtacgagctgctgtag

SEQ ID NO: 318512 - DNA, 963 bp, Artificial Sequence
  derived and/or modified sequence
atgagaatcctgcacgtgaacggcttcaaccccgaggagaagaagcagaagatcctggacatcagaaagaacgtgaaggacgccatcgtgaccatcgtgagcgccatgagcaccatcatcccccccgtgcccctggccaaccccgagaaccagttcagaagcgactacatcaagagcatcgcccccatcaccgacttcgagtacagccaggagttcttcgaccacgtgaagaagctgtgggacgacgagggcgtgaaggcctgcttcgagagaagcaacgagtaccagctgatcgactgcgcccagtacttcctggagagaatcgacagcgtgagcctggtggactacacccccaccgaccaggacctgctgagatgcagagtgctgaccagcggcatcttcgagaccagattccaggtggacaaggtgaacttccacatgttcgacgtgggcggccagagagacgagagaagaaagtggatccagtgcttcaacgacgtgaccgccatcatctacgtggccgcctgcagcagctacaacatggtgatcagagaggacaacaacaccaacagactgagagagagcctggacctgttcgagagcatctggaacaacagatggctgagaaccatcagcatcatcctgttcctgaacaagcaggacatgctggccgagaaggtgctggccggcaagagcaagatcgaggactacttccccgagtacgccaactacaccgtgcccgaggacgccacccccgacgccggcgaggaccccaaggtgaccagagccaagttcttcatcagagacctgttcctgagaatcagcaccgccaccggcgacggcaagcactactgctacccccacttcacctgcgccgtggacaccgagaacatcagaagagtgttcaacgactgcagagacatcatccagagaatgcacctgaagcagtacgagctgctgtag

SEQ ID NO: 318513 - DNA, 651 bp, Artificial Sequence
  derived and/or modified sequence
atgctaattggaggcaacattgaggtgcacgtgaaccctggtgacggcacgggcttacggaaggcgctgctacacgcacctacgggcacctgctcagatggccaggcacactcaatttcattagtgagaaaccgaaggatcattaccgtgcagctggatgagaacaaccctgtggaaatgaagctgggtacactggttgagtcccggaccataaatgtctctaacctttatgttggcggcatccccgaaggggagggcactagtctcctcactatgcggcggtctttccacgggtgtatcaagaatcttattttcaaccttgagcttctcgactttaactctgccgtcatgagcaagtccacatggactcccgcaggttgtcagaagggtctgagttggctgcctatgcagcggaccaagctgctcccagagccaagagccttccccgtgggagctgcctcattcacaatctcccaggttcaaagcgcaaaggaaggactggggcagagagagctgaaatgggggctcgcagttaaagtccccgccaaggcaggcgctggggccggagcgggcgccgtacttaagatccgcgccggtaccggaagggaacgtgtgcctcaggctacacaaatgactcggcccaacccctag

SEQ ID NO: 318514 - DNA, 651 bp, Artificial Sequence
  derived and/or modified sequence
atgctgattggaggcaacatcgaggtgcacgtgaaccctggagatggcaccggcctgaggaaggccctgctgcacgcccccaccggcacctgcagtgatggccaggcccacagcatcagcctggtgaggaacagacgcatcatcaccgtgcagctggatgagaacaaccctgtggagatgaagctgggcaccctggtggagagcaggaccatcaacgtgagcaacctgtatgtgggcggcatccctgagggggagggcaccagcctgctgaccatgagaagaagcttccacggctgcatcaagaacctgatcttcaacctggagctgctggacttcaacagcgctgtgatgagcaagagcacctggaccccagctggctgccagaagggcctgtcctggctgcccatgcagaggaccaagctgctgcctgagccccgggccttccctgtgggcgccgccagcttcaccatcagccaggtgcagagcgccaaggagggcctgggccagcgggagctgaagtggggcctggccgtgaaggtgcctgccaaggccggggccggggccggggccggggctgtgctgaagatccgggccggcaccggccgggagcgggtgccccaggccacccagatgacccggcccaacccctag

SEQ ID NO: 318515 - DNA, 651 bp, Artificial Sequence
  derived and/or modified sequence
atgctgatcggcggcaacatcgaggtgcacgtgaaccccggcgacggcacgggcctgaggaaggctcttctccacgcccctaccgggacttgctcggacgggcaggcacactcaatatcgctggtgaggaacagacgtatcatcaccgtgcagctggatgaaaacaatccggtggagatgaaactggggaccctggtggagagccggacgattaacgtttctaatttatacgtaggcggcatcccggaaggcgagggcactagcctgctgacgatgaggaggagcttccatggctgtattaaaaatctcattttcaatctggaactgttggattttaacagcgccgtcatgtctaagtctacctggacaccagccggctgtcagaaagggttgtcttggcttccgatgcagcgtactaaactgctccccgagcctcgggccttccctgtaggcgccgccagtttcactatcagccaggtgcagtctgcaaaagagggtctaggccaaagagaattaaaatggggattagcagtcaaggtgccagcaaaggctggcgccggcgctggggcaggcgcagtactaaagattcgagccggcaccggcagggaacgcgtgccacaggctactcaaatgacacgcccaaatccctag

SEQ ID NO: 318516 - DNA, 651 bp, Artificial Sequence
  derived and/or modified sequence
atgttaattggaggcaacattgaggtccacgtaaaccccggtgatggtaccggactgagaaaggcccttttgcatgcccctaccggtacatgttctgacggccaggctcactcaattagtttagtacggaatcggcgaattatcactgttcagctcgacgagaacaaccccgtcgagatgaagctggggactcttgtggagagccgcacaatcaacgtgagcaacctctacgtgggcggaatcccagaaggggaaggcacttctctgcttacgatgcgccgatcctttcacggttgcatcaaaaacctcatcttcaatctcgagctgctcgattttaattcggcggttatgagcaagagcacatggacacctgcgggttgtcagaaggggcttagttggctgcccatgcagcgtacaaaacttcttccagaaccacgcgcattcccagttggagccgcaagcttcactatctcccaggttcaatctgcaaaggagggcctaggccagagggaattgaagtggggcctggctgtgaaggtgccagccaaagcgggagccggagccggagccggtgccgttctgaagattcgggcaggaacgggcagggagcgcgtcccccaggccactcagatgacccgaccaaacccctag

SEQ ID NO: 318517 - DNA, 651 bp, Artificial Sequence
  derived and/or modified sequence
atgctgatcggcggcaacatcgaggtgcacgtgaaccccggcgacggcaccggcctgagaaaggccctgctgcacgcccccaccggcacctgcagcgacggccaggcccacagcatcagcctggtgagaaacagaagaatcatcaccgtgcagctggacgagaacaaccccgtggagatgaagctgggcaccctggtggagagcagaaccatcaacgtgagcaacctgtacgtgggcggcatccccgagggcgagggcaccagcctgctgaccatgagaagaagcttccacggctgcatcaagaacctgatcttcaacctggagctgctggacttcaacagcgccgtgatgagcaagagcacctggacccccgccggctgccagaagggcctgagctggctgcccatgcagagaaccaagctgctgcccgagcccagagccttccccgtgggcgccgccagcttcaccatcagccaggtgcagagcgccaaggagggcctgggccagagagagctgaagtggggcctggccgtgaaggtgcccgccaaggccggcgccggcgccggcgccggcgccgtgctgaagatcagagccggcaccggcagagagagagtgccccaggccacccagatgaccagacccaacccctag

SEQ ID NO: 318518 - protein, 1161 aa, Artificial Sequence
  derived and/or modified sequence
MKINNNFNINSLVDNKDVAIVRGRKTDIFLKVFQVAPNIWVAPERYYGESLNINEDQKSNGGIYDSNFLLTNDEKDEFLQATVKILQRINNNVIGAKLLSLISTAIPFPYEYRAEDYRQTNYLSSKDNQHYYTANLVIFGPGTNIVENNVVYYKKEDSKNGMGTMSEIWFQPFLTYKYDQFYVDPALELIKCLIKSLYYLYGIKPNDDLSIPYRLRSEFNSLEYSELDMVDFLISGGTDYKLLNTNPYWFTDNYFINAPKNFEKYKNDYETKIKNNNDIANSIKLYLEQKFKTNVQDIWELNLSYFSTEFEIMMPEIFNNALNHYHRKEYYVIDYFKNYNINGFINGQIKTILPLSKYYKNIINKPELIVNLINENNSVLMKSNIYGDGLKDTIGNFYAVYKIPYNIGDEYHINSSDSCLDNVDIKEINNIPPINDADIYPYRKNCDPFTPVYNITETKEINTTIPFPVNYLQAQVTNSNDINLSSDFLKVISSKDRSLVYSFLDNTIDYLDSIKYDGPIDTDKKYYLWLKEIFRNYSFDITATQEINTDCGINKVVTWFGKALNILNTSDSFVEEFQNLGPISLINKKENLSMPKIEIDEIPNSMLNLSFKDLSENLFNIFSKNNSYFEKIYYDFLDQWWTQYYSQYFDLICMAKRSVLAQESLIKKIIQKKLSYLIGNSNISSDNLALMNLTTTNTLRDISNESQIAMNNVNNFLNNVAICVFQTNIYPKFISFMEQCINNINKNTREFIQKCTNITENEKLQLINQNIFSSLDFDFLNIENLKSLFNSETGLLIKEETSPYELVLYAFQEPGNNAIGDASGKNTSIEYSKDIGLVYGINRDALYLNGSNQSISFSNDFFENGLTNSFSIYFWLRNLGKDTIKSKLIGSKEDNCGWEIYFQDTGLVFNMIDSNGNEKNIYLSDVSNNSWHYITISVDRLKEQLLIFIDDNLVANESIKEILNIYSSNTISLVDENNPIYVEGLSILNKPTTSQEVLSNYFKVLNNSYIRDSSEERLEYNKTYQLYNYVFSENPIYEIKQNNNIYLTINNTNNLNLQVSKFKLLSINPNKQYVQKLDEVIISVLDNMEKYIDISEDNRLQLIDNKNNAKKMIISNDIFISNCLIISYNGKYICLSMKDENHNWMICNNDMSKYLYLWSFK

SEQ ID NO: 318519 - protein, 216 aa, Artificial Sequence
  derived and/or modified sequence
MLIGGNIEVHVNPGDGTGLRKALLHAPTGTCSDGQAHSISLVRNRRIITVQLDENNPVEMKLGTLVESRTINVSNLYVGGIPEGEGTSLLTMRRSFHGCIKNLIFNLELLDFNSAVMSKSTWTPAGCQKGLSWLPMQRTKLLPEPRAFPVGAASFTISQVQSAKEGLGQRELKWGLAVKVPAKAGAGAGAGAVLKIRAGTGRERVPQATQMTRPNP

SEQ ID NO: 318520 - DNA, 1310 bp, Artificial Sequence
  derived and/or modified sequence
agataatcatgctttttaataccttttcacctaatggacttcttctctacctgggttcatacggcacaaaagactttttatccatcgagctgtttcgtggcagagtgaaggttatgactgacctgggttcaggacccattacccttttgacagacagacgttataacaatggaacctggtacaaaattgccttccagcgaaaccggaagcaaggagtgctagcagttatcgatgcctataacaccagtaataaagaaaccaagcagggcgagactccgggagcatcttctgacctcaaccgcctagacaaggacccgatttatgtgggtggattaccaaggtcaagagttgtaaggagaggtgtcaccaccaaaagctttgtgggctgcatcaagaacctggaaatatccagatcaacctttgacttactcagaaattcctatggagtgagaaaaggctgtttactggagcccatccggagtgttagcttcctgaaaggcggctacattgaattgccacccaaatctttgtcaccagaatcagaatggctggtaacatttgccaccacgaacagcagtggcatcatcctggctgccctcggcggggatgtggagaagcggggtgatcgtgaggaagcacacgtgcccttcttttccgtcatgctgatcggaggcaacattgaggtacatgtcaatcctggggatgggacaggcctgagaaaagctctcctgcacgctcccacgggtacctgcagtgatggacaagcgcattccatctccttggtcaggaatcggagaattatcactgtccaattggatgagaacaatcctgtggaaatgaagttgggcacattagtagaaagcaggacgataaatgtgtccaatctgtacgtcgggggaattccagagggagaggggacgtcactgctcacaatgagaagatcgttccatggctgtatcaaaaacctgatcttcaatttggaacttttggatttcaacagtgcagttatgagcaagtcgacctggacacctgctggctgtcagaaaggcctaagctggctcccgatgcagaggacaaagctcttgccagagccccgggcttttccagtaggagcggcttcctttactatcagtcaggtccagtcagcaaaggagggcctaggacagagggagttaaaatggggccttgctgtaaaggtgcctgcgaaagctggagctggagctggagctggagctgtgctaaaaatcagagcggggacagggagggaaagggtgcctcaagcaactcagatgacacggcccaatccatag

SEQ ID NO: 318521 - DNA, 504 bp, Artificial Sequence
  derived and/or modified sequence
atgccaatgaaacccccacggtgcacaaggacctcccgaagctcatgtagcagaaccactctgaggcccgctgcgtctccaaatacgaccagtagtcggggtcagactgttcaccctccttgctctagcaaactcaggatggacccaacccccgcctggcccgccagctgcgaggcgctgatggggccctcttcttcagcaggtccagcacggttgcgcctcccccccaggcggcactctagtctgccccctagaagggcaagtttcctcattgtgagcagagctagcaagtcttgggaatgcgcaggccctgtacctgccctgcctggtggcgtggtagccgtgcccacatctcagcaggacccacagtgcaggggatctcaggtggcacacagaagatgtttgagccgagcaatcctgcagtccggaccacagtgtcagtcttgtctctcgatctgggtcacaagcgcgcgaagtagggtccaggcgtcgtcccgcagttag

SEQ ID NO: 318522 - DNA, 1574 bp, Artificial Sequence
  derived and/or modified sequence
cgccagcgcaggtgtgggacgggcggcggactaggcacagagctgcgggagcaggcacagggagtgtggagcctggcggcgggacggcgggatccggtgggagccggagtcccgccgaggggggctggaggtggaggggcccggcgaggccgcgatgaagccgagcggcgaggaccaggcggcgctggcggccggcccctgggaggagtgcttccaggcggccgtgcagctggcgctgcgggcaggacagatcatcagaaaagcccttactgaggaaaaacgtgtctcaacaaaaacatcagctgcagatcttgtgacagaaacagatcaccttgtggaagatttaattatttctgagttgcgagagaggtttccttcacacaggtctcctttttctctagtacacatgtgaacccggcacaggaactggatagaaaacctctcggcaaggccacatagtcatgcacagaacagatgtttgcttagcgcctgcccaaggcctcacccttagtgaacttgggacagtccaagagtgtcaaaagcactgccctgaatgctttagatctagtcttttctttgatcctgagaatgcctttggaaggtgtaaacagcggccagctccacagggaccagcctgcagaaggttcattgcagaagaggccgcggcttctggggccaagtgtgtgctcacccacagcccgacgtggatcatcgaccccatcgacggcacctgcaattttgtgcacagattcccgactgtggcggttagcattggatttgctgttcgacaagagcttgaattcggagtgatttaccactgcacagaggagcggctgtacacgggccggcggggtcggggcgccttctgcaatggccagcggctccgggtctccggggagacaggatctcactctgtcacccaggctggagtgcggtggtgcagtcttggctcactgcagcctccacatcctaggttcaagcaattctcctgcctcatcctcctgagtagctgggactacaggcatgcgccaccacatctggctaatttttttgtattttttagtagagacggggtttcaccatgttggccaggctggtctcaaactgctgacctcaagtgagccttttgcctcggcctccgaaagtgctggggttacagttgtgagccactgcacctgaccatatttttaaaatatagagtcgataatgagttatactgggtttttttttttctgtttttttttttctgagatggagtttcactcttgttgcccaggctggagtgcaatggggcgatctcggctcactgcaacctccgcctccctggttcaagtgattttcctcctaagcctcccaagtagctgggattacaggcgcatgccaccatgcccagctaatttttgtatttttagtggagacagggttttgtcatgttggccaggctggtcttgaactcctgacctcaggtgatccacccgcccgggcctcccaaagtattgggattacaggcatgagccaccacacccggcctcaaccccatctcttaaaaaaataaaaagataacctttgctctc

SEQ ID NO: 318523 - DNA, 5826 bp, Artificial Sequence
  derived and/or modified sequence
atgaagaccagcgacctggtgcccagcttcggctacttcatcagaagccccgagaagagagagcccatcgccctgatcagaaagagcgacgtgagcagaggcaacctggagaaggagatggcccacctgaaccacgacctgtacagcggcgacctgaacgagcagagccaggcccagctgagcgagggcagcatcaccctgcaggtggaggccgtggagagcaccagccaggtggacgagaacgacgtgaccctgaccgccgacaagggcaagaccgaggacaccttcttcatgagcaacaagccccagagatacaaggacaagctgcccgacagcggcgacagcatgctgagaatcagcaccatcgccagcgccatcgccgaggccagcgtgaacaccgaccccagccagctggccgccatgatcaaggccctgagcaacaagaccagagacaagaccttccaggaggacgagaagcagaaggactacagccacgtgagacacttcctgcccaacgacctggagaagagcaacggcagcaacgccctggacatggagaagtacctgaagaagaccgaggtgagcagatacgagagcgccctggagaacttcagcagagccagcatgagcgacacctgggacctgagcctgcccaaggagcagaccacccaggacatccaccccgtggacctgagcgccaccagcgtgagcgtgagagcccccgaggagaacaccgccgccatcgtgtacgtggagaacggcgagagcgagaaccaggagagcttcagaaccatcaacagcagcaacagcgtgaccaacagagagaacaacagcgccgtggtggacgtgaagacctgcagcatcgacaacaagctgcaggacgtgggcaacgacgagaaggccaccagcatcagcacccccagcgacagctacagcagcgtgagaaaccccagaatcaccagcctgtgcctgctgaaggactgcgaggagatcagagacaacagagagaaccagagacagaacgagtgcgtgagcgagatcagcaacagcgagaagcacgtgaccttcgagaaccacagaatcgtgagccccaagaacagcgacctgaagaacaccagccccgagcacggcggcagaggcagcgaggacgagcaggagagcttcagacccagcaccagccccctgagccacagcagccccagcgagatcagcggcaccagcagcagcggctgcgccctggagagcttcggcagcgccgcccagcagcagcagcccccctgcgagcaggagctgagccccctggtgtgcagccccgccggcgtgagcagactgacctacgtgagcgagcccgagagcagctaccccaccaccgccaccgacgacgccctggaggacagaaagagcgacatcaccagcgagctgagcaccaccatcatccagggcagccccgccgccctggaggagagagccatggagaagctgagagagaaggtgcccttccagaacagaggcaagggcaccctgagcagcatcatccagaacaacagcgacaccagaaaggccaccgagaccaccagcctgagcagcaagcccgagtacgtgaagcccgacttcagatggagcaaggaccccagcagcaagagcggcaacctgctggagaccagcgaggtgggctggaccagcaaccccgaggagctggaccccatcagactggccctgctgggcaagagcggcctgagctgccaggtgggcagcgccaccagccaccccgtgagctgccaggagcccatcgacgaggaccagagaatcagccccaaggacaagagcaccgccggcagagagttcagcggccaggtgagccaccagaccaccagcgagaaccagtgcacccccatccccagcagcaccgtgcacagcagcgtggccgacatgcagaacatgcccgccgccgtgcacgccctgctgacccagcccagcctgagcgccgcccccttcgcccagagatacctgggcaccctgcccagcaccggcagcaccaccctgccccagtgccacgccggcaacgccaccgtgtgcggcttcagcggcggcctgccctaccccgccgtggccggcgagcccgtgcagaacagcgtggccgtgggcatctgcctgggcagcaacatcggcagcggctggatgggcaccagcagcctgtgcaacccctacagcaacaccctgaaccagaacctgctgagcaccaccaagcccttccccgtgcccagcgtgggcaccaactgcggcatcgagccctgggacagcggcgtgaccagcggcctgggcagcgtgagagtgcccgaggagctgaagctgccccacgcctgctgcgtgggcatcgccagccagaccctgctgagcgtgctgaaccccaccgacagatggctgcaggtgagcatcggcgtgctgagcatcagcgtgaacggcgagaaggtggacctgagcacctacagatgcctggtgttcaagaacaaggccatcatcagaccccacgccaccgaggagatcaaggtgctgttcatccccagcagccccggcgtgttcagatgcaccttcagcgtggccagctggccctgcagcaccgacgccgagaccatcgtgcaggccgaggccctggccagcaccgtgaccctgaccgccatcgccgagagccccgtgatcgaggtggagaccgagaagaaggacgtgctggacttcggcgacctgacctacggcggctggaaggccctgcccctgaagctgatcaacagaacccacgccaccgtgcccatcagactgatcatcaacgccaacgccgtggcctggagatgcttcaccttcagcaaggagagcgtgagagcccccgtggaggtggccccctgcgccgacgtggtgaccagactggccggccccagcgtggtgaaccacatgatgcccgccagctacgacggccaggaccccgagttcctgatgatctgggtgctgttccacagccccaagaagcagatcagcagcagcgacatcctggacagcgccgaggagttcagcgccaaggtggacatcgaggtggacagccccaaccccacccccgtgctgagaagcgtgagcctgagagccagagccggcatcgccagaatccacgcccccagagacctgcagaccatgcacttcctggccaaggtggccagcagcagaaagcagcacctgcccctgaagaacgccggcaacatcgaggtgtacctggacatcaaggtgcccgagcagggcagccacttcagcgtggaccccaagaacctgctgctgaagcccggcgaggagcacgaggtgatcgtgagcttcacccccaaggaccccgaggcctgcgaggagagaatcctgaagatcttcgtgcagcccttcggcccccagtacgaggtggtgctgaagggcgaggtgatcagcagcggcagcaagcccctgagccccggcccctgcctggacatccccagcatcctgagcaacaagcagttcctggcctggggcggcgtgcccctgggcagaacccagctgcagaagctggccctgagaaacaacagcgccagcaccacccagcacctgagactgctgatcagaggccaggaccaggactgcttccagctgcagaacaccttcggcagcgagcagagactgaccagcaactgcgagatcagaatccaccccaaggaggacatcttcatcagcgtgctgttcgcccccaccagactgagctgcatgctggccagactggagatcaagcagctgggcaacagaagccagcccggcatcaagttcaccatccccctgagcggctacggcggcaccagcaacctgatcctggagggcgtgaagaagctgagcgacagctacatggtgaccgtgaacggcctggtgcccggcaaggagagcaagatcgtgttcagcgtgagaaacaccggcagcagagccgccttcgtgaaggccgtgggcttcaaggacagccagaagaaggtgctgctggaccccaaggtgctgagaatcttccccgacaagttcgtgctgaaggagagaacccaggagaacgtgaccctgatctacaaccccagcgacagaggcatcaacaacaagaccgccaccgagctgagcaccgtgtacctgttcggcggcgacgagatcagcagacagcagtacagaagagccctgctgcacaagcccgagatgatcaagcagatcctgcccgagcacagcgtgctgcagaacatcaacttcgtggaggccttccaggacgagctgctggtgaccgaggtgtacgacctgccccagagacccaacgacgtgcagctgttctacggcagcatgtgcaagatcatcctgagcgtgatcggcgagttcagagactgcatcagcagcagagagttcctgcagcccagcagcaaggccagcctggagagcaccagcgacctgggcgccagcggcaagcacggcggcaacgtgagcctggacgtgctgcccgtgaagggcccccagggcagccccctgctgagcagagccgccagaccccccctggaccagctggccagcgaggagccctggaccgtgctgcccgagcacctgatcctggtggcccccagcccctgcgacatggccaagaccggcagattccagatcgtgaacaacagcgtgagactgctgagattcgagctgtgctggcccgcccactgcctgaccgtgaccccccagcacggctgcgtggcccccgagagcaagctgcagatcctggtgagccccaacagcagcctgagcaccaagcagagcatgttcccctggagcggcctgatctacatccactgcgacgacggccagaagaagatcgtgaaggtgcagatcagagaggacctgacccaggtggagctgctgaccagactgaccagcaagcccttcggcatcctgagccccgtgagcgagcccagcgtgagccacctggtgaagcccatgaccaagccccccagcaccaaggtggagatcagaaacaagagcatcaccttccccaccaccgagcccggcgagaccagcgagagctgcctggagctggagaaccacggcaccaccgacgtgaagtggcacctgagcagcctggcccccccctacgtgaagggcgtggacgagagcggcgacgtgttcagagccacctacgccgccttcagatgcagccccatcagcggcctgctggagagccacggcatccagaaggtgagcatcaccttcctgcccagaggcagaggcgactacgcccagttctgggacgtggagtgccaccccctgaaggagccccacatgaagcacaccctgagattccagctgagcggccagagcatcgaggccgagaacgagcccgagaacgcctgcctgagcaccgacagcctgatcaagatcgaccacctggtgaagcccagaagacaggccgtgagcgaggccagcgccagaatccccgagcagctggacgtgaccgccagaggcgtgtacgcccccgaggacgtgtacagattcagacccaccagcgtgggcgagagcagaaccctgaaggtgaacctgagaaacaacagcttcatcacccacagcctgaagttcctgagccccagagagcccttctacgtgaagcacagcaagtacagcctgagagcccagcactacatcaacatgcccgtgcagttcaagcccaagagcgccggcaagttcgaggccctgctggtgatccagaccgacgagggcaagagcatcgccatcagactgatcggcgaggccctgggcaagaactag

SEQ ID NO: 318524 - DNA, 5826 bp, Artificial Sequence
  derived and/or modified sequence
atgaaaacatcagaccttgtgcccagtttcgggtatttcattaggtcccctgaaaaaagggaaccaatagccctgattcggaagtcagacgtgtcaaggggaaatctagaaaaagaaatggctcacttgaatcacgatctctactccggggacctcaatgaacagtcccaggctcagctcagcgaaggctctattacgctccaggtggaagccgttgagagtacttcacaggtagatgagaatgatgtgaccttgacagctgacaaaggtaagacagaagatacattttttatgagcaataagccgcagcggtacaaggataagctgcccgatagcggcgattcaatgctacgcataagtaccatagcatccgccatcgccgaagcttcagtcaatactgatccatcgcagttggcggcaatgatcaaggcattgtccaacaaaacccgggataagacatttcaggaagatgagaagcagaaagactattcacatgtgcggcatttcctgcccaacgatctggagaagtctaacgggtcaaatgccctcgacatggagaagtaccttaagaaaactgaagtcagccgttatgaaagtgctttagaaaatttttcccgggcatcgatgagtgatacatgggacctctccttgcctaaggaacagaccactcaagacattcatcccgtggacttgtccgccacttcagtgagtgtgcgtgcccccgaagaaaatacagccgccatcgtgtacgttgaaaacggtgaaagcgaaaatcaagaatcctttagaacaatcaactcctctaatagcgtgaccaaccgagaaaacaattcggctgttgtcgacgtgaaaacctgttcaatcgacaataaactacaggacgtgggtaatgatgaaaaggcgacatccattagcacacctagcgacagctacagctccgtgagaaatcctcgtattaccagtctttgtctactgaaagattgcgaagagatacgcgataatcgcgagaatcagagacaaaacgaatgtgtgtccgaaatttctaactcagagaagcatgtcacctttgaaaaccaccgaatcgtttcaccaaagaacagcgatttaaagaataccagcccagagcacggggggcggggcagtgaggacgaacaggaatcttttcggccgtccacctctcccttgtcacactcatccccatccgagattagcggaaccagtagctctggatgtgcactagaatcatttggctccgccgcccaacagcagcaacctccgtgtgagcaggagctgagccctctggtgtgtagccccgcgggcgtgtctcggctcacgtacgtgagtgagcctgagagctcttacccaaccacggctactgacgacgcattggaggatcgaaagtccgatataaccagtgagctttccacgactattatacaagggtcaccagccgccttggaggaacgtgctatggagaagcttagggagaaggttccatttcagaaccgaggaaaagggactctgtcttccatcatccagaacaacagcgatacccgaaaggcgaccgagaccacctctctgagctccaagccggaatatgtgaagcccgatttcagatggagtaaggatcctagcagcaagtcaggaaacctactggaaacgtcggaggtgggctggacatctaatccagaagaactggaccccattagattagccctcctgggcaagtccgggttatcatgtcaagttggcagcgccacaagccatccagtgagctgccaggaacctattgatgaggatcaaagaatctctcccaaggataaaagcaccgctggcagagagtttagcggtcaggtgtcccatcagacaacttccgagaatcagtgtacgcccatcccctcctccacggtgcactcctccgtcgccgatatgcagaacatgcctgctgcagtgcacgcactacttactcaaccatcgctgagcgccgctccatttgcccagaggtacctcggaaccctgccgtctactggcagtacaacactccctcaatgccacgccggaaacgccactgtgtgcggattctcaggcggcctgccataccctgctgtggctggcgaacccgtccagaacagcgtggctgttgggatatgcctcggttctaacatcggatctggttggatgggaacatcatccctctgtaacccgtatagcaatacccttaaccagaatctgctgtctactacaaagcccttccctgtgcctagcgtggggaccaactgcggaatcgagccatgggattctggtgttacatcaggcctagggtccgtgagggtacctgaggaactcaagctgccacacgcttgctgcgtcgggatagcctctcagaccctgttatccgtgttaaaccctactgataggtggcttcaagtttctatcggtgtgctgtcaatctccgttaatggagaaaaggtggacttgtccacctatcggtgcctggtcttcaagaacaaagctatcataagacctcacgccaccgaggagattaaggtgctgttcattccaagctctcccggggtgttccggtgcacctttagcgttgcgtcctggccctgtagcaccgatgcagaaaccatcgttcaggcagaggccttggccagcactgttacgctcactgccattgcagagtcccccgtgattgaagtcgagacagagaagaaagacgtgcttgactttggcgatctcacctacgggggatggaaggctctcccgctcaagcttattaacaggacccacgctacagtccccatcaggcttattattaacgctaacgcagtcgcatggcgatgctttacattcagcaaggaatccgtccgagcacctgttgaagtggcgccctgcgccgacgtggtcactcgtctggctgggcccagtgtcgtcaaccatatgatgcccgcctcctacgacggtcaggatcccgagtttctcatgatctgggtgctctttcatagccccaaaaaacagatctccagcagcgatatcctcgactctgcggaagaattttctgcgaaagtcgatatcgaggtcgactcccctaatccaactcccgtgctcagaagcgtgtcactgcgggccagagccggcattgcccgtatacatgcacctagggacctgcagacaatgcacttcttagccaaggttgccagtagccgcaagcagcacctgcccctcaagaacgccgggaatattgaggtctaccttgatattaaggtgcctgagcaaggctcccatttctccgttgatcctaagaacctgctgttgaagccgggcgaagaacacgaagtgattgtgtcttttacaccgaaggatcccgaagcttgtgaggagcgcatcttaaagattttcgtacaaccctttggcccacagtatgaggtggtgctgaaaggtgaggtcatctcgtccgggtccaagcctctgagtcccggcccatgccttgacattcctagcatcctttccaacaaacagtttctcgcatggggcggagtaccgttgggcaggacacagttgcagaaactggctctacgtaacaactctgccagcaccacacagcatctgcgtctcctgattaggggacaggatcaggactgtttccagctgcagaacaccttcggctctgagcagcggctcacttctaactgtgagattcggatccatccaaaagaagatatttttatcagcgtcctctttgcacctaccagactatcttgcatgcttgcccgccttgagattaagcagctcggcaatagaagccagcctggaataaagttcacaattcctctgagcggctacggcggaacaagcaacctgatcttagaaggagtcaagaaactgagcgattcatacatggttactgttaacggtctcgtgcccggaaaagaaagcaagatcgtattcagcgttcgcaacactgggtcccgcgcagctttcgtgaaggcagtcggattcaaggatagtcaaaaaaaggtgttgttagacccaaaagtcctgcgaatctttcccgataagtttgtattgaaggagcggacacaggagaacgtgacactcatttacaatccgtccgacaggggaatcaataacaaaaccgctactgagctctcgacagtgtatctgtttggcggggatgagattagtagacagcagtataggcgcgccctgctgcacaaacctgaaatgattaagcagatcctccccgagcattcagtcctgcagaatatcaacttcgtggaagcctttcaagacgaactacttgttactgaggtgtatgacctgccccagcgccccaacgacgtgcagctcttctatggttcaatgtgtaagatcatcctgtcagtcattggagaattcagagactgtatctcttctagagagttcctccagccatccagtaaagcgagcttggagtccacgtccgatctgggtgcatccggaaaacacgggggaaatgtttcactcgacgtgttgcctgtgaaaggtccacagggctcgcccctcttgtcccgagcggctagaccacctctggaccagctcgcttctgaggagccatggacagttcttccagagcacctgatcttggtggctcctagtccatgcgacatggctaagactgggcggtttcagatcgtgaacaactccgttagactgttgagatttgaactctgctggcccgcacactgcctgaccgttacgccccagcacggctgtgttgctccagaatccaaactccagattctggtgagccccaactcaagcctgtcaactaagcaatctatgttcccctggagcggactaatatacatccactgcgatgacggacaaaagaaaatcgtcaaggtacagattagagaggacctgacacaagttgagctgctcactcgccttacctctaaacccttcggaattctttcccctgtgagtgagccatccgtcagtcatcttgtgaaaccaatgactaaacccccttccaccaaagtggagataagaaataaaagtattactttccccaccacggagcccggtgaaacatccgagtcatgtcttgagctagaaaatcacggaaccacagacgtcaaatggcacctttcgtctctggccccaccctacgtgaaaggggtggacgaatcaggtgatgtgtttcgggccacatatgctgcgttcaggtgctcaccaatctctggtctactggagtcacacggtatccaaaaagtcagcatcaccttcttgccaagaggaaggggggattacgcccagttctgggatgtcgagtgccacccgctgaaggagccccatatgaaacataccctgaggttccagctctctggccagtctatagaggctgaaaatgaaccagaaaacgcctgtctgagcacagactccttaatcaagatcgaccacctagtcaaaccacggcggcaggcggtcagcgaagcaagcgcccgcatcccagagcaactcgacgttacagcccgcggtgtatacgctcccgaagacgtttatcggtttcgccccaccagcgtgggcgaaagtaggactctcaaagtgaatctgcggaataatagttttatcacacactccctgaagtttctttccccacgcgagcctttctacgttaagcacagtaaatattcactcagggcacagcattacataaacatgcctgtccagtttaagcctaaatcagccgggaagtttgaggccctgctggtgatccagacggatgagggtaaaagtattgccatccgcctgattggcgaagcattgggtaagaactag

SEQ ID NO: 318525 - DNA, 5826 bp, Artificial Sequence
  derived and/or modified sequence
atgaagaccagtgacctggtgcccagctttggctacttcatccgcagccctgagaagcgggagcccatcgccctgatcaggaagagtgatgtgtcccggggcaacctggagaaggagatggcccacctgaaccacgacctgtacagcggggacctgaatgagcagagccaggcccagctgtctgagggcagcatcaccctgcaggtggaggccgtggagagcaccagccaggtggatgaaaatgatgtgaccctgacagctgacaagggcaagacagaggacaccttcttcatgagcaacaagccccagcgctacaaggacaagctgcctgacagcggggacagcatgctgcgcatcagcaccatcgccagcgccatcgccgaggcctctgtgaacacagaccccagccagctggccgccatgatcaaggccctgagcaacaagacccgggacaagaccttccaggaggatgagaagcagaaggactacagccacgtgcgccacttcctgcccaatgacctggagaagagcaatggcagcaatgccctggacatggagaagtacctgaagaagacagaggtgagccgctatgaaagtgccctggagaacttcagccgggcctccatgtctgacacctgggacctgagcctgcccaaggagcagaccacccaggacatccaccctgtggacctgagcgccacctctgtgtctgtgcgggccccagaagaaaatacagctgccatcgtgtatgtggagaatggagagagcgagaaccaggagagcttccgcaccatcaacagcagcaacagcgtgaccaaccgggagaacaacagcgctgtggtggatgtgaagacctgcagcattgacaacaagctgcaggatgtgggcaatgatgagaaggccaccagcatcagcacccccagcgacagctacagctctgtgaggaacccccgcatcaccagcctgtgcctgctgaaggactgtgaggagatccgggacaaccgggagaaccagaggcagaatgaatgtgtgtctgagatcagcaacagcgagaagcacgtgacctttgagaaccacagaattgtgagccccaagaacagcgacctgaagaacaccagccctgagcacggcggccggggctctgaagatgagcaggagagcttccggcccagcaccagccccctgagccacagcagccccagcgagatcagcggcaccagcagcagcggctgtgccctggagagctttggcagcgctgcccagcagcagcagcccccctgtgagcaggagctgagccccctggtgtgcagccctgctggggtgtcccggctgacctacgtgtctgagcctgagagcagctaccccaccacagccacagatgatgccctggaggacaggaagagtgacatcaccagcgagctgagcaccaccatcatccagggcagccctgctgccctggaggagcgggccatggagaagctgcgggagaaggtgcccttccagaacagaggcaagggcaccctgagcagcatcatccagaacaacagcgacaccaggaaggccacagagaccaccagcctgagcagcaagccagaatatgtgaagccagacttccgctggagcaaggaccccagcagcaagagcggcaacctgctggagaccagcgaggtgggctggaccagcaaccctgaggagctggaccccatccggctggccctgctgggcaagagcggcctgagctgccaggtgggcagcgccaccagccaccctgtgtcctgccaggagcccattgatgaggaccagaggatcagccccaaggacaagagcacagctggccgggagttcagcggccaggtgagccaccagaccaccagcgagaaccagtgcacccccatccccagcagcacagtgcacagctctgtggccgacatgcagaacatgcctgctgctgtgcacgccctgctgacccagcccagcctgtctgctgccccctttgcccagcgctacctgggcaccctgcccagcacaggcagcaccaccctgccccagtgccacgccggaaatgccaccgtgtgtggcttcagcggcggcctgccctacccagctgtggccggggagcctgtgcagaacagcgtggccgtgggcatctgcctgggcagcaacatcggcagcggctggatgggcaccagcagcctgtgcaacccctacagcaacaccctgaaccagaacctgctgagcaccaccaagcccttccctgtgcccagcgtgggcaccaactgtggcatcgagccctgggacagcggcgtgaccagcggcctgggctctgtgcgggtgcctgaggagctgaagctgccccacgcctgctgcgtgggcatcgccagccagaccctgctgtctgtgctgaaccccacagaccgctggctgcaggtgtccattggagtgctgagcatctctgtgaatggagagaaggtggacctgagcacctaccgctgcctggtgttcaagaacaaggccatcatccggccccacgccacagaggagatcaaggtgctcttcatccccagcagccctggggtcttccgctgcaccttctctgtggcctcctggccctgcagcacagatgctgagaccatcgtgcaggccgaggccctggccagcacagtgaccctgacagccatcgccgagagccctgtgattgaggtggagacagagaagaaggatgtgctggactttggagacctgacctacggcggctggaaggccctgcccctgaagctgatcaacagaactcatgccaccgtgcccatccgcctcatcatcaatgccaatgctgtggcctggcgctgcttcaccttcagcaaggagagcgtgcgggcccctgtggaggtggccccctgtgctgatgtggtgacccggctggccggccccagcgtggtgaaccacatgatgcctgccagctatgatggccaggaccctgagttcctgatgatctgggtgctcttccacagccccaagaagcagatcagcagcagtgacatcctggacagcgctgaggagttcagcgccaaggtggacatcgaggtggacagccccaaccccacccctgtgctgcggtctgtgtccctgcgggcccgggccggcatcgcccgcatccacgccccccgggacctgcagaccatgcacttcctggccaaggtggccagcagcaggaagcagcacctgcccctgaagaatgccggcaacatcgaggtgtacctggacatcaaggtgcctgagcagggcagccacttctctgtggaccccaagaacctgctgctgaagccaggagaggagcacgaggtgattgtgtccttcacccccaaggaccctgaggcctgtgaggagcgcatcctgaagatctttgtgcagcccttcggcccccagtatgaggtggtgctgaagggggaggtgatcagcagcggcagcaagcccctgagccctggcccctgcctggacatccccagcatcctgagcaacaagcagttcctggcctggggcggcgtgcccctgggccgcacccagctgcagaagctggccctgaggaacaacagcgccagcaccacccagcacctgcggctgctgatccggggccaggaccaggactgcttccagctgcagaacaccttcggcagcgagcagaggctgaccagcaactgtgagatccgcatccaccccaaggaggacatcttcatctctgtgctgtttgcccccacccggctgagctgcatgctggcccggctggagatcaagcagctgggcaacagaagccagcccggcatcaagttcaccatccccctgagcggctacggcggcaccagcaacctgatcctggagggcgtgaagaagctgagtgacagctacatggtgacagtgaatggcctggtgcctgggaaggagagcaagatcgtgttttctgtgaggaacacaggcagccgggccgcctttgtgaaggctgtgggcttcaaggacagccagaagaaggtgctgctggaccccaaggtgctgcgcatcttcccagacaagtttgtgctgaaggagaggacccaggagaatgtgaccctcatctacaaccccagcgaccggggcatcaacaacaagacagccacagagctgagcacagtgtacctgtttggaggagatgagatcagccggcagcagtacagaagagccctgctgcacaagccagagatgatcaagcagatcctgcctgagcacagcgtgctgcagaacatcaactttgtggaggccttccaggatgagctgctggtgacagaggtgtatgacctgccccagaggcccaatgatgtgcagctgttctacggctccatgtgcaagatcatcctgagcgtcatcggggagttccgggactgcatcagcagccgggagttcctgcagcccagcagcaaggccagcctggagagcaccagtgacctgggcgccagcggcaagcatggaggaaatgtgtccctggatgtgctgcctgtgaagggcccccagggcagccccctgctgagccgggccgcccggccccccctggaccagctggccagcgaggagccctggacagtgctgcctgagcacctgatcctggtggcccccagcccctgtgacatggccaagacaggccgcttccagatcgtgaacaacagcgtgcggctgctgcgctttgagctgtgctggccagcccactgcctgactgtgaccccccagcacggctgtgtggcccctgagagcaagctgcagatcctggtgagccccaacagcagcctgagcaccaagcagagcatgttcccctggagcggcctcatctacatccactgtgatgatggccagaagaagatcgtgaaggtgcagatccgggaggacctgacccaggtggagctgctgacccggctgaccagcaagcccttcggcatcctgagccctgtgtctgagcccagcgtgagccacctggtgaagcccatgaccaagccacccagcaccaaggtggagatccggaacaagagcatcaccttccccaccacagagcccggggagaccagcgagagctgcctggagctggagaaccacggcaccacagatgtgaagtggcacctgagcagcctggccccaccctacgtgaagggcgtggatgagagcggagatgtgttccgggccacctatgctgccttccgctgcagccccatcagcggcctgctggagagccacggcatccagaaggtgtccatcaccttcctgccccggggccgcggggactatgcccagttctgggatgtggagtgccaccccctgaaggagccccacatgaagcacaccctgcgcttccagctgagcggccagagcattgaagcagaaaatgaaccagaaaatgcctgcctgagcacagacagcctcatcaagattgaccacctggtgaagccccggcggcaggccgtgtctgaggccagcgcccgcatccctgagcagctggatgtgacagcccggggcgtgtatgccccagaagatgtgtaccgcttccggcccacctctgtgggggagagcaggaccctgaaggtgaacctgaggaacaacagcttcatcacccacagcctgaagttcctgagcccccgggagcccttctacgtgaagcacagcaagtacagcctgcgggcccagcactacatcaacatgcctgtgcagttcaagcccaagtctgctgggaagtttgaggccctgctggtgatccagacagatgagggcaagagcatcgccatccgcctcatcggggaggccctgggcaagaactag

SEQ ID NO: 318526 - DNA, 5826 bp, Artificial Sequence
  derived and/or modified sequence
atgaagaccagcgacctggtgcccagcttcggctacttcatccggtccccagagaaacgcgaacctattgcacttattaggaaatctgacgtgagcagaggtaacctggagaaggagatggctcatctcaatcacgatctgtactctggtgacctcaatgagcaaagtcaagcacaactcagcgagggctctatcacacttcaggtggaggcggtggaatcaacaagccaggtggacgagaatgacgttaccctcaccgcagacaagggcaagaccgaggacaccttcttcatgagcaataagccccagcgctataaggacaagttacccgactctggggatagcatgttacggatctctacaattgcctccgccattgctgaggcaagcgtgaacaccgatccttcacagctcgcagccatgatcaaggcgctatccaataagaccagagacaaaacttttcaagaagatgagaagcaaaaggattactcccacgtgcgacatttcctccccaacgatcttgaaaagtccaatggcagtaatgccctggatatggaaaagtacctgaagaaaactgaggtctccaggtatgagtctgccttggagaacttttcacgagccagtatgagcgacacctgggatctgtccctccctaaggagcagacaacccaggatatccatccagtcgatctatctgccacttccgtctccgtgcgggctcccgaagaaaacaccgccgcgatagtttatgtcgaaaacggggaaagtgagaatcaggagagttttcggacgatcaatagcagcaacagtgttaccaaccgtgaaaacaactccgccgttgtcgacgtgaaaacttgtagtattgataacaaactgcaggatgtcggcaatgatgagaaggccaccagcatctctacaccctccgactcctattcatcagtgaggaatccccgtattacatccctttgtctccttaaagattgtgaggagattcgcgataatcgagagaatcaacgacaaaatgagtgtgtgtcagaaatctccaattcagagaaacacgtaacctttgagaaccaccggatagtgtcccctaaaaattctgatctaaaaaacacctctcccgagcatggcggcaggggctccgaggatgagcaggagagttttaggccctcaacctcccccctttcccacagtagcccatccgaaattagcggtaccagcagcagcgggtgtgcactcgaatcctttggatccgcggcccagcagcagcagcctccgtgcgaacaagagctgtcccccttggtgtgttccccagcaggcgtctctcgcctcacgtacgtgtccgaacctgagtccagttaccccaccacagctaccgacgacgcacttgaagatcgcaaaagcgatataacctccgaattgagcacaaccattatccaggggagcccagctgctctagaggagagagctatggagaaactgagggaaaaggttcccttccagaatcggggaaaaggaacattgtctagtattatccagaataattcggatacccggaaagcaactgaaaccacctccctgtcatccaagcccgagtacgtcaaaccagattttaggtggtccaaagacccgagcagcaagagcggcaacctcctagagaccagcgaggtgggttggacctccaatcccgaagagctggatccaataaggctggccctgttaggtaagagcggcctgtcatgtcaggtcgggagcgctacatcccatccagtatcatgccaggaacccattgacgaagaccaaagaatctcacccaaggataagagcacagctggaagggaattctccggtcaggtttcccaccagacaacttctgaaaatcagtgcacccctatacctagctcaaccgtgcattctagtgtcgccgacatgcagaacatgcctgccgcggtccatgccctgctgactcagccaagcctgtccgccgccccattcgcccaacggtacctcggaaccctgccttccacgggttccactaccctccctcagtgtcacgcgggcaacgctactgtctgcggattttctggcggcctgccttatcccgccgtcgctggggagccagtgcagaacagcgtggccgtggggatatgcctcggtagcaacattggctccggttggatggggacttcctccctgtgcaatccgtactcaaacactctgaaccagaacctgctgtcgacgactaaaccatttcccgtgcccagcgtgggaacaaactgtggcatcgaaccctgggatagcggcgttaccagtggactaggctctgttcgcgtgccagaggaactgaaattgccgcacgcttgctgtgttggcatagcttctcagacccttctgtccgtgctgaatccaacggaccgctggctgcaggtgtctattggtgttttatctatcagtgtgaatggggagaaagtagacttgtcgacatatcgttgtctagtgttcaagaataaggccattattagaccccatgcaactgaggagatcaaagtgctgttcattccttcttctccgggcgtttttcggtgcactttttctgtcgcaagttggccctgttccaccgatgctgaaactattgtccaagctgaagcactggcctctaccgtaaccttgactgccatcgctgaatcgcccgttattgaagtcgagactgagaagaaggatgtcctcgacttcggggacctgacatacggaggatggaaggctctcccactgaagctgattaaccgcacacacgccaccgtgccaatccggcttattattaacgccaatgcagtcgcatggagatgtttcactttctccaaagaatccgtgcgggcccctgtggaagttgctccttgcgccgatgtcgtaactaggttggccggaccctccgtcgtcaatcacatgatgcccgcttcttatgacggtcaggaccctgagtttctgatgatctgggtcctgtttcacagcccaaagaaacaaatatcctcttcagatattctggacagcgcagaggagtttagtgccaaggtcgacattgaagtcgacagccccaacccaacaccagtgctgcgaagcgtcagtctccgcgcccgtgccggaattgccaggattcatgctccaagggatctgcaaaccatgcattttctggccaaggtggcttcctcacgcaagcagcacctccctcttaagaatgctggaaacattgaggtgtacttagatattaaggttcccgagcagggctctcatttctccgtggacccgaagaacttacttctgaagccgggagaggagcatgaagtgattgtgtccttcacgccgaaggaccctgaagcctgcgaggagcgaatcctgaagatctttgtgcaaccttttggaccacagtatgaagtcgtgctaaaaggcgaggttatcagttcaggtagcaaaccattatctccgggaccttgccttgacataccaagtatcctgtctaataagcagttcctggcatggggcggcgttccactcggccgtacccagcttcagaagcttgccctgcgaaataactcagcctccactacacagcacttgaggctgttgataagagggcaggaccaggactgctttcaactccagaatacattcggaagcgagcaacgattaactagcaattgtgaaatccggatccatcccaaggaggatattttcatctcagtgctgtttgcacccactagactcagctgcatgcttgcccgcctggaaattaaacaactgggcaaccgcagccagccgggtatcaagttcactatcccgctgtccggctacggaggcacttccaatttaatccttgaaggcgtgaaaaaattgagtgatagttacatggtaacagtgaatggtctggttcccgggaaagagtccaaaattgtgttcagtgtgcgcaacacgggctcaagagccgccttcgtcaaggcagtcggctttaaggattcacagaaaaaggttttgcttgatccgaaggtgctaagaatattcccagataaattcgttctcaaggaaaggacccaagagaatgtgacactgatctacaacccatctgataggggaattaacaacaaaacagccacagagctgagcacagtatatctcttcggaggtgatgagatatctcgtcagcagtaccgtcgggcattgcttcacaaacccgagatgatcaagcaaattttgcccgaacatagtgtgttgcagaacatcaactttgtggaggccttccaagacgagctgctagtgacggaagtctacgatcttccccagagaccaaatgacgtgcagcttttctacggttctatgtgtaagattatcctaagcgtgattggcgaatttcgtgattgcatatcgtctcgggagttccttcaacccagtagcaaagcatcgctggagtctacctcagacctcggcgcctctggcaagcacggcggaaacgtgtccctggatgtcctcccagtgaagggcccccagggcagtcccctgttgagccgagccgcccggcctcccctggatcagttggccagtgaggagccctggacggttctgccggaacatttgatcttagtcgcaccaagtccctgcgacatggcaaagactgggcgattccagatagtgaataatagcgttcgacttctgagattcgaattgtgctggccggcacattgtctgaccgtcacccctcagcatggctgtgtcgcccccgagtccaagctgcagattttggtgtcgccaaactcttctctgtccacaaaacaatccatgtttccctggtcagggctgatatatatccattgcgacgacggccagaagaaaattgtgaaggtgcagatcagagaggacctgacacaggtagaactgctgacaagactgaccagcaagccattcgggattttaagtccagttagtgagccttccgtcagtcacctggtaaaacccatgacgaaaccaccctcgaccaaagtggagattagaaataaatcaatcacttttccgaccactgaaccaggagaaacctccgaaagttgcctggagttggagaaccatggcactaccgatgtaaaatggcatttatcctcccttgctcctccctatgttaagggggtggacgagagtggcgatgtgtttcgggccacttatgccgcctttcgatgtagtccaattagtggcttattagagtcccacggcattcagaaggtgtcaattaccttcttgccacgagggagaggcgactatgcccaattttgggacgttgaatgccatcctttaaaggagcctcatatgaagcacactctgaggttccaactgagcggacaaagcatcgaggccgaaaacgagccagaaaatgcttgcctgtccaccgactcgctgatcaagatcgatcacttggtgaagcccaggcggcaggcagtatccgaggcgtctgcccgaataccagagcaactcgatgtaaccgcgcggggggtttacgccccagaggatgtctacaggttccgacccactagcgttggagagagccgtactttgaaggtgaaccttcgaaataattcctttattactcattctctgaaattcctgtcgcctcgggaaccattctacgtaaagcattccaaatactctctgagggctcagcattacataaacatgccagtccagtttaagccaaaaagcgccggtaagttcgaggccctgctagtaattcagacggacgaggggaaatctatcgccatccgtttaatcggcgaggccctcggcaagaactag

SEQ ID NO: 318527 - DNA, 5825 bp, Artificial Sequence
  derived and/or modified sequence
atgaagaccagcgaccttgttcccagtttcgggtatttcatcaggtctccagagaaacgtgaacctatcgccttaattcgaaagagtgatgtaagccggggaaatctggagaaagaaatggcacacctgaaccatgatctatattctggcgatcttaatgaacaaagtcaggcccaattgtcagagggtagtattactctacaggtcgaagccgtcgaaagcacatctcaagtggatgaaaacgatgtgacgcttactgccgacaaaggaaaaacagaggacacattctttatgtccaataagccccagcgttacaaagataagctgccggattccggagatagtatgctgcggatttctactatcgcctccgccatcgccgaggccagtgtaaatactgatccttcacagcttgccgctatgattaaggcacttagtaataagaccagagacaaaaccttccaggaggatgaaaaacagaaagactacagccacgtcaggcattttttgccgaacgacctcgagaagagtaatggatctaatgcattagacatggagaaatacctcaaaaagacagaggtttctcgatacgagagcgcactggagaacttctctcgggctagcatgtccgatacctgggacctctccttgccaaaggaacagaccacccaggacatccacccggtggatctctcagcaaccagcgtgtccgttcgagcccctgaggagaacacagccgctatagtctacgtggagaatggagagtctgagaatcaggaatcttttagaaccatcaattcaagtaactctgttaccaatagagagaataacagtgccgtcgttgatgtgaagacgtgttcgattgataacaagctgcaggacgtgggcaatgatgaaaaggccacgagtatttcaactcctagcgactcctactcgtcagtcaggaatcctagaattaccagcctgtgcctccttaaagattgtgaggagattcgcgataacagggagaatcagagacagaacgagtgtgtgtccgaaatctctaattccgagaagcacgtaacattcgagaaccatcgtatcgtctcacctaaaaacagcgatctgaagaatacctctcctgaacacgggggacgagggtctgaggatgaacaggagagttttcggcctagtactagtcctctatcccattcgagtccctctgaaattagcggcacctcttccagcgggtgcgcccttgagtcctttggtagcgctgcgcagcagcaacaaccaccatgcgaacaggagctctctccactggtgtgttcaccagccggtgtcagccggctgacgtatgtgtccgagccagaatcgtcctaccccaccacagctaccgacgacgctctggaggaccgtaaaagtgacatcactagcgagttgtctaccacaatcatccagggatctccggctgctctagaggaaagagcaatggaaaagttacgtgaaaaggtgcctttccagaataggggtaaggggacactgagctctatcatccagaacaattccgatactaggaaggcaacagaaacaacatcattgagctcgaagccagagtacgttaagcctgacttccggtggtcaaaggaccctagctccaaaagcggaaaccttctcgagacttccgaagtgggctggacgtcaaatccagaggagcttgatcccatcagactcgctctacttggaaagtctggcctgtcctgtcaggtgggatccgcgacaagccatcccgtgagttgtcaggaacctattgacgaagaccagcgaatctcccctaaggacaaatctactgcaggcagggagttctctgggcaggtcagccaccagaccaccagcgaaaatcagtgtaccccaattccttcttcaacagtccattcctctgtagcagacatgcagaacatgcccgcagctgttcatgccctgttgacccagccatcgctttcagctgcaccctttgcccaaagatatcttggcaccctgccctccacgggaagcacaacactacctcaatgtcacgccggaaatgctacagtgtgcgggttcagcggcggtctcccctaccccgcagtggcgggtgagcccgtccagaattctgttgcagtaggcatctgcctgggatcaaacatcggcagcgggtggatgggaactagcagtctgtgtaatccatactcaaacactcttaatcagaacctgctctctacaacaaagccgttccccgtaccatcagtggggactaattgcggaattgagccgtgggatagcggcgtgacgagtggtctcggaagcgtgagagtgccagaagagttgaaattgccccatgcatgttgtgtcggcatcgccagtcagacgctcctctccgtgctgaaccctaccgatcgctggttgcaggttagtatcggagtgctctctatttcagtcaatggcgagaaagtggacctatccacctacagatgtctggtgtttaagaacaaagctatcatccgtccacacgctactgaggagatcaaggtcctgttcattccctcttcaccaggcgtctttcgctgtacattctcggtggcatcgtggccctgctctactgatgccgaaaccattgtccaagccgaagcccttgcaagtactgtgacactgacagccattgcggagtccccagtaatcgaggtggaaaccgaaaaaaaggatgtcctcgacttcggcgaccttacatatggagggtggaaggcgctccctctgaagctgataaataggactcacgcaacagtccccattcggctcattataaatgcgaatgcagtagcatggcgatgctttaccttcagcaaagagtctgttcgggctccggtggaagtcgcgccatgcgcagatgtcgtgactcgtttggccggtccaagtgttgtgaatcatatgatgccagccagttatgacggacaagaccctgagtttctgatgatatgggttctgttccacagtccgaagaaacagatcagctccagtgacattcttgactcagccgaagagtttagcgccaaggtcgatatcgaagttgacagccccaatcctacccccgtcctccgatcagtctccctgcgggcacgggcaggcatagctcgcatccacgcccctcgcgatttgcaaactatgcatttcctggcgaaagttgcctccagcaggaagcagcatcttcctctcaaaaacgcgggtaatattgaggtatatctggatattaaggtgcccgaacagggctctcatttcagtgtggaccccaaaaacctgctcctgaaacctggggaggagcacgaagtgatcgtgtccttcacccccaaggatccagaagcatgcgaagagcgaatcctgaaaatcttcgtccaaccgttcggtccgcagtacgaggtcgtacttaagggagaggtgatctcctcaggatctaagcctctcagtcctggaccatgccttgacatcccaagcatcctgagcaataagcagtttctagcatggggtggagtcccgctggggagaacacagctccagaagctagcactcaggaacaacagcgctagcactactcagcacttgcggttactcatacggggacaagaccaagattgtttccaactccagaacacttttggaagtgaacaacggctcaccagcaattgcgagattcgcattcatcctaaggaagacatctttatcagtgttcttttcgctcccaccagattgagctgtatgctggcaaggttggaaattaaacaactggggaacagatcccagccaggcattaaattcaccatcccacttagcggctacggcggtacctccaatcttatcctggagggggtcaaaaagttgtccgatagttacatggtaactgttaacggcctggttcctggtaaggagtcaaaaattgtgttttctgtcagaaacaccggcagccgcgcagctttcgttaaagcagtaggatttaaggacagccagaagaaggttctgttagacccaaaagtcttgcgtatcttcccggacaaattcgtacttaaagaacgcacgcaagaaaatgtaactcttatctataatccatcagaccggggaataaataataaaacagctaccgagctgtccaccgtctacctatttgggggtgacgaaatctctcgacaacagtatcgcagggcccttcttcacaagccagagatgatcaagcagatcttacccgagcacagtgtgctgcagaatatcaacttcgtagaggcctttcaggatgaattgctggttacagaggtctacgatctgccacagaggcctaatgacgttcagctcttttatggttcgatgtgcaagatcatcctcagtgtaattggggagttcagagactgcatctccagcagggagttcctgcagccctcttctaaagcctcactggagagcactagtgacctgggcgctagcggcaaacatggaggaaatgtgtctctcgatgtactaccagttaaaggcccacaggggagcccgttacttagccgagctgcacgcccacctcttgaccagttggcatctgaggagccgtggacagtgttaccagaacatcttatcttggtggcgccatctccatgtgacatggcgaagacagggcgttttcagatagttaataactctgtgaggctgctgcggtttgagttgtgttggcccgctcactgccttaccgtaactccgcagcacggttgcgtcgcgcctgaaagcaagctccagattctggtcagcccaaacagctccctgtcgaccaaacagtcgatgtttccttggagcggtcttatctatattcactgtgatgatggtcagaagaagattgtgaaggtgcaaatccgtgaggatctaacccaggttgagctcttaacccgcctgactagcaagccgtttggcatactatctccagtgtctgaaccctccgtgtcccaccttgtcaagccaatgacgaagcccccaagtactaaagttgagatcagaaataaaagcattacttttcccaccacagaaccaggtgagacctccgagtcatgcctagagctcgagaaccatggaacaacagacgtaaagtggcaccttagctcgctggcccctccttacgtgaaaggagtcgacgaatcgggcgacgtatttcgcgcaacatatgcagctttcagatgctcaccgatctccggcctcctggagagtcatggtatccaaaaggtgagcattacgtttcttcctagaggaagaggtgattacgcgcagttctgggacgtagagtgtcatcctctgaaggagccacatatgaagcataccttgaggtttcaactatcaggccaatccattgaagctgagaacgagccagaaaatgcatgtttatcgacggactctctgataaaaatcgatcatctggtgaaacccaggcgccaggctgtctcagaggctagtgctcgtatacctgagcaactggacgtgaccgccagaggcgtgtacgccccagaagacgtgtaccgttttaggccaacatcagtgggcgaatctagaacgttaaaagttaacctcaggaacaacagctttatcacacacagtctgaaattcttaagccctcgagaaccattttacgttaagcattccaaatactctctgagagcgcaacattatatcaatatgcctgtccaattcaagccaaaatctgcaggcaaatttgaggccctgctggttatccagacagacgaagggaaatctattgctattagattgataggtgaagccctaggtaagaacta

SEQ ID NO: 318528 - DNA, 7697 bp, Artificial Sequence
  derived and/or modified sequence
agtgccctgggacacctcttcagtccgtggactttcccgctgcacactgccctccgaagtcggggacgcgggctcgtgagatggaagattttcgaggtatagcagaagaatcatttccaagctttctcaccaattcattatttggtaacagtgggattttggaaaatgtcactctttcttcaaatcttggcttgcctgttgctgtttctacacttgctagggatagatccagcactgataacaggtatcctgatatccaggcatcttacttagtagaagggagattttcagttccatccgggtcatctcccggaagccagagtgatgctgaaccaagagagaggttacagcttagcttccaggatgatgattctatctctaggaaaaagagctatgtggaaagtcaacgtttgtcaaatgctctcagcaaacagtcagctttacaaatggagacagcaggaccagaagaggagccagccggagctacagaatccttgcagggccaagatctcttcaacagggcttcaccactggaacaagcacaagactcacctattgattttcatttacagtcatggatgaataataaggaacccaagattgttgtgcttgatgctggaaaacattttgaagacaagactctaaagagtgacctaagccacactagcttattagaaaatgagaaacttatcttaccgacaagcttggaagattcttctgatgatgatattgatgatgaaatgttttatgatgatcatttggaggcttattttgaacaactggcaattccaggaatgatatatgaagacctagaaggaccagaacctccagaaaaaggttttaagttacctacaaatggtcttagacaggcaaatgaaaacggtagcttaaactgcaagtttcaatcagaaaataacagctctctgatttccctcgactcacactcttctgaaacaactcacaaagagtctgaggaaagccaagttatttgtctacctgggactagtaattctataggtactggagatagtagaaggtacacagatggtatgttaccattttcctctggtacttggggaactgagaaagaaatagaaaatttgaagggtattgttccagatcttaacagtgaatgtgcaagtaaagatgttctggtgaagaccctcagggctattgatgtgaaacttaactctgataattttcatgatgcaaatgccaatagaggtggttttgatctgactgaccctgtaaaacagggggcagagtgtcctcaccaaaataagacagttttgcacatggatggatgtttagacactgagactcctacggtgtccattcaagaaaatgtggatgtagcctctttgaagcccattagtgacagtggaattaatttcactgatgccatttggtcaccaacttgtgaaaggcgaacatgtgaatgtcacgagtccatcgaaaagaataaagacaaaacagatctcccacagagtgtggtctatcaaaatgaagagggtaggtgggtcacagaccttgcctattacacatcttttaatagcaaacaaaatttaaatgtgtctctaagtgatgagatgaatgaagacttcagatctggttccatcatttggctattttattagatcaccagagaagagagaacctattgccttaataagaaaatctgatgtatcaagaggtaatttggaaaaagaaatggctcatcttaaccatgatctatattcaggagatttaaatgaacagtcccaggcacagctaagtgaaggatcaattacacttcaggttgaagcagtagagagtacttcacaagtggatgaaaatgatgtgacgttaacggctgataaaggcaaaacagaggacactttcttcatgagcaacaaaccccaaagatacaaagacaagctaccagatagtggtgattctatgcttaggatcagcaccattgcttcagccattgcagaggcatcagttaatactgatccttcccaacttgctgcaatgatcaaggcactttcaaataaaaccagagacaagacttttcaggaagatgagaaacaaaaggactattctcatgtgcgtcatttcttacctaatgatttagaaaaaagtaatggatccaatgcacttgatatggagaaataccttaaaaaaacagaagttagtagatatgaaagtgcattggaaaacttttcaagggctagtatgtctgatacttgggatttatctttgcccaaagaacaaactactcaagacattcatccggtggacttaagtgctactagtgtaagtgtgagggcaccagaagaaaacacagcagctattgtttatgttgaaaatggagagagtgagaatcaagagtcatttagaaccataaactcctcaaattcagttacaaatagagagaataacagtgcagtagttgatgtgaagacatgttccattgacaacaaattacaagatgttggtaacgatgaaaaagctacctcaatttccactccatctgatagttattcatcagtgaggaaccccagaataacatccctttgtctgttaaaagactgtgaagaaatacgagataacagagaaaatcagaggcaaaatgagtgtgtcagtgaaataagcaacagtgagaagcatgtgacttttgaaaaccatcgcatagtctcacctaaaaatagtgatttgaaaaatacctctcctgagcatggtggacgtggctcagaggatgagcaggagagcttcagaccttccacgtcaccactgagtcattcttctcctagtgaaatttctggaacgagttcatcagggtgtgcgttagagtcctttggttcagcagctcagcagcagcagcctccctgtgagcaggagttgtctcccttggtgtgctcgcctgctggggtgagcaggctgacgtatgtgtctgaaccagagagctcctatcctaccacagccacagatgatgccctggaggaccgcaagagtgatatcaccagcgagttgagtaccacaattattcaaggcagtccagccgcattggaggaacgggctatggaaaaattgagagaaaaagttccatttcagaatagaggaaaaggaacattatcatctattatccagaataactctgatacaagaaaagcaactgaaactacttctctgagtagcaagcctgaatatgtaaaacctgactttagatggagtaaagatccttcctccaaaagtggaaatctgttggaaaccagtgaggtaggttggacatcaaaccctgaggaattggacccgatcaggctggctctcctgggcaagtcaggtctgagctgtcaggtggggtcagccacatcacaccctgtgtcctgccaggagcctatagatgaagatcaaagaataagtcctaaagataagtcaactgctggccgtgagttcagtggccaggtttctcatcagaccacctctgaaaaccagtgtactcctattcccagcagcacagttcacagctctgtggctgacatgcagaacatgcctgctgctgtgcacgcactcttgacacaaccctctctcagcgctgctccttttgctcagcggtatttgggaacactcccttcaactggaagcaccaccttgcctcagtgccatgctggcaatgccacagtctgtggcttctcaggaggccttccctatccagctgttgcaggagagcctgtgcagaactctgtggctgtgggaatttgtctaggatcaaatatcggctctggatggatgggtacctcttccctctgtaacccatattctaataccttaaatcagaacctgctaagcacaacaaaaccttttcctgtgccgtctgttggtacaaactgtggaattgaaccatgggattcaggagtgacatcaggattggggagtgtccgagtgcccgaggagttgaagcttcctcatgcttgctgtgtcgggatcgcttcccagaccctcctcagtgtgcttaatccaactgaccgctggctgcaagtcagcattggggtcctcagcattagtgttaatggtgaaaaggtggatctttcaacatatcgttgtttagttttcaagaataaagccatcataagacctcatgccacagaagagataaaagtgctttttataccatccagtcctggggttttcagatgcacattcagtgttgcttcttggccatgttcgacagatgctgagaccatcgtacaggcagaagctttggccagcaccgtcactctcactgccattgccgagagtcctgttattgaggtagaaacagaaaagaaagacgttcttgattttggtgacttgacttatggaggctggaaagccctcccactaaaattgataaaccgaacgcatgccactgtgccaattagactgattattaatgctaacgctgtagcctggcgctgtttcacgttttccaaggaatccgtccgagctcctgtggaagttgctccttgcgctgatgtggtcactcggctagcaggcccttctgtggtcaaccacatgatgcctgctagttatgatggacaggatccagaatttctgatgatttgggttcttttccatagtccaaagaaacagatcagctcttcagatattctggactcagcagaagaattctcggcaaaagttgatatcgaagttgacagcccaaaccctacgcccgttcttagaagtgtgagtctccgagcaagagcaggaatagctaggatccatgctcccagggacttgcagacgatgcatttcttggccaaagtggcttcctcaagaaagcagcacttacctttgaaaaatgctgggaacattgaagtttatttggatatcaaggtcccagaacaaggaagtcacttttcagtggatccaaagaatctactccttaaacctggagaagaacatgaggttattgtttcatttactccaaaggatcctgaagcctgcgaggaaaggatcttgaaaatatttgtgcagccatttggacctcagtatgaggtagtgttaaaaggcgaagtcatttcttcaggaagtaaacctctgtcacctggaccttgcttagatattccatcgattttgtccaacaaacaatttctggcttggggaggagtccctctaggtagaacacagcttcagaaactagctttaagaaataattctgcatctacaactcaacatttacgactgcttattagaggacaagatcaggactgctttcagcttcagaacacttttggttcagaacagcgattgaccagtaactgtgagatcagaattcacccaaaggaagacattttcatctctgtattatttgcacctactcgattatcttgcatgttggctagactagaaatcaaacaacttggaaatcgatcacaaccaggcattaagttcacaatacctttgtctggatatggaggaacaagcaatcttattttggaaggcgttaaaaaattatctgacagttacatggtaacagtgaatggcttagtacctggcaaagaaagtaaaattgttttttctgtccgcaacactggctcccgagcagcttttgttaaagcagtaggttttaaggattctcagaaaaaagttttgctggatcctaaagtattgaggatttttccagataaatttgtactcaaggaaagaacacaagaaaatgttactttaatatataatccatcagacagaggaatcaataataaaactgcaacagaactatcaactgtatacttatttggtggagatgaaatttcaagacagcagtatcgcagggccctgttacataaaccagagatgataaaacagatacttccagaacatagtgtgcttcaaaacattaattttgttgaagcatttcaagatgagctattagtaactgaagtatatgatcttccccaacgacctaatgatgttcagctcttttatggaagcatgtgtaaaattatactttcagtaattggagaattcagagattgcatttctagcagagaattccttcagccttcttccaaagctagcttggaatctacaagcgacttgggagcttctgggaaacatggtggcaacgtctctttggatgttttaccagtcaaaggtcctcagggttctcctcttctctcacgggcggctcgcccgcctctggatcagctggcctccgaagagccgtggactgtcctacccgagcacttgattctggtagctccttctccttgtgacatggcaaaaactggacgtttccagattgtgaataactctgtgaggttactgagatttgagctgtgctggccagcgcattgcctcacagtcacgccgcagcatggatgtgtcgcgccagagagtaaactacaaattcttgtgagtcctaattcctccttatccacaaaacagtcaatgttcccgtggagtggtttgatctatatacactgtgacgatggacagaagaaaattgtgaaagttcaaattcgagaagatttaactcaagtggaacttttaactcgtttgacctccaaaccatttggaattctttccccagtatctgagccttcagttagtcatttggtcaaaccaatgacaaaaccgccttccacaaaagttgaaataagaaacaagagtattacttttcctacaacagaacctggtgaaacttcagagagctgtctagaactcgagaatcatggcaccacagacgtgaaatggcatctgtcatctttagcgccaccttatgtcaagggagttgatgaaagtggagatgtttttagagctacctatgcagcattcagatgttctcctatttctggtctgctggaaagccatgggatccaaaaagtctccatcacatttttgcccagaggtaggggggattatgcccagttttgggatgttgaatgtcaccctcttaaggagcctcacatgaaacacacgttgagattccaactctctggacaaagcatcgaagcagaaaatgagcctgaaaacgcatgcctttccacggattccctcattaaaatagatcatttagttaagccccgaagacaagctgtgtcagaggcttctgctcgcatacctgagcagcttgatgtgactgctcgtggagtttatgccccagaggatgtgtacaggttccggccgactagtgtgggggaatcacggacacttaaagtcaatctgcgaaataattcttttattacacactcactgaagtttttgagtcccagagagccattctatgtcaaacattccaagtactctttgagagcccagcattacatcaacatgcccgtgcagttcaaaccgaagtccgcaggcaaatttgaagctttgcttgtcattcaaacagatgaaggcaagagtattgctattcgactaattggtgaagctcttggaaaaaattaactagaatacatttttgtgtaaagtaaattacataagttgtattttgttaactttatctttctacactacaattatgcttttgtatatatattttgtatgatggatatctataattgtagattttgtttttacaagctaatactgaagactcgactgaaatattatgtatctagcccatagtattgtacttaacttttacaggtgagaagagagttctgtgtttgcattgattatgatattctgaataaatatggaatatattttaatgtggtatatcc

SEQ ID NO: 318529 - protein, 213 aa, Artificial Sequence
  derived and/or modified sequence
MRRCQIIRDMIGPEKTLMMDANQRWDVPEAVEWMSKLAKFKPLWIEEPTSPDDILGHATISKALVPLGIGIATGEQCHNRVIFKQLLQAKALQFLQIDSCRLGSVNENLSVLLMAKKFEIPVCPHAGGVGLCELVQHLIIFDYISVSASLENRVCEYVDHLHEHFKYPVMIQRASYMPPKDPGYSTEMKEESVKKHQYPDGEVWKKLLPAQEN

SEQ ID NO: 318530 - protein, 142 aa, Artificial Sequence
  derived and/or modified sequence
MVRGRISRLSVRDVRFPTSLGGHGADAMHTDPDYSAAYVVIETDAEDGIKGCGITFTLGKGTEVVVCAVNALAHHVLNKDLKDIVGDFRGFYRQLTSDGQLRWIGPEKGVVHLATAAVLNAVWDLWAKQEGKPVWKLLVDMG

SEQ ID NO: 318531 - DNA, 429 bp, Artificial Sequence
  derived and/or modified sequence
atggtaaggggaagaatcagccggttatcagtgagggatgtgcgcttcccaacctccctgggcggtcatggggccgacgcaatgcacacagatcccgattattccgctgcgtatgtggtcatagaaacagatgcagaagacggaatcaagggatgcggcataacttttactttaggtaagggtacagaagtggtggtttgtgccgttaatgcgctggctcaccacgtgctgaataaggatctcaaggacattgtcggcgattttcggggtttttataggcaactgacatcagacggccaactgagatggatcggacccgagaaaggggttgtacacctcgctaccgcagctgtcttgaacgctgtctgggacctgtgggccaagcaggaagggaaaccggtttggaagctgctcgtagacatgggctag

SEQ ID NO: 318532 - DNA, 429 bp, Artificial Sequence
  derived and/or modified sequence
atggtgcggggccgcatcagccggctgtctgtgagagatgtgcgcttccccaccagcctgggcggccatggagcagatgccatgcacacagatcctgactacagcgctgcctacgtggtgattgaaacagatgctgaagatggcatcaagggctgcggcatcaccttcaccctgggcaagggcacagaggtggtggtgtgtgctgtgaatgccctggcccaccacgtgctgaacaaggacctgaaggacatcgtgggggacttccggggcttctaccggcagctgaccagtgatggccagctgcgctggattggccctgagaagggcgtggtgcacctggccacagctgctgtgctgaatgctgtgtgggacctgtgggccaagcaggagggcaagcctgtgtggaagctgctggtggacatgggctag

SEQ ID NO: 318533 - DNA, 429 bp, Artificial Sequence
  derived and/or modified sequence
atggtgcggggccggatcagccggctgagcgtgcgggacgtgcggtttccaacatccctgggggggcacggtgctgacgcaatgcatacagatcctgactacagcgcggcctacgtggttattgagactgacgcggaagacgggatcaaagggtgcgggattacctttactttaggcaagggtactgaggtcgtggtatgtgctgtaaatgccctggcgcatcacgtgctgaacaaggatctgaaagatatcgttggagatttcagaggtttctaccgccagctgacctcggacggtcagttgaggtggataggcccggaaaagggggtcgtgcatctcgcaacagctgccgtccttaacgcggtatgggacttgtgggcaaagcaggaggggaagcctgtttggaagttgttagtcgacatgggctag

SEQ ID NO: 318534 - DNA, 429 bp, Artificial Sequence
  derived and/or modified sequence
atggtcagagggaggatcagtcgcttaagcgttagagatgtgcgctttccgactagtctggggggacacggagccgacgccatgcacacagacccagactacagtgccgcatatgtggtcattgaaactgatgcagaggacggaattaagggatgcgggatcaccttcacgcttggcaagggtactgaagtcgtggtgtgcgccgtcaacgcattggcccaccatgtgctgaacaaggatcttaaggacatagttggggactttcgagggttttacaggcagctcacgtccgatggacagctccgctggataggaccagagaagggtgtcgtccacctggcaacggctgcggtgttgaacgctgtatgggacctctgggccaagcaggaggggaagcctgtttggaagctgttggtggatatgggctag

SEQ ID NO: 318535 - DNA, 429 bp, Artificial Sequence
  derived and/or modified sequence
atggtgagaggcagaatcagcagactgagcgtgagagacgtgagattccccaccagcctgggcggccacggcgccgacgccatgcacaccgaccccgactacagcgccgcctacgtggtgatcgagaccgacgccgaggacggcatcaagggctgcggcatcaccttcaccctgggcaagggcaccgaggtggtggtgtgcgccgtgaacgccctggcccaccacgtgctgaacaaggacctgaaggacatcgtgggcgacttcagaggcttctacagacagctgaccagcgacggccagctgagatggatcggccccgagaagggcgtggtgcacctggccaccgccgccgtgctgaacgccgtgtgggacctgtgggccaagcaggagggcaagcccgtgtggaagctgctggtggacatgggctag

SEQ ID NO: 318536 - DNA, 886 bp, Artificial Sequence
  derived and/or modified sequence
cgcggccacggggcgcaggggccatggtgcgcggcaggatctcccggctctcggtccgggacgtgcgcttccccacgtcgcttgggggccacggcgcggacgccatgcacacggaccctgactactcggctgcctatgtcgtcatagaaactgatgcagaagatggaatcaaggggtgtggaattaccttcactctgggaaaaggcactgaagttgttgtctgtgctgtgaatgccctcgcccaccatgtgctcaacaaggacctcaaggacattgttggtgacttcagaggcttctataggcagctcacaagtgatgggcagctcagatggattggtccagaaaagggcgtggtgcacctggcgacagcggccgtcctaaacgcggtgtgggacttgtgggccaagcaggagggaaagcctgtctggaagttacttgtggacatggggtgaacaactggatgctgaggaggaaaaaactgggcaaattaaaggggaatgagcttcagaccccatgcagagctggctgtgagtccgggtttcactgctcaccagctgcatgaccttgagcatgtgacttccccactctgagctgcggtggcctcagtgcaacacctgggtggcggttaaaaacctcgtgatccacaaatgaaggcccttgttattagttggcaaaaaattaaggaaaaacaaagaacaccatggccttgaagagtgttgggcaggagactgctcctcctccggaggaaagtgaagacaggaggctgtcacatcgtctctgacatggagagtggcttccgggccatccgtaggggaaggacacagagctcttgagcccccttctagattcaaggatcccaggatgctggtatcctgcatagatttca

SEQ ID NO: 318537 - protein, 1239 aa, Artificial Sequence
  derived and/or modified sequence
MGTLSLHPGIDVRDAPLKEIKVTSSRRFIASFNVVNTTKRDAGKYRCMIRTEGGVGISNYAELVVKEPPVPIAPPQLASVGATYLWIQLNANSINGDGPIVAREVEYCTASGSWNDRQPVDSTSYKIGHLDPDTEYEISVLLTRPGEGGTGSPGPALRTRTKCADPMRGPRKLEVVEVKSRQITIRWEPFGYNVTRCHSYNLTVHYCYQVGGQEQVREEVSWDTENSHPQHTITNLSPYTNVSVKLILMNPEGRKESQELIVQTDEDLPGAVPTESIQGSTFEEKIFLQWREPTQTYGVITLYEITYKAVSSFDPEIDLSNQSGRVSKLGNETHFLFFGLYPGTTYSFTIRASTAKGFGPPATNQFTTKISAPSMPAYELETPLNQTDNTVTVMLKPAHSRGAPVSVYQIVVEEERPRRTKKTTEILKCYPVPIHFQNASLLNSQYYFAAEFPADSLQAAQPFTIGDNKTYNGYWNTPLLPYKSYRIYFQAASRANGETKIDCVQVATKGAATPKPVPEPEKQTDHTVKIAGVIAGILLFVIIFLGVVLVMKKRKLAKKRKETMSSTRQEMTVMVNSMDKSYAEQGTNCDEAFSFMDTHNLNGRSVSSPSSFTMKTNTLSTSVPNSYYPDETHTMASDTSSLVQSHTYKKREPADVPYQTGQLHPAIRVADLLQHITQMKCAEGYGFKEEYESFFEGQSAPWDSAKKDENRMKNRYGNIIAYDHSRVRLQTIEGDTNSDYINGNYIDGYHRPNHYIATQGPMQETIYDFWRMVWHENTASIIMVTNLVEVGRVKCCKYWPDDTEIYKDIKVTLIETELLAEYVIRTFAVEKRGVHEIREIRQFHFTGWPDHGVPYHATGLLGFVRQVKSKSPPSAGPLVVHCSAGAGRTGCFIVIDIMLDMAEREGVVDIYNCVRELRSRRVNMVQTEEQYVFIHDAILEACLCGDTSVPASQVRSLYYDMNKLDPQTNSSQIKEEFRTLNMVTPTLRVEDCSIALLPRNHEKNRCMDILPPDRCLPFLITIDGESSNYINAALMDSYKQPSAFIVTQHPLPNTVKDFWRLVLDYHCTSVVMLNDVDPAQLCPQYWPENGVHRHGPIQVEFVSADLEEDIISRIFRIYNAARPQDGYRMVQQFQFLGWPMYRDTPVSKRSFLKLIRQVDKWQEEYNGGEGRTVVHCLNGGGRSGTFCAISIVCEMLRHQRTVDVFHAVKTLRNNKPNMVDLLDQYKFCYEVALEYLNSG

SEQ ID NO: 318538 - DNA, 3720 bp, Artificial Sequence
  derived and/or modified sequence
atgggtaccctgagtttgcatcccggaattgacgtccgtgacgccccccttaaggagattaaggtgacctcatctcgcaggttcatcgccagctttaatgtcgtgaacacgacaaaaagggatgctggcaagtacaggtgtatgatcaggaccgagggtggggtcggcatctccaattacgccgaactagttgtgaaggaacctcccgtgcccatcgcaccgccgcagctcgcttctgtcggagccacttacctttggatccagctgaatgccaattccatcaatggcgatggccctattgtggcaagggaggtcgagtactgcacagcgagcggcagctggaacgacagacaaccagtggatagtacatcatataagatcggccacctagacccggataccgaatacgaaatatctgttctgttgacaagacctggtgaaggtggaactggctctccaggccctgccctaaggaccagaacaaaatgtgcagatcccatgcgcggacctaggaagttggaggtagttgaagtcaagtcccggcaaatcactatccggtgggagccattcggatataatgtgactcgatgccactcttacaacctgactgtgcattactgttaccaagttggcggccaggaacaggtgcgcgaggaggtgtcttgggataccgagaatagtcatccgcagcacaccattactaacctctcaccctacaccaacgtatcagtgaagcttatactgatgaatcccgaagggcgtaaagagagccaggagcttattgtccaaacagatgaggacctgccgggcgccgtccctaccgaatccatccagggctctacatttgaggagaagatcttcctgcagtggcgtgagcccacacagacatatggagtgataacactgtacgagattacttataaggccgtctcttcgtttgacccagaaatcgacctgtctaaccagagcgggcgcgtgtcaaaactcgggaatgaaacccacttcctgttttttggactctatcctggcactacatactctttcaccatcagagccagcacagcaaagggcttcggacccccagccaccaatcagttcactaccaagataagcgcacccagtatgcccgcctacgagttagaaactcctctcaaccaaaccgacaacaccgtgaccgtgatgctgaaaccagcccactctcgcggtgcacctgtttctgtgtatcagattgtggtggaagaggagcgcccacgccgaacaaagaagacaacagagatccttaagtgctatccagtacccatccactttcaaaatgcctccctactgaacagccagtactacttcgcagctgagtttccagcagacagtttacaagctgcccagccattcaccataggcgataataagacttataacggatactggaacacaccattgctgccctacaaatcataccgcatctatttccaggccgcctcaagggcaaacggggagacaaaaattgattgtgtccaagtggccaccaagggagcagcgacccccaagcctgtaccagagcccgaaaaacagaccgatcataccgtgaaaatcgcgggagtaattgccggtatcttgctttttgtcataatcttcctcggagtggtgctggttatgaagaaaagaaagttggcaaaaaagagaaaagaaacaatgtcaagcacacggcaggaaatgacagtgatggtgaattcaatggacaagagttatgctgagcagggtacaaactgcgatgaagccttctcttttatggacacccacaacctgaatggcagatccgtttcctcaccaagctcgttcactatgaagactaatacactgtctacttcggtgcccaatagttactatccagatgagacccacacgatggcgtctgatacttcgagcctggtgcagagccatacatataagaagagagagcccgcagacgtcccctaccagactggacaattacaccctgctattagagtcgcagatctcctgcagcatattacccagatgaagtgtgccgaggggtatggtttcaaggaggaatatgaaagctttttcgaaggacagagcgctccctgggactccgccaaaaaagacgaaaacaggatgaaaaatcgatatggaaatatcatcgcttacgaccacagcagagtccgcctacagacgatcgagggtgacactaattccgattacattaacggcaattacatcgatggatatcatcggccaaatcactacatagctacgcagggacccatgcaggagacgatctatgacttctggcgcatggtttggcatgagaacactgcctcaattatcatggtgaccaacctcgtggaagtgggaagagtgaagtgttgcaaatactggcctgacgacaccgagatctataaggacatcaaggtgaccctgattgaaaccgaacttttagccgaatacgttattcggacattcgcagtcgagaaacggggcgtccacgaaatcagggagatccgccagtttcattttacgggttggcctgatcatggcgtaccataccacgcgaccgggctgctgggattcgtcaggcaggtgaagtccaagagtcctccttcagccgggccactcgttgtgcattgctcggccggcgctggtagaactgggtgtttcatcgtgattgatatcatgctcgacatggcggagcgagagggtgttgtcgacatttacaattgcgttcgagagctgcgatcccgtagagttaatatggtacagactgaagaacagtacgtcttcattcatgacgcaattctcgaggcctgtctgtgtggagatacatctgtacccgcctcccaggttaggtccctgtactacgacatgaacaaactcgacccccagacgaatagctcacagatcaaggaggaattcagaaccctcaatatggtgacaccaacgctgagggtcgaagactgctccattgctctactgcctcggaaccacgagaaaaatcgctgtatggacattctgccccccgatcggtgcctccctttcttgataacgattgatggagagtccagcaattacatcaatgctgctctaatggattcctataaacaaccaagtgcctttatagtgacccagcatccactgccaaacactgtgaaggacttttggaggttagtgttggattatcactgtacctccgtggtaatgttaaacgacgtcgacccagcacaactctgcccacagtactggcccgagaacggggtgcatagacacggccctatccaagtcgaattcgtgagcgccgatctagaggaggatattatttcccggattttccgcatttacaacgccgcccgtccacaggacggctatcggatggtgcaacaattccagttcctcggttggcctatgtatcgagatactcccgtcagcaaaaggtctttcctgaagctcatcagacaagtggataagtggcaggaagagtataatggtggcgaaggccggactgtcgtccattgcttaaacggaggaggaaggagcggcactttctgtgccattagtattgtgtgcgagatgctgcgtcatcagcggaccgtcgatgtgttccacgcggtcaaaacactgagaaataataagccgaatatggtggatctgctcgaccagtacaagttctgctacgaagttgccctggagtacctcaactcgggctag

SEQ ID NO: 318539 - DNA, 3720 bp, Artificial Sequence
  derived and/or modified sequence
atgggcaccctgagcctgcaccctggcattgatgtgagagatgcccccctgaaggagatcaaggtgaccagcagccgccgcttcatcgccagcttcaacgtggtgaacaccaccaagagagatgctgggaagtaccgctgcatgatcagaacagaaggaggagtgggcatcagcaactatgcagagctggtggtgaaggagccccctgtgcccatcgccccaccccagctggcctctgtgggcgccacctacctgtggatccagctgaatgccaacagcatcaatggagatggccccatcgtggcccgggaggtggagtactgcacagccagcggctcctggaatgaccggcagcctgtggacagcaccagctacaagattggccacctggaccctgacacagaatatgagatctctgtgctgctgaccaggcctggagagggcggcaccggcagccctggccctgccctgcggaccaggaccaagtgtgccgaccccatgaggggccccaggaagctggaggtggtggaggtgaagagccggcagatcaccatccgctgggagcccttcggctacaacgtgacccgctgccacagctacaacctgactgtgcactactgctaccaggtgggcggccaggagcaggtgcgggaggaggtgtcctgggacacagagaacagccacccccagcacaccatcaccaacctgagcccctacaccaacgtgtctgtgaagctgatcctgatgaaccctgagggcaggaaggagagccaggagctgattgtgcagacagatgaggacctgcctggagctgtgcccacagagagcatccagggcagcacctttgaggagaagatcttcctgcagtggagggagcccacccagacctatggagtcatcaccctgtatgagatcacctacaaggctgtgagcagctttgatcctgagattgacctgagcaaccagagcggccgggtgtccaagctgggcaatgagacccacttcctgttcttcggcctgtacccaggcaccacctacagcttcaccatccgggccagcacagccaagggcttcggccccccagccaccaaccagttcaccaccaagatcagcgcccccagcatgcctgcctatgagctggagacccccctgaaccagacagacaacacagtgacagtgatgctgaagccagcccacagcagaggagcccctgtgtctgtgtaccagatcgtggtggaggaggagcggcccaggaggaccaagaagaccacagagatcctgaagtgctaccctgtgcccatccacttccagaatgccagcctgctgaacagccagtactactttgctgctgagttccctgctgacagcctgcaggccgcccagcccttcaccatcggggacaacaagacctacaacggctactggaacacccccctgctgccctacaagagctaccgcatctacttccaggccgccagccgggccaacggggagaccaagattgactgtgtgcaggtggccaccaagggagctgccacccccaagcctgtgcctgagcctgagaagcagacagaccacacagtgaagattgctggggtgattgctggcatcctgctcttcgtcatcatcttcctgggcgtggtgctggtgatgaagaagaggaagctggccaagaagaggaaggagaccatgagcagcacccggcaggagatgacagtgatggtgaacagcatggacaagagctatgcagagcagggcaccaactgtgatgaggccttctccttcatggacacccacaacctgaatggccgctctgtgagcagccccagcagcttcaccatgaagaccaacaccctgagcacctctgtgcccaacagctactacccagatgagacccacaccatggccagtgacaccagcagcctggtgcagagccacacctacaagaagcgggagccagcagatgtgccctaccagacaggccagctgcacccagccatccgggtggccgacctgctgcagcacatcacccagatgaagtgtgccgagggctacggcttcaaggaggagtatgagagcttctttgagggccagagcgccccctgggacagcgccaagaaggatgaaaataggatgaagaacagatatggcaacatcatcgcctatgaccacagccgggtgcggctgcagaccatcgagggggacaccaacagcgactacatcaatggaaactacattgatggctaccaccggcccaaccactacatcgccacccagggccccatgcaggagaccatctatgacttctggaggatggtgtggcatgagaacacagccagcatcatcatggtgaccaacctggtggaggtgggccgggtgaagtgctgcaagtactggccagatgacacagagatctacaaggacatcaaggtgaccctcatcgagacagagctgctggccgagtatgtgatccgcacctttgctgtggagaagaggggcgtgcatgagatccgggagatccggcagttccacttcaccggctggccagaccatggagtgccctaccacgccaccggcctgctgggctttgtgcggcaggtgaagagcaagagcccccccagcgctggccccctggtggtgcactgcagcgctggggccggccgcacaggctgcttcatcgtgattgacatcatgctggacatggccgagcgggagggcgtggtggacatctacaactgtgtgcgggagctgcggagccggcgggtgaacatggtgcagacagaggagcagtatgtgttcatccatgatgccatcctggaggcctgcctgtgtggggacacctctgtgcctgccagccaggtgcgcagcctgtactatgacatgaacaagctggacccccagaccaacagcagccagatcaaggaggagttccgcaccctgaacatggtgacccccaccctgcgggtggaggactgcagcatcgccctgctgcccagaaatcatgagaagaaccgctgcatggacatcctgcccccagaccgctgcctgcccttcctgatcaccattgatggagagagcagcaactacatcaatgctgccctgatggacagctacaagcagcccagcgccttcatcgtgacccagcaccccctgcccaacacagtgaaggacttctggaggctggtgctggactaccactgcacctctgtggtgatgctgaatgatgtggaccctgcccagctgtgcccccagtactggccagaaaatggagtgcaccgccacggccccatccaggtggagtttgtgtctgctgacctggaggaggacatcatcagccgcatcttccgcatctacaatgctgcccggccccaggacggctacaggatggtgcagcagttccagttcctgggctggcccatgtacagagacacccctgtgtccaagaggagcttcctgaagctgatccggcaggtggacaagtggcaggaggagtacaacggcggggagggccgcacagtggtgcactgcctgaatggaggcggccgcagcggcaccttctgtgccatcagcatcgtgtgtgagatgctgcggcaccagaggacagtggatgtgttccacgctgtgaagaccctgaggaacaacaagcccaacatggtggacctgctggaccagtacaagttctgctatgaggtggccctggagtacctgaacagcggctag

SEQ ID NO: 318540 - DNA, 3720 bp, Artificial Sequence
  derived and/or modified sequence
atgggcaccctgagcctgcaccccggcatcgacgtgcgggacgcccctctcaaggagatcaaggtcacatcatctcgaaggttcatcgcaagcttcaacgtcgtaaacacaaccaagagagatgctggcaagtacaggtgtatgattcgcactgaaggtggagtgggcatttctaactacgcggaactcgtcgtgaaagagcctcctgttcctatagccccaccacagcttgccagtgtcggggcaacgtacctttggattcagcttaacgcaaactcaataaacggcgacgggcctatcgtggcaagggaggtggagtactgcacagcctccggctcatggaatgacaggcagccagtggactcaaccagctacaaaataggccatctggatcctgacaccgaatacgagataagcgtactcctgacacgcccgggagaaggaggtaccggctctcccggacctgcgctcagaacacgcacaaagtgtgcagaccccatgcgaggtccccggaagctggaggttgtcgaggttaagtcacggcagattaccatccgctgggagcccttcgggtataacgtcacgcgatgccactcctacaacctcactgtgcactactgctaccaggtgggcgggcaggagcaagttcgtgaagaggtatcatgggacacggagaactcacacccgcagcacaccattacgaacctcagcccctacaccaacgtgtctgtaaagttaattttgatgaaccccgaaggtagaaaggaaagtcaggagctgatcgtccagactgacgaggaccttccaggagctgtgccgacagaatcaatacaggggagtacattcgaggaaaagatttttctacagtggcgcgagccgacacagacgtacggcgtcattacactgtacgagattacatacaaggccgtgagttcattcgatccggagattgatttatctaatcagtccggacgtgtgtccaaactggggaatgagacgcacttcctcttctttggactgtacccgggaacgacatattcttttaccattagggccagtaccgcgaagggtttcggcccccctgccaccaatcagttcactacaaaaatatccgccccctccatgccggcctacgagcttgagacccccctgaatcagaccgacaacacggtgaccgtgatgctgaagcccgcccactcacgcggcgcgccagttagcgtgtaccagattgtggtggaggaagagagaccccgccggactaaaaaaacgaccgagatattgaagtgttaccccgtcccgatccatttccagaatgctagcctcctcaactcccaatactattttgctgccgagttccccgctgactccctccaggccgcgcagccatttaccatcggcgacaataagacctacaatggatattggaacacaccgctcttaccatataaaagctacagaatctattttcaggccgcttccagagcaaatggcgagactaagatcgactgtgtgcaggtcgctacaaagggtgccgctactcctaagcccgtgcccgagcccgaaaagcagactgatcacacggttaaaattgcgggtgtgatcgctggcatactgctgttcgtgattattttcctgggggtggtattagtcatgaagaagcgaaaattggccaagaagcggaaagaaaccatgtccagcactcggcaggaaatgactgtgatggttaacagcatggacaaatcctacgctgaacaggggacaaattgtgatgaagccttttcattcatggacacgcataacctgaatggacggagtgtgagcagcccttcgtcctttaccatgaagacaaataccctcagtacctcagtccctaattcatactatcccgacgagacccatactatggcctccgacacgagctccttagtgcagagtcacacctacaagaaaagggaacccgcggacgttccctatcagacaggtcagctacatcctgccatccgggtggccgaccttttgcagcacattacccagatgaaatgtgcagaaggttatggttttaaagaggaatatgagagtttttttgagggacagagcgcaccatgggacagtgcaaaaaaagatgagaaccgcatgaagaaccgctatggcaatattattgcctacgatcacagccgcgtaaggctccagacaatcgagggggatacaaacagcgattatatcaacggtaactacatcgatggataccacagacccaatcactacattgcaacacaaggaccgatgcaggagactatttacgatttctggcgtatggtgtggcacgagaatactgctagcattatcatggtgacgaacctggtggaagtaggcagggtgaaatgttgtaagtactggcctgacgacactgagatatacaaagacattaaggtgactctgatcgagaccgaactgttagctgaatatgttattcgtacatttgccgtcgaaaagcgcggtgttcacgagatccgagagatcagacagttccacttcaccgggtggccagatcacggggtgccatatcacgctaccggacttctgggcttcgtccggcaagtgaaatccaagagccccccctctgctggtcccctcgtggtgcactgcagcgccggtgctgggcggacaggctgtttcatagtcatcgacatcatgttagacatggcggaaagagagggagtggtcgacatctacaactgtgttcgggaacttcgtagccgaagggtcaacatggtacagacagaggagcagtatgtctttatccacgatgccatattggaggcatgtctgtgcggtgacacaagtgtccccgcctctcaggtgcgatctctatattatgacatgaacaagttggatccccagacaaattcttcccagatcaaggaagagttcaggacactcaatatggtgactcccactctgcgggtggaggattgcagcatagcactccttccacgtaatcacgagaaaaacaggtgcatggacatcctccctccagaccgctgcctgccctttctgattacgattgacggagagtcttcaaactatatcaatgccgcactgatggatagctacaagcagcccagtgcctttattgtcacccagcatccactgcctaacacagtgaaagatttttggcggctcgtcctcgattaccactgtactagcgttgtgatgctgaatgacgtggaccctgcacagttgtgcccccagtattggcccgagaatggagtgcacagacatggaccaatccaggtagaattcgtcagtgccgacctggaagaagatatcatatccaggatctttcgcatctacaacgcagctcgtcctcaggacggctacaggatggtgcagcagttccaattcctgggctggcccatgtacagggataccccagtctccaagagatccttcctcaagcttatccgccaggttgataaatggcaggaagaatacaacggcggtgaaggaaggacagttgtgcattgcctgaacgggggtggaagatccggaacattttgcgcgatctccatcgtatgtgagatgctgcggcaccagcggaccgtcgacgttttccacgcagtgaaaacactgcgaaataataagcctaacatggtcgatctcctggaccagtacaagttctgctacgaggttgcgcttgagtaccttaacagcggttag

SEQ ID NO: 318541 - DNA, 3720 bp, Artificial Sequence
  derived and/or modified sequence
atgggcactctcagcttgcaccccggtatcgacgtgcgcgacgcccctctaaaggagatcaaagtgacatcctctcggagattcattgctagtttcaatgtagttaatactacaaagcgggatgcaggtaaataccggtgtatgatccggaccgagggcggagttggaatctccaactatgccgagctcgtcgttaaagagccgccagtcccaatcgcaccaccacaattggcctcagtgggggctacatacctttggatccagctaaacgcaaactcaattaacggcgacggtccaattgtagccagggaggtggagtactgcaccgcatcaggatcctggaatgataggcaaccagtggactctacctcttacaagattggtcatttagaccccgacaccgagtacgaaatctccgtcctactgactcgaccaggagaggggggaaccgggtcacccggtcccgcattgcggactaggaccaagtgcgcagatcccatgcgtgggcctagaaaacttgaggttgtcgaagtcaagtctcggcagattaccatccgctgggagccattcggatataacgtcacacgctgccacagctataacctgaccgtgcactactgctaccaggtgggaggccaggagcaagtgcgcgaagaagtaagttgggatacagagaactcccacccccagcacacaatcacaaatctgagtccatacacgaatgtgagcgtcaaactgatattgatgaaccccgaaggccgtaaagagtcacaggaacttatcgtgcagacagatgaagacttaccgggagcagttcccaccgaaagcattcagggatcgaccttcgaggagaagattttcctccaatggcgggagcccacacagacttacggcgtcatcactctgtacgaaattacctataaagctgttagtagcttcgatccagagattgacctgagcaatcagtccggacgggttagcaagttagggaacgagacccacttcctcttcttcggattgtatccaggaacaacgtattcttttaccatccgggcatcaaccgctaagggcttcggtcctcctgccaccaatcaatttaccactaaaatatctgccccatctatgcctgcatatgagctggagacacctctgaatcagaccgacaacacagttactgtcatgttaaaaccagcacactcccgcggagcccctgttagtgtgtatcagatcgtggttgaagaggagaggccacgccgtacaaaaaaaaccacagagatcttaaaatgttacccagttcccatccactttcaaaacgcttccttgctaaactcgcagtactatttcgccgctgaattccccgcagatagtcttcaggctgctcagcctttcacaataggtgataataagacctacaatggctattggaacacgcctctccttccttataagagttaccgtatttattttcaagctgcctcgagggccaatggtgaaacaaagatcgactgcgttcaggtggccactaagggcgcagcgacccctaagccagtgcccgaacccgagaagcagaccgatcatacagtgaagatcgccggagtgatagcaggcattctgttgttcgtaatcatctttctgggagttgtcctcgtgatgaagaaacggaagctcgcgaagaagcgcaaggagaccatgagcagtacccggcaggaaatgaccgtcatggtcaactcaatggacaaaagctacgccgaacaggggactaactgcgacgaggcattcagctttatggacacgcacaatctcaatggtcggagcgtttcttcaccaagctcattcaccatgaagactaacacactcagcacttccgtccccaatagttactacccagacgagacccacactatggcctctgacacttcatcactcgtacagtctcacacttataaaaagcgggagcctgccgatgtgccctaccaaacaggccagctgcatcctgcgatccgggtcgcggacttgctgcaacatatcacccagatgaaatgtgctgagggctatggatttaaagaagagtacgagtcatttttcgaagggcagagcgccccatgggactctgcaaagaaggatgagaaccgtatgaagaaccggtacgggaacataattgcatatgaccactccagagtccgcttgcagacaatagagggcgacaccaattccgactacattaatgggaactatatcgacggatatcaccgcccaaaccattatatcgcaactcagggacccatgcaagaaacaatttacgacttttggagaatggtatggcatgagaatactgcctccattattatggttacgaacctcgtagaggtgggtagggtcaagtgctgcaaatactggcccgacgatacggaaatttacaaagatattaaggtgaccctgatcgaaaccgagttactggccgaatacgtgattagaacattcgccgtggagaagagaggcgtgcacgagattagagaaatcaggcagttccattttaccggctggcccgatcatggagtgccctatcatgcgacagggcttttgggttttgtgcggcaagtaaaatcaaagtcccccccaagcgctggtcctctcgtggtgcattgcagcgctggcgcaggcaggacaggatgtttcatcgtcatcgacatcatgctggatatggctgagagagagggcgtcgtggacatctataattgcgtgcgggaacttcggtcccgaagggtgaacatggtccagacagaggaacagtatgtctttatccacgatgccattctcgaagcctgtctgtgcggtgacaccagtgttcctgcatcccaggtgaggtctctttactacgatatgaacaaactagatccacagacgaatagcagccagataaaggaagaattccgaaccctgaatatggtgaccccaactcttcgggtagaggactgtagtattgccctcctgcctaggaaccacgaaaaaaatagatgcatggatattttgcctccagaccggtgcctcccctttttaattacaatcgacggggagagttcgaactatatcaatgctgcgttaatggatagctacaaacagccgtccgctttcattgtcactcaacaccccctgcccaatactgtgaaagacttctggcgcttggtgctggattaccattgtacatctgtggtcatgttgaacgacgtggaccctgctcaactttgtcctcaatattggcctgagaacggcgtacacagacatgggccaattcaagttgagtttgtcagcgcggatctggaagaggacatcatctccagaatattcaggatttacaacgctgcacggcctcaggacggttacagaatggtgcagcaatttcagtttttgggctggcccatgtatcgagacacaccggttagtaaaagaagtttccttaaacttattagacaagttgacaaatggcaggaggagtacaacggcggtgagggtaggacggtcgtgcattgtctgaatggcggaggtcgatctggaactttctgtgctatctccatcgtatgcgagatgcttagacaccagcgcactgtcgacgtttttcacgccgtgaagacactgagaaacaacaaacctaatatggtcgacctcctcgatcaatacaagttctgttatgaggtagctctggagtatctgaactccgggtag

SEQ ID NO: 318542 - DNA, 4414 bp, Artificial Sequence
  derived and/or modified sequence
atgggaaccctctccctccatcctggcattgatgtgcgagatgctcctctgaaggaaatcaaggtgaccagctcccgacgcttcattgcttcatttaatgttgtgaataccaccaaacgagatgctggaaagtaccgctgcatgattcgcactgaaggaggtgttggaatatcaaactatgcagagttggtagttaaagaaccacccgttcctattgccccacctcagctcgcctctgtaggagccacctacctgtggatacagctcaacgccaactccatcaatggggatgggcccattgtggcccgagaggtggagtactgcacggccagtgggagctggaatgaccggcagccagtcgattccacgagctataaaattggacaccttgacccagatacagaatatgagattagtgtgctcctgaccaggccaggggagggtggcactggctctcctggtccagctctcaggacaagaacaaagtgtgctgatcccatgcgaggcccaagaaaactagaagtagtggaggtcaaatctcggcaaatcactatccgctgggagccatttggatataatgtaactcgttgccacagttataatctcactgtccactactgttaccaagttggaggacaagaacaagtgcgagaagaagtaagctgggatacagaaaactcacaccctcaacacacgatcactaacctgtcaccatacaccaatgtcagtgtgaaactgatcctcatgaacccagagggccggaaggaaagccaagaactcatagtgcagacagatgaagacctcccaggtgctgttcccactgaatccatacaaggaagtacctttgaagagaagatatttcttcagtggagagaaccaactcaaacatatggtgtaatcactttatatgagatcacctacaaagcagtcagttcctttgacccagaaatagatttatccaatcagagtggaagagtttcaaagctgggaaatgaaacccattttctgttttttggactgtatccggggaccacatactcctttaccatccgagctagcacagctaagggttttgggcctccagcaacaaaccagttcaccaccaaaatatcagcaccctctatgccagcttatgaacttgagacacctttgaatcaaactgacaataccgtgacagtcatgctgaaacctgcccacagcagaggagcacctgtcagtgtctatcaaatagttgttgaggaagaacgtcctcgaagaactaaaaagacgacagaaatcttaaagtgctacccagtgccaattcacttccagaatgcttctctgctgaactcacagtactactttgctgcagaatttcctgcagacagcctccaagctgcgcagccttttacaattggtgataataagacatataatggatactggaacactccccttctcccctataaaagctacagaatttatttccaagctgctagtagagccaatggggaaaccaaaatagactgtgtccaagtggccacaaaaggagctgccactccgaaaccagtcccagaacccgagaaacagacagaccatacagttaaaattgctggagtcatcgcgggcatcttgctgttcgtgattatatttcttggagttgtgttggtaatgaagaaaaggaaactggccaagaagcggaaagagaccatgagcagcacccgacaggagatgactgtgatggtgaactcaatggacaagagctatgctgagcagggcacaaactgcgacgaggctttctcattcatggacacgcacaatctgaatgggagatctgtgtcttcaccatcgtccttcacaatgaaaacaaatacactgagcacatcggtgcctaattcctattacccagatgaaacccacacaatggccagcgataccagcagcctggtgcagtcccatacttacaagaagcgagagccggccgacgtgccctatcagactgggcagctccaccccgccatccgggtggcagacctccttcagcacatcacacagatgaagtgtgcggagggctacggcttcaaggaggaatacgagagcttctttgaagggcagtctgcaccatgggactcggctaagaaagatgagaacagaatgaagaacagatacgggaatatcattgcatacgatcattcccgagtgaggctgcagacaatagaaggagacacaaactcagactatatcaatggcaattatatcgatggttatcatcgacccaatcattacattgctacccaagggccaatgcaggaaaccatctatgacttctggaggatggtgtggcacgaaaacactgcaagtatcatcatggtgaccaatcttgtggaagtgggaagggtcaaatgctgcaaatactggccagatgacacagagatatataaagacattaaagttaccctaatagaaacagaactactggcagaatatgtgataagaacatttgctgttgaaaagagaggtgtgcatgaaatccgagagatcagacagtttcacttcactggctggccggatcatggggtcccctaccatgccaccggcctgctgggattcgtgcggcaagtcaagtccaagagcccgcccagtgcaggcccactggtggtgcactgcagtgctggtgcagggaggactggctgtttcatcgtcattgatatcatgttggacatggccgaaagggaaggggtcgtagacatctacaactgcgtcagggagctgcggtcacggagggtgaacatggtgcaaacagaggagcagtatgtgtttatccacgatgcgatcctggaagcctgtctttgtggggacacctctgtgcctgcttcccaagttaggtctctgtattatgacatgaacaaactggatccacagacaaactcaagccagattaaagaggaattccggacgctaaacatggtgacaccaacgctgcgagtagaggactgcagcatcgcactgttgccccggaaccatgagaaaaaccggtgcatggacatcctgcccccagaccgctgcctgcccttcctcatcaccatcgatggggagagcagcaactacatcaatgctgccctcatggacagctataaacagccttcagcttttatagtcacccagcatcctttgccaaacacagtgaaagacttttggagactggtcctggattatcactgcacatccgtagttatgctaaatgatgtggatcctgcccagttgtgtccacagtactggccagaaaacggagtacacagacacggccccatccaggtggaatttgtctctgctgacctggaagaggacatcatcagcaggatattccgcatttacaatgccgccagaccccaagatggatatcggatggtgcagcaattccagttcctgggctggccgatgtacagggacacaccagtgtctaagcgctccttcttgaagctcattcgccaggtggacaagtggcaagaggagtacaatggcggggaaggccgcacggttgtgcactgcttgaacgggggaggccgcagtgggacgttctgcgccatcagcatcgtatgtgagatgctccggcaccagagaaccgtggatgtctttcacgctgtgaagacactgaggaacaacaagcccaacatggtcgacctcctggatcagtacaagttctgctacgaggtggccctggaatacttgaattctggctgatggtgtaaacagctctgcaaacaatccctttcataccacaaagccaagacgttccatggtatttgtgcaaaagagatgaagacttctcaatatgcttattttgctttgcataattggctctttttaagagcccaagaaagtgtttctaaaattgcttgcactgcccaatcccagtaatgctgctgcctgacagaaacacacacacagccacagttgccaaatcccgtactccttgccaccggcttcctagagcagcgtagacagctggtaaactgaagagcacaactatattcttatgaaggaatttgtacctttggggtattattttgtggcccgtgaccctcgttattgttacagctgagtgtatgtttttgttctgtggagaatgctatctggcattatggtaatatattattttaggtaatatttgtactttaacatgttgcataatatatgcttatgtagctttccaggactaacagataaatgtgtaatgaacaaagatatgttgtatgagtcgtcgtttctgtcagatttgtattgtttccaagggaaaagcttgggggaggactcagttcacaaaatgcaaaactcaacgatcagattcacggacccagagcttttccatgtgtttatattgtaaatatttttgatttcatcaaattatttattcattaaaagaaatttttgtgaa

SEQ ID NO: 318543 - DNA, 3720 bp, Artificial Sequence
  derived and/or modified sequence
atgggcaccctgagcctgcaccccggcatcgacgtgagagacgcccccctgaaggagatcaaggtgaccagcagcagaagattcatcgccagcttcaacgtggtgaacaccaccaagagagacgccggcaagtacagatgcatgatcagaaccgagggcggcgtgggcatcagcaactacgccgagctggtggtgaaggagccccccgtgcccatcgcccccccccagctggccagcgtgggcgccacctacctgtggatccagctgaacgccaacagcatcaacggcgacggccccatcgtggccagagaggtggagtactgcaccgccagcggcagctggaacgacagacagcccgtggacagcaccagctacaagatcggccacctggaccccgacaccgagtacgagatcagcgtgctgctgaccagacccggcgagggcggcaccggcagccccggccccgccctgagaaccagaaccaagtgcgccgaccccatgagaggccccagaaagctggaggtggtggaggtgaagagcagacagatcaccatcagatgggagcccttcggctacaacgtgaccagatgccacagctacaacctgaccgtgcactactgctaccaggtgggcggccaggagcaggtgagagaggaggtgagctgggacaccgagaacagccacccccagcacaccatcaccaacctgagcccctacaccaacgtgagcgtgaagctgatcctgatgaaccccgagggcagaaaggagagccaggagctgatcgtgcagaccgacgaggacctgcccggcgccgtgcccaccgagagcatccagggcagcaccttcgaggagaagatcttcctgcagtggagagagcccacccagacctacggcgtgatcaccctgtacgagatcacctacaaggccgtgagcagcttcgaccccgagatcgacctgagcaaccagagcggcagagtgagcaagctgggcaacgagacccacttcctgttcttcggcctgtaccccggcaccacctacagcttcaccatcagagccagcaccgccaagggcttcggcccccccgccaccaaccagttcaccaccaagatcagcgcccccagcatgcccgcctacgagctggagacccccctgaaccagaccgacaacaccgtgaccgtgatgctgaagcccgcccacagcagaggcgcccccgtgagcgtgtaccagatcgtggtggaggaggagagacccagaagaaccaagaagaccaccgagatcctgaagtgctaccccgtgcccatccacttccagaacgccagcctgctgaacagccagtactacttcgccgccgagttccccgccgacagcctgcaggccgcccagcccttcaccatcggcgacaacaagacctacaacggctactggaacacccccctgctgccctacaagagctacagaatctacttccaggccgccagcagagccaacggcgagaccaagatcgactgcgtgcaggtggccaccaagggcgccgccacccccaagcccgtgcccgagcccgagaagcagaccgaccacaccgtgaagatcgccggcgtgatcgccggcatcctgctgttcgtgatcatcttcctgggcgtggtgctggtgatgaagaagagaaagctggccaagaagagaaaggagaccatgagcagcaccagacaggagatgaccgtgatggtgaacagcatggacaagagctacgccgagcagggcaccaactgcgacgaggccttcagcttcatggacacccacaacctgaacggcagaagcgtgagcagccccagcagcttcaccatgaagaccaacaccctgagcaccagcgtgcccaacagctactaccccgacgagacccacaccatggccagcgacaccagcagcctggtgcagagccacacctacaagaagagagagcccgccgacgtgccctaccagaccggccagctgcaccccgccatcagagtggccgacctgctgcagcacatcacccagatgaagtgcgccgagggctacggcttcaaggaggagtacgagagcttcttcgagggccagagcgccccctgggacagcgccaagaaggacgagaacagaatgaagaacagatacggcaacatcatcgcctacgaccacagcagagtgagactgcagaccatcgagggcgacaccaacagcgactacatcaacggcaactacatcgacggctaccacagacccaaccactacatcgccacccagggccccatgcaggagaccatctacgacttctggagaatggtgtggcacgagaacaccgccagcatcatcatggtgaccaacctggtggaggtgggcagagtgaagtgctgcaagtactggcccgacgacaccgagatctacaaggacatcaaggtgaccctgatcgagaccgagctgctggccgagtacgtgatcagaaccttcgccgtggagaagagaggcgtgcacgagatcagagagatcagacagttccacttcaccggctggcccgaccacggcgtgccctaccacgccaccggcctgctgggcttcgtgagacaggtgaagagcaagagcccccccagcgccggccccctggtggtgcactgcagcgccggcgccggcagaaccggctgcttcatcgtgatcgacatcatgctggacatggccgagagagagggcgtggtggacatctacaactgcgtgagagagctgagaagcagaagagtgaacatggtgcagaccgaggagcagtacgtgttcatccacgacgccatcctggaggcctgcctgtgcggcgacaccagcgtgcccgccagccaggtgagaagcctgtactacgacatgaacaagctggacccccagaccaacagcagccagatcaaggaggagttcagaaccctgaacatggtgacccccaccctgagagtggaggactgcagcatcgccctgctgcccagaaaccacgagaagaacagatgcatggacatcctgccccccgacagatgcctgcccttcctgatcaccatcgacggcgagagcagcaactacatcaacgccgccctgatggacagctacaagcagcccagcgccttcatcgtgacccagcaccccctgcccaacaccgtgaaggacttctggagactggtgctggactaccactgcaccagcgtggtgatgctgaacgacgtggaccccgcccagctgtgcccccagtactggcccgagaacggcgtgcacagacacggccccatccaggtggagttcgtgagcgccgacctggaggaggacatcatcagcagaatcttcagaatctacaacgccgccagaccccaggacggctacagaatggtgcagcagttccagttcctgggctggcccatgtacagagacacccccgtgagcaagagaagcttcctgaagctgatcagacaggtggacaagtggcaggaggagtacaacggcggcgagggcagaaccgtggtgcactgcctgaacggcggcggcagaagcggcaccttctgcgccatcagcatcgtgtgcgagatgctgagacaccagagaaccgtggacgtgttccacgccgtgaagaccctgagaaacaacaagcccaacatggtggacctgctggaccagtacaagttctgctacgaggtggccctggagtacctgaacagcggctag

SEQ ID NO: 318544 - protein, 563 aa, Artificial Sequence
  derived and/or modified sequence
MSVVIYTMLVLIFIYTYQFENFPGLWQNMTGLKKEKLEDLGLKQFTVAELFTRIFIPTSFLLVCILHLHYFHDRFLELTDLKSIPSKEDNTIYSHAKVNGRVYLIINSIKKKLPIHQNELAHPEGSLPDLTMMHLTASLEKPEVRKLAEPGEEKLEGYSEKAQKGDLGKDSEESEEDGEEEEESEEEEETSDLRNKWHLVIDRLTVLFLKFLEYFHKLQVFMWWILELHIIKIVSSYIIWVSVKEVSLFNYVFLISWAFALPYAKLRRLASSVCTVWTCVIIVCKMLYQLQTIKPENFSVNCSLPNENQTNIPFNELNKSLLYSAPIDPTEWVGLRKSSPLLVYLRNNLLMLAILAFEVTIYRHQEYYRGRNNLTAPVSRTIFHDITRLHLDDGLINCAKYFINYFFYKFGLETCFLMSVNVIGQRMDFYAMIHACWLIAVLYRRRRKAIAEIWPKYCCFLACIITFQYFICIGIPPAPCRDYPWRFKGASFNDNIIKWLYFPDFIVRPNPVFLVYDFMLLLCASLQRQIFEDENKAAVRIMAGDNVEICMNLDAASFSQHNP

SEQ ID NO: 318545 - DNA, 1692 bp, Artificial Sequence
  derived and/or modified sequence
atgtccgtggtgatctatactatgctagtgttaatctttatttacacttaccagttcgaaaattttcccggcctatggcagaacatgaccggtctcaagaaggaaaaactcgaagatttgggcttgaaacagttcacagtcgcagaactcttcaccagaattttcataccaactagcttcctattagtctgtatcctgcatcttcactacttccacgatagatttctggagctcactgatctgaagtccatccctagtaaagaggataacaccatttattcccacgcaaaggtaaacggtagggtgtatctgattattaactctataaagaagaagctgcctatccatcaaaacgagcttgcgcatcctgaggggtctctccccgatttaaccatgatgcatttgaccgctagtttggaaaagccagaggtgcgcaaactagccgaacccggggaagagaaattggagggatacagcgagaaagcccaaaagggcgacctgggaaaagactcagaagaatcagaggaagacggggaagaagaagaggaatctgaggaagaggaagagactagcgacctccgcaacaagtggcatctggtgatcgaccggttgacagtgctttttctcaaattcctggaatacttccacaagcttcaagtgttcatgtggtggatactggagttacatattatcaagattgtctccagttatatcatatgggtcagcgtgaaagaggtgtccctgtttaattatgtgttccttattagctgggccttcgcccttccttacgcaaagttgcggagactggccagtagtgtgtgtaccgtgtggacgtgcgtgatcatcgtgtgcaagatgctgtatcagttacaaacgattaaacctgaaaacttcagcgtgaattgctcattgccgaatgagaaccagacgaacatccccttcaatgagctcaacaagtctctcctgtattccgcccctattgatccaacggagtgggtgggacttcgaaaatcctcgcccctgctggtgtatctgcggaacaacttgttaatgcttgctattctggcgtttgaggtcaccatttatcgccaccaggagtattatcgcggcagaaataacctgaccgcccctgtttctcggactatttttcacgacatcacacggctgcatctggacgacggattgatcaattgtgctaagtacttcattaattacttcttctacaagttcggcctggaaacatgctttttgatgtctgtgaacgtgatcgggcagcgcatggatttttatgccatgatacacgcctgctggttaattgcagtcctttataggagaaggaggaaggcgatcgctgagatttggcctaaatactgctgctttctggcgtgcattatcacattccagtacttcatttgcatcggcataccgcccgccccatgcagggactacccctggcggttcaaaggggcctccttcaatgacaacatcattaaatggttgtattttccagattttatcgttaggcccaaccctgtttttctggtttacgatttcatgcttttgctgtgcgcgtccctgcagcgacagattttcgaggacgagaataaggcagccgttagaattatggcgggtgacaacgtcgagatttgcatgaacctcgatgccgccagcttcagtcagcacaatccgtag

SEQ ID NO: 318546 - DNA, 1692 bp, Artificial Sequence
  derived and/or modified sequence
atgtctgtggtgatctacaccatgctggtgctgatcttcatctacacctaccagtttgagaacttccctggcctgtggcagaacatgacaggcctgaagaaggagaagctggaggacctgggcctgaagcagttcaccgtggccgagctgttcacccgcatcttcatccccaccagcttcctgctggtgtgcatcctgcacctgcactacttccatgaccgcttcctggagctgacagacctgaagagcatccccagcaaggaggacaacaccatctacagccacgccaaggtgaatggccgggtgtacctgatcatcaacagcatcaagaagaagctgcccatccaccagaatgagctggcccaccctgagggcagcctgcctgacctgaccatgatgcacctgacagccagcctggagaagccagaggtgaggaagctggccgagcccggggaggagaagctggagggctacagcgagaaggcccagaagggggacctgggcaaggacagcgaggagagcgaggaggatggagaggaggaggaggagagcgaggaggaggaggagaccagtgacctgaggaacaagtggcacctggtgattgaccggctgactgtgctcttcctgaagttcctggagtacttccacaagctgcaggtgttcatgtggtggatcctggagctgcacatcatcaagatcgtgagcagctacatcatctgggtgtctgtgaaggaggtgtccctcttcaactacgtgttcctgatctcctgggcctttgccctgccctatgccaagctgcggcggctggccagctctgtgtgcaccgtgtggacctgtgtgatcatcgtgtgcaagatgctgtaccagctgcagaccatcaagccagagaacttctctgtgaactgcagcctgcccaatgaaaaccagaccaacatccccttcaatgagctgaacaagagcctgctgtacagcgcccccatcgaccccacagagtgggtgggcctgaggaagagcagccccctgctggtgtacctgaggaacaacctgctgatgctggccatcctggcctttgaggtgaccatctaccgccaccaggagtactaccggggcaggaacaacctgacagcccctgtgtccaggaccatcttccatgacatcacccggctgcacctggatgatggcctcatcaactgtgccaagtacttcatcaactacttcttctacaagtttggcctggagacctgcttcctgatgtctgtgaatgtgattggccagaggatggacttctacgccatgatccacgcctgctggctgattgctgtgctgtacagaagaagaaggaaggccatcgccgagatctggcccaagtactgctgcttcctggcctgcatcatcaccttccagtacttcatctgcatcggcatccccccagccccctgccgggactacccctggaggttcaagggggccagcttcaatgacaacatcatcaagtggctgtacttcccagacttcatcgtgcggcccaaccctgtgttcctggtgtatgacttcatgctgctgctgtgtgccagcctgcagaggcagatctttgaagatgagaacaaggctgctgtgcgcatcatggccggggacaacgtggagatctgcatgaacctggatgctgccagcttcagccagcacaacccctag

SEQ ID NO: 318547 - DNA, 1692 bp, Artificial Sequence
  derived and/or modified sequence
atgagcgtggtgatctacaccatgctggtgctgatcttcatctacacataccagtttgaaaacttcccaggcctctggcaaaacatgacaggactcaagaaggagaaactggaggacctagggctcaaacagtttacagttgcagaattgtttactcgaatctttatcccaactagcttcttgttagtttgtatactgcacttgcattactttcatgatcgcttccttgagcttacagatttaaaatccatcccttctaaggaagataacaccatttactcgcatgcaaaggtgaatggacgcgtatacctaattattaactcaattaagaagaagttgcccatccatcagaacgagctcgctcacccagaggggagcctgcctgatttaaccatgatgcatctgaccgccagtctagaaaaaccagaggtcagaaaacttgccgaaccaggtgaagagaaactggagggctattcagagaaagcccagaaaggggatctggggaaggattcggaggaatccgaagaagatggcgaagaagaggaagaatcagaggaggaggaagaaaccagcgatttgaggaacaagtggcatctggtgatagataggctcacagtgctcttcctgaaattcctcgagtattttcataagcttcaggtgtttatgtggtggatcttagagctgcatatcattaagattgtcagcagctacattatctgggtgagtgtgaaggaagtcagtctatttaattacgtgtttttgatctcatgggctttcgccctgccatacgctaagcttcgccgcctggcatccagtgtgtgcaccgtgtggacatgcgtgataatcgtttgtaaaatgctgtaccagctgcagaccatcaaacctgaaaatttcagcgtgaactgcagtttaccaaatgagaatcagactaatatcccctttaacgaactgaataagagcttgctgtattctgcccccatcgaccccacagaatgggtcggcttgcgcaagagcagcccacttctagtctacctgaggaataacttgctgatgttggccattcttgcgtttgaggtcacaatctatcggcatcaagaatactatagaggccgaaacaatttgacagccccagttagcagaactatctttcacgacataactagattgcatctcgatgacgggttgatcaattgcgcaaagtacttcatcaattacttcttctacaaatttggtcttgaaacatgtttcttaatgtccgtgaatgtgattggacagcgtatggatttttatgctatgattcacgcctgctggttgattgcggtgctgtaccgacgaaggcggaaagcaattgctgagatctggccgaagtactgctgttttctcgcttgcattataacctttcagtattttatctgcattggtattccccccgccccctgtagggattacccatggaggttcaagggcgcgtcgtttaacgataatataatcaagtggctgtacttccctgatttcatcgtcagacctaaccctgtgtttctagtgtatgattttatgctgctcctttgtgcatctctacagagacagatctttgaggacgaaaacaaagctgcagttcgtattatggccggggacaatgtggaaatttgtatgaatctggacgccgcttccttcagccagcacaatccttag

SEQ ID NO: 318548 - DNA, 2650 bp, Artificial Sequence
  derived and/or modified sequence
atgtcagtggttatttacactatgctggtgcttatctttatatacacatatcagtttgagaacttcccaggcctgtggcaaaatatgactggactgaaaaaagaaaagcttgaggatcttggcttaaagcagtttactgtggctgaactattcactcgcatattcatcccaacctcctttctgctggtgtgcattttacacctgcactacttccatgaccggttccttgaactcacagacctcaagtccattcccagcaaagaagacaacaccatctacagccatgccaaagtcaatggtcgcgtatatctaataataaatagcatcaagaaaaaattaccaatccaccaaaatgaactggcccacccggaaggaagcctcccggacctcaccatgatgcatctgactgccagcctggagaagccggaggtgaggaagttggctgagcctggggaggagaagcttgagggctactctgaaaaagcccagaagggtgatcttgggaaagacagcgaggagtcagaggaggacggagaggaagaggaggaatccgaggaggaggaagaaacatcagacttaaggaacaaatggcacctggtgattgaccgcctcactgtgctcttcttaaaattcctggagtattttcacaagctgcaggtgttcatgtggtggattttggagttgcacatcatcaaaatcgtttcctcttacattatctgggtttctgtgaaagaggtgtctctgttcaactatgtatttttgatttcttgggcttttgctctgccgtacgccaagctgcgccgtctggcttcaagtgtctgcacagtctggacgtgtgtgatcatcgtctgcaaaatgttgtaccagctccaaaccattaagcctgagaacttctctgttaactgttccttgccaaatgaaaatcaaacaaacatcccctttaatgagttgaacaagtctctgctctacagcgctcctatcgatcctacagagtgggtcggcctgcggaagtcttcgcctctgctagtctacctgaggaataacctcctgatgctggctatcctggcctttgaagtcaccatttaccgccatcaggaatactatcgaggtcgaaataacctgacggcccctgtgtctagaactatctttcatgacattacaagactacatctagatgatggacttattaattgtgccaaatatttcattaattacttcttttacaagtttggtctggagacctgtttcctaatgtcagttaacgtcattggccagcgaatggatttctatgccatgatccacgcctgctggctgatcgctgtcttatatagacgcagaaggaaagccatcgcagagatctggcccaagtactgctgcttcctggcatgcatcatcaccttccagtatttcatctgcattggcatcccacctgctccttgccgagattacccgtggagattcaagggtgccagcttcaatgacaacatcataaagtggctgtacttcccagatttcattgtgcggcccaaccctgtgtttctcgtctatgacttcatgctgcttctgtgtgcctccttacaacggcagatttttgaggatgagaacaaggctgcagtgcgaatcatggcaggtgacaatgtcgagatctgcatgaaccttgatgcggcctccttcagccaacataaccctgtgccagattttattcactgcagatcttacttagacatgtccaaagtgatcatcttcagctacctcttctggtttgtgctcaccatcatcttcatcactgggaccaccaggatcagcatcttttgcatggggtacctggtggcctgtttctacttcctgctctttgggggcgatttgctgttgaaacccatcaagagcatcctgcgctactgggactggctgatcgcatacaacgtttttgtgattacgatgaaaaatatcctgtcaataggagcatgtggatacattggaacattggtgcacaatagttgttggttgatccaggctttcagcctggcctgcacagtcaaaggctatcaaatgcctgctgctaattcaccctgtacacttcccagtggggaagcaggaatcatttgggacagcatatgttttgccttcctcctgctgcaaagaagagttttcatgagttattattttctacatgttgtggctgatataaaagcttcccagattctggcatcaagaggagctgaacttttccaggccacaattgtaaaagctgtaaaggcaagaattgaggaagagaagaagtccatggaccagctgaagcgacagatggatcgcatcaaggccaggcaacagaaatataaaaagggtaaggagaggatgctgagcttgacccaggagccaggggaaggccaggacatgcaaaaactctctgaagaggatgatgaaagagaagcagacaaacagaaagccaagggcaaaaaaaagcagtggtggcggccttgggttgatcatgcttccatggtcaggagtggagattattatttgtttgaaacggatagtgaagaggaggaagaggaagaattaaagaaggaagatgaagaacctccacgaaggtcagcattccagtttgtttatcaagcctggattactgatcctaaaacagcactccgac

SEQ ID NO: 318549 - DNA, 1692 bp, Artificial Sequence
  derived and/or modified sequence
atgtccgtggtgatctatacaatgctggtgcttatcttcatctacacatatcagttcgaaaatttccccggactgtggcagaacatgaccggcctgaagaaggaaaagctggaggacttgggcctgaagcagttcacggttgcagaactgttcacacgcatcttcatcccgacatcctttctgcttgtgtgtatactgcacttacactatttccacgacagatttctggaactgacggatttgaagtccatccccagtaaggaggacaatactatctacagtcacgcgaaagtgaacgggagagtttatctgatcatcaactcaataaaaaagaagcttcccatccaccagaatgagttggctcaccccgaggggagtctgcctgaccttaccatgatgcatctgaccgcttctctggagaagccagaggtgcggaaactcgccgagcccggagaagagaaactggaggggtactccgaaaaggcgcagaaaggcgacctcggcaaagacagcgaagaaagcgaggaagatggcgaggaagaggaggagagtgaggaggaggaggaaacctctgacttgagaaacaaatggcacctggtgatcgataggttgacagtcctgtttttaaagtttctggaatacttccataagctgcaagtgtttatgtggtggatacttgaactacacattatcaaaattgtgagtagctacatcatctgggtatctgtaaaagaggtcagcttatttaattatgtttttctgatatcttgggctttcgctctgccatacgctaagctgaggagactagcttcgagtgtatgtactgtatggacttgtgtgattatcgtgtgtaagatgctgtatcagctccagacaatcaagccagaaaacttcagcgtaaactgttccctcccaaatgaaaaccagaccaacattccttttaatgagcttaacaagtcactcctctacagcgctccgattgaccctacagagtgggtgggcctccgtaaaagctctcccctgttggtttacttgaggaacaatctgctgatgctagcaatcctcgctttcgaggtcacaatctatcgacaccaggaatattaccgtggtagaaataacctgactgccccagtgtcacgtactattttccacgatatcacccgcttacatctggacgacggattgattaattgtgccaaatatttcatcaattactttttttataaattcggcctggagacttgcttcctgatgagcgtgaacgtgatcggccagaggatggatttttatgcaatgatccacgcctgctggctgatagccgtattatacaggcgcagacgtaaggctatcgccgagatttggcccaagtactgctgcttcctggcgtgcattattacattccagtatttcatatgcattggcattcctcctgctccttgtcgtgactatccatggcgttttaagggggctagcttcaacgacaacattattaagtggctgtactttcctgatttcatagtccgacctaacccagtctttttggtgtacgacttcatgctattgctgtgcgcctctctccaacggcagatcttcgaggatgagaacaaggccgcagtgcgaatcatggcaggcgataatgtggagatttgcatgaaccttgatgctgctagcttttctcaacataacccatag

SEQ ID NO: 318550 - DNA, 1692 bp, Artificial Sequence
  derived and/or modified sequence
atgagcgtggtgatctacaccatgctggtgctgatcttcatctacacctaccagttcgagaacttccccggcctgtggcagaacatgaccggcctgaagaaggagaagctggaggacctgggcctgaagcagttcaccgtggccgagctgttcaccagaatcttcatccccaccagcttcctgctggtgtgcatcctgcacctgcactacttccacgacagattcctggagctgaccgacctgaagagcatccccagcaaggaggacaacaccatctacagccacgccaaggtgaacggcagagtgtacctgatcatcaacagcatcaagaagaagctgcccatccaccagaacgagctggcccaccccgagggcagcctgcccgacctgaccatgatgcacctgaccgccagcctggagaagcccgaggtgagaaagctggccgagcccggcgaggagaagctggagggctacagcgagaaggcccagaagggcgacctgggcaaggacagcgaggagagcgaggaggacggcgaggaggaggaggagagcgaggaggaggaggagaccagcgacctgagaaacaagtggcacctggtgatcgacagactgaccgtgctgttcctgaagttcctggagtacttccacaagctgcaggtgttcatgtggtggatcctggagctgcacatcatcaagatcgtgagcagctacatcatctgggtgagcgtgaaggaggtgagcctgttcaactacgtgttcctgatcagctgggccttcgccctgccctacgccaagctgagaagactggccagcagcgtgtgcaccgtgtggacctgcgtgatcatcgtgtgcaagatgctgtaccagctgcagaccatcaagcccgagaacttcagcgtgaactgcagcctgcccaacgagaaccagaccaacatccccttcaacgagctgaacaagagcctgctgtacagcgcccccatcgaccccaccgagtgggtgggcctgagaaagagcagccccctgctggtgtacctgagaaacaacctgctgatgctggccatcctggccttcgaggtgaccatctacagacaccaggagtactacagaggcagaaacaacctgaccgcccccgtgagcagaaccatcttccacgacatcaccagactgcacctggacgacggcctgatcaactgcgccaagtacttcatcaactacttcttctacaagttcggcctggagacctgcttcctgatgagcgtgaacgtgatcggccagagaatggacttctacgccatgatccacgcctgctggctgatcgccgtgctgtacagaagaagaagaaaggccatcgccgagatctggcccaagtactgctgcttcctggcctgcatcatcaccttccagtacttcatctgcatcggcatcccccccgccccctgcagagactacccctggagattcaagggcgccagcttcaacgacaacatcatcaagtggctgtacttccccgacttcatcgtgagacccaaccccgtgttcctggtgtacgacttcatgctgctgctgtgcgccagcctgcagagacagatcttcgaggacgagaacaaggccgccgtgagaatcatggccggcgacaacgtggagatctgcatgaacctggacgccgccagcttcagccagcacaacccctag

SEQ ID NO: 318551 - protein, 544 aa, Artificial Sequence
  derived and/or modified sequence
MEKLQEHLIKAKAFTIKKTLEIYVPIKQFFYNLIHPEYSAVTDVYVLMFLADTVDFIIIVFGFWAFGKHSAAADITSSLSEDQVPGPFLVMVLIQFGTMVVDRALYLRKTVLGKVIFQVILVFGIHFWMFFILPGVTERKFSQNLVAQLWYFVKCVYFGLSAYQIRCGYPTRVLGNFLTKSYNYVNLFLFQGFRLVPFLTELRAVMDWVWTDTTLSLSSWICVEDIYAHIFILKCWRESEKPIFTMSAQQSQLKVMDQQSFNKFIQAFSRDTGAMQFLENYEKEDITVAELEGNSNSLWTISPPSKQKMIHELLDPNSSFSVVFSWSIQRNLSLGAKSEIATDKLSFPLKNITRKNIAKMIAGNSTESSKTPVTIEKIYPYYVKAPSDSNSKPIKQLLSENNFMDITIILSRDNTTKYNSEWWVLNLTGNRIYNPNSQALELVVFNDKVSPPSLGFLAGYGIMGLYASVVLVIGKFVREFFSGISHSIMFEELPNVDRILKLCTDIFLVRETGELELEEDLYAKLIFLYRSPETMIKWTREKTN

SEQ ID NO: 318552 - protein, 646 aa, Artificial Sequence
  derived and/or modified sequence
MTESGMAREESDDELSLGHGRRDSSDSLKSINLAASVESVHVTFPEQQTAVRRKRSGSSSEPSQRSSFSSNRSQRGSTSTRNSSQKGSSVLSIKQKGKRELYMEKLQEHLIKAKAFTIKKTLEIYVPIKQFFYNLIHPEYSAVTDVYVLMFLADTVDFIIIVFGFWAFGKHSAAADITSSLSEDQVPGPFLVMVLIQFGTMVVDRALYLRKTVLGKVIFQVILVFGIHFWMFFILPGVTERKFSQNLVAQLWYFVKCVYFGLSAYQIRCGYPTRVLGNFLTKSYNYVNLFLFQGFRLVPFLTELRAVMDWVWTDTTLSLSSWICVEDIYAHIFILKCWRESEKPIFTMSAQQSQLKVMDQQSFNKFIQAFSRDTGAMQFLENYEKEDITVAELEGNSNSLWTISPPSKQKMIHELLDPNSSFSVVFSWSIQRNLSLGAKSEIATDKLSFPLKNITRKNIAKMIAGNSTESSKTPVTIEKIYPYYVKAPSDSNSKPIKQLLSENNFMDITIILSRDNTTKYNSEWWVLNLTGNRIYNPNSQALELVVFNDKVSPPSLGFLAGYGIMGLYASVVLVIGKFVREFFSGISHSIMFEELPNVDRILKLCTDIFLVRETGELELEEDLYAKLIFLYRSPETMIKWTREKTN

SEQ ID NO: 318553 - protein, 709 aa, Artificial Sequence
  derived and/or modified sequence
MTESGMAREESDDELSLGHGRRDSSDSLKSINLAASVESVHVTFPEQQTAVRRKRSGSSSEPSQRSSFSSNRSQRGSTSTRNSSQKGSSVLSIKQKGKRELYMEKLQEHLIKAKAFTIKKTLEIYVPIKQFFYNLIHPEYSAVTDVYVLMFLADTVDFIIIVFGFWAFGKHSAAADITSSLSEDQVPGPFLVMVLIQFGTMVVDRALYLRKTVLGKVIFQVILVFGIHFWMFFILPGVTERKFSQNLVAQLWYFVKCVYFGLSAYQIRCGYPTRVLGNFLTKSYNYVNLFLFQGFRLVPFLTELRAVMDWVWTDTTLSLSSWICVEDIYAHIFILKCWRESEKRYPQPRGQKKKKVVKYGMGGMIIVLLICIVWFPLLFMSLIKSVAGVINQPLDVSVTITLGGYQPIFTMSAQQSQLKVMDQQSFNKFIQAFSRDTGAMQFLENYEKEDITVAELEGNSNSLWTISPPSKQKMIHELLDPNSSFSVVFSWSIQRNLSLGAKSEIATDKLSFPLKNITRKNIAKMIAGNSTESSKTPVTIEKIYPYYVKAPSDSNSKPIKQLLSENNFMDITIILSRDNTTKYNSEWWVLNLTGNRIYNPNSQALELVVFNDKVSPPSLGFLAGYGIMGLYASVVLVIGKFVREFFSGISHSIMFEELPNVDRILKLCTDIFLVRETGELELEEDLYAKLIFLYRSPETMIKWTREKTN

SEQ ID NO: 318554 - protein, 341 aa, Artificial Sequence
  derived and/or modified sequence
MAMIELGFGRQNFHPLKRKSSLLLKLIAVVFAVLLFCEFLIYYLAIFQCNWPEVKTTASDGEQTTREPVLKAMFLADTHLLGEFLGHWLDKLRREWQMERAFQTALWLLQPEVVFILGDIFDEGKWSTPEAWADDVERFQKMFRHPSHVQLKVVAGNHDIGFHYEMNTYKVERFEKVFSSERLFSWKGINFVMVNSVALNGDGCGICSETEAELIEVSHRLNCSREQARGSSRCGPGPLLPTSAPVLLQHYPLYRRSDANCSGEDAAPAEERDIPFKENYDVLSREASQKLLWWLQPRLVLSGHTHSACEVHHGGRVPELSVPSFSWRNRNNPSFIMGTDA

SEQ ID NO: 318555 - DNA, 732 bp, Artificial Sequence
  derived and/or modified sequence
atggagagggccttccagacagctctgtggctcttgcagccggaggtggtgtttattctcggcgacattttcgacgaggggaaatggagtacgcctgaggcctgggctgatgacgtagagagattccagaagatgttcagacatccttctcacgtccagctaaaggttgttgcggggaaccatgatattgggtttcattatgagatgaacacatataaggtggaacgcttcgagaaggtatttagcagcgagcggttattcagttggaaagggatcaattttgttatggtgaatagtgtggcccttaacggagacggatgtggaatctgttccgaaactgaggccgaacttatcgaggtgtcccacaggcttaattgtagtcgggaggccagaggaagcagtcgctgcggaccaggacccctgctcccaacctccgcgcccgtgcttttgcagcactatccattgtacaggagaagcgacgcaaactgctccggcgaagatgcagctccagcagaggaacgtgacatcccattcaaggaaaattatgacgtgctgtccagagaggcatcccagaaactactctggtggctccagccgagactggtgctctctggtcatacacattctgcatgtgaagtgcatcacggtgggagggtgcctgagctgtcagttccaagcttcagctggaggaaccggaacaaccccagcttcatcatgggtactgatgcttag

SEQ ID NO: 318556 - DNA, 1026 bp, Artificial Sequence
  derived and/or modified sequence
atggccatgattgaacttggctttggtagacagaacttccacccactcaaaaggaaaagtagtctgctgttaaaactgatagccgtcgtgtttgccgtgctcttgttctgtgagttcctgatctattacctagcaatctttcaatgtaactggccagaggtcaagactactgcctctgacggcgaacagaccactcgagagcccgtgctcaaagcaatgtttttagccgatacacacctgctgggggaattccttggtcactggcttgacaagctgcgccgcgagtggcagatggaacgcgcctttcagactgctctgtggctccttcagcctgaagttgtgtttatcctgggcgatatattcgatgagggcaagtggtctacgcccgaggcttgggccgacgacgtcgagagatttcagaagatgtttcggcatccttcacacgtccaactgaaggtcgtcgctggcaaccatgatataggcttccactatgaaatgaacacctataaagtggagaggttcgaaaaagtgttttcaagtgagaggctgttctcctggaaaggcatcaacttcgtcatggtgaacagcgtggctctcaatggcgatggttgcggaatctgttccgaaaccgaggccgaactcatcgaggtatcacatcgtctgaactgctctagagaacaggctcggggttcgagcaggtgcggcccgggaccgctgctgcctactagcgcccccgtcctgttacagcactaccctttatatagacgatcagacgccaattgctctggcgaggatgccgcacccgcagaagagagggacataccatttaaagagaattatgatgtgctgagccgggaagcttcacagaagttactgtggtggctgcagccacggcttgtgttgtctggccacacccactccgcctgtgaggtgcatcacggcggaagggtgcctgaactatccgttcctagcttctcatggcggaaccgaaacaatcctagctttattatgggcaccgacgcgtag

SEQ ID NO: 318557 - DNA, 732 bp, Artificial Sequence
  derived and/or modified sequence
atggagcgggccttccagacagccctgtggctgctgcagcctgaggtggtgttcatcctgggggacatctttgatgagggcaagtggagcaccccagaggcctgggcagatgatgtggagcgcttccagaagatgttccgccaccccagccacgtgcagctgaaggtggtggccggcaaccacgacatcggcttccactatgagatgaacacctacaaggtggagagatttgagaaggtgttcagcagcgagcggctcttctcctggaagggcatcaactttgtgatggtgaacagcgtggccctgaatggagatggctgcggcatctgcagcgagacagaagctgagctgattgaggtgagccaccggctgaactgcagccgggaggcccggggcagcagccgctgtggccctggccccctgctgcccaccagcgcccctgtgctgctgcagcactaccccctgtacagaagaagtgatgccaactgcagcggggaggatgctgccccagctgaggagcgggacatccccttcaaggagaactatgatgtgctgagccgggaggccagccagaagctgctgtggtggctgcagccccggctggtgctgagcggccacacccacagcgcctgtgaggtgcaccacggcggccgggtgcctgagctgtctgtgcccagcttctcctggaggaacagaaacaaccccagcttcatcatgggcacagatgcctag

SEQ ID NO: 318558 - DNA, 1026 bp, Artificial Sequence
  derived and/or modified sequence
atggccatgattgagctgggcttcggccggcagaacttccaccccctgaagaggaagagcagcctgctgctgaagctgattgctgtggtgtttgctgtgctgctcttctgtgagttcctgatctactacctggccatcttccagtgcaactggccagaggtgaagaccacagccagtgatggagagcagaccacccgggagcctgtgctgaaggccatgttcctggccgacacccacctgctgggggagttcctgggccactggctggacaagctgcggcgggagtggcagatggagcgggccttccagacagccctgtggctgctgcagcctgaggtggtgttcatcctgggggacatctttgatgagggcaagtggagcaccccagaggcctgggcagatgatgtggagcgcttccagaagatgttccgccaccccagccacgtgcagctgaaggtggtggccggcaaccacgacatcggcttccactatgagatgaacacctacaaggtggagagatttgagaaggtgttcagcagcgagcggctcttctcctggaagggcatcaactttgtgatggtgaacagcgtggccctgaatggagatggctgcggcatctgcagcgagacagaggccgagctgattgaggtgagccaccggctgaactgcagccgggagcaggcccggggcagcagccgctgtggccctggccccctgctgcccaccagcgcccctgtgctgctgcagcactaccccctgtacagaagaagtgatgccaactgcagcggggaggatgctgccccagctgaggagcgggacatccccttcaaggagaactatgatgtgctgagccgggaggccagccagaagctgctgtggtggctgcagccccggctggtgctgagcggccacacccacagcgcctgtgaggtgcaccacggcggccgggtgcctgagctgtctgtgcccagcttctcctggaggaacagaaacaaccccagcttcatcatgggcacagatgcctag

SEQ ID NO: 318559 - DNA, 1667 bp, Artificial Sequence
  derived and/or modified sequence
gcacttcgcggagggcgctaggggccgggacgcggccgccgagcgtaggttccggcctttactccgagttgcgcacggagccccagctgcggttgtccgctctggggatcacaggccgcggagacccgggagccacccgccgggccccttcagacgacccgcttccgcaaaccggccgtgggactccggcgccgggcggacgaagcggctccgggaagactcggtcttccccgcccgcctgaggtcgccggggcggggcttcagtgacaggcccgcgcgctaccgcggaaacaggaagttggctgggtgcgcgccggctccggctgcagttcccgggtccctcggccaccgaagccaccctgccctggtgaaagggctcccgcaccgcccggtgctccccatctgcctggcgttgtgcgcagagctggaaagcatggctgttataaatgaattctgattttggggagcagatgccaacttagagcctcgtaccaatctctctgtctttaaaagatgaggtgacttggtgattttcctggaaaattataggtgcccagctaagacctgaatgccatcaccctccccagggctctgcagttttctcgtggtgaacccttgatggatttgttgttgcttgagaaatggcgatgatcgaattggggtttggaagacagaattttcatccattaaagaggaagagttcattgctgttgaaactcatagctgttgtctttgctgtgcttctattttgtgaatttttaatctattacttagcgatctttcagtgtaattggcctgaagtgaaaaccacagcctctgatggtgaacagaccacacgtgagcctgtgctcaaagccatgtttttggctgacacccatttgcttggggaattcctaggccactggctggacaaattacgaagggaatggcagatggagagagcgttccagacagctctgtggttgctgcagccggaagtcgtcttcatcctgggggatatctttgatgaagggaagtggagcacccctgaggcctgggcggatgatgtggagcggtttcagaaaatgttcagacacccaagtcatgtacagctgaaggtagttgctggaaaccatgacattggcttccattatgagatgaacacatacaaagtagaacgctttgagaaagtgttcagctctgaaagactgttttcttggaaaggcattaactttgtgatggtcaacagcgtggcgctgaacggggatggctgtggcatctgctctgaaacagaagcagagctcattgaagtttctcacagactgaactgctcccgagagcaggcacgtggctccagccggtgtggacctgggcctctgctgcccacgtctgcccctgtcctcctgcagcattatcctctgtatcggagaagtgatgctaactgttctggggaagacgctgctcctgcagaggaaagggacatcccatttaaggagaactatgacgtgctttcacgggaggcatcacaaaagctgctgtggtggctccagccgcgcctggttctcagtggccacacgcacagcgcctgcgaggtgcaccacgggggccgagtccccgagctcagcgtcccatctttcagttggaggaacagaaacaaccccagtttcatcatgggaacagatgcttag

SEQ ID NO: 318560 - DNA, 732 bp, Artificial Sequence
  derived and/or modified sequence
atggagcgggccttccagaccgccctgtggctgctgcagcccgaggtggtgttcatactgggcgacattttcgacgaaggtaagtggagtacacctgaggcctgggcagatgacgttgagcgcttccagaagatgttccgacatcctagccatgtgcaactcaaagtcgtcgctggcaatcacgacattggattccactacgaaatgaacacgtacaaggttgaacgatttgagaaagtctttagttctgagagactgtttagctggaagggcattaattttgtcatggtgaacagtgtcgccctgaacggagacggctgtggtatctgttcagaaaccgaagctgagctgatcgaggtctcccatcggctcaactgctcaagggaagcacgcgggtcctcccgctgtggccccggtccccttttgcccacaagcgccccagtcctccttcagcactaccctctgtaccgccggagcgatgccaattgctccggcgaggacgccgctccagcggaggaacgggacattccattcaaagaaaattacgatgtgctgtcgagagaggctagccagaaactactctggtggttgcaacctaggctggtgctgagtgggcacacacacagcgcctgtgaggtccaccacggcgggcgtgtcccggaactctctgtcccttcattcagctggagaaaccgaaacaaccccagtttcataatgggtaccgatgcatag

SEQ ID NO: 318561 - DNA, 1026 bp, Artificial Sequence
  derived and/or modified sequence
atggccatgatcgagctgggcttcggccggcagaacttccaccccctaaaacgcaagtcatcattgctgctgaaacttatcgccgttgtgtttgcggtactccttttttgtgaatttcttatatactacctagctatatttcagtgtaactggcctgaagttaaaacaacggcctctgacggcgaacagacaaccagagagccagttcttaaggctatgttcctggctgatactcacctcttaggcgaatttctgggacactggctcgacaagctgcgacgggagtggcagatggagcgcgccttccagacagctctgtggcttctgcagccggaagtggtgtttatcttgggagacatctttgatgaaggaaagtggtcaacacctgaagcgtgggccgatgacgtggaacggttccagaaaatgtttcgccacccaagtcacgttcaactcaaagtggtggctggaaaccacgacattggatttcactatgagatgaatacttacaaggtggagaggttcgaaaaggtgttctcttcagaacggttgttttcatggaaagggatcaactttgtaatggtaaattccgtggccttgaatggggacggctgtgggatttgcagtgagacggaagccgagctaattgaggtttctcatagactgaactgtagtcgtgagcaggcccgcgggtctagccgctgcggccctggccccctgctccctacatccgcccctgtcctattacagcactacccgctgtaccgaaggtctgatgccaattgctctggggaagatgcagctcctgccgaggagcgcgatattcctttcaaggaaaattacgacgtgctcagccgcgaggcttcccagaagctcctatggtggcttcagccaagattggtcttgagtggtcatacacacagcgcgtgcgaagtgcatcatggaggtagagtccccgagttatcagtcccatctttctcttggcgcaaccggaacaacccgagctttattatgggcacagatgcctag

SEQ ID NO: 318562 - DNA, 732 bp, Artificial Sequence
  derived and/or modified sequence
atggagcgggcttttcagacagcactgtggctcctgcagcccgaagtggtgttcatccttggcgacattttcgacgagggtaagtggtctacaccagaggcttgggcagacgatgtggagaggtttcaaaaaatgttccgtcatcccagtcacgtccagctgaaggtggtggccggaaaccatgatataggctttcattacgagatgaatacttacaaggtggagagattcgaaaaggtcttcagttccgagagattgttttcttggaagggcattaatttcgtgatggttaactcagtagcattgaatggagacgggtgtggcatctgctcagagactgaagccgaactaattgaggtgtcccatcggcttaactgcagccgcgaggctcgaggcagcagccgttgcggccctggccctctgctgcctacgtcagctcctgtgctccttcagcattatccactgtatcggcgatcagatgcgaattgctctggggaggacgctgcgccagccgaggagagagacattccatttaaagaaaattacgacgtgctctccagagaggcatcacagaaactcctgtggtggctgcaacccagattagtcctgagtgggcacacacattccgcctgtgaagtgcaccacggaggccgtgtgccggagctttcagtgccgtccttcagttggcgcaacagaaataatccaagcttcattatgggtactgatgcttag

SEQ ID NO: 318563 - DNA, 1026 bp, Artificial Sequence
  derived and/or modified sequence
atggccatgatcgagctgggctttggacgccaaaacttccacccccttaaacgcaagtcttctctgttgctgaagctgattgctgtagtgtttgctgtcttgctcttctgtgagtttctcatctactacctggcgatcttccagtgcaactggccggaggtgaaaaccactgcttcagacggagaacagaccacaagagaacccgttctgaaggccatgtttcttgcagacactcacctcctgggggaatttttaggtcattggttagataagctgcggagagagtggcagatggaaagagcctttcagactgcattgtggctcctccaaccggaagtcgtatttatacttggcgacatcttcgatgagggcaagtggtccacaccggaagcctgggctgacgatgttgagcgattccaaaaaatgtttcggcacccctcgcacgtgcaattaaaggtggtggccggtaatcacgacatcggcttccactatgagatgaacacttataaggtagaacgctttgaaaaggtcttctcgtccgagcgcttgttctcatggaaagggatcaacttcgtgatggttaactcagtggccttaaatggcgacggttgcggaatctgctctgagaccgaagccgagctgatagaggtgagccaccgtttaaattgttccagggaacaggctagagggtcctctcgctgcggacctggtcctctgctgccaacgagtgccccagtgctgcttcagcattaccccctatatcgccgatccgatgcaaattgcagcggggaagatgcagcccctgcagaagagcgcgatatcccatttaaggaaaattacgacgtcctgagtcgcgaagcaagtcaaaagctgctttggtggctgcagccacggctagtgttgagcggtcatacccattccgcttgcgaagtccatcatggcggacgagtgccagaactctcggttcccagcttttcatggcgcaacagaaacaatccatctttcatcatgggcaccgacgcttag

SEQ ID NO: 318564 - DNA, 732 bp, Artificial Sequence
  derived and/or modified sequence
atggagagagccttccagaccgccctgtggctgctgcagcccgaggtggtgttcatcctgggcgacatcttcgacgagggcaagtggagcacccccgaggcctgggccgacgacgtggagagattccagaagatgttcagacaccccagccacgtgcagctgaaggtggtggccggcaaccacgacatcggcttccactacgagatgaacacctacaaggtggagagattcgagaaggtgttcagcagcgagagactgttcagctggaagggcatcaacttcgtgatggtgaacagcgtggccctgaacggcgacggctgcggcatctgcagcgagaccgaggccgagctgatcgaggtgagccacagactgaactgcagcagagaggccagaggcagcagcagatgcggccccggccccctgctgcccaccagcgcccccgtgctgctgcagcactaccccctgtacagaagaagcgacgccaactgcagcggcgaggacgccgcccccgccgaggagagagacatccccttcaaggagaactacgacgtgctgagcagagaggccagccagaagctgctgtggtggctgcagcccagactggtgctgagcggccacacccacagcgcctgcgaggtgcaccacggcggcagagtgcccgagctgagcgtgcccagcttcagctggagaaacagaaacaaccccagcttcatcatgggcaccgacgcctag

SEQ ID NO: 318565 - DNA, 1026 bp, Artificial Sequence
  derived and/or modified sequence
atggccatgatcgagctgggcttcggcagacagaacttccaccccctgaagagaaagagcagcctgctgctgaagctgatcgccgtggtgttcgccgtgctgctgttctgcgagttcctgatctactacctggccatcttccagtgcaactggcccgaggtgaagaccaccgccagcgacggcgagcagaccaccagagagcccgtgctgaaggccatgttcctggccgacacccacctgctgggcgagttcctgggccactggctggacaagctgagaagagagtggcagatggagagagccttccagaccgccctgtggctgctgcagcccgaggtggtgttcatcctgggcgacatcttcgacgagggcaagtggagcacccccgaggcctgggccgacgacgtggagagattccagaagatgttcagacaccccagccacgtgcagctgaaggtggtggccggcaaccacgacatcggcttccactacgagatgaacacctacaaggtggagagattcgagaaggtgttcagcagcgagagactgttcagctggaagggcatcaacttcgtgatggtgaacagcgtggccctgaacggcgacggctgcggcatctgcagcgagaccgaggccgagctgatcgaggtgagccacagactgaactgcagcagagagcaggccagaggcagcagcagatgcggccccggccccctgctgcccaccagcgcccccgtgctgctgcagcactaccccctgtacagaagaagcgacgccaactgcagcggcgaggacgccgcccccgccgaggagagagacatccccttcaaggagaactacgacgtgctgagcagagaggccagccagaagctgctgtggtggctgcagcccagactggtgctgagcggccacacccacagcgcctgcgaggtgcaccacggcggcagagtgcccgagctgagcgtgcccagcttcagctggagaaacagaaacaaccccagcttcatcatgggcaccgacgcctag

SEQ ID NO: 318566 - DNA, 759 bp, Artificial Sequence
  derived and/or modified sequence
atggacatccctctcgatctgagtagtagcgctggttcgggaaagagaagaaggcgaggcaacctgccaaaagaatcagtgcagatcctacgcgattggctgtatgaacataggtataacgcctacccttccgagcaggagaaggccttgttgtcccagcaaactcatctcagtacattgcaggtctgcaactggtttatcaatgctcgaagaagactgttgccagacatgctccgcaaagacggtaaggaccccaatcagttcacaatctctcggaggggagctaaaatcagcgagacgtcatcggtcgaatctgtaatggggataaaaaacttcatgcctgccctcgaagaaacccccttccacagctgtaccgcaggaccaaatccaacactgggaaggccactttccccaaagccctcaagtcctggctcggtgcttgcgcgtccatcagtgatctgccatactactgtcaccgctctgaaagacgttccgttctcactgtgccagtcggtgggggtaggccaaaatacagacatccagcagattgccgcaaaaaactttaccgacacatctttgatgtaccctgaggatacttgcaagagcggccctagcactaacactcagagcggactgtttaacactccgccacctacaccccccgatttgaaccaggacttcagcgggttccaattgctggtcgacgtggcccttaagagagcagccgaaatggaacttcaggcgaagctaactgcatag

SEQ ID NO: 318567 - DNA, 759 bp, Artificial Sequence
  derived and/or modified sequence
atggacataccgctggatctcagcagcagtgccgggtccggaaagcgacggagacgcggaaatctccctaaggagtctgtgcaaatcttgagggactggttgtacgagcatagatataacgcctatccatcagaacaggaaaaagccctcctcagccaacagacccatttgagcacactgcaggtatgtaactggtttatcaacgcacgacgccgactgctgcctgacatgctcaggaaggacgggaaggatccaaaccaatttacaatcagccggcggggtgcgaagattagcgagacctccagcgtggagtctgttatgggaatcaagaacttcatgcctgctctggaagagactcctttccattcttgcaccgccggtccaaatcctacgttggggcggcctctgtctccgaaaccttccagccccggttccgtgcttgctaggccctctgtcatttgtcatacaactgtgaccgcactgaaagacgtacccttctctctatgccagagcgtcggagtggggcagaacacagatattcagcagattgccgctaagaatttcacggatacatcactgatgtaccctgaagacacctgtaagtcaggtccttctactaacacacagtctggcctgtttaacacaccccctcctacaccacccgatctgaaccaggacttcagcggtttccaattgctagtggacgtggctcttaagcgggctgctgagatggagctgcaggccaagctgactgcctag

SEQ ID NO: 318568 - DNA, 759 bp, Artificial Sequence
  derived and/or modified sequence
atggacatccccctggacctttcatccagcgccggatctgggaaacgccgccgcagggggaatctccccaaggagagcgttcaaatcctgagagactggctctatgaacacaggtacaacgcataccccagcgagcaggaaaaggctttgctttcccaacagacccatttatcaacactgcaggtctgcaactggtttattaatgcaaggcgcaggttactcccggatatgctgcgtaaggatgggaaggatcccaaccagtttaccattagtaggaggggtgcgaagattagtgagacttcatctgttgagtccgtgatggggataaaaaacttcatgcccgcacttgaagagaccccttttcactcctgcacggctggcccaaaccccacacttggccgtccactttcgcccaagccctccagtccgggctcagtgctggcgagaccaagcgtaatctgtcacactactgtgactgctctcaaggacgtgccattttcactttgtcagagcgtgggcgtcggccagaataccgacatccagcagattgctgcaaaaaattttacagacacctccctaatgtatccagaagacacgtgtaaaagcggtcctagtacaaacacacagagcggcctgttcaacactccaccaccgactccacctgatctaaatcaagacttctcaggattccagttacttgtggacgtcgcccttaaaagagccgccgagatggagcttcaagcaaagttaacagcctag

SEQ ID NO: 318569 - DNA, 759 bp, Artificial Sequence
  derived and/or modified sequence
atggacatccctcttgacctctcatctagtgcagggtctggaaaacggcgcaggaggggcaatctcccgaaggaatccgtgcagatattacgggactggctgtacgagcatagatacaatgcctacccttccgagcaggagaaggctctgctgtcacagcagacacatctcagcacgctgcaagtgtgtaactggttcattaacgctcggcgtagactgctgccagacatgctgcgaaaagacgggaaggatccaaaccaatttactattagtcggcgaggcgctaagattagcgaaacttcatctgtcgaaagcgtcatgggtattaaaaattttatgcctgctctcgaggagacaccttttcatagctgcaccgccggccccaatccaactttgggacggccactctccccaaaaccttcgagcccagggtctgtcttggcccgacccagcgtgatatgtcacactaccgtcaccgcactcaaagacgtgccattctctctttgccagtccgttggcgttggtcagaatactgacatccaacagatcgccgcaaagaacttcactgacactagtctcatgtacccggaagatacgtgtaagagcggcccctcaaccaacactcagagcggacttttcaatactccaccccctacgccaccagacctgaatcaggacttctctggctttcagctcctggttgacgtcgctctgaaaagagccgccgagatggaattgcaggccaagctgactgcatag

SEQ ID NO: 318570 - DNA, 759 bp, Artificial Sequence
  derived and/or modified sequence
atggacattccattggatcttagtagttcagctggcagcgggaaaagacgtcgacgcggcaatctgcctaaggaatccgtgcaaattctgagagactggctatacgaacaccggtacaacgcatatcccagtgaacaggagaaggctctactctcccagcagacacatctttcaaccttacaggtgtgtaactggttcattaacgccaggaggcggctccttcccgacatgctgcggaaggatggaaaagacccgaatcagttcacgattagtcgccgcggggctaaaatttctgagacctcgtctgttgagtctgtaatgggcatcaagaactttatgcctgcactcgaagaaacacccttccacagttgcaccgctggtcctaaccctaccttgggacggcccctttcccctaaaccgagttcacccggatccgtgttggcacggccctccgtgatctgccataccaccgtgacagccctgaaagacgttcctttctcactctgccaatcagtcggtgtggggcagaacactgatatccagcagattgccgccaaaaactttactgacacgtctttgatgtatccggaggatacctgcaaaagcggacctagcacaaacactcagtcgggactttttaatacaccccctcccactccgcctgatctcaaccaggatttctctggcttccagctgttagtggatgtggcactaaaacgcgcagcagagatggaactacaggccaaattgactgcatag

SEQ ID NO: 318571 - DNA, 279 bp, Artificial Sequence
  derived and/or modified sequence
atggacatcccacttgacctgagctcgagcgccggctctggaaagagaaggagacggggcaacctgcccaaggaaagcgtgcagatcctgagggactggctttatgagcaccgatataacgcttacccctcggaacaggagaaggccctgttatcacagcagacccatctgtcgaccctccaagtatgtaattggtttatcaacgcacgaaggcggctcctacctgatatgctgaggaaggacgggaaagatcccaaccaatttacgatcagtcgatag

SEQ ID NO: 318572 - DNA, 402 bp, Artificial Sequence
  derived and/or modified sequence
atggacattcctcttgatctgtcttcgagcgctggttctggaaagaggcgacgccgggggaacctacctaaagaatctgtccagatcctaagggactggctctacgaacatcgatacaatgcttatcccagtgagcaagagaaagcactgctgagccagcagactcacctttctaccctacaagtctgcaactggttcattaatgcccggcggcggctgctcccagatatgcttcggaaggacgggaaggaccctaaccagttcactatctcaaggaggggagccaagatcagtgagacatcatctgtcgaaagtgtgatgggtatcaagaatttcatgcccgccttggaagagacacctttccacagttgcaccgccgggcccaacccaacgctggggtag

SEQ ID NO: 318573 - DNA, 741 bp, Artificial Sequence
  derived and/or modified sequence
atggacatacctctggacctctcatccagtgcaggatccggcaagagaagaaggcgggggaacctcccaaaggagagcgtccagattctacgagattggttgtatgaacataggtacaacgcctatcctagcgaacaagagaaggcccttctatctcagcagactcatctgtccaccctgcaggtctgtaattggtttatcaacgccaggaggcgtttgctgccagacatgctgcgtaaagatggcaaagacccaaaccaattcaccataagtaggcggggcgctaagatatctgagacaagctcagttgaatccgtgatgggtattaaaaatttcatgccggctctcgaggagacacctttccactcctgtactgcggggccgaacccgacgttggggaggccattgtcgcctaaaccgtcatcaccaggcagcgtgctcgcccgtccctccgtcatctgtcacactacggttaccgccctcaaagacgtaccattttcattatgtcagtccgttggtgtggggcagaacaccgatatacagcagatcgccgccaaaaacttcaccgacacatctctgatgtatcctgaggatacctgcaaatctggtccctcaacaaacacacagtcaggtctgtttaatacaccaccccctacaccaccggatctgaaccaggacttcagcggattccagctcctggtggatgtggctctgaagcgcgccgccgaaatggagctgtag

SEQ ID NO: 318574 - DNA, 660 bp, Artificial Sequence
  derived and/or modified sequence
atggacatacctctggacctgagcagttccgcagggagcggaaagagaaggcggagaggcaacctacccaaggagtctgtgcagatcctccgtgactggttgtacgagcataggtacaatgcatacccctcagagcaggagaaggctctcctgtcacagcagactcatctttccactctgcaggtctgtaactggttcatcaatgcccgacgcaggctgcttcccgacatgctccggaaggatggcaaagatcccaatcaatttactatttctaggcgaggagccaaaatcagtgagacctcctccgtcgagtccgtgatgggcatcaagaattttatgcctgcactggaagaaacgccgttccactcttgtacagccggcccaaacccaaccttggggaggccgctttctcctaagccttcaagtccaggttccgtccttgcccggcccagcgtgatctgccataccactgttactgcattaaaggacgtgcccttctcgctgtgccagagcgtgggcgtcggccagaacactgacatccaacagattgcagcaaagaattttaccgacacttccctcatgtatcctgaggacacctgcaaatctggcccatctacaaacactcagtccggtctgtttaacacaccaccccccacctag

SEQ ID NO: 318575 - DNA, 396 bp, Artificial Sequence
  derived and/or modified sequence
atggacattccactagacctgtcctccagcgctgggagtggaaagagacgccgccggggcaacttgcccaaggagtccgttcaaattctccgcgactggctgtacgaacaccgctacaatgcttatccttccgagcaggagaaagcgctattatctcaacagactcatctctccactctgcaggtgtgtaattggtttattaatgccaggcgcagactgctgccggatatgctgaggaaagatggtaaagaccccaatcaatttaccataagtcgaagaggtgcaaagatctccgaaacaagcagcgttgagtccgtgatgggaattaaaaatttcatgccggctctggaggagacgccttttcattcctgcactgccggcccgaatcccacatag

SEQ ID NO: 318576 - DNA, 417 bp, Artificial Sequence
  derived and/or modified sequence
atggacataccactggatctgagcagttctgccgggagcggtaaacggagacgtcgtggaaatctgccaaaggaaagcgtacaaatcttacgtgattggctgtacgaacatcgatataacgcctatccatcagagcaggagaaggcacttctcagccagcagacccatctgagcacactgcaggtgtgcaactggttcatcaatgcccgaaggcgactgctgccggacatgcttcgcaaggatgggaaagacccaaaccagttcaccatcagtcggaggggggcaaagatctcagagacctcttccgtcgagtcagtcatgggcattaagaacttcatgcccgcccttgaggaaacaccgtttcacagctgcaccgcaggaccgaacccgacgctagggcgccccctgtctccttag

SEQ ID NO: 318577 - DNA, 759 bp, Artificial Sequence
  derived and/or modified sequence
atggacataccccttgacctctcctcctcggccggctcaggcaagcggcgcagaaggggcaatctgccaaaggagtctgtccagatactacgggactggctttatgaacatcgctataacgcctacccatccgagcaggagaaagcgcttctgtcccaacagacgcatctgagcactcttcaggtctgcaattggtttataaatgccagacgtagattgttgcccgatatgctgagaaaagatgggaaagacccaaaccagttcactattagccggcgaggtgcaaagattagcgagacaagtagcgtggagtccgttatgggtattaaaaacttcatgccagccctggaagaaacaccgttccactcctgtaccgcagggcccaatcctactctcggcaggcctctgagtcccaaaccctcctctccaggcagtgtgcttgccagacctagcgtgatttgccacaccacagtaaccgccctcaaggatgtgccttttagcctgtgtcagagtgtcggggtcggacaaaacacagacatccagcagatcgccgccaagaatttcacagatacaagcctcatgtatccggaggatacttgtaaatctggaccctcgactaacacacaaagcggactgttcaacactccacctcccacaccacctgatctgaatcaggacttctcgggctttcagttgttggtagatgttgctctgaaaagagccgccgaaatggaactgcaggcaaagctgacagcttag

SEQ ID NO: 318578 - DNA, 507 bp, Artificial Sequence
  derived and/or modified sequence
atggacatccctctggacttgtcctcatccgcaggatccggcaagagacggcggagaggcaacctgcctaaagagagtgtgcagattctgcgcgattggttatacgaacaccgctacaacgcctatcccagcgagcaggagaaagcactcctgtctcagcagactcacctgtccacgcttcaggtgtgtaattggttcattaacgcgagacgaagactcctgcctgatatgctccggaaagacggcaaggatccaaaccaattcactatttctcgccgaggggccaagatttcggaaacatcgagtgtcgagtccgtgatgggcatcaagaactttatgcccgccctggaggagactccgtttcactcctgtacggccggccccaaccccactttgggcagaccattgagtccaaaaccgtccagccccggatctgtcctggctcggccttctgtgatttgtcacaccaccgtgacagccctgaaggacgtcccttttagcttgtag

SEQ ID NO: 318579 - DNA, 759 bp, Artificial Sequence
  derived and/or modified sequence
atggacatccccctggacctgagcagcagcgctggcagcggcaagagaagaagaagaggcaacctgcccaaggagagcgtgcagatcctgcgggactggctgtatgagcaccgctacaatgcctaccccagcgagcaggagaaggccctgctgagccagcagacccacctgagcaccctgcaggtgtgcaactggttcatcaatgcccggcggcggctgctgcctgacatgctgaggaaggatggcaaggaccccaaccagttcaccatcagccggcggggggccaagatcagcgagaccagctctgtggagagcgtgatgggcatcaagaacttcatgcctgccctggaggagacccccttccacagctgcacagctggccccaaccccaccctgggccggcccctgagccccaagcccagcagccctggctctgtgctggcccggcccagcgtcatctgccacaccaccgtgacagccctgaaggatgtgcccttcagcctgtgccagagcgtgggcgtgggccagaacacagacatccagcagattgctgccaagaacttcacagacaccagcctgatgtacccagaggacacctgcaagagcggccccagcaccaacacccagagcggcctcttcaacaccccaccacccaccccaccagacctgaaccaggacttcagcggcttccagctgctggtggatgtggccctgaagagagctgctgagatggagctgcaggccaagctgacagcctag

SEQ ID NO: 318580 - DNA, 279 bp, Artificial Sequence
  derived and/or modified sequence
atggacatccccctggacctgagcagcagcgctggcagcggcaagagaagaagaagaggcaacctgcccaaggagagcgtgcagatcctgcgggactggctgtatgagcaccgctacaatgcctaccccagcgagcaggagaaggccctgctgagccagcagacccacctgagcaccctgcaggtgtgcaactggttcatcaatgcccggcggcggctgctgcctgacatgctgaggaaggatggcaaggaccccaaccagttcaccatcagcaggtag

SEQ ID NO: 318581 - DNA, 402 bp, Artificial Sequence
  derived and/or modified sequence
atggacatccccctggacctgagcagcagcgctggcagcggcaagagaagaagaagaggcaacctgcccaaggagagcgtgcagatcctgcgggactggctgtatgagcaccgctacaatgcctaccccagcgagcaggagaaggccctgctgagccagcagacccacctgagcaccctgcaggtgtgcaactggttcatcaatgcccggcggcggctgctgcctgacatgctgaggaaggatggcaaggaccccaaccagttcaccatcagccggcggggggccaagatcagcgagaccagctctgtggagagcgtgatgggcatcaagaacttcatgcctgccctggaggagacccccttccacagctgcacagctggccccaaccccaccctgggctag

SEQ ID NO: 318582 - DNA, 741 bp, Artificial Sequence
  derived and/or modified sequence
atggacatccccctggacctgagcagcagcgctggcagcggcaagagaagaagaagaggcaacctgcccaaggagagcgtgcagatcctgcgggactggctgtatgagcaccgctacaatgcctaccccagcgagcaggagaaggccctgctgagccagcagacccacctgagcaccctgcaggtgtgcaactggttcatcaatgcccggcggcggctgctgcctgacatgctgaggaaggatggcaaggaccccaaccagttcaccatcagccggcggggggccaagatcagcgagaccagctctgtggagagcgtgatgggcatcaagaacttcatgcctgccctggaggagacccccttccacagctgcacagctggccccaaccccaccctgggccggcccctgagccccaagcccagcagccctggctctgtgctggcccggcccagcgtcatctgccacaccaccgtgacagccctgaaggatgtgcccttcagcctgtgccagagcgtgggcgtgggccagaacacagacatccagcagattgctgccaagaacttcacagacaccagcctgatgtacccagaggacacctgcaagagcggccccagcaccaacacccagagcggcctcttcaacaccccaccacccaccccaccagacctgaaccaggacttcagcggcttccagctgctggtggatgtggccctgaagagagctgctgagatggagctgtag

SEQ ID NO: 318583 - DNA, 660 bp, Artificial Sequence
  derived and/or modified sequence
atggacatccccctggacctgagcagcagcgctggcagcggcaagagaagaagaagaggcaacctgcccaaggagagcgtgcagatcctgcgggactggctgtatgagcaccgctacaatgcctaccccagcgagcaggagaaggccctgctgagccagcagacccacctgagcaccctgcaggtgtgcaactggttcatcaatgcccggcggcggctgctgcctgacatgctgaggaaggatggcaaggaccccaaccagttcaccatcagccggcggggggccaagatcagcgagaccagctctgtggagagcgtgatgggcatcaagaacttcatgcctgccctggaggagacccccttccacagctgcacagctggccccaaccccaccctgggccggcccctgagccccaagcccagcagccctggctctgtgctggcccggcccagcgtcatctgccacaccaccgtgacagccctgaaggatgtgcccttcagcctgtgccagagcgtgggcgtgggccagaacacagacatccagcagattgctgccaagaacttcacagacaccagcctgatgtacccagaggacacctgcaagagcggccccagcaccaacacccagagcggcctcttcaacaccccaccacccacctag

SEQ ID NO: 318584 - DNA, 396 bp, Artificial Sequence
  derived and/or modified sequence
atggacatccccctggacctgagcagcagcgctggcagcggcaagagaagaagaagaggcaacctgcccaaggagagcgtgcagatcctgcgggactggctgtatgagcaccgctacaatgcctaccccagcgagcaggagaaggccctgctgagccagcagacccacctgagcaccctgcaggtgtgcaactggttcatcaatgcccggcggcggctgctgcctgacatgctgaggaaggatggcaaggaccccaaccagttcaccatcagccggcggggggccaagatcagcgagaccagctctgtggagagcgtgatgggcatcaagaacttcatgcctgccctggaggagacccccttccacagctgcacagctggccccaaccccacctag

SEQ ID NO: 318585 - DNA, 417 bp, Artificial Sequence
  derived and/or modified sequence
atggacatccccctggacctgagcagcagcgctggcagcggcaagagaagaagaagaggcaacctgcccaaggagagcgtgcagatcctgcgggactggctgtatgagcaccgctacaatgcctaccccagcgagcaggagaaggccctgctgagccagcagacccacctgagcaccctgcaggtgtgcaactggttcatcaatgcccggcggcggctgctgcctgacatgctgaggaaggatggcaaggaccccaaccagttcaccatcagccggcggggggccaagatcagcgagaccagctctgtggagagcgtgatgggcatcaagaacttcatgcctgccctggaggagacccccttccacagctgcacagctggccccaaccccaccctgggccggcccctgagcccctag

SEQ ID NO: 318586 - DNA, 507 bp, Artificial Sequence
  derived and/or modified sequence
atggacatccccctggacctgagcagcagcgctggcagcggcaagagaagaagaagaggcaacctgcccaaggagagcgtgcagatcctgcgggactggctgtatgagcaccgctacaatgcctaccccagcgagcaggagaaggccctgctgagccagcagacccacctgagcaccctgcaggtgtgcaactggttcatcaatgcccggcggcggctgctgcctgacatgctgaggaaggatggcaaggaccccaaccagttcaccatcagccggcggggggccaagatcagcgagaccagctctgtggagagcgtgatgggcatcaagaacttcatgcctgccctggaggagacccccttccacagctgcacagctggccccaaccccaccctgggccggcccctgagccccaagcccagcagccctggctctgtgctggcccggcccagcgtcatctgccacaccaccgtgacagccctgaaggatgtgcccttcagcctgtag

SEQ ID NO: 318587 - DNA, 759 bp, Artificial Sequence
  derived and/or modified sequence
atggacatccccctggacctgagcagcagcgccggcagcggcaagcgccggcggcggggaaatctgccaaaggaaagcgttcagatcctgcgcgactggctctatgaacacaggtataacgcttatccctctgagcaggaaaaggccctgctttcccagcagacacatctatcgactctgcaagtctgcaattggttcatcaatgccaggcgtcggctgctgcctgacatgctgagaaaggatggaaaggatccaaatcagttcaccatatctaggaggggggcgaagatttccgaaacgtccagtgtcgagtccgttatgggtataaaaaacttcatgcccgctctggaagagacacccttccattcttgcacagccgggcctaatcctaccctggggcgaccgctgagccccaaaccgtctagccctgggtccgtcctcgcacgaccatctgtgatatgtcatactacggttactgctcttaaggacgtccctttctccctctgccagtcagtcggcgtcggacaaaacactgacattcagcagatagctgccaagaacttcactgatacaagtctaatgtaccccgaagatacatgcaagtcagggcccagcacaaacactcagtcggggctgttcaacacccccccaccaacccctcctgacctcaaccaggacttcagcggcttccagcttttagtcgacgtggctcttaaacgcgcggctgagatggagctgcaggctaagctcacggcatag

SEQ ID NO: 318588 - DNA, 759 bp, Artificial Sequence
  derived and/or modified sequence
atggacatccccctggacctgagcagcagcgccggcagcggcaagagaagacgacgtggcaatcttccgaaggagagcgtacagattttgagggactggctctacgagcaccgttacaatgcttacccttcggagcaggaaaaagcactgcttagtcaacagacccacctgagtaccctccaagtgtgtaactggtttatcaatgcccgaaggcgcctcctgcctgacatgctaaggaaggacgggaaggaccctaaccaatttaccatcagcaggagaggggcgaagatttccgagaccagctctgtagagagcgtgatgggaatcaaaaactttatgccagcacttgaggagaccccttttcactcctgtactgcagggccaaatccaaccttaggccgaccgctgtcacctaaacccagcagcccaggttctgttctggcccgccctagtgttatatgtcataccacagttacagcccttaaagatgtccctttctccctatgccagagtgtgggtgttggccaaaataccgacatccagcagatcgctgccaagaacttcactgacacgtctttaatgtatccagaagatacgtgtaaaagcggcccctccacaaatacacaatcaggcttgtttaatacgccaccgcctactccccctgacttgaaccaggacttctcgggctttcagctgcttgtggatgtcgcacttaagagggccgccgagatggagctccaagccaaacttacagcttag

SEQ ID NO: 318589 - DNA, 759 bp, Artificial Sequence
  derived and/or modified sequence
atggacatccccctggacctgagcagcagcgccggcagcggcaagcgcaggagacgtggcaatctgcctaaagagtccgtgcagattctcagggactggctctacgagcaccggtacaacgcttacccaagtgagcaggagaaggcactgctatcccagcagacccacctgtccaccctccaggtgtgcaattggtttataaatgctcgtcggagactgctgcctgacatgcttcgaaaagacggcaaggatccaaatcaattcactatatctcgacgtggcgctaaaattagtgagaccagctcagtggaatctgtgatgggaattaagaacttcatgcctgctttagaagaaacaccattccatagttgtacagctggacccaacccgaccctgggccggcccctgtcccctaaaccgtcaagcccaggttcagtgctggccagaccgtcagttatatgtcataccactgtgaccgcccttaaagacgttcccttttccctctgtcaaagtgttggcgtggggcagaacaccgatatccagcagattgcagccaagaattttacagatacctcccttatgtatccagaagacacttgcaagagcggcccctcgactaacactcagagcggactctttaacacacctccaccgacacctcctgaccttaatcaggactttagtgggttccagctactggtcgatgtcgcactgaaaagggccgctgagatggagctgcaagcaaaactcacagcctag

SEQ ID NO: 318590 - DNA, 759 bp, Artificial Sequence
  derived and/or modified sequence
atggacatccccctggacctgagcagcagcgccggcagcggcaagcgacgaagacgggggaatctgcctaaagagtccgtccaaatcctgcgggactggctgtacgagcaccgctataacgcgtacccgtccgaacaggagaaggcgctcttgtcccaacaaacgcacctcagcacattgcaggtttgcaattggttcattaacgcccgcagaaggcttttgcccgatatgctaagaaaagacggcaaggatccgaatcagtttaccatttcccgccggggggctaaaatcagtgaaacgagctccgtggagagcgtgatgggtataaagaatttcatgccggccctggaagagaccccttttcattcttgtacagcaggtccaaacccaacgctggggcgacccctctcccctaagccgagctcaccaggctcagtcctggcccgcccctctgtaatctgtcacacgaccgttaccgctctgaaagatgtcccgttctccctctgtcaatcagtgggggtcggccagaatactgacattcagcagattgcggccaagaacttcacagatacctctctaatgtacccggaggatacgtgcaaatccggcccatctacaaatacacagagtggcctgtttaatacaccccctccaacacctcctgacttaaaccaggactttagcggcttccagctgctagtagacgtcgccctgaaaagggctgcggagatggaactgcaggcaaagctgactgcctag

SEQ ID NO: 318591 - DNA, 759 bp, Artificial Sequence
  derived and/or modified sequence
atggacatccccctggacctgagcagcagcgccggcagcggcaagcggcgaagacgaggtaatctcccgaaggaaagcgtccagatcctccgggactggctttatgagcatagatacaacgcatacccatctgaacaggagaaggcattattatcccaacagacccatctctcgaccctgcaggtttgtaattggtttatcaatgcgagaagaaggttactccctgatatgttgagaaaagatggcaaagacccaaatcaattcacaatttcgaggcgaggcgctaagatttccgagactagcagtgtagagtccgtgatgggcatcaagaacttcatgcccgcacttgaggagacaccctttcattcctgcaccgcagggcctaatccaactctgggtcggcccctgtcccctaaaccttccagcccgggcagtgtcctcgcaaggccctccgtgatttgccatacaaccgtgactgctctgaaggacgtaccattcagcctgtgtcagtccgtaggggtcggccaaaataccgatatccagcagattgccgccaagaactttactgatacctctctaatgtacccagaggacacttgtaaatcgggaccctcaaccaacacacagtcaggcctcttcaacactccaccacctaccccgccagacctcaaccaggatttttccggctttcagctgctagtggacgtggcattgaagcgggccgccgagatggaacttcaggccaagctcaccgcgtag

SEQ ID NO: 318592 - DNA, 279 bp, Artificial Sequence
  derived and/or modified sequence
atggacatccccctggacctgagcagcagcgccggcagcggcaagcgcagacgacggggaaacttacctaaagagagtgtgcagattcttagggattggttgtacgaacaccgttataatgcttatccatctgagcaggaaaaggccctgctctcccagcagactcacttatccactctacaagtgtgcaattggttcatcaatgctcggaggcgcctgctgccagacatgttacgcaaagacggcaaggatcctaaccagttcactatctcccgctag

SEQ ID NO: 318593 - DNA, 402 bp, Artificial Sequence
  derived and/or modified sequence
atggacatccccctggacctgagcagcagcgccggcagcggcaagagaaggaggagaggcaatctgccaaaggaatctgtacagattctaagagactggttgtacgagcacagatacaatgcctaccctagcgagcaggagaaagcactcttgtcgcaacagacccatctctcaaccctacaggtgtgtaattggttcataaatgccaggagaaggttactgcccgacatgctgcggaaagacgggaaggaccccaatcaatttacaatctccagacgtggggcgaagatctctgagacctccagcgtggagagcgtgatgggtatcaaaaactttatgccagccttagaggagacaccctttcattcatgcacagccggccctaatccgactctgggctag

SEQ ID NO: 318594 - DNA, 741 bp, Artificial Sequence
  derived and/or modified sequence
atggacatccccctggacctgagcagcagcgccggcagcggcaagcgtagacggcgtggcaatctgcctaaggaatcagtacagatccttcgagactggttgtatgagcatcgctacaacgcttacccaagcgaacaggagaaggcgttgctgtcccagcaaactcatcttagtaccttgcaggtatgtaactggtttataaacgccagaaggcgtctgctgcccgatatgctgcgtaaggacggaaaagatccaaaccagttcaccattagccggcgcggcgctaagatatcggaaacgtcttcagtcgagtcagtgatgggtattaaaaatttcatgcctgccctagaagagactccattccattcctgtaccgccggccctaacccaactctaggtcgccccttatccccaaagcctagctcacccggctcagtcctagcaagaccttctgtcatttgccacactacagtcaccgcactgaaagatgttcccttctcactgtgccagtctgtgggcgtgggtcaaaatacagatatccaacagatcgccgcaaagaatttcaccgataccagtctgatgtatcctgaggatacgtgcaagtccggaccttccacaaatacccagtcaggcctgttcaacacacccccacctactccacctgatctgaaccaggatttttccggtttccagctgcttgttgatgtggccctgaaacgcgccgccgagatggagctgtag

SEQ ID NO: 318595 - DNA, 660 bp, Artificial Sequence
  derived and/or modified sequence
atggacatccccctggacctgagcagcagcgccggcagcggcaagcgcaggcgtcgaggtaatttgcccaaggaatcagtacaaatcttacgagattggttatatgagcaccgctataacgcctatccctctgagcaggagaaagccctgctatcccaacaaacgcacttatctacacttcaagtgtgtaattggtttataaatgcccggcgcagactgctgccggacatgttgagaaaagatggcaaggatccaaaccaatttactatctcccgaagaggggccaagatctccgagacttcatctgtcgaatcagtcatgggaatcaagaactttatgccggccctagaggaaacaccattccactcctgcaccgccggaccgaaccccactctcggccgcccacttagcccgaagccttcttctccaggctcagtccttgcacggccatccgtgatatgccacacaaccgtgaccgcccttaaagacgtgccattctcattgtgtcagtccgtgggcgtcgggcagaataccgatattcagcaaattgcggctaagaactttacagacacttccttgatgtatcctgaggatacctgcaagtcaggaccatccaccaatactcagagtggactattcaatacaccccctccgacatag

SEQ ID NO: 318596 - DNA, 396 bp, Artificial Sequence
  derived and/or modified sequence
atggacatccccctggacctgagcagcagcgccggcagcggcaagcgtcgtcgacggggtaatcttccgaaggaaagcgtccagattttgagagactggctgtacgagcaccgctacaatgcctatccatctgagcaggaaaaggccctgttgtcccagcagacccacctctcgaccctccaggtttgtaactggtttataaacgcacgccgccggttgttaccagacatgcttagaaaagacggcaaagatcctaatcagtttacaatttcacggaggggagctaaaattagcgaaacgtcctctgtcgagagcgtgatgggaattaaaaacttcatgcccgccctggaggaaaccccatttcacagctgtaccgccggtcctaatcctacctag

SEQ ID NO: 318597 - DNA, 417 bp, Artificial Sequence
  derived and/or modified sequence
atggacatccccctggacctgagcagcagcgccggcagcggcaagagaagacgccgaggcaatcttcccaaagagtcagttcagatcttacgcgattggctttacgaacaccggtacaacgcctacccctctgagcaggagaaggcactgctgagccagcagacacaccttagtacacttcaggtgtgtaattggttcattaatgcacgccgacgactgctgccagacatgcttcggaaagacggcaaggatcccaaccagttcaccatctctcgccgcggcgcgaagatctccgaaacctcaagtgtggaatccgtgatgggcattaaaaactttatgcctgcactcgaagaaaccccattccacagctgcacagccggtccaaaccctaccctgggcaggcccctgagcccgtag

SEQ ID NO: 318598 - DNA, 759 bp, Artificial Sequence
  derived and/or modified sequence
atggacatccccctggacctgagcagcagcgccggcagcggcaagaggcgcagaagaggcaaccttccgaaggagtcagtgcagatcctaagggactggctctatgaacatagatacaatgcatatcctagtgaacaggaaaaagccctgttgtctcagcagacccatctgtcaacccttcaagtctgtaactggttcattaacgccagaagaagattactaccagacatgctccgcaaagatggcaaggaccccaatcagttcaccatttccagacgtggggccaagataagtgaaacgtcaagtgtggagtccgtgatgggtattaagaattttatgcctgccctggaggagaccccattccattcgtgtaccgccggacccaatccgaccctaggaaggcccctttctccaaaaccctcatcacctggatcggtacttgctaggcccagtgtcatctgccacactaccgtgaccgctttgaaagatgtacccttttcactgtgccagtctgtgggagtcgggcagaacacggacatccaacagatagccgccaaaaattttacggacactagtctcatgtacccggaggatacctgcaagtctgggcctagtacgaatacacagagcggattatttaatacaccgcctcccaccccccctgatttaaatcaggacttcagcggctttcaactgctggtggacgtcgctctgaaaagagccgctgaaatggaacttcaagccaaactgacagcttag

SEQ ID NO: 318599 - DNA, 507 bp, Artificial Sequence
  derived and/or modified sequence
atggacatccccctggacctgagcagcagcgccggcagcggcaagagaaggcgccgaggtaacttgcctaaagaatcagtgcagatcctgcgcgattggctgtacgaacatagatacaatgcctacccgagtgagcaagagaaggcgctcctgtcccaacaaacccacctttctaccctgcaagtttgcaactggttcattaatgctcggcggcggctcctacctgacatgctaaggaaagatggtaaggacccaaaccaattcactatcagcaggagaggggctaagatcagcgaaacgagcagcgtggaaagcgtcatgggcatcaagaattttatgcccgccctcgaagaaacaccattccactcctgcaccgccggacctaacccaacgctgggccgcccattaagccctaaaccctctagtcctgggagcgtgctcgccagaccatccgtgatctgccacactacagtgacagccctcaaagacgtgcctttctcactgtag

SEQ ID NO: 318600 - DNA, 759 bp, Artificial Sequence
  derived and/or modified sequence
atggatatccctctggatctgtcttcttctgctggatccggtaagcgtaggcggagagggaatctgcccaaagagtccgtccaaatcctgcgtgactggctctacgagcaccggtataacgcgtaccctagtgagcaagagaaagctcttttgtcccaacagacccatctatccactcttcaagtttgcaattggtttattaacgctagaaggagactgcttcccgacatgctgcgaaaggacgggaaagacccaaatcaattcacaatcagtcggcgaggcgcaaagatctcagaaacaagtagcgtagaaagcgtgatgggcattaaaaattttatgccggctctggaggagacccccttccacagctgtactgccggtcctaaccccacgctgggtcgcccactgtctcccaagccaagttctcccggtagtgttttggcacgcccttctgtcatttgtcataccaccgtgaccgccttaaaagatgtgcctttctctctctgccaatctgtcggcgtaggacagaacaccgatattcaacagatagctgctaagaacttcacagataccagcctgatgtatccagaggatacttgtaagagcgggcctagcacaaatacacagtcggggctgtttaatactccaccccctacgccaccagatctgaaccaggacttctctggtttccagctcctagtcgatgtggccctaaagagggcagccgagatggagttgcaggccaagctgaccgcatag

SEQ ID NO: 318601 - DNA, 759 bp, Artificial Sequence
  derived and/or modified sequence
atggatattccgttggaccttagcagctccgcaggcagtggcaagaggcggcgaagaggaaatcttcccaaagaatcagtgcagatcctgcgtgactggttatatgaacacagatacaatgcatacccttccgaacaggaaaaggcactgctgtcccaacagacccacctgagcactctccaggtctgcaattggttcattaacgctcgaaggaggctgttgccggacatgctgcgcaaggacggcaaagatccgaatcaatttacgatatctaggaggggagccaagattagcgagaccagctctgtcgagagcgtcatgggcattaagaacttcatgcccgctctggaggagacaccttttcactcatgtaccgccggtccaaaccccacactcggacggccactctcacccaaaccatcttcccctggcagcgtgctggcgaggcccagcgtaatctgtcacactaccgtgacggccctgaaggatgtcccttttagtctgtgtcagagtgtgggagtgggccagaataccgatattcagcaaattgccgctaagaactttaccgataccagcctgatgtacccagaggatacctgcaaatctggaccctcgaccaacacgcagtcaggtctgtttaacactcctcccccaactcccccagacctcaaccaggacttctctgggtttcagctgctcgtggatgtggcacttaaaagggcagcggagatggaattgcaggccaaactcaccgcctag

SEQ ID NO: 318602 - DNA, 759 bp, Artificial Sequence
  derived and/or modified sequence
atggatattccactggacctgagctcttcagctggaagcggtaaacgcagaaggcgtgggaacctccctaaggagtccgtccagatcctgcgggactggctttacgaacacagatataatgcatatccctcagaacaggagaaggctctgctaagtcagcagacacacctgtcaactcttcaggtgtgcaactggttcattaatgcacgtcgcaggcttctgcccgacatgctccgaaaagacggcaaagaccctaaccagtttaccatcagcagaagaggagccaagatttctgagacctctagtgtcgagagcgtgatgggaatcaaaaactttatgccggcactagaggagactcctttccactcctgcactgctggcccaaaccctacccttggtcgacctttgtctcccaaaccaagcagcccaggaagtgtcttagccaggccatcagttatatgccacactacagtgactgccctcaaggacgtcccctttagcttatgtcagagtgtgggagtgggacagaacaccgatatacaacagattgcagctaaaaactttaccgacacatcccttatgtacccagaggatacctgtaaatccggacccagtacaaatacgcagtccgggctgttcaacacaccaccccctacccctcccgacctgaatcaggatttctcaggcttccagttgctcgtagatgtggccctgaagcgagcagctgaaatggagctgcaagccaagttgaccgcctag

SEQ ID NO: 318603 - DNA, 759 bp, Artificial Sequence
  derived and/or modified sequence
atggacattcccttagatctctcttctagcgcgggaagcggcaagaggaggcgaagaggaaatctgccaaaggagagtgtgcagatcctccgagactggctgtatgaacacagatacaacgcatacccttcagagcaagagaaggctcttctttcccagcagactcacttgtctaccctccaagtctgcaattggttcattaacgcaagaaggagactgctacctgatatgctaaggaaggacggtaaggaccccaatcagttcacaatctctaggagaggcgctaagatttcggaaacatcatctgtcgagagcgtaatgggaatcaagaattttatgcccgcactcgaggagaccccctttcactcttgcacagccggtcctaatcccacactcggtagaccgctatccccgaagccctccagtcccggttctgtgctcgctcgcccatccgtcatttgccacacaacagtgactgctttgaaggacgtacccttttccttgtgccaaagtgttggtgtcggtcagaatactgacattcagcaaatcgcagccaagaattttactgacacttctctgatgtaccctgaagacacatgcaagtctgggccatccacgaatacccagtccggtctgttcaataccccacccccaacgcctcccgacctgaaccaagacttctcagggttccagctgctcgtggacgtggcactgaaacgagctgctgagatggagcttcaggctaaacttacagcgtag

SEQ ID NO: 318604 - DNA, 759 bp, Artificial Sequence
  derived and/or modified sequence
atggacatccctctcgacctttcgagtagtgccggttctggaaagcggaggcgcaggggaaatctccctaaggaaagcgtgcaaatcctgcgggactggctttatgagcaccggtacaatgcttatcccagtgagcaagagaaagctctgctgtctcagcagacacatctgtcgacgttacaggtatgtaattggttcatcaacgcaaggcgcaggctgctgcctgatatgttaagaaaggatggaaaggatccaaatcagtttacaatctctcgccgaggagcaaagatttcagaaacctcgtccgtggagagcgtgatggggatcaaaaactttatgcctgcactcgaggagacaccgtttcactcgtgcacagccggacccaatccaactctggggcgtcctctttctccaaagccatcctctccaggttcagtactggccagacctagcgtgatttgtcacacgaccgttactgccctcaaggatgtaccattttcgctttgccagagcgtaggagtagggcagaatacagatattcagcagatcgccgctaaaaattttaccgatacctccctgatgtacccagaggacacctgcaaaagcggaccatctaccaacacacagtccggcctgtttaacacaccaccccctaccccacctgatctcaatcaagattttagcggatttcaactgctggttgatgtagccctgaagagggcagctgaaatggaattacaggcaaaattaacagcttag

SEQ ID NO: 318605 - DNA, 279 bp, Artificial Sequence
  derived and/or modified sequence
atggacatcccgctcgacctgtctagttcagccggtagcggtaaaagacgaaggcggggtaatcttcccaaagaatcggtccaaattctaagggattggctgtatgaacatcgatacaatgcgtatccgtccgagcaggaaaaagcattgctcagccagcaaactcatttgagcacactgcaggtttgcaactggttcatcaatgctcggaggagactgctgcctgacatgcttaggaaggacgggaaagaccccaaccaattcacaatatcaagatag

SEQ ID NO: 318606 - DNA, 402 bp, Artificial Sequence
  derived and/or modified sequence
atggacattcctctcgatctctcaagcagcgcagggagcggcaagcgcaggagacggggaaacttacctaaagaatcagtgcaaatcttgcgtgactggctgtacgaacatcgctacaatgcatatccctcagagcaggagaaggctctgttgtcccagcagacccacctctcaaccctgcaggtgtgtaattggttcataaatgctcgtcgtcggctgctgcccgacatgctccggaaagatggtaaagatcctaaccagtttaccatttctcgcaggggtgctaaaatctcagagacgtcatcagtggagagtgttatgggaattaagaacttcatgccagcacttgaggaaacgcctttccacagctgtaccgcagggccaaaccctacgttagggtag

SEQ ID NO: 318607 - DNA, 741 bp, Artificial Sequence
  derived and/or modified sequence
atggatattccattggacctgagctccagcgctggctcgggcaagcgcagacggaggggtaacctgccgaaggagagtgtgcagatcctgagagattggctctacgagcatcgttacaacgcgtatccaagtgagcaagagaaagcactgctgtcccaacagacacatctgtcaacactccaggtctgcaactggttcattaatgcgagaagacgactcttgccagacatgttaaggaaagacggtaaggatcccaaccagttcaccatcagcaggagaggtgcaaagatctccgagaccagctccgtggaaagcgtgatgggaatcaagaattttatgccggctttggaagagaccccttttcatagctgtactgctggacccaacccaaccctgggaaggccactgagtcccaagccttcatcaccagggtccgttctggccagacctagtgtgatctgtcacactacggtgaccgccctgaaggatgtcccattctcactctgccagtcagttggtgtgggacaaaatactgatattcaacagattgcagccaaaaatttcacagacacaagcctcatgtatccagaggatacttgtaaatcaggccctagcaccaatactcagtctggcctgttcaacacccctcctcctaccccaccagatttgaatcaggactttagcggttttcagcttcttgtggatgtagccttgaagagggccgcagagatggagctgtag

SEQ ID NO: 318608 - DNA, 660 bp, Artificial Sequence
  derived and/or modified sequence
atggacatcccactcgatctgtcttcatccgccggttccggcaaacgtcgcagaaggggcaatttacctaaggagagtgtgcagattctccgcgactggctatacgaacatagatacaacgcgtatccgagtgagcaggagaaagccttattgagccaacagactcacctgtccactctccaagtatgcaattggttcataaatgcaagaaggcggttactacccgatatgctacgcaaggacggaaaggacccgaaccagttcactatttccagacgaggggctaagattagcgaaacatcctccgtggaatccgtaatgggaattaaaaactttatgccagctctggaagaaaccccttttcactcctgcaccgctggtcccaatcccaccctggggaggccactttcccctaagccaagttctccgggtagcgtgcttgcacgcccatcagtgatctgtcacacaactgttactgccctcaaggacgttccctttagtctgtgccagtccgttggcgtcgggcagaacactgatatccagcagattgccgctaagaactttactgacaccagcttaatgtaccctgaggatacctgcaagtctggccctagcacgaacactcagagcggactgttcaacacaccccctcccacctag

SEQ ID NO: 318609 - DNA, 396 bp, Artificial Sequence
  derived and/or modified sequence
atggacataccccttgatctaagcagctctgccggaagcggcaagaggcggcgtagaggcaatctacctaaggagtccgtccaaatcctgcgcgactggctgtatgaacatagatataatgcatatccctctgagcaggagaaagcactactgtcacagcagacccacctaagtacactacaggtctgcaattggtttattaatgccaggaggcgcttgcttcctgatatgctcagaaaagatggcaaggaccccaaccagttcaccatttcccgccgaggggcaaagatttccgaaacgtctagcgtcgagtccgtgatgggcattaaaaacttcatgcctgctctggaggagactcccttccattcctgcactgccggtcctaaccccacctag

SEQ ID NO: 318610 - DNA, 417 bp, Artificial Sequence
  derived and/or modified sequence
atggacatcccgttagacctctctagctcagccggaagcgggaagcgcagacggcgtggaaatctgcccaaggagagtgtccagatcctacgagattggttgtacgaacatcggtataatgcataccccagtgaacaggagaaagcacttctgtcccagcagacacatctttcaaccctgcaagtctgcaactggtttattaacgccagacggaggctcctgccagatatgttgcggaaggatgggaaagatccaaaccagtttacaatctccaggcggggtgccaagatcagcgaaacatcgtccgttgaatcagtgatgggcataaagaattttatgcccgctctggaggaaaccccttttcactcgtgcactgccggaccaaaccccaccttagggcgacctctctcaccctag

SEQ ID NO: 318611 - DNA, 759 bp, Artificial Sequence
  derived and/or modified sequence
atggatatccctctggatctcagcagttctgctggcagcggcaagcggagaaggagggggaatctgccaaaagagtccgtccagatcctgagggactggttatatgaacatagatacaacgcctatcccagcgagcaggagaaagccctcctgagtcaacagacccatctgtcgacgttacaggtttgtaattggttcattaacgcccgacgcagactgttaccagacatgctgcgaaaggatggcaaggatccaaaccagttcacaatttctcgacgcggagcaaaaatttccgagacatcttccgttgaatccgtgatgggtattaaaaattttatgcccgctctcgaggagactccatttcactcttgcactgccggtcccaatcctactttagggaggcccctgtccccgaagccttccagccctggaagcgtgctggcacggccttcagttatctgtcacaccacggtgaccgcattgaaggatgtgcccttttctctatgccaatccgtcggtgtgggccagaacaccgatattcagcagatcgcggctaagaattttacagacacctcgctgatgtatccagaggatacttgtaaatctgggcctagcactaatactcagagcggactattcaatacaccacctcctaccccccctgacctgaatcaggacttttcgggctttcaactccttgtggacgtcgctctgaaaagggcagctgaaatggagctgcaggctaaattaactgcatag

SEQ ID NO: 318612 - DNA, 507 bp, Artificial Sequence
  derived and/or modified sequence
atggatatcccgctggatctttctagctccgccggatctgggaagcggcgaaggcggggaaacttgcccaaggagtctgtacagatactccgggattggctgtatgaacaccggtataacgcctatcccagcgagcaggaaaaggccttattgtcccagcaaacccatctctccacgctgcaggtgtgtaactggttcattaatgcacgacgacggctactgccagacatgttgcgaaaagacggcaaggatccgaaccagttcaccatctcacggcgtggagcaaagattagcgaaacctcaagcgttgagtctgtcatgggtatcaagaatttcatgccagctttagaagaaactccgttccatagttgcacagccggaccaaatcccacacttgggaggcctttatcaccaaagccatcctccccaggcagcgtactggccagacctagtgtgatttgtcatacaactgttacggctctgaaagatgttccgttctccttgtag

SEQ ID NO: 318613 - DNA, 759 bp, Artificial Sequence
  derived and/or modified sequence
atggacatccccctggacctgagcagcagcgccggcagcggcaagagaagaagaagaggcaacctgcccaaggagagcgtgcagatcctgagagactggctgtacgagcacagatacaacgcctaccccagcgagcaggagaaggccctgctgagccagcagacccacctgagcaccctgcaggtgtgcaactggttcatcaacgccagaagaagactgctgcccgacatgctgagaaaggacggcaaggaccccaaccagttcaccatcagcagaagaggcgccaagatcagcgagaccagcagcgtggagagcgtgatgggcatcaagaacttcatgcccgccctggaggagacccccttccacagctgcaccgccggccccaaccccaccctgggcagacccctgagccccaagcccagcagccccggcagcgtgctggccagacccagcgtgatctgccacaccaccgtgaccgccctgaaggacgtgcccttcagcctgtgccagagcgtgggcgtgggccagaacaccgacatccagcagatcgccgccaagaacttcaccgacaccagcctgatgtaccccgaggacacctgcaagagcggccccagcaccaacacccagagcggcctgttcaacacccccccccccaccccccccgacctgaaccaggacttcagcggcttccagctgctggtggacgtggccctgaagagagccgccgagatggagctgcaggccaagctgaccgcctag

SEQ ID NO: 318614 - DNA, 279 bp, Artificial Sequence
  derived and/or modified sequence
atggacatccccctggacctgagcagcagcgccggcagcggcaagagaagaagaagaggcaacctgcccaaggagagcgtgcagatcctgagagactggctgtacgagcacagatacaacgcctaccccagcgagcaggagaaggccctgctgagccagcagacccacctgagcaccctgcaggtgtgcaactggttcatcaacgccagaagaagactgctgcccgacatgctgagaaaggacggcaaggaccccaaccagttcaccatcagcagatag

SEQ ID NO: 318615 - DNA, 402 bp, Artificial Sequence
  derived and/or modified sequence
atggacatccccctggacctgagcagcagcgccggcagcggcaagagaagaagaagaggcaacctgcccaaggagagcgtgcagatcctgagagactggctgtacgagcacagatacaacgcctaccccagcgagcaggagaaggccctgctgagccagcagacccacctgagcaccctgcaggtgtgcaactggttcatcaacgccagaagaagactgctgcccgacatgctgagaaaggacggcaaggaccccaaccagttcaccatcagcagaagaggcgccaagatcagcgagaccagcagcgtggagagcgtgatgggcatcaagaacttcatgcccgccctggaggagacccccttccacagctgcaccgccggccccaaccccaccctgggctag

SEQ ID NO: 318616 - DNA, 741 bp, Artificial Sequence
  derived and/or modified sequence
atggacatccccctggacctgagcagcagcgccggcagcggcaagagaagaagaagaggcaacctgcccaaggagagcgtgcagatcctgagagactggctgtacgagcacagatacaacgcctaccccagcgagcaggagaaggccctgctgagccagcagacccacctgagcaccctgcaggtgtgcaactggttcatcaacgccagaagaagactgctgcccgacatgctgagaaaggacggcaaggaccccaaccagttcaccatcagcagaagaggcgccaagatcagcgagaccagcagcgtggagagcgtgatgggcatcaagaacttcatgcccgccctggaggagacccccttccacagctgcaccgccggccccaaccccaccctgggcagacccctgagccccaagcccagcagccccggcagcgtgctggccagacccagcgtgatctgccacaccaccgtgaccgccctgaaggacgtgcccttcagcctgtgccagagcgtgggcgtgggccagaacaccgacatccagcagatcgccgccaagaacttcaccgacaccagcctgatgtaccccgaggacacctgcaagagcggccccagcaccaacacccagagcggcctgttcaacacccccccccccaccccccccgacctgaaccaggacttcagcggcttccagctgctggtggacgtggccctgaagagagccgccgagatggagctgtag

SEQ ID NO: 318617 - DNA, 660 bp, Artificial Sequence
  derived and/or modified sequence
atggacatccccctggacctgagcagcagcgccggcagcggcaagagaagaagaagaggcaacctgcccaaggagagcgtgcagatcctgagagactggctgtacgagcacagatacaacgcctaccccagcgagcaggagaaggccctgctgagccagcagacccacctgagcaccctgcaggtgtgcaactggttcatcaacgccagaagaagactgctgcccgacatgctgagaaaggacggcaaggaccccaaccagttcaccatcagcagaagaggcgccaagatcagcgagaccagcagcgtggagagcgtgatgggcatcaagaacttcatgcccgccctggaggagacccccttccacagctgcaccgccggccccaaccccaccctgggcagacccctgagccccaagcccagcagccccggcagcgtgctggccagacccagcgtgatctgccacaccaccgtgaccgccctgaaggacgtgcccttcagcctgtgccagagcgtgggcgtgggccagaacaccgacatccagcagatcgccgccaagaacttcaccgacaccagcctgatgtaccccgaggacacctgcaagagcggccccagcaccaacacccagagcggcctgttcaacacccccccccccacctag

SEQ ID NO: 318618 - DNA, 396 bp, Artificial Sequence
  derived and/or modified sequence
atggacatccccctggacctgagcagcagcgccggcagcggcaagagaagaagaagaggcaacctgcccaaggagagcgtgcagatcctgagagactggctgtacgagcacagatacaacgcctaccccagcgagcaggagaaggccctgctgagccagcagacccacctgagcaccctgcaggtgtgcaactggttcatcaacgccagaagaagactgctgcccgacatgctgagaaaggacggcaaggaccccaaccagttcaccatcagcagaagaggcgccaagatcagcgagaccagcagcgtggagagcgtgatgggcatcaagaacttcatgcccgccctggaggagacccccttccacagctgcaccgccggccccaaccccacctag

SEQ ID NO: 318619 - DNA, 417 bp, Artificial Sequence
  derived and/or modified sequence
atggacatccccctggacctgagcagcagcgccggcagcggcaagagaagaagaagaggcaacctgcccaaggagagcgtgcagatcctgagagactggctgtacgagcacagatacaacgcctaccccagcgagcaggagaaggccctgctgagccagcagacccacctgagcaccctgcaggtgtgcaactggttcatcaacgccagaagaagactgctgcccgacatgctgagaaaggacggcaaggaccccaaccagttcaccatcagcagaagaggcgccaagatcagcgagaccagcagcgtggagagcgtgatgggcatcaagaacttcatgcccgccctggaggagacccccttccacagctgcaccgccggccccaaccccaccctgggcagacccctgagcccctag

SEQ ID NO: 318620 - DNA, 507 bp, Artificial Sequence
  derived and/or modified sequence
atggacatccccctggacctgagcagcagcgccggcagcggcaagagaagaagaagaggcaacctgcccaaggagagcgtgcagatcctgagagactggctgtacgagcacagatacaacgcctaccccagcgagcaggagaaggccctgctgagccagcagacccacctgagcaccctgcaggtgtgcaactggttcatcaacgccagaagaagactgctgcccgacatgctgagaaaggacggcaaggaccccaaccagttcaccatcagcagaagaggcgccaagatcagcgagaccagcagcgtggagagcgtgatgggcatcaagaacttcatgcccgccctggaggagacccccttccacagctgcaccgccggccccaaccccaccctgggcagacccctgagccccaagcccagcagccccggcagcgtgctggccagacccagcgtgatctgccacaccaccgtgaccgccctgaaggacgtgcccttcagcctgtag

SEQ ID NO: 318621 - protein, 543 aa, Artificial Sequence
  derived and/or modified sequence
MGCIKSKENKSPAIKYRPENTPEPVSTSVSHYGAEPTTVSPCPSSSAKGTAVNFSSLSMTPFGGSSGVTPFGGASSSFSVVPSSYPAGLTGGVTIFVALYDYEARTTEDLSFKKGERFQIINNTEGDWWEARSIATGKNGYIPSNYVAPADSIQAEEWYFGKMGRKDAERLLLNPGNQRGIFLVRESETTKGAYSLSIRDWDEIRGDNVKHYKIRKLDNGGYYITTRAQFDTLQKLVKHYTEHADGLCHKLTTVCPTVKPQTQGLAKDAWEIPRESLRLEVKLGQGCFGEVWMGTWNGTTKVAIKTLKPGTMMPEAFLQEAQIMKKLRHDKLVPLYAVVSEEPIYIVTEFMSKGSLLDFLKEGDGKYLKLPQLVDMAAQIADGMAYIERMNYIHRDLRAANILVGENLVCKIADFGLARLIEDNEYTARQGAKFPIKWTAPEAALYGRFTIKSDVWSFGILQTELVTKGRVPYPGMVNREVLEQVERGYRMPCPQGCPESLHELMNLCWKKDPDERPTFEYIQSFLEDYFTATEPQYQPGENL

SEQ ID NO: 318622 - DNA, 1632 bp, Artificial Sequence
  derived and/or modified sequence
atgggctgcatcaagagcaaggagaacaagagccccgccatcaagtacagacccgagaacacccccgagcccgtgagcaccagcgtgagccactacggcgccgagcccaccaccgtgagcccctgccccagcagcagcgccaagggcaccgccgtgaacttcagcagcctgagcatgacccccttcggcggcagcagcggcgtgacccccttcggcggcgccagcagcagcttcagcgtggtgcccagcagctaccccgccggcctgaccggcggcgtgaccatcttcgtggccctgtacgactacgaggccagaaccaccgaggacctgagcttcaagaagggcgagagattccagatcatcaacaacaccgagggcgactggtgggaggccagaagcatcgccaccggcaagaacggctacatccccagcaactacgtggcccccgccgacagcatccaggccgaggagtggtacttcggcaagatgggcagaaaggacgccgagagactgctgctgaaccccggcaaccagagaggcatcttcctggtgagagagagcgagaccaccaagggcgcctacagcctgagcatcagagactgggacgagatcagaggcgacaacgtgaagcactacaagatcagaaagctggacaacggcggctactacatcaccaccagagcccagttcgacaccctgcagaagctggtgaagcactacaccgagcacgccgacggcctgtgccacaagctgaccaccgtgtgccccaccgtgaagccccagacccagggcctggccaaggacgcctgggagatccccagagagagcctgagactggaggtgaagctgggccagggctgcttcggcgaggtgtggatgggcacctggaacggcaccaccaaggtggccatcaagaccctgaagcccggcaccatgatgcccgaggccttcctgcaggaggcccagatcatgaagaagctgagacacgacaagctggtgcccctgtacgccgtggtgagcgaggagcccatctacatcgtgaccgagttcatgagcaagggcagcctgctggacttcctgaaggagggcgacggcaagtacctgaagctgccccagctggtggacatggccgcccagatcgccgacggcatggcctacatcgagagaatgaactacatccacagagacctgagagccgccaacatcctggtgggcgagaacctggtgtgcaagatcgccgacttcggcctggccagactgatcgaggacaacgagtacaccgccagacagggcgccaagttccccatcaagtggaccgcccccgaggccgccctgtacggcagattcaccatcaagagcgacgtgtggagcttcggcatcctgcagaccgagctggtgaccaagggcagagtgccctaccccggcatggtgaacagagaggtgctggagcaggtggagagaggctacagaatgccctgcccccagggctgccccgagagcctgcacgagctgatgaacctgtgctggaagaaggaccccgacgagagacccaccttcgagtacatccagagcttcctggaggactacttcaccgccaccgagccccagtaccagcccggcgagaacctgtag

SEQ ID NO: 318623 - DNA, 1632 bp, Artificial Sequence
  derived and/or modified sequence
atgggatgtatcaagtctaaagaaaacaaatccccagccattaagtatcgcccggagaacacaccggaaccagtgagcaccagcgtcagccattacggcgcggagcctacaaccgtgagcccatgcccttcctctagcgcgaaggggacagcagtgaactttagctccctctcaatgacaccttttgggggctctagtggggttacaccgttcgggggagcttcctcctctttcagtgtggtgccctctagctaccccgccggcctcaccggaggcgtgacaatttttgtcgccctgtacgattacgaagcccggactaccgaggatttgagcttcaaaaaaggcgaacgctttcagatcatcaacaacacagagggtgattggtgggaagcacgttccatcgctaccggcaagaacggatatattccatccaattacgtggcccccgcagacagcatccaggctgaggagtggtactttggcaaaatgggaagaaaagacgccgaacggctgttactcaatcccggcaatcagagagggatttttttggtaagggagtccgagacgacaaaaggagcctatagtctctcaatccgggactgggatgagatcaggggcgacaacgttaaacactacaaaatcagaaaactggacaatggtgggtattacatcacaacgcgagctcagtttgacactctccagaaactggttaagcattatactgagcacgctgacggtctgtgtcataagctgactaccgtgtgccccactgttaagcctcagacccagggtctggccaaggatgcctgggagatccctagagaatccctgaggctcgaggtgaaactcggtcagggctgtttcggggaggtctggatgggcacctggaatggaactacaaaggtcgccatcaagaccctgaagccaggcacaatgatgcctgaagcctttctccaggaggcccaaatcatgaaaaaattgcgacatgacaagctggtgcccctgtacgctgtagtcagcgaagagcctatttatattgtgacagagttcatgtctaaaggcagtctgttggactttctgaaggagggagacgggaagtatcttaaactgcctcagctggtggacatggcggcacagatcgctgacggtatggcctatattgaacggatgaactatatccatcgggatttacgggcggcaaatattttggtcggggaaaacctggtgtgcaagatcgctgacttcgggctggcgcgacttattgaggacaatgagtacaccgctcggcagggcgctaaatttccaatcaaatggactgctccagaagctgccctctacggaaggttcacaattaaatctgatgtgtggtctttcggcatcttacagacggagttggtcaccaaggggcgtgtgccataccctggaatggtgaaccgggaggtgcttgagcaagtagagcggggctacagaatgccctgtccccagggctgccccgaatcgttacacgaattaatgaatctgtgctggaagaaagacccagacgaacgacccactttcgaatacatccagagcttcttggaggactattttaccgccactgagcctcaataccagcctggtgagaatctctag

SEQ ID NO: 318624 - DNA, 1632 bp, Artificial Sequence
  derived and/or modified sequence
atgggctgtatcaagtcaaaggagaataagtcccccgccatcaagtatagacccgaaaatacaccagaacctgtatcaacatcagtgagtcactatggagccgagccaacaacggtaagtccatgcccctcctccagcgccaagggcactgcggtgaatttctcaagccttagcatgactccattcgggggcagtagcggggtgacccccttcggcggagcctctagcagcttttccgttgtgcctagtagctatccagctggactcaccggaggcgtgaccattttcgtcgctctttatgattatgaagcccggacaaccgaagacttaagctttaagaagggagagaggttccagattatcaacaacaccgagggagactggtgggaggctcgctctattgccaccggaaaaaacgggtatattccaagcaactacgttgcccctgctgactctatacaggcggaggaatggtattttgggaagatgggtcgcaaggacgcagaaagactgttgctgaatcccggaaatcagagaggcatcttcttagtacgggagagcgagaccacgaagggggcttactccctgagtatcagagattgggacgaaatcaggggggacaacgtgaagcactacaagatcagaaagcttgataatgggggatactatatcacgacaagagcccagtttgacacattacagaaactagtgaaacattacaccgaacatgcggacgggctgtgccacaaattaaccaccgtatgcccaaccgtgaagccgcagacacagggcctcgccaaggacgcttgggagattcctagggaatcgctccggttggaggtcaaactgggtcaaggatgtttcggggaggtctggatggggacttggaacgggacaacaaaggtggcgataaaaactttgaagcctggcacgatgatgcccgaggcgttcttacaggaggcccagattatgaagaaactgcgtcacgacaagttggtgccgctgtatgccgtggtgagcgaagagcctatttatattgtcactgagtttatgtctaaagggtcccttctggattttctcaaagaaggagatggaaagtaccttaagctaccccagctggtggacatggcagcacagatcgctgacggtatggcttatattgagcgcatgaattacatacacagagacctgcgcgccgccaacatccttgtgggagaaaatttggtttgtaagatagccgactttggactagcccgtttaatcgaggataatgagtacacagcaagacagggggctaaattcccgataaaatggactgctcctgaggccgccctttatggtcgcttcacaatcaagagtgatgtgtggtcatttggcatattacagactgaactcgttacaaaagggcgcgtgccctaccctggaatggtgaaccgggaagtattggaacaagttgaaagagggtaccgaatgccctgtcctcagggctgtccggaaagtctgcacgagctcatgaacctttgttggaagaaggatccagacgaacgacctacgtttgaatatatccagtccttcctagaggactatttcaccgccacagagccacagtatcagcccggcgagaatctgtag

SEQ ID NO: 318625 - DNA, 1632 bp, Artificial Sequence
  derived and/or modified sequence
atgggttgcataaagagtaaggagaacaagtctccagctatcaagtacagaccggagaatactcccgagccagtgtcaacatcggtgagtcattacggggcggaaccaaccaccgtgagcccctgtccaagcagctcagcaaaagggaccgccgtgaacttctcatccctctcaatgaccccattcggaggttccagcggtgtgaccccattcggcggggctagtagtagcttctccgtggtccctagtagctacccggccggtctgacaggtggcgtcactatcttcgtcgctttatacgactatgaggccagaaccactgaggatctctcttttaagaaaggggagaggttccaaataattaacaataccgagggcgattggtgggaggccaggtccatagcgactgggaagaacggttacatcccttccaactacgtagcgccagccgattccatccaggcggaggaatggtactttgggaaaatgggtcgaaaagacgccgagcggctgctcctgaaccctggtaaccagcgcgggattttcttggtgcgggaatccgaaacaactaagggtgcttattctttgtccattagagactgggacgaaatccgtggggataatgtcaaacattataaaattagaaagctcgataacggcggatactatataactacaagagctcagttcgatactttgcagaagctagtaaaacactacaccgaacatgctgacggactctgccacaaattgactaccgtctgtcccacagtgaagccacaaactcaagggcttgctaaagacgcttgggagattccaagggagagcctgagactggaggtgaagttgggccaaggatgctttggagaggtgtggatgggaacatggaacggcaccacgaaggttgcaattaaaactcttaagccaggtacaatgatgcccgaagccttcctccaggaggcccagatcatgaagaagttgcgacacgacaagctcgtcccactctacgccgtggtcagtgaagaacccatctatatcgtcacagagttcatgtccaaagggtcgttactggactttcttaaggagggagatggaaagtacctcaagttgccacaattagttgacatggccgcccagattgctgatggcatggcctacattgagagaatgaactacatccatcgagatttgagggccgccaatatcctggtgggcgagaatctggtgtgcaaaatcgctgactttgggctggcccgcctgatcgaggacaacgagtatacagctaggcagggcgctaaattccccataaagtggaccgcgcctgaagcagccctgtacggaagatttacaatcaaaagcgacgtgtggagctttggcattttacaaactgaactggtaacaaaaggtagagtgccctacccgggcatggtgaaccgtgaggtgctggagcaggtggaacgggggtaccggatgccttgcccacagggatgccctgagtcactacacgaactgatgaacctgtgttggaagaaagaccccgacgaacggccgacttttgaatatatccaaagctttcttgaagattattttaccgccaccgaaccccagtaccagcctggtgaaaatctgtag

SEQ ID NO: 318626 - DNA, 1632 bp, Artificial Sequence
  derived and/or modified sequence
atgggctgcatcaagagcaaggagaacaagagccctgccatcaagtacagacctgagaacaccccagagcctgtgtccacctctgtgagccactacggggctgagcccaccaccgtgagcccctgccccagcagcagcgccaagggcacagctgtgaacttcagcagcctgtccatgaccccatttggaggcagcagcggcgtgaccccatttggaggagccagcagcagcttctctgtggtgcccagcagctacccagctggcctgaccggcggcgtgaccatctttgtggccctgtatgactatgaggcccggaccacagaggacctgtccttcaagaagggggagcgcttccagatcatcaacaacacagaaggagactggtgggaggcccggagcatcgccaccgggaagaatggctacatccccagcaactacgtggccccagctgacagcatccaggccgaggagtggtactttgggaagatgggcaggaaggatgctgagcggctgctgctgaaccctggcaaccagaggggcatcttcctggtgcgggagagcgagaccaccaagggggcctacagcctgagcatccgggactgggatgagatccggggggacaacgtgaagcactacaagatcaggaagctggacaatggaggctactacatcaccacccgggcccagtttgacaccctgcagaagctggtgaagcactacacagaacatgctgatggcctgtgccacaagctgaccaccgtgtgccccaccgtgaagccccagacccagggcctggccaaggatgcctgggagatcccccgggagagcctgcggctggaggtgaagctgggccagggctgcttcggggaggtgtggatgggcacctggaatggcaccaccaaggtggccatcaagaccctgaagccaggcaccatgatgcctgaggccttcctgcaggaggcccagatcatgaagaagctgcggcatgacaagctggtgcccctgtatgctgtggtgtctgaggagcccatctacatcgtgacagagttcatgagcaagggcagcctgctggacttcctgaaggagggagatggcaagtacctgaagctgccccagctggtggacatggccgcccagattgctgatggcatggcctacattgaaagaatgaactacatccaccgggacctgcgggccgccaacatcctggtgggggagaacctggtgtgcaagattgctgactttggcctggcccggctgattgaggacaatgagtacacagcccggcagggcgccaagttccccatcaagtggacagcccctgaggccgccctgtatggccgcttcaccatcaagagtgatgtgtggagctttggcatcctgcagacagagctggtgaccaagggccgggtgccctacccaggcatggtgaaccgggaggtgctggagcaggtggagcggggctacaggatgccctgcccccagggctgcccagagagcctgcacgagctgatgaacctgtgctggaagaaggaccctgatgagcggcccacctttgagtacatccagagcttcctggaggactacttcaccgccacagagccccagtaccagcctggagagaacctgtag

SEQ ID NO: 318627 - DNA, 1632 bp, Artificial Sequence
  derived and/or modified sequence
atgggctgcatcaagagcaaggagaacaagagccccgccatcaagtacaggcctgaaaatactcctgaacctgtgtcgaccagtgtatctcactacggtgctgagccaaccaccgtttccccatgccctagttcctcggcgaaaggcacggctgtcaatttcagtagcctgtcaatgactccgttcggagggtcctctggagttacccccttcggtggcgcaagcagcagcttcagtgtggtgcccagctcctatcctgcaggcctcacggggggggtgaccatcttcgtcgcactgtatgattatgaagccagaacaacagaggatttatcttttaagaagggcgagaggttccagatcatcaacaacacagagggcgattggtgggaggcaagatccattgccacgggtaaaaatggctatatccctagcaattacgtcgccccggccgactcaattcaggcagaggaatggtatttcggcaaaatgggcaggaaagatgctgagaggctgctgcttaacccgggcaaccaacggggcatatttttagtgcgcgagagcgaaaccaccaagggagcatattcattatcaatcagggattgggacgagatacgtggagacaacgttaagcactataagatccggaagctggataacggtggttactacataacaaccagggcccaattcgacacccttcagaaacttgtgaagcactacacggaacatgccgacggtctctgtcacaagttaaccacggtttgtcccacagttaagccccagactcaggggctggccaaggatgcatgggagatccctagagagtcactgagactggaggtaaagctgggacagggctgctttggtgaagtttggatgggaacatggaacggaacgacaaaggtggcgatcaaaacgttgaaacctggcacaatgatgccagaagccttcttacaggaagcacagattatgaagaaactccgtcatgataaactggttccactgtatgcagtcgtctcggaagagcctatatacatagtcactgagttcatgtctaaaggctccttactagacttcttgaaggaaggcgacggcaaatacctgaagcttcctcagctggttgatatggcggctcagatcgccgacggtatggcctatattgagagaatgaattacatccatagagacctcagagccgccaatatcctggtcggggaaaacctagtctgcaagatagctgatttcggcttggcccgtctcatcgaagataacgaatacaccgctcgtcagggcgccaaatttcccattaaatggacagctcctgaagctgctttatatggcaggtttaccattaaatcagacgtatggtcctttggaatattacagaccgaactcgtcactaagggtagggtcccctatcctggtatggtcaatcgggaagtgttggaacaagtggaacggggctatcgtatgccttgcccacaaggatgccccgagagtctgcacgaactgatgaatctttgttggaagaaagatccggacgagcgtcccacatttgagtacatccaatccttccttgaggactatttcactgccacggagccacaatatcaacctggtgagaatttatag

SEQ ID NO: 318628 - DNA, 1632 bp, Artificial Sequence
  derived and/or modified sequence
atgggctgcatcaagagcaaggagaacaagagccccgccatcaagtaccggccagagaatacacccgaacccgtgtcgactagcgtgagccactacggcgcggaacctactacagtatccccctgtcccagctctagcgccaagggtacggccgtaaacttcagctctctgtcgatgaccccctttggggggagttccggcgtgacccccttcggaggagcctcatcttctttttccgtggttccctcttcatatcccgccggtctaaccggtggcgtgacgatttttgtcgctctctatgattatgaggccaggacaacagaggatctgagctttaagaagggtgaacggttccaaatcattaataatacagagggcgactggtgggaagccagaagtatcgccactggaaaaaacggatacatccctagcaattatgtcgcgcccgccgattctattcaagccgaggaatggtactttgggaaaatgggacggaaagatgcagagcgcttgttgttaaaccctgggaaccagcgagggatctttctcgtgcgtgaatccgaaaccacaaaaggcgcttacagcctgagcattcgagattgggacgaaatccggggcgataacgtgaaacattataagatcagaaagctggacaatggcggctactatattaccacaagggcccagtttgacacgctccagaagctagttaaacactacaccgaacatgccgacgggctatgtcataagttgaccacagtttgccctacggttaagccacagacacaggggctggcaaaggatgcctgggagataccaagggaatcactgagactggaggtgaagctaggacaaggttgtttcggcgaagtatggatgggtacttggaatgggaccaccaaggtggccatcaaaacactgaagcccggaacaatgatgcctgaggcctttctgcaggaagcacaaataatgaaaaagctgcgccacgacaaactggtgcccctgtacgctgtggtgagcgaggaaccaatttatattgtcacggagtttatgtccaagggatcgctgctcgatttcctgaaagagggagacggaaaatacttaaaacttccccagctcgtagatatggccgcccagatcgcggacgggatggcttatattgagagaatgaattacattcacagggacctgcgcgccgccaacattcttgtcggagagaatcttgtctgtaaaatcgccgattttggcctggcccgcttaatcgaggacaatgaatacactgctaggcagggggctaagtttccaatcaagtggaccgccccagaggccgctctttatggcagatttacgatcaagtccgatgtatggagcttcggcattttgcaaaccgaactggtgaccaagggaagggttccctaccccggcatggtcaacagagaagtactggaacaggtcgagcgaggttaccgcatgccatgcccacaggggtgtccagaatcactgcatgagttgatgaacctctgttggaagaaggatcccgacgaaagaccaacatttgaatacatacagtcatttttggaagactattttaccgccaccgaaccacaatatcagccaggggaaaatctttag

SEQ ID NO: 318629 - DNA, 1632 bp, Artificial Sequence
  derived and/or modified sequence
atgggctgcatcaagagcaaggagaacaagagccccgccatcaagtaccgccctgagaacactcctgagcccgtgtctacatccgtgagtcattatggcgctgaacccaccacggtgagtccctgcccgtcttctagcgctaaaggcactgcagtgaatttttcaagcctctccatgaccccgttcgggggatcttctggcgttacaccttttgggggtgcctcaagctcattctccgtagtccctagtagttaccctgccggccttacgggcggagtgacaatttttgtcgccctctatgattatgaggccagaacaacagaagatttatccttcaaaaagggagagcggttccagatcatcaacaatacagaaggggactggtgggaagccaggagtatagcgactggcaagaacggttacattcccagcaactatgtggcacctgccgactcaatacaggcagaggagtggtatttcggaaagatgggaagaaaggatgccgagcggctgctcttaaatcccgggaaccagaggggaatctttctcgtgagggaaagcgagacaaccaaaggtgcctactcactttcaatacgcgactgggatgaaatccgcggcgacaatgtgaagcactataaaatccgcaaactggacaatggcggctactatatcacgactcgtgcccagtttgacactctgcagaagctggttaaacactataccgagcatgctgatggtctctgccacaaactgaccacggtctgtccgacagtcaagcctcaaactcagggcctggccaaagacgcttgggagataccaagggagtccctgagattggaggtgaagcttgggcaggggtgcttcggagaggtctggatgggaacctggaatggaaccaccaaggttgcaatcaagactcttaagcccgggacgatgatgcctgaggcatttttgcaggaggctcagatcatgaagaagttgagacatgataaactggtgccactttatgctgtggtgtcggaggaaccgatttatatagtcaccgagtttatgtcaaaggggagccttctcgattttttgaaagagggcgatggaaagtacttaaaactgccccaactggtggacatggccgctcagatagctgatgggatggcatacatcgaacgcatgaattacatacaccgcgacctcagagcagcaaacattctcgtaggcgaaaatttagtgtgtaagatcgccgacttcggtctggccaggctcatcgaagacaatgagtataccgctagacaaggggccaagtttccaatcaagtggacggccccagaggccgctctgtacggacgctttaccatcaaatccgacgtgtggtctttcggaatcctgcagacagaactggtcactaaaggtcgggtgccttatcctgggatggttaaccgcgaggttttagagcaggtcgaacgcggctatcggatgccttgtccgcagggttgtccagaaagccttcacgagctgatgaacctctgctggaagaaggatcccgacgaaagaccaaccttcgagtacattcagagcttccttgaagattactttaccgctaccgaaccccagtaccagcccggcgaaaatctgtag

SEQ ID NO: 318630 - DNA, 1632 bp, Artificial Sequence
  derived and/or modified sequence
atgggctgtataaagtcaaaggagaataaatcacccgcaatcaagtacagaccagaaaacacaccggagccggtctctacatctgtcagccattatggtgccgaacccaccaccgttagcccatgcccctcatccagtgctaagggcactgccgtgaacttctctagtctgtccatgacaccatttggaggctcttccggagtcacacccttcggcggagcctcctcaagcttctccgttgtcccctcatcttaccccgcagggctcactgggggtgtgaccattttcgttgcactctacgactacgaagcgcgtacaaccgaggacttgtcattcaaaaaaggcgagcgcttccagattattaacaacacagagggtgattggtgggaggcgagatcaatcgccactgggaaaaatggttatatcccttcaaattacgtggctcccgcagactctattcaggctgaagaatggtacttcggcaaaatgggcaggaaggacgcagagcgcttactgttgaacccaggaaatcaaagaggaattttcctggtgagggaatccgaaacaacaaagggggcttactcactgagcatccgggattgggacgaaattcgcggagataacgtaaagcactacaagattagaaaactggataacggagggtactatattaccacacgggcacaattcgacaccttacagaaactggtgaaacattacacggagcacgccgacggtctttgtcacaagttgacaaccgtatgtcctactgtaaaacctcagacgcagggactcgctaaggacgcgtgggagatacccagggaatctcttaggttagaggtcaaactcggtcagggctgttttggcgaggtttggatgggcacttggaacggcactaccaaggttgccatcaaaacattaaagcccggaactatgatgcctgaggctttccttcaggaagctcaaatcatgaagaagctccgccatgataagctcgtaccactctacgctgtagttagcgaggaaccaatttacatagtgaccgaatttatgtcaaagggatctctgctggactttctgaaagaaggcgacggaaagtatttgaaactgccccagcttgttgacatggctgcccagatcgcagatggtatggcctacatagagagaatgaattacatacacagggatttacgcgcagccaatatcttggtgggggaaaatttagtatgcaaaattgccgatttcgggctcgcaagactgatcgaagataacgaatacaccgctaggcagggagcaaagttcccgatcaaatggacggcgcctgaggccgcactctacggtcgcttcacaataaaaagcgatgtgtggtcctttgggatcctccagaccgagcttgtcaccaaggggagggtcccttaccccggaatggttaacagagaggtgctcgagcaggttgagcgtggttaccgcatgccatgccctcagggctgcccagaatctctccacgagttgatgaatctctgttggaagaaagaccctgatgagaggcccacattcgagtacattcagagctttctggaagactatttcaccgcaacagagccccagtaccagcccggagagaatctgtag

SEQ ID NO: 318631 - DNA, 1632 bp, Artificial Sequence
  derived and/or modified sequence
atgggctgtatcaagtcaaaagaaaataaatcacctgcaatcaaataccggcctgagaatacacctgagcctgtctcaaccagcgtctcgcattatggcgcagagccaacaaccgtttccccttgcccaagtagtagcgccaagggaactgccgtcaacttttcaagcttgtccatgacaccgttcggcggaagcagtggcgtgacacccttcggcggtgccagcagttcattttcggtggtgccatcatcatatccggctggattgaccggaggagtcactattttcgttgcactgtacgattacgaagctaggaccacagaagacctatcctttaagaaaggggaacgttttcagatcattaacaataccgaaggggactggtgggaggcacggagtattgccactgggaaaaatggatatatcccgtcgaattacgtcgcgccagccgactccatccaggcagaagaatggtatttcggcaagatgggccgaaaagatgctgagcgcctgcttctgaacccgggaaaccagagaggaatcttccttgtcagggaatccgagaccacaaagggggcatactcgctaagcattcgggattgggacgaaatcaggggtgataatgttaaacattacaagatacggaaacttgacaacggagggtactatataacaacccgcgcacagtttgacacactacagaagctagtgaagcattacacggagcatgccgacggcctgtgccacaaactgactacagtgtgtcctacagtcaagccccaaactcagggactggcaaaagatgcctgggaaattcccagggagagcctccgactggaggtgaaattagggcaggggtgtttcggtgaggtttggatgggaacttggaatggcaccaccaaagtcgcaatcaaaactcttaaaccaggcaccatgatgcctgaggcatttctgcaggaagcacagatcatgaagaagctgaggcatgacaagttagtccctctttatgccgtggtgtctgaggagcctatatacattgtgactgagttcatgagcaaaggctccctgctcgattttctgaaggagggggacgggaagtatcttaaactgcctcaattggtagatatggcagctcagatcgcggatggtatggcctatatagagagaatgaattacatccaccgagacttaagagcagccaacattctggtgggcgaaaatctggtctgcaaaatcgctgattttggattggccagactgattgaggacaacgaatacaccgcaaggcagggggctaagttcccgattaagtggaccgcccctgaggcagcactgtatgggaggttcaccatcaagtcagatgtgtggtcatttggaatcctgcagaccgagctagtgacaaaagggagggtgccttatcccggaatggttaacagagaagtcctcgaacaagtggagcgaggctatcgaatgccttgcccccagggttgccccgaatccttgcacgagctgatgaatctgtgttggaagaaagatcctgatgaacgaccaacatttgaatatatccaaagcttcctcgaggactatttcaccgccactgaaccacagtaccagcctggcgagaatctgtag

SEQ ID NO: 318632 - DNA, 1632 bp, Artificial Sequence
  derived and/or modified sequence
atgggatgtattaaatccaaagaaaataaaagtcccgctataaaatacagacctgagaacacgcctgaacccgtttccacatctgttagccattatggagccgagccgacgaccgtatccccttgcccaagcagttcagcgaaaggaacggctgtgaacttctcaagcttatctatgaccccattcggaggcagctctggagttactccattcgggggagcatcaagttcattctcagttgttccttcaagctacccggcagggctgacaggtggtgtaacaatattcgtagccctatatgactatgaggctagaactacagaggacctgtcctttaagaaaggggaacgattccagattataaataatactgaaggtgattggtgggaagccagatcaatcgcaactgggaagaacggctacatcccctcaaattacgttgcccctgcagactccatacaggccgaggaatggtattttgggaaaatgggtcgaaaggacgctgagcgactgctgttaaacccaggcaaccagcgcggaatttttctcgtgagagagagtgaaactactaagggcgcatacagcttgtcaatccgcgattgggacgagattcgcggagataacgttaagcactacaaaattcgtaaactcgacaatggagggtactatattactacccgcgcacagtttgacaccctccaaaaacttgttaagcactatactgaacacgcagacggcctctgtcacaaattaactaccgtgtgtccaaccgtgaaaccccagacgcaggggctggccaaggacgcttgggagatccctcgagaaagcctcaggctagaggtaaaactcggtcaggggtgcttcggcgaagtgtggatggggacatggaacggaacaaccaaagtcgccattaagaccctgaagcctgggactatgatgcctgaggccttcctgcaggaagctcagatcatgaagaagctgcgtcacgacaaactggtgccactgtacgctgttgtgtcggaggagcccatctacattgtgacagagtttatgtctaagggatcacttcttgattttttaaaggaaggcgatggcaaatacctgaaacttccccagctcgtggatatggctgcacagatcgctgatgggatggcctatatcgaaaggatgaattatatccatagggaccttcgcgctgccaacatattggtgggggaaaacctggtgtgtaagattgcagactttggcttggctagactgattgaagataacgaatatacagctcggcaaggggctaagtttcccattaagtggacagctcctgaagctgctctttatggccgttttaccattaaaagtgacgtttggagctttggcatcttgcagactgagctcgtgacaaagggaagggtcccatatccaggaatggtgaaccgcgaggttctggagcaggtagagaggggttacagaatgccatgtccccaaggctgtcctgagtcactacatgaactgatgaacttgtgttggaaaaaggatcctgacgagcgtcccaccttcgaatacatacagagcttccttgaagactactttacagctaccgaacctcagtatcagccaggagagaatctttag

SEQ ID NO: 318633 - DNA, 4685 bp, Artificial Sequence
  derived and/or modified sequence
ggaggaggtggagagtgaggccgaggcgtggggagcccgggaactccctcctcctgaagtaacgcgtcccgggccggctctgccgtcgttgctgccgccgggcgccccgggacgaggaggtggaggagggagagggcccgcgggcctcgcctccgccctccgccacctcgagctgcggtagcagcgactcatgagagcgcggccggaggacagatttgataatgggctgcattaaaagtaaagaaaacaaaagtccagccattaaatacagacctgaaaatactccagagcctgtcagtacaagtgtgagccattatggagcagaacccactacagtgtcaccatgtccgtcatcttcagcaaagggaacagcagttaatttcagcagtctttccatgacaccatttggaggatcctcaggggtaacgccttttggaggtgcatcttcctcattttcagtggtgccaagttcatatcctgctggtttaacaggtggtgttactatatttgtggccttatatgattatgaagctagaactacagaagacctttcatttaagaagggtgaaagatttcaaataattaacaatacggaaggagattggtgggaagcaagatcaatcgctacaggaaagaatggttatatcccgagcaattatgtagcgcctgcagattccattcaggcagaagaatggtattttggcaaaatggggagaaaagatgctgaaagattacttttgaatcctggaaatcaacgaggtattttcttagtaagagagagtgaaacaactaaaggtgcttattccctttctattcgtgattgggatgagataaggggtgacaatgtgaaacactacaaaattaggaaacttgacaatggtggatactatatcacaaccagagcacaatttgatactctgcagaaattggtgaaacactacacagaacatgctgatggtttatgccacaagttgacaactgtgtgtccaactgtgaaacctcagactcaaggtctagcaaaagatgcttgggaaatccctcgagaatctttgcgactagaggttaaactaggacaaggatgtttcggcgaagtgtggatgggaacatggaatggaaccacgaaagtagcaatcaaaacactaaaaccaggtacaatgatgccagaagctttccttcaagaagctcagataatgaaaaaattaagacatgataaacttgttccactatatgctgttgtttctgaagaaccaatttacattgtcactgaatttatgtcaaaaggaagcttattagatttccttaaggaaggagatggaaagtatttgaagcttccacagctggttgatatggctgctcagattgctgatggtatggcatatattgaaagaatgaactatattcaccgagatcttcgggctgctaatattcttgtaggagaaaatcttgtgtgcaaaatagcagactttggtttagcaaggttaattgaagacaatgaatacacagcaagacaaggtgcaaaatttccaatcaaatggacagctcctgaagctgcactgtatggtcggtttacaataaagtctgatgtctggtcatttggaattctgcaaacagaactagtaacaaagggccgagtgccatatccaggtatggtgaaccgtgaagtattagaacaagtggagcgaggatacaggatgccgtgccctcagggctgtccagaatccctccatgaattgatgaatctgtgttggaagaaggaccctgatgaaagaccaacatttgaatatattcagtccttcttggaagactacttcactgctacagagccacagtaccagccaggagaaaatttataattcaagtagcctattttatatgcacaaatctgccaaaatataaagaacttgtgtagattttctacaggaatcaaaagaagaaaatcttctttactctgcatgtttttaatggtaaactggaatcccagatatggttgcacaaaaccacttttttttccccaagtattaaactctaatgtaccaatgatgaatttatcagcgtatttcagggtccaaacaaaatagagctaagatactgatgacagtgtgggtgacagcatggtaatgaaggacagtgaggctcctgcttatttataaatcatttcctttctttttttccccaaagtcagaattgctcaaagaaaattatttattgttacagataaaacttgagagataaaaagctataccataataaaatctaaaattaaggaatatcatgggaccaaataattccattccagttttttaaagtttcttgcatttattattctcaaaagttttttctaagttaaacagtcagtatgcaatcttaatatatgctttcttttgcatggacatgggccaggtttttcaaaaggaatataaacaggatctcaaacttgattaaatgttagaccacagaagtggaatttgaaagtataatgcagtacattaatattcatgttcatggaactgaaagaataagaactttttcacttcagtccttttctgaagagtttgacttagaataatgaaggtaactagaaagtgagttaatcttgtatgaggttgcattgattttttaaggcaatatataattgaaactactgtccaatcaaaggggaaatgttttgatctttagatagcatgcaaagtaagacccagcattttaaaagccctttttaaaaactagacttcgtactgtgagtattgcttatatgtccttatggggatgggtgccacaaatagaaaatatgaccagatcagggacttgaatgcacttttgctcatggtgaatatagatgaacagagaggaaaatgtatttaaaagaaatacgagaaaagaaagtgaaagttttacaagttagagggatggaaggtaatgtttaatgttgatgtcatggagtgacagaatggctttgctggcactcagagctcctcacttagctatattctgagactttgaagagttataaagtataactataaaactaatttttcttacacactaaatgggtatttgttcaaaataatgaagttatggcttcacattcattgcagtgggatatggtttttatgtaaaacatttttagaactccagttttcaaatcatgtttgaatctacattcacttttttttgttttcttttttgagacggagtctcgctctgtcgcccaggctggagtgcagtggcgcgatctcggctcactgcaagctctgcctcccaggttcacaccattctcctgcctcagcctcccgagtagctgggactacaggtgcccaccaccacgcctggctagttttttgtatttttagtagagacgcagtttcaccgtgttagccaggatagtctcgatctcctgaccttgtgatctgcccgcctcggcctcccaaagtgctgggattacaggcgtgagccaccgcgcccagcctacattcacttctaaagtctatgtaatggtggtcattttttcccttttagaatacattaaatggttgatttggggaggaaaacttattctgaatattaacggtggtgaaaaggggacagtttttaccctaaagtgcaaaagtgaaacatacaaaataagactaatttttaagagtaactcagtaatttcaaaatacagatttgaatagcagcattagtggtttgagtgtctagcaaaggaaaaattgatgaataaaatgaaggtctggtgtatatgttttaaaatactctcatatagtcacactttaaattaagccttatattaggcccctctattttcaggatataattcttaactatcattatttacctgattttaatcatcagattcgaaattctgtgccatggcatatatgttcaaattcaaaccatttttaaaatgtgaagatggacttcatgcaagttggcagtggttctggtactaaaaattgtggttgttttttctgtttacgtaacctgcttagtattgacactctctaccaagagggtcttcctaagaagagtgctgtcattatttcctcttatcaacaacttgtgacatgagattttttaagggctttatgtgaactatgatattgtaatttttctaagcatattcaaaagggtgacaaaattacgtttatgtactaaatctaatcaggaaagtaaggcaggaaaagttgatggtattcattaggttttaactgaatggagcagttccttatataataacaattgtatagtagggataaaacactaacttaatgtgtattcattttaaattgttctgtatttttaaattgccaagaaaaacaactttgtaaatttggagatattttccaacagcttttcgtcttcagtgtcttaatgtggaagttaacccttaccaaaaaaggaagttggcaaaaacagccttctagcacacttttttaaatgaataatggtagcctaaacttaatatttttataaagtattgtaatattgttttgtggataattgaaataaaaagttctcattgaatgcacctattaatcgttttagttgctattcatattctcattcgttttttaaaaactgatatattctgaatttattcttccattgagaaaaaaatgttcagttacttgtaactactgagcagaatttaatcaatcctttattaaattcagaacattattgaa

SEQ ID NO: 318634 - DNA, 4767 bp, Artificial Sequence
  derived and/or modified sequence
ggaggaggtggagagtgaggccgaggcgtggggagcccgggaactccctcctcctgaagtaacgcgtcccgggccggctctgccgtcgttgctgccgccgggcgccccgggacgaggaggtggaggagggagagggcccgcgggcctcgcctccgccctccgccacctcgagctgcggtagcagcgactcatgagagcgcggccggaggacaggctgtggaagagagccaccattatcaaaatgatcacagttgcaaacattcgtgcttcaaataccagccactatgttagatttgataatgggctgcattaaaagtaaagaaaacaaaagtccagccattaaatacagacctgaaaatactccagagcctgtcagtacaagtgtgagccattatggagcagaacccactacagtgtcaccatgtccgtcatcttcagcaaagggaacagcagttaatttcagcagtctttccatgacaccatttggaggatcctcaggggtaacgccttttggaggtgcatcttcctcattttcagtggtgccaagttcatatcctgctggtttaacaggtggtgttactatatttgtggccttatatgattatgaagctagaactacagaagacctttcatttaagaagggtgaaagatttcaaataattaacaatacggaaggagattggtgggaagcaagatcaatcgctacaggaaagaatggttatatcccgagcaattatgtagcgcctgcagattccattcaggcagaagaatggtattttggcaaaatggggagaaaagatgctgaaagattacttttgaatcctggaaatcaacgaggtattttcttagtaagagagagtgaaacaactaaaggtgcttattccctttctattcgtgattgggatgagataaggggtgacaatgtgaaacactacaaaattaggaaacttgacaatggtggatactatatcacaaccagagcacaatttgatactctgcagaaattggtgaaacactacacagaacatgctgatggtttatgccacaagttgacaactgtgtgtccaactgtgaaacctcagactcaaggtctagcaaaagatgcttgggaaatccctcgagaatctttgcgactagaggttaaactaggacaaggatgtttcggcgaagtgtggatgggaacatggaatggaaccacgaaagtagcaatcaaaacactaaaaccaggtacaatgatgccagaagctttccttcaagaagctcagataatgaaaaaattaagacatgataaacttgttccactatatgctgttgtttctgaagaaccaatttacattgtcactgaatttatgtcaaaaggaagcttattagatttccttaaggaaggagatggaaagtatttgaagcttccacagctggttgatatggctgctcagattgctgatggtatggcatatattgaaagaatgaactatattcaccgagatcttcgggctgctaatattcttgtaggagaaaatcttgtgtgcaaaatagcagactttggtttagcaaggttaattgaagacaatgaatacacagcaagacaaggtgcaaaatttccaatcaaatggacagctcctgaagctgcactgtatggtcggtttacaataaagtctgatgtctggtcatttggaattctgcaaacagaactagtaacaaagggccgagtgccatatccaggtatggtgaaccgtgaagtattagaacaagtggagcgaggatacaggatgccgtgccctcagggctgtccagaatccctccatgaattgatgaatctgtgttggaagaaggaccctgatgaaagaccaacatttgaatatattcagtccttcttggaagactacttcactgctacagagccacagtaccagccaggagaaaatttataattcaagtagcctattttatatgcacaaatctgccaaaatataaagaacttgtgtagattttctacaggaatcaaaagaagaaaatcttctttactctgcatgtttttaatggtaaactggaatcccagatatggttgcacaaaaccacttttttttccccaagtattaaactctaatgtaccaatgatgaatttatcagcgtatttcagggtccaaacaaaatagagctaagatactgatgacagtgtgggtgacagcatggtaatgaaggacagtgaggctcctgcttatttataaatcatttcctttctttttttccccaaagtcagaattgctcaaagaaaattatttattgttacagataaaacttgagagataaaaagctataccataataaaatctaaaattaaggaatatcatgggaccaaataattccattccagttttttaaagtttcttgcatttattattctcaaaagttttttctaagttaaacagtcagtatgcaatcttaatatatgctttcttttgcatggacatgggccaggtttttcaaaaggaatataaacaggatctcaaacttgattaaatgttagaccacagaagtggaatttgaaagtataatgcagtacattaatattcatgttcatggaactgaaagaataagaactttttcacttcagtccttttctgaagagtttgacttagaataatgaaggtaactagaaagtgagttaatcttgtatgaggttgcattgattttttaaggcaatatataattgaaactactgtccaatcaaaggggaaatgttttgatctttagatagcatgcaaagtaagacccagcattttaaaagccctttttaaaaactagacttcgtactgtgagtattgcttatatgtccttatggggatgggtgccacaaatagaaaatatgaccagatcagggacttgaatgcacttttgctcatggtgaatatagatgaacagagaggaaaatgtatttaaaagaaatacgagaaaagaaagtgaaagttttacaagttagagggatggaaggtaatgtttaatgttgatgtcatggagtgacagaatggctttgctggcactcagagctcctcacttagctatattctgagactttgaagagttataaagtataactataaaactaatttttcttacacactaaatgggtatttgttcaaaataatgaagttatggcttcacattcattgcagtgggatatggtttttatgtaaaacatttttagaactccagttttcaaatcatgtttgaatctacattcacttttttttgttttcttttttgagacggagtctcgctctgtcgcccaggctggagtgcagtggcgcgatctcggctcactgcaagctctgcctcccaggttcacaccattctcctgcctcagcctcccgagtagctgggactacaggtgcccaccaccacgcctggctagttttttgtatttttagtagagacgcagtttcaccgtgttagccaggatagtctcgatctcctgaccttgtgatctgcccgcctcggcctcccaaagtgctgggattacaggcgtgagccaccgcgcccagcctacattcacttctaaagtctatgtaatggtggtcattttttcccttttagaatacattaaatggttgatttggggaggaaaacttattctgaatattaacggtggtgaaaaggggacagtttttaccctaaagtgcaaaagtgaaacatacaaaataagactaatttttaagagtaactcagtaatttcaaaatacagatttgaatagcagcattagtggtttgagtgtctagcaaaggaaaaattgatgaataaaatgaaggtctggtgtatatgttttaaaatactctcatatagtcacactttaaattaagccttatattaggcccctctattttcaggatataattcttaactatcattatttacctgattttaatcatcagattcgaaattctgtgccatggcatatatgttcaaattcaaaccatttttaaaatgtgaagatggacttcatgcaagttggcagtggttctggtactaaaaattgtggttgttttttctgtttacgtaacctgcttagtattgacactctctaccaagagggtcttcctaagaagagtgctgtcattatttcctcttatcaacaacttgtgacatgagattttttaagggctttatgtgaactatgatattgtaatttttctaagcatattcaaaagggtgacaaaattacgtttatgtactaaatctaatcaggaaagtaaggcaggaaaagttgatggtattcattaggttttaactgaatggagcagttccttatataataacaattgtatagtagggataaaacactaacttaatgtgtattcattttaaattgttctgtatttttaaattgccaagaaaaacaactttgtaaatttggagatattttccaacagcttttcgtcttcagtgtcttaatgtggaagttaacccttaccaaaaaaggaagttggcaaaaacagccttctagcacacttttttaaatgaataatggtagcctaaacttaatatttttataaagtattgtaatattgttttgtggataattgaaataaaaagttctcattgaatgcacctattaatcgttttagttgctattcatattctcattcgttttttaaaaactgatatattctgaatttattcttccattgagaaaaaaatgttcagttacttgtaactactgagcagaatttaatcaatcctttattaaattcagaacattattgaactca

SEQ ID NO: 318635 - DNA, 4639 bp, Artificial Sequence
  derived and/or modified sequence
ggtcgggagaagtgacacggaccggtcgcctatcctgaccacagcaaagcggcccggagcccgcggaggggacctgacgggggcgtaggcgccggaaggctgggggccccggagccgggccggcgtggcccgagttccggtgagcggacggcggcgcgcgcagatttgataatgggctgcattaaaagtaaagaaaacaaaagtccagccattaaatacagacctgaaaatactccagagcctgtcagtacaagtgtgagccattatggagcagaacccactacagtgtcaccatgtccgtcatcttcagcaaagggaacagcagttaatttcagcagtctttccatgacaccatttggaggatcctcaggggtaacgccttttggaggtgcatcttcctcattttcagtggtgccaagttcatatcctgctggtttaacaggtggtgttactatatttgtggccttatatgattatgaagctagaactacagaagacctttcatttaagaagggtgaaagatttcaaataattaacaatacggaaggagattggtgggaagcaagatcaatcgctacaggaaagaatggttatatcccgagcaattatgtagcgcctgcagattccattcaggcagaagaatggtattttggcaaaatggggagaaaagatgctgaaagattacttttgaatcctggaaatcaacgaggtattttcttagtaagagagagtgaaacaactaaaggtgcttattccctttctattcgtgattgggatgagataaggggtgacaatgtgaaacactacaaaattaggaaacttgacaatggtggatactatatcacaaccagagcacaatttgatactctgcagaaattggtgaaacactacacagaacatgctgatggtttatgccacaagttgacaactgtgtgtccaactgtgaaacctcagactcaaggtctagcaaaagatgcttgggaaatccctcgagaatctttgcgactagaggttaaactaggacaaggatgtttcggcgaagtgtggatgggaacatggaatggaaccacgaaagtagcaatcaaaacactaaaaccaggtacaatgatgccagaagctttccttcaagaagctcagataatgaaaaaattaagacatgataaacttgttccactatatgctgttgtttctgaagaaccaatttacattgtcactgaatttatgtcaaaaggaagcttattagatttccttaaggaaggagatggaaagtatttgaagcttccacagctggttgatatggctgctcagattgctgatggtatggcatatattgaaagaatgaactatattcaccgagatcttcgggctgctaatattcttgtaggagaaaatcttgtgtgcaaaatagcagactttggtttagcaaggttaattgaagacaatgaatacacagcaagacaaggtgcaaaatttccaatcaaatggacagctcctgaagctgcactgtatggtcggtttacaataaagtctgatgtctggtcatttggaattctgcaaacagaactagtaacaaagggccgagtgccatatccaggtatggtgaaccgtgaagtattagaacaagtggagcgaggatacaggatgccgtgccctcagggctgtccagaatccctccatgaattgatgaatctgtgttggaagaaggaccctgatgaaagaccaacatttgaatatattcagtccttcttggaagactacttcactgctacagagccacagtaccagccaggagaaaatttataattcaagtagcctattttatatgcacaaatctgccaaaatataaagaacttgtgtagattttctacaggaatcaaaagaagaaaatcttctttactctgcatgtttttaatggtaaactggaatcccagatatggttgcacaaaaccacttttttttccccaagtattaaactctaatgtaccaatgatgaatttatcagcgtatttcagggtccaaacaaaatagagctaagatactgatgacagtgtgggtgacagcatggtaatgaaggacagtgaggctcctgcttatttataaatcatttcctttctttttttccccaaagtcagaattgctcaaagaaaattatttattgttacagataaaacttgagagataaaaagctataccataataaaatctaaaattaaggaatatcatgggaccaaataattccattccagttttttaaagtttcttgcatttattattctcaaaagttttttctaagttaaacagtcagtatgcaatcttaatatatgctttcttttgcatggacatgggccaggtttttcaaaaggaatataaacaggatctcaaacttgattaaatgttagaccacagaagtggaatttgaaagtataatgcagtacattaatattcatgttcatggaactgaaagaataagaactttttcacttcagtccttttctgaagagtttgacttagaataatgaaggtaactagaaagtgagttaatcttgtatgaggttgcattgattttttaaggcaatatataattgaaactactgtccaatcaaaggggaaatgttttgatctttagatagcatgcaaagtaagacccagcattttaaaagccctttttaaaaactagacttcgtactgtgagtattgcttatatgtccttatggggatgggtgccacaaatagaaaatatgaccagatcagggacttgaatgcacttttgctcatggtgaatatagatgaacagagaggaaaatgtatttaaaagaaatacgagaaaagaaagtgaaagttttacaagttagagggatggaaggtaatgtttaatgttgatgtcatggagtgacagaatggctttgctggcactcagagctcctcacttagctatattctgagactttgaagagttataaagtataactataaaactaatttttcttacacactaaatgggtatttgttcaaaataatgaagttatggcttcacattcattgcagtgggatatggtttttatgtaaaacatttttagaactccagttttcaaatcatgtttgaatctacattcacttttttttgttttcttttttgagacggagtctcgctctgtcgcccaggctggagtgcagtggcgcgatctcggctcactgcaagctctgcctcccaggttcacaccattctcctgcctcagcctcccgagtagctgggactacaggtgcccaccaccacgcctggctagttttttgtatttttagtagagacgcagtttcaccgtgttagccaggatagtctcgatctcctgaccttgtgatctgcccgcctcggcctcccaaagtgctgggattacaggcgtgagccaccgcgcccagcctacattcacttctaaagtctatgtaatggtggtcattttttcccttttagaatacattaaatggttgatttggggaggaaaacttattctgaatattaacggtggtgaaaaggggacagtttttaccctaaagtgcaaaagtgaaacatacaaaataagactaatttttaagagtaactcagtaatttcaaaatacagatttgaatagcagcattagtggtttgagtgtctagcaaaggaaaaattgatgaataaaatgaaggtctggtgtatatgttttaaaatactctcatatagtcacactttaaattaagccttatattaggcccctctattttcaggatataattcttaactatcattatttacctgattttaatcatcagattcgaaattctgtgccatggcatatatgttcaaattcaaaccatttttaaaatgtgaagatggacttcatgcaagttggcagtggttctggtactaaaaattgtggttgttttttctgtttacgtaacctgcttagtattgacactctctaccaagagggtcttcctaagaagagtgctgtcattatttcctcttatcaacaacttgtgacatgagattttttaagggctttatgtgaactatgatattgtaatttttctaagcatattcaaaagggtgacaaaattacgtttatgtactaaatctaatcaggaaagtaaggcaggaaaagttgatggtattcattaggttttaactgaatggagcagttccttatataataacaattgtatagtagggataaaacactaacttaatgtgtattcattttaaattgttctgtatttttaaattgccaagaaaaacaactttgtaaatttggagatattttccaacagcttttcgtcttcagtgtcttaatgtggaagttaacccttaccaaaaaaggaagttggcaaaaacagccttctagcacacttttttaaatgaataatggtagcctaaacttaatatttttataaagtattgtaatattgttttgtggataattgaaataaaaagttctcattgaatgcacctattaatcgttttagttgctattcatattctcattcgttttttaaaaactgatatattctgaatttattcttccattgagaaaaaaatgttcagttacttgtaactactgagcagaatttaatcaatcctttattaaattcagaacattattgaactca

SEQ ID NO: 318636 - DNA, 747 bp, Artificial Sequence
  derived and/or modified sequence
atggcagccgagctagaattcgcccagattatcatcattgtcgttgtcgtaactgttatggtggtcgtcattgtatgcttattgaatcactataaagtcagcactagatcgttcattaacagacctaaccaatccagaaggcgggaggacggactgccacaagagggatgtctttggccatcggactccgcagcaccaaggctgggcgcctctgagataatgcacgctcccaggtcaagggataggttcactgctccatcttttatccagcgcgataggttctctagatttcagcccacttatccctacgtccaacacgagatcgatctgccgcctacaatctctctgtcagatggggaggaaccaccaccctatcaaggaccttgcacgttacaattgagggatccagaacagcagatggaacttaaccgcgaatcagtgagggcaccgcctaatagaactattttcgacagtgacctaattgacatcgccatgtacagcggcgggccctgtccgccctccagcaacagtggtatcagtgcaagtacatgttcgagtaacgggcggatggagggacctccaccaacctatagtgaagtcatggggcatcatccaggcgcctcgttcttgcaccatcagcgcagcaatgctcatagagggtccaggctacagtttcaacagaataatgccgagagtaccatcgtgccaataaaaggaaaagatcgaaaacccggcaacctagtgtag

SEQ ID NO: 318637 - DNA, 747 bp, Artificial Sequence
  derived and/or modified sequence
atggctgctgagctggagtttgcccagatcatcatcatcgtggtggtggtgacagtgatggtggtggtgattgtgtgcctgctgaaccactacaaggtgtccaccaggagcttcatcaaccggcccaaccagagcagaagaagagaagatggcctgccccaggagggctgcctgtggcccagcgacagcgctgccccccggctgggcgccagcgagatcatgcacgcccccaggagccgggaccgcttcaccgcccccagcttcatccagagggaccgcttcagccgcttccagcccacctacccctacgtgcagcacgagattgacctgccccccaccatcagcctgagtgatggagaggagcccccaccctaccagggcccctgcaccctgcagctgcgggaccctgagcagcagatggagctgaaccgggagagcgtgcgggccccacccaacagaaccatctttgacagcgacctgattgatattgccatgtacagcggcggcccctgcccccccagcagcaacagcggcatcagcgccagcacctgcagcagcaatggaaggatggagggccccccacccacctacagcgaggtgatgggccaccaccctggggccagcttcctgcaccaccagaggagcaatgcccaccggggcagccggctgcagttccagcagaacaatgctgagagcaccatcgtgcccatcaagggcaaggacaggaagccaggcaacctggtgtag

SEQ ID NO: 318638 - DNA, 747 bp, Artificial Sequence
  derived and/or modified sequence
atggccgccgagctggagttcgcccagatcatcatcatcgtggtggttgtgacggttatggtggtcgtgatcgtctgtctgctcaatcattataaagtgagtaccagaagcttcattaatcgtcccaaccagtcacgcagaagggaggatggactgccccaggaggggtgcctgtggccaagcgattcagccgctcctcgcttaggcgcatccgaaatcatgcatgcccctagaagtagggaccgctttactgctccaagctttattcagcgtgatcgcttttcaagatttcagccgacctacccgtacgtccagcatgagattgacctacccccaacgatctccttatcagacggcgaagagcccccgccctatcaaggcccctgtacccttcagcttagggatcccgaacaacagatggaattaaatcgggaaagcgtccgggcaccccccaaccggacaatcttcgattctgatctgatcgacatagcaatgtactctggggggccttgccctccgtcttctaattctggtatttctgcttccacgtgttcctctaacggccgaatggagggcccacctcctacatattctgaggttatgggacaccaccccggtgccagctttttgcaccatcagaggtctaacgcccaccgaggtagtcggctgcagtttcagcaaaacaacgcagagtcgaccatagtcccaatcaaaggaaaggaccgcaaaccaggcaacctggtgtag

SEQ ID NO: 318639 - DNA, 747 bp, Artificial Sequence
  derived and/or modified sequence
atggccgctgaactggaatttgcccagataattatcattgtggtggtcgtcacagttatggtcgtggtaatcgtttgccttctcaaccactacaaggtgtccaccagaagctttataaatcggcctaaccaatctcgaagaagagaagatgggctaccccaggaaggctgcctgtggccgtcggacagtgccgctcccaggctaggggcttcggagataatgcacgccccaagatctagggataggtttactgctcccagttttatccaacgcgaccgattttctcgtttccagcctacatatccctatgtccagcacgaaattgatttgccaccgacgatatctctgagtgacggcgaagagccacccccttaccaaggcccttgcaccttgcaacttagggaccccgagcagcagatggagctgaacagagaatccgtgagagcacctccaaaccgaaccatcttcgatagcgatctgatcgatattgcaatgtactctgggggaccatgccctccttcaagcaactcaggcatttctgctagcacttgctccagtaacggtagaatggaaggacccccacccacgtattctgaagtgatgggccatcatccaggagccagttttctgcaccatcagcgatcgaacgcacatcgcggaagtagactgcagtttcaacagaataacgccgagagcaccatagtcccaattaagggcaaagatcgcaagcctggaaacctggtgtag

SEQ ID NO: 318640 - DNA, 8086 bp, Artificial Sequence
  derived and/or modified sequence
ctcagctccctgtggtgggggatggcagaggcttcccgctccccgcagctggtttgcacagcctcccgactgtgccgtggtgtctccttccctaaagtgggacagtcgtttctgtgtcctgctggcctctgaggaacagacgtgtgtgagaggccttcagggcctgatggctggggtggtgacagtgcctggagaatgggtggggactggaggggccaggtggctaaccactctcctcttccatggcagcggagctggagttcgcccaaatcatcatcatcgtcgtggtggtcacggtgatggtggtggtcatcgtctgcctgctgaaccactacaaagtctccacgcggtccttcatcaaccgcccgaaccagagccggaggcgggaggacgggctgccgcaggaagggtgcctgtggccttcagacagcgccgcaccgcggctgggcgcctcggagatcatgcatgccccgcggtccagggacaggttcacagcgccgtccttcatccagagggatcgcttcagccgcttccagcccacctacccctatgtgcagcacgagattgatcttcctcccaccatctccctgtccgacggtgaagagccacctccttaccaggggccctgcaccctgcagctccgggaccctgaacagcagatggaactcaaccgagagtccgtgagggccccacccaaccgaaccatatttgacagtgatttaatagacattgctatgtatagcgggggtccatgcccacccagcagcaactcgggcatcagtgcaagcacctgcagcagtaacgggaggatggaggggccaccccccacatacagcgaggtgatgggccaccacccaggcgcctctttcctccatcaccagcgcagcaacgcacacaggggcagcagactgcagtttcagcagaacaatgcagagagcacaatagtacccatcaaaggcaaagataggaagcctgggaacctggtctgattccttccaacgtgcacttcagctggagaaagaaaccaagaagggaagcggccgctgggcccctcctgcgcacagtgttgttcagtttcacatggtacaaataagtaaaaccaaatgagcaaacacggtctttgtttctgattccttttaggggaattgcatgcaaactagactgaaatgatacaaacttccatctggtctgaccgcaaacagtgtttatttggggacaggggttgggatgggggtgtgggcaggggaaaacagagaacgggatgctttgaagataccatgaaataaaacccacagaggtatttgatgtatttaattgtgaaaggagactttgcagataaatgaggccagaatggcatgttttataattaactgaataaagaaggaagcattattatatattattgtggggaagaaccagccagttcgctttttctcctaaggtgtggaacttttattttgttttaaaaatatgaatcaaaattcctgtgttgtgtgccaaggtataaagtggagaagttagatgagtgcaaggagctcctttgtgttgtgatgatgtgttttaaaagttgcactatcttaatgttgaaaatatttacaagggaactgttttacgtgaagttctgtatgttgtcttttcacctgtggattgtaatcaggcccaaggaatatcctggagtggtccccagaagcatccaagaaaagatatttggggacgtagcctaacattttaccaacttacgtaaatcaaaaaagtcattattgttgcaggagtttgcatcaaatagcagtgcatcgctgaagcttttggagacttttggatggaagataagatagggaagattaagttccagcatttctgacttgttattttgagttactctgctactcttaggctgcatagtttatgagaaaatgaacacatgcatttatggatccagtatcatgcagtgctgccctcatcctccagcagtgcaatttcttcagtaatttagatttttttcactatagcatgaaatatattcaaatacataccttattttatgcaataaattgtttaaaatgcaaggtggttattctgcatactgttgaaatatgtgactcctcagtatattcccattgcctctccccctttcctcgacagcttagttcagttctgcagggctgctcagttcacaggaggctcccagcagccaccccacatccagcctacacagaacttcgtgtgggagtggtgtgggtggtggtttcttatgctttggaagcccctagaaataatgacggaagaatgccatgttgctgatcgtggtaataagccattgtgggttattgtatgtcactagtattagcatagcattcttaaaggaatgcagtgctcaaaacctacccaaattcccgcaggattctaccaaacccttccccaggccagcttttgtactgaaggcaagaactggacagtcagagaacagtggagggggcaagtgactgaagagcaccgggtaaaaagcacaacatgcagttaaaatgcaactagaaaactaattttaaatattgttagttttaatattcctgatatttacaaatattcattcttatatacaatgaaaaaaataactttcttctgcagatgtaagcactggcttttataagagcagcagccaacacgtttagcagacactgcgcgtggagaagggcttatctgcagtacactctgccatgtggagggtgggcctctgtggcctcttcacataacaagatgagctggaatgatgattccatgactcccacctatgcagccttaaagccaaatccgcgtgtgtgtgtttgtgtctgtctgtgggtctcgaaggtgatccgtcggtgcggtggctctgtgctgtaactggagagactgttccaaaccccaagagttgtctgatcctagtctgttcccttctgcttcttacctctgtagataggtcactggtttttgtttgtttgttttgaggattggaatttccattacattcatcctttgcacacagtaacatccacagaactagtccaactcttaaaaggagagaggaaaaacacaggcaccagttgtcagctcatgcttacaacctgtgtggaagtatatacagttgagagtcacagtggaggttctgagactggattcagtcttgttccagtgacagttggaaggcctctgctggagagacaccagctctcagggcagagattggcttggggccagaaggaccctccccaaccctggagacaccctgaaggttcactggctctccagattagcctctcttcctctgtcaggcaaagatgaggagcccgtgttcccatcgggccctgctggcagggacttgcagtggattcttggtcaggtgtgcccacagatgcggaggcgaggtgagtgattccatcatttcagttctcacctgcagttttggtgaagcaggagatgcaccccacagctctagctctcaaatggcttcacagtccttacttctctacctgcctcaagaaggggctcagagcagagacttgtgaattccttagtaactgtgagtatatgaatgtgttgcacatgtccacagtattggcgagataattacataattcagatacctttaatcatctttcaagaaagaggctcctcccattcaaccaccctagagaactgcctttgttaaatagttatttaaagactcatacatatcaaaccatgactttgaaaggtcttcgaggctggggctctgtaatgaattagtttaaaagccaaggtcataacatgaattgatggtcaatttcccttcagcagaaggaaaaggtgatttagatcagtagctcttttgaaggttgtggctgacctgttcataccgtgtcgcctcatggctagtgtggcgttgaaagagtagcgactgggaagatacaacttacacagtggggcctattgttctttcaagaaccctttttttagcttatagaacccatgggtccagtttagtaacgagtgatttaggcaatcaatgataggtttataatcttagattattccagcaaagtgtggattgcattgttaggaagaacatttggtgggaatgaacactcctgggcataccgctgacttttgtcccttgttcccggtgtaggagacccaaggcatcttgaatcccatctataagaacacaatcttccagcatacgtttgctttttcagaaactctagcattctctttaaatactgacgcaatccttaatggaaaagagatttcatgaagcaaattatgtatttcaatagttcttctatttttagtgtccaaaatttactaatacagaagcttgacaagcatgtcctcaccctccccaccacataaacacatggacacacacccaagccacaagaaatcccaagagagcagaagcgaatttttaaaagatttatcgtgaggactgcatttccattcactaattttggctcaaacttatgaggcaggaaataggggccaacagtaaatgggggaggcctcctgacaccagcagaggaattttgtacccaggcgaggacttcttgaacttctgcgtatctccgtttgatctctttcacctttatttcatcttcataagaatgagaaaggctcaaaaggaagcacttttagaaatcttctctgacctagaagaatccatccaaatccctgccttcctctctgaaccaacagttcccttctctgacaggggccatcctctatcttccatccagcggctcttctttttaggaaggctctggtgcagagcacttcaaatatgtcctcaggccagatactgattgctagtagagagacacccggcacccagtccgaagccctccctcaaaggaccggctcatggcgttggtcactggcaggctcagagacattctgctgtgggcgcagggagcccggccccccatgcagccatgactggatgcgcccccatctcgggggcttgctgcactgcttgtttattgaattttgctacttagaatggcaacattaactttgtgtaccattcattttttaaaaattttccaaagctcggcagtgtatgaaagaaaaaactgggaaagatacttggtttctgttaacttttgtgttgcttgcttaagtgattaaagccagtgcttggagccaagccttcatgccacgaacatgctccacagcctgccctttgctctcctgctcacactgaccaagaatgccgcgtgcttggcctactgaggtgaaaggacaattgaatgacaggtgggcaaagggagaacttccccttcttggtgcgaggaaagtcacaaatttaaaaatgttgcttccagcccagatcctaaatgctagttctcagcagctgcgtggcttaccgttcgccatttccaccaccgccagctgccagcaccgctacagatcacagagatgtgaacagacaatggaaagcactcttagccttgcagtggtctacattttttaggaaccaatatttcagcattctttattacccggcacgctgtgtcctttgcagagttcaagtttatgttactgccagggtcagacagtcatttgctgctgctgctgctgctgctgcttctcgaactggatgcattaggaagctgctgtctgagtgtaggaatgtcttgctaagaaagcaatgtcttccttcatccttttctttcttccctctgcgtgtccttgtttttgtgtaatgcgggagagggttagagctatagagattatatatacactatccgtgcacattatatatatgtagatatacccctatcatgtcagagatctgcatgtcagtttttcagcaactaaggtgcctcatgttctgagttcagcagatataggaaccaagccgccccctcctgcacttgatgctcccacctttgttgtgcctcacttaaaatggtgcttttttcagttgtctgtcttttcttatgtttttatttgtaaggtgctgtatataagttgaatatattatgcacatatcctacccaatgggtagaacaaaaagttgttaatactgtaatataatgtatagatgataccaattttaacagaaatggcatagaatttgtgaatgcctatgtgctttgtcctcttttgtaaggaaatttgcaaatggatgcatacagattaaagtctatgtagtttattttcctattaaatatcaatattataacacaagagaaagaagtgtgaacaaacaagcaacagtttatgaccagcgtatatatagcaatggaaagttgcatctttgctgtgaaaacactttaaagaaaatactttttaaaaaatcccacagctttttggttgccactagacgcttcttattttaatcattttagtaatgctcagctggaccagtgttagttatatttgagtcagaaaaatgttgtttttcaacttgctttataatctcctgcatctatctcctgctgtagcatcacgaaggtgtcaggcaacagtgaaaagtgcacatttttgttgttgcagaaactgtgtcagaggaataagtaaatcagcctgcagcagaagactttgttcagctccagaggcatctgtgaccgtctgtgtccaagtctctctgtgcctttttcttttacaaactgaagctgtggagccaatgaagtaacagtagagattgtagggaaagaatacctcaggaaaaacaaatacacttacaagaagaccctgttcttagaaaatgtgtttagttatgggttagcactagaagagacttggctgtcagccagccaagtgaaggacctctcatccattcccattcatgtcccatcataatacggacccaaaaagcaaactcggttttgccatcagttagaaattacgttttggattgtatattgttacatctctcttccggcttagtttttagtgtctgattgtgacctctgcatttatcttcaaataccctaattttaaaacaaaagaacaagaaaagtttataacaccatgttcactaaaaccacggttgaatcttgggtgtgggcatcctttcgagtgttgtccataagagcagttcgtggaattttgcccatctgacccatattatcagcttattctgccaccagagtagagtctaataaattccaaagtttttatttgctccatggtgtatgttctgactttgaaaatgtcagattctataatcatacccctaacatccaggaaacaaatgacagattatctttaaactgaaattgactctacaatgcaacccttaatgctgaatggattaaaaaagtcagcccttttagtatctgtttgaaagggccgtaaaaagttgacacttttgttgttgtggatcctgcgtgtctagacccacgtgttgtttccatcgtatactgtagggtgcaccccttgggattcatcattaagaactgaggctcactgttgtcagaaacaaagctcccaccccccaggttcaaccttgtgggagaactgttgagcatgagaatgttctagactcagaggtactaaaatttgttaccacatcattgcttcctttctacaggacgaattgaggcttaaactttactgttaatgatactggttcattttaatgtgcttgttggtatgttgctatttttcatttcatagctttcaaaaatcatgctaattgtatacttgtctagtttaaggctattttaaaatatgtacaatactattcacagcatttagttcgtttaatttttattataaagcaatctactaaaaaagtacaactgtatttgaacttttcaatagttgtttgtgagctatgataatcaaaagtcattaaagtcttttttaacaaacattcgtgcttacttttcaacataattcccagttatatacagaaaaagatttccacctgtcacgtatctgcctcttttacctgagcaatggtgtagttcttagacctaaggtctgtaattgcaatacttttaaagaaagatgttgctctaagtgctgtttgttagttatgaaatcagatttttctgcttgttcttaatgctgtggtcaaaccatagcacaaaatcattaaaaataatcagcggcatac

SEQ ID NO: 318641 - DNA, 747 bp, Artificial Sequence
  derived and/or modified sequence
atggccgccgagctggagttcgcccagatcatcatcatcgtggtggtggtgaccgtgatggtggtggtgatcgtgtgcctgctgaaccactacaaggtgagcaccagaagcttcatcaacagacccaaccagagcagaagaagagaggacggcctgccccaggagggctgcctgtggcccagcgacagcgccgcccccagactgggcgccagcgagatcatgcacgcccccagaagcagagacagattcaccgcccccagcttcatccagagagacagattcagcagattccagcccacctacccctacgtgcagcacgagatcgacctgccccccaccatcagcctgagcgacggcgaggagccccccccctaccagggcccctgcaccctgcagctgagagaccccgagcagcagatggagctgaacagagagagcgtgagagccccccccaacagaaccatcttcgacagcgacctgatcgacatcgccatgtacagcggcggcccctgcccccccagcagcaacagcggcatcagcgccagcacctgcagcagcaacggcagaatggagggccccccccccacctacagcgaggtgatgggccaccaccccggcgccagcttcctgcaccaccagagaagcaacgcccacagaggcagcagactgcagttccagcagaacaacgccgagagcaccatcgtgcccatcaagggcaaggacagaaagcccggcaacctggtgtag

SEQ ID NO: 318642 - protein, 330 aa, Artificial Sequence
  derived and/or modified sequence
RGALVGAPRSARASCLRGRRPGRRQPCGRCPDPPRSGPGQAGRARCARDVAAQTALAPRALALGAGAAGPGWRGAVPRRPAARVSRAAQRQEQELVRLHREQECELQPEPAPPRPSGPATAEDPGRRPVLPQRPPEERPPQPPGSTGVIAETGQAGPPAGAGVSGYPKSPPVASPGAPVPSLVSFSAGLTQKPFPSDGGVVLFNKVLVNDGDVYNPSTGVFTAPYDGRYLITATLTPERDAYVEAVLSVSNASVAQLHTAGYRREFLEYHRPPGALHTCGGPGAFHLIVHLKAGDAVNVVVTGGKLAHTDFDEMYSTFSGVFLYPFLSHL

SEQ ID NO: 318643 - DNA, 390 bp, Artificial Sequence
  derived and/or modified sequence
atgaagtccgtgcttataggcgagttcctggaaaaggtaagacagaaaaagaaacgtgacattaccgtccttgacttaggatgcggtaaaggtggcgatctcttgaagtggaaaaaaggcaggattaacaagctcgtatgcacagatattgccgacgtttctgtcaagcagtgccaacaacgatacgaggacatgaagaaccgtagggatagcgagtatatttttagtgcagaatttatcactgcggattcttccaaggagcttttaattgataagtttcgtgaccctcagatgtgttttgacatttgcagttgtcagttcgtatgccattacagttttgaatcctatgagcaggccgacatgatgctgagaaatgcctgcggaacatag

SEQ ID NO: 318644 - DNA, 390 bp, Artificial Sequence
  derived and/or modified sequence
atgaagtctgtgctgattggagagttcctggagaaggtgcggcagaagaagaagagggacatcaccgtgctggacctgggctgtgggaagggcggggacctgctgaagtggaagaagggccgcatcaacaagctggtgtgcacagacattgctgatgtgtctgtgaagcagtgccagcagagatatgaggacatgaagaacagaagagattctgagtacatcttctctgctgagttcatcacagctgacagcagcaaggagctgctgattgacaagttccgggacccccagatgtgctttgacatctgcagctgccagtttgtgtgccactacagctttgagagctatgagcaggccgacatgatgctgagaaatgcctgtggcacctag

SEQ ID NO: 318645 - DNA, 390 bp, Artificial Sequence
  derived and/or modified sequence
atgaagagcgtgctgatcggcgagttcctggagaaggtgcggcagaaaaagaaacgggatatcacagtactggacctggggtgtggtaaaggcggggatctgctcaagtggaaaaagggccggattaataagctagtgtgcactgacatagccgacgtcagtgtgaagcagtgtcagcaaagatacgaggatatgaagaaccgtcgggattctgaatacatattctcagcagaattcattaccgccgactcaagcaaggagcttctaatcgataagttcagggacccgcagatgtgctttgatatttgttcttgccaatttgtctgtcactatagtttcgagagctacgaacaagcagacatgatgctccggaacgcatgcggcacatag

SEQ ID NO: 318646 - DNA, 390 bp, Artificial Sequence
  derived and/or modified sequence
atgaagtctgttctaataggagaattcctggagaaggtgagacagaaaaagaaacgtgacatcaccgtgcttgaccttggttgcgggaaaggcggtgatctcttaaaatggaaaaaaggtcgaatcaacaaacttgtctgtactgacattgctgatgtgagtgttaagcaatgccagcaacgatatgaggacatgaaaaaccgcagggactcagaatatatcttcagtgccgagttcattacggcggatagcagtaaagaactgttgatcgacaagttccgtgatcctcagatgtgttttgatatctgcagttgtcagttcgtctgccattattccttcgagagctatgagcaggcagacatgatgctgagaaatgcctgtggaacctag

SEQ ID NO: 318647 - DNA, 390 bp, Artificial Sequence
  derived and/or modified sequence
atgaagagcgtgctgatcggcgagttcctggagaaggtgagacagaagaagaagagagacatcaccgtgctggacctgggctgcggcaagggcggcgacctgctgaagtggaagaagggcagaatcaacaagctggtgtgcaccgacatcgccgacgtgagcgtgaagcagtgccagcagagatacgaggacatgaagaacagaagagacagcgagtacatcttcagcgccgagttcatcaccgccgacagcagcaaggagctgctgatcgacaagttcagagacccccagatgtgcttcgacatctgcagctgccagttcgtgtgccactacagcttcgagagctacgagcaggccgacatgatgctgagaaacgcctgcggcacctag

SEQ ID NO: 318648 - protein, 230 aa, Artificial Sequence
  derived and/or modified sequence
MMLKEMQKLPEAVQLIEKASMMYLENGTPDTAAMALERAGKLIENVDPEKAVQLYQQTANVFENEERLRQAVELLGKASRLLVRGRRFDEAALSIQKEKNIYKEIENYPTCYKKTIAQVLVHLHRNDYVAAERCVRESYSIPGFNGSEDCAALEQLLEGYDQQDQDQVSDVCNSPLFKYMDNDYAKLGLSLVVPGGGIKKKSPATPQAKPDGVTATAADEEEDEYSGGLC

SEQ ID NO: 318649 - DNA, 693 bp, Artificial Sequence
  derived and/or modified sequence
atgatgctgaaggagatgcagaagctgcccgaggccgtgcagctgatcgagaaggccagcatgatgtacctggagaacggcacccccgacaccgccgccatggccctggagagagccggcaagctgatcgagaacgtggaccccgagaaggccgtgcagctgtaccagcagaccgccaacgtgttcgagaacgaggagagactgagacaggccgtggagctgctgggcaaggccagcagactgctggtgagaggcagaagattcgacgaggccgccctgagcatccagaaggagaagaacatctacaaggagatcgagaactaccccacctgctacaagaagaccatcgcccaggtgctggtgcacctgcacagaaacgactacgtggccgccgagagatgcgtgagagagagctacagcatccccggcttcaacggcagcgaggactgcgccgccctggagcagctgctggagggctacgaccagcaggaccaggaccaggtgagcgacgtgtgcaacagccccctgttcaagtacatggacaacgactacgccaagctgggcctgagcctggtggtgcccggcggcggcatcaagaagaagagccccgccaccccccaggccaagcccgacggcgtgaccgccaccgccgccgacgaggaggaggacgagtacagcggcggcctgtgctag

SEQ ID NO: 318650 - DNA, 693 bp, Artificial Sequence
  derived and/or modified sequence
atgatgctcaaggagatgcagaaactacctgaagctgtgcaactgattgagaaagctagtatgatgtacttggaaaacggcacccccgataccgccgccatggctctggaaagggctggtaaactgattgagaatgtggacccggaaaaggctgttcagctctaccagcagactgccaacgttttcgagaacgaagaaaggctgcgccaggcggtagagcttctaggtaaggccagtcggctcctggtgagaggccggaggtttgatgaggctgccctctcaatacagaaagagaaaaatatttataaagaaattgagaactaccctacttgctataagaagaccattgcacaggtgctcgtgcatttacatcggaacgattatgttgcagcagagcgctgcgtgcgggaatcttacagtatccctggctttaatggtagtgaggattgcgcagcattggagcagctccttgaaggctacgaccagcaggaccaagatcaggtgtctgatgtgtgcaacagcccgctctttaagtacatggacaatgactatgctaaattaggccttagcttagtggttccaggaggcgggattaagaagaagtcccccgcaacaccccaggccaaacctgacggtgtcaccgctacagcagctgatgaagaggaggatgagtatagcgggggcttatgctag

SEQ ID NO: 318651 - DNA, 693 bp, Artificial Sequence
  derived and/or modified sequence
atgatgctgaaggagatgcagaagctgcctgaggccgtgcagctgattgagaaggcctccatgatgtacctggagaatggcaccccagacacagctgccatggccctggagagagctgggaagctgattgaaaatgtggaccctgagaaggctgtgcagctgtaccagcagacagccaacgtgtttgaaaatgaggagcggctgcggcaggccgtggagctgctgggcaaggccagccggctgctggtgcggggccgccgctttgatgaagctgccctgagcatccagaaggagaagaacatctacaaggagattgagaactaccccacctgctacaagaagaccatcgcccaggtgctggtgcacctgcacagaaatgactatgtggccgctgagcgctgtgtgcgggagagctacagcatccctggcttcaatggaagtgaggactgtgccgccctggagcagctgctggagggctatgaccagcaggaccaggaccaggtgtctgatgtgtgcaacagccccctcttcaagtacatggacaatgactatgccaagctgggcctgagcctggtggtgcctgggggcggcatcaagaagaagagccctgccaccccccaggccaagccagatggagtgacagccacagctgctgatgaggaggaggatgagtacagcggcggcctgtgctag

SEQ ID NO: 318652 - DNA, 693 bp, Artificial Sequence
  derived and/or modified sequence
atgatgctgaaggagatgcagaagctgcccgaggccgtgcagctgattgaaaaagcgtccatgatgtacctggagaatgggacccctgacacagcagccatggccttggagcgcgcaggcaagttgattgagaacgtcgaccccgagaaggcggttcagttgtaccagcaaactgctaacgtgttcgagaatgaagagcgcctgcgtcaggcagtcgaacttctaggaaaggcaagcaggcttttggtgcgagggagaaggtttgacgaggcggccctgagtatacagaaggagaaaaacatctataaagaaatcgagaactaccctacttgctacaagaaaactatcgctcaggttttagttcacttgcaccgtaatgactatgtcgcagccgagcggtgcgttagagagtcctactcaatccccggattcaatggtagcgaggattgtgccgcactcgagcaactgctggaaggatacgatcagcaggaccaagaccaggtttccgacgtgtgcaattctccactgttcaagtacatggacaatgattacgccaagctaggtctgagtttagtggtgcccgggggtggcatcaaaaagaaaagtcccgcaactccacaggctaaaccagacggtgtgaccgctacagcagccgacgaagaggaagatgagtatagcggcggtctctgttag

SEQ ID NO: 318653 - DNA, 693 bp, Artificial Sequence
  derived and/or modified sequence
atgatgctcaaggaaatgcaaaagcttcccgaagctgtgcagctcattgaaaaagcgagcatgatgtatctggagaatggaacaccggacacggcagcgatggccctggagagggctggtaaacttatcgagaatgtggaccctgaaaaggctgttcagctctaccagcaaactgccaacgtgtttgagaatgaggagcggctgaggcaggccgtggaactgctgggtaaagcatccagactgttggtgcgaggtcggaggttcgacgaggcagcgctctccattcagaaagagaaaaatatatacaaagaaatcgagaattacccgacttgctacaagaaaacaattgcacaagtgctcgtgcacctgcaccgcaatgactacgtggccgctgaaagatgtgttcgagagagttacagtatccctggttttaacggctccgaagattgcgcagccctggaacagctgctagaagggtatgatcagcaggaccaggatcaggtttcggatgtgtgcaactccccccttttcaaatacatggataatgactacgccaaattaggcctgtctctggttgtaccgggaggagggattaagaagaaatctccagctaccccacaggctaagccagacggagttaccgcaaccgccgcagacgaagaagaagatgagtactctggcggtctctgctag

SEQ ID NO: 318654 - protein, 470 aa, Artificial Sequence
  derived and/or modified sequence
MLQVRTYLTEPTVRAELMEQVPHIALFCQENRPSIPYAFSKFLLPIVVRYLADQNNQVRKTSQAALLALLEQELIERFDVETKVCPVLIELTAPDSNDDVKTEAVAIMCKMAPMVGKDITERLILPRFCEMCCDCRMFHVRKVCAANFGDICSVVGQQATEEMLLPRFFQLCSDNVWGVRKACAECFMAVSCATCQEIRRTKLSALFINLISDPSRWVRQAAFQSLGPFISTFANPSSSGQYFKEESKSSEEMSVENKNRTRDQEAPEDVQVRPEDTPSDLSVSNSSVILENTMEDHAAEASGKPLGEISVPLDSSLLCTLSSESHQEAASNENDKKPGNYKSMLRPEVGTTSQDSALLDQELYNSFHFWRTPLPEIDLDIELEQNSGGKPSPEGPEEESEGPVPSSPNITMATRKELEEMIENLEPHIDDPDVKAQVEVLSAALRASSLDAHEETISIKREVICKMNWI

SEQ ID NO: 318655 - DNA, 1413 bp, Artificial Sequence
  derived and/or modified sequence
atgcttcaggtcaggacatacctaacagagccaacagtccgcgccgagctcatggaacaggtccctcacattgcgctgttttgccaggagaatcggccctccataccatacgccttcagcaaatttctgctgcctattgtggtgagatatctggcagaccagaataatcaggtgcgcaagacctctcaggccgccctgctcgccttgctggagcaggagctgattgaacgctttgacgtagagacaaaagtgtgtccggtgctgattgaattaacagcccccgatagtaacgatgacgtcaagactgaggcggtggccatcatgtgtaagatggcgccaatggtgggaaaagacatcactgaaagactgatcctgccacggttttgtgagatgtgttgcgactgccgaatgttccatgtgagaaaagtgtgcgctgcaaacttcggtgacatttgctccgttgtcggccagcaagcgacagaggaaatgctcctgccaaggttctttcagctttgctcagacaatgtttggggagttagaaaagcgtgcgcagaatgtttcatggccgtgagttgtgccacatgtcaggaaattcgtcgtaccaaactgagcgccctatttatcaacttgatcagtgacccttctaggtgggtacgccaggctgcgtttcagtcccttggtccgttcatctccacattcgcaaacccgtcttcctccgggcagtacttcaaggaagagtctaagtccagcgaagaaatgtcggtggagaataagaatcgtacacgggatcaggaggcgcctgaggacgtgcaggtccgtccagaagatacccctagcgacctttctgtgagcaattcaagcgttattcttgagaacacaatggaggaccacgcggctgaagcatccggcaaaccgcttggggaaattagcgtgcccctggactctagcctgctttgtacattgagctcggagtcacatcaggaagcagcgtcaaatgaaaatgacaagaaaccaggaaattacaaaagcatgctgcgccccgaggtaggaacgacgtctcaggatagcgccctcctggatcaagaactgtataattcattccatttctggaggaccccacttcctgagatagatcttgatattgaactggagcagaacagcggaggaaaacctagcccagagggaccagaagaagaaagcgaaggcccagttccttccagccctaacatcaccatggcaactcgcaaggagctcgaggagatgattgaaaacctggaaccacacatcgacgatcctgatgtgaaggcccaggtggaggtcctttcagctgctttgagagcctcctctctcgacgcccatgaagagaccatctctattaagcgtgaggttatctgcaagatgaattggatttag

SEQ ID NO: 318656 - DNA, 1413 bp, Artificial Sequence
  derived and/or modified sequence
atgctgcaggtgaggacctacctgacagagcccaccgtgcgggcagagctgatggagcaggtgccccacatcgccctcttctgccaggagaaccggcccagcatcccctatgccttcagcaagttcctgctgcccatcgtggtgcgctacctggccgaccagaacaaccaggtgaggaagaccagccaggccgccctgctggccctgctggagcaggagctgattgaaagatttgatgtggagaccaaggtgtgccctgtgctgattgagctgacagccccagacagcaatgatgatgtgaagacagaggccgtggccatcatgtgcaagatggcccccatggtgggcaaggacatcacagagcggctcatcctgccccgcttctgtgagatgtgctgtgactgcaggatgtttcatgtgaggaaggtgtgtgccgccaactttggagacatctgcagcgtggtgggccagcaggccacagaggagatgctgctgccccgcttcttccagctgtgcagcgacaacgtgtggggcgtgaggaaggcctgtgccgagtgcttcatggctgtgtcctgtgccacctgccaggagatccggaggaccaagctgagcgccctcttcatcaacctgatcagtgaccccagccgctgggtgcggcaggccgccttccagagcctgggccccttcatcagcacctttgccaaccccagcagcagcggccagtacttcaaggaggagagcaagagcagcgaggagatgtctgtggagaacaagaacagaacccgggaccaggaggccccagaagatgtgcaggtgcggcctgaggacacccccagcgacctgtctgtgagcaacagcagcgtcatcctggagaacaccatggaggaccacgccgctgaggccagcggcaagcccctgggggagatctctgtgcccctggacagcagcctgctgtgcaccctgagcagcgagagccaccaggaggccgccagcaatgaaaatgacaagaagccaggcaactacaagtccatgctgcggcctgaggtgggcaccaccagccaggacagcgccctgctggaccaggagctgtacaacagcttccacttctggaggacccccctgcctgagattgacctggacatcgagctggagcagaacagcggcggcaagcccagccctgagggccctgaggaggagagcgagggccctgtgcccagcagccccaacatcaccatggccaccaggaaggagctggaggagatgattgagaacctggagccccacattgatgatcctgatgtgaaggcccaggtggaggtgctgtctgctgccctgcgggccagcagcctggatgcccacgaggagaccatcagcatcaagcgggaggtgatctgcaagatgaactggatctag

SEQ ID NO: 318657 - DNA, 1413 bp, Artificial Sequence
  derived and/or modified sequence
atgctgcaggtgcggacctacctgaccgagcccaccgtgcgggccgagttgatggaacaagtgccacacatagctctgttctgtcaagagaaccgccccagcattccctatgcattctcgaagttcctgcttccaatagtcgtgagatacctcgcagaccagaataatcaggttcgcaaaacttctcaggccgcactgctggccttgctcgagcaggagctgatcgagcggttcgatgtcgagacaaaggtttgtcccgtgttaattgagttgactgccccagacagtaatgatgacgtgaaaaccgaggccgttgccatcatgtgcaaaatggcaccaatggtggggaaggatatcaccgaacggctaatcctacctcgtttctgcgagatgtgttgcgactgccggatgttccacgtgcgcaaagtatgtgccgctaattttggggatatttgctctgtcgtagggcagcaggccacagaggaaatgctgcttcccagattcttccagttatgctcagacaatgtatggggcgtccgaaaagcctgcgctgaatgctttatggctgtctcctgcgcgacctgccaggaaatccgccggaccaagctttccgctctcttcatcaacctcatttctgacccttctagatgggtaagacaggctgcctttcaatcactggggccgttcataagtaccttcgctaacccatccagctccggacagtatttcaaagaagagtctaagagctctgaagagatgtcagtggagaataaaaaccgcacccgtgatcaagaagcaccagaggatgtgcaggtgagacccgaagacacccccagcgacctttccgtctctaacagcagcgttattttggagaacactatggaagatcacgctgctgaggcaagcgggaagcccctgggtgaaataagcgtgccactggactcttcactcctgtgtactctgagttctgagagccatcaggaagcggcctccaacgagaacgacaaaaaacccgggaattataaaagtatgctgaggcccgaggtaggaaccacatcacaagattccgctctgctcgaccaggagttatataatagctttcatttctggcgcacccccctgcccgaaatagacttggatatcgagctggagcagaacagtggcggcaaaccatcacctgagggacccgaagaggagtcagagggcccggttcccagctcaccaaatattacaatggccacgcggaaagaattagaggagatgattgaaaatctggaaccccatatcgatgatcctgacgttaaggcacaggtggaggtgctgtccgctgccctcagagcaagctcattggatgcacacgaggaaacaatctccattaaacgtgaagtcatttgcaagatgaattggatttag

SEQ ID NO: 318658 - DNA, 1413 bp, Artificial Sequence
  derived and/or modified sequence
atgttacaggttcgcacctatcttactgaaccaacagtgcgcgctgaattgatggagcaggtaccgcacattgctctgttttgtcaagagaatcgcccatccatcccatacgcattttccaaattcttgctacccatcgtggttagatacctggccgaccagaacaaccaggttcggaagacttcacaggccgcactgctggcactgctggaacaggagctgatcgaaagattcgacgtggaaacaaaagtgtgtccagtgctgatcgaactgactgcgccagacagcaatgatgatgtgaaaaccgaagccgtggctatcatgtgcaagatggcgcctatggtcggcaaggacatcacagagaggctgatcttacctaggttctgcgaaatgtgctgtgattgtagaatgtttcatgtgcggaaagtctgtgcagcgaactttggggatatctgttctgtagtgggccagcaggccaccgaggagatgctcctgcccagattcttccaactttgctcagataacgtgtggggggtccggaaagcctgcgcagaatgtttcatggcagtgtcatgcgcgacctgtcaggagataagaaggacaaagttgtccgccctgttcatcaatttaatttccgacccatcccggtgggttcgtcaggctgccttccagtctctgggaccttttatatctacgtttgctaatcctagttcgagcggacagtattttaaggaggagtcaaaatcgagtgaagaaatgtctgtggaaaacaagaacagaacccgggaccaagaggcccctgaagacgtccaggtacgtcccgaagatacccctagcgatctgagcgtgtccaactcaagcgtcatcttggaaaataccatggaggaccacgctgccgaagcctctgggaaacctttaggggagatctctgtgcctttggactcatcgctattgtgtacattgtcttccgagtctcatcaggaggctgccagcaacgaaaatgacaagaagcccggaaattacaaaagcatgctcagacccgaagttggcacaacttctcaggatagtgctctgctggatcaagagctgtataatagctttcatttctggcgaacacccttgccggaaatcgatctggatatcgagctggagcaaaactcaggtggtaagccgagccctgaggggcctgaagaagagtccgagggaccagttccttcttcccccaacataacaatggcaacccgcaaagaactagaggagatgatcgaaaatctggaacctcatatcgatgatcctgacgtcaaggctcaggtagaggtccttagcgccgcattgagggcttcttcgctggatgcccatgaagaaaccatctcaatcaagagagaggtgatctgcaaaatgaattggatctag

SEQ ID NO: 318659 - DNA, 1866 bp, Artificial Sequence
  derived and/or modified sequence
ggaggagggggcgaccacaagatggcggacctctcgctgcttcaggaggacctgcaggaggacgcagacggatccctggactttgtctcacaagatgaaatgttgacgcccctggggagattggacaagtatgctgcaagtgagaacatatttaacagaaccaactgtgagagcggagctgatggaacaggtgcctcacatcgcactgttttgtcaagaaaaccggccttcaataccatatgctttttcaaaattcttactacctattgtggttagataccttgcagatcagaataatcaggtgaggaaaacaagtcaggcagctttgctggctctgttggagcaggagctcattgaacgatttgatgtggagaccaaagtgtgccctgtcctcatagagctgacagccccagatagcaatgatgatgtgaaaacagaagctgtggctataatgtgcaaaatggctcccatggttgggaaggatattacagagcgtcttatcctccctaggttttgtgagatgtgctgcgattgcagaatgtttcacgttcgaaaggtctgtgctgccaattttggagatatttgcagtgtagttggccagcaagctactgaagaaatgttgctgcccagatttttccagctttgttctgataatgtatggggagtccgaaaggcttgtgctgaatgcttcatggcggtttcatgtgcaacatgtcaagaaatccgacggaccaaattatcagcactttttattaatttgatcagtgatccttcacgttgggttcgccaagcagcttttcagtctctgggacctttcatatctacttttgctaatccatctagctcaggccagtattttaaagaagaaagcaaaagttcagaagagatgtcagtagaaaacaaaaataggaccagagatcaagaagccccagaggatgtacaagtcaggccagaggatactccttcagatctcagtgttagtaattccagtgtcatactggaaaacacgatggaagaccatgctgctgaggcatccgggaagcctctaggtgaaattagtgttccactggacagctctttactttgtactttgtcctcagaatctcaccaggaagcagctagtaatgagaatgataaaaaacctggtaactacaaatctatgttacgaccagaggttggcaccacttcacaagattcagctctcttagatcaggaattgtataactccttccatttctggaggactcctcttcctgaaatagatctagacatagagcttgaacagaactctgggggaaaacccagcccagagggaccagaggaagaatctgagggccctgtgcccagttctccaaacatcaccatggccaccagaaaggaactggaagaaatgatagaaaatctagagccccacattgatgatccagatgttaaagcacaagtggaagtgctgtccgctgcactacgtgcttccagcctggatgcacatgaagagaccatcagtataaaaagagaagtgatttgcaagatgaactggatataaatgagctaccaaattgtaaaataaatcaagaagattctgtgcctttaatcagcgatgctgttgagaggtgctttgtttctgatcggaccatttcactgcagcaagcaacacagtattctgagcagaagatcgggacttgaggccatgttgcggagggccagtgacattatctggactctggagtgtgaggaatatggactccactcttcactatattcacagcgattcagacttgagcaacaatagcagttttagccctgatgaggaaaggagaactaaagtacaagatgttgtacctcaggcgttgttagatcagtatttat

SEQ ID NO: 318660 - DNA, 1413 bp, Artificial Sequence
  derived and/or modified sequence
atgctgcaggtgagaacctacctgaccgagcccaccgtgagagccgagctgatggagcaggtgccccacatcgccctgttctgccaggagaacagacccagcatcccctacgccttcagcaagttcctgctgcccatcgtggtgagatacctggccgaccagaacaaccaggtgagaaagaccagccaggccgccctgctggccctgctggagcaggagctgatcgagagattcgacgtggagaccaaggtgtgccccgtgctgatcgagctgaccgcccccgacagcaacgacgacgtgaagaccgaggccgtggccatcatgtgcaagatggcccccatggtgggcaaggacatcaccgagagactgatcctgcccagattctgcgagatgtgctgcgactgcagaatgttccacgtgagaaaggtgtgcgccgccaacttcggcgacatctgcagcgtggtgggccagcaggccaccgaggagatgctgctgcccagattcttccagctgtgcagcgacaacgtgtggggcgtgagaaaggcctgcgccgagtgcttcatggccgtgagctgcgccacctgccaggagatcagaagaaccaagctgagcgccctgttcatcaacctgatcagcgaccccagcagatgggtgagacaggccgccttccagagcctgggccccttcatcagcaccttcgccaaccccagcagcagcggccagtacttcaaggaggagagcaagagcagcgaggagatgagcgtggagaacaagaacagaaccagagaccaggaggcccccgaggacgtgcaggtgagacccgaggacacccccagcgacctgagcgtgagcaacagcagcgtgatcctggagaacaccatggaggaccacgccgccgaggccagcggcaagcccctgggcgagatcagcgtgcccctggacagcagcctgctgtgcaccctgagcagcgagagccaccaggaggccgccagcaacgagaacgacaagaagcccggcaactacaagagcatgctgagacccgaggtgggcaccaccagccaggacagcgccctgctggaccaggagctgtacaacagcttccacttctggagaacccccctgcccgagatcgacctggacatcgagctggagcagaacagcggcggcaagcccagccccgagggccccgaggaggagagcgagggccccgtgcccagcagccccaacatcaccatggccaccagaaaggagctggaggagatgatcgagaacctggagccccacatcgacgaccccgacgtgaaggcccaggtggaggtgctgagcgccgccctgagagccagcagcctggacgcccacgaggagaccatcagcatcaagagagaggtgatctgcaagatgaactggatctag

SEQ ID NO: 318661 - protein, 701 aa, Artificial Sequence
  derived and/or modified sequence
MMSIQEKSKENSSKVTKKSDDKNSETEIQDSQKNLAKKSGPKETIKSQAKSSSESKINQPELETRMSTRSSKAASNDKATKSINKNTVTVRGYSQESTKKKLSQKKLVHENPKANEQLNRRSQRLQQLTEVSRRSLRSREIQGQVQAVKQSLPPTKKEQCSSTQSKSNKTSQKHVKRKVLEVKSDSKEDENLVINEVINSPKGKKRKVEHQTACACSSQCTQGSEKCPQKTTRRDETKPVPVTSEVKRSKMATSVVPKKNEMKKSVHTQVNTNTTLPKSPQPSVPEQSDNELEQAGKSKRGSILQLCEEIAGEIESDNVEVKKESSQMESVKEEKPTEIKLEETSVERQILHQKETNQDVQCNRFFPSRKTKPVKCILNGINSSAKKNSNWTKIKLSKFNSVQHNKLDSQVSPKLGLLRTSFSPPALEMHHPVTQSTFLGTKLHDRNITCQQEKMKEINSEEVKINDITVEINKTTERAPENCHLANEIKPSDPPLDNQMKHSFDSASNKNFSQCLESKLENSPVENVTAASTLLSQAKIDTGENKFPGSAPQQHSILSNQTSKSSDNRETPRNHSLPKCNSHLEITIPKDLKLKEAEKTDEKQLIIDAGQKRFGAVSCNVCGMLYTASNPEDETQHLLFHNQFISAVKYVVLLINHHECGSEEEFITSLFLSMFNFRYTQRSFSFPIRFLEGLEERKNSG

SEQ ID NO: 318662 - DNA, 2106 bp, Artificial Sequence
  derived and/or modified sequence
atgatgtccatacaagagaaatctaaggaaaactcaagcaaagtgaccaaaaaaagcgacgacaagaactctgagacagagatccaggactctcaaaagaacctggcaaagaagtctgggcctaaagaaactattaagtctcaagctaaaagtagttccgaatccaagataaaccaacctgagttggagacgcgaatgagtacacggtcaagcaaagctgcgagcaacgacaaggccactaagtccatcaataagaataccgtcacagtgaggggttattctcaggagagtaccaaaaagaaactgtctcaaaagaaactcgtgcacgagaatccaaaagcgaatgagcagctgaacaggcgcagccagaggttacagcaactgacagaggttagccgccgaagcctgcggagtcgtgaaattcaaggccaggtccaagctgtcaaacagtcgctacctcccactaagaaagaacagtgtagtagcacccagtccaaaagcaacaagacatctcagaaacatgtgaagcgcaaggtcctcgaagtgaagtcagattcaaaggaagacgagaatctagtcatcaacgaggtcataaactcccctaagggcaagaaacggaaagtggagcatcagaccgcatgtgcgtgttctagtcaatgcacccagggatctgaaaagtgcccgcagaaaacaacacggcgggacgaaactaaaccagttccagtgacatccgaggtgaagagaagcaagatggccacctctgtggtgccaaagaaaaacgagatgaagaagagtgtgcatacccaagtcaatacaaacaccacgttaccaaaatctccacagccgagtgtgcctgaacagtcagacaatgaattggagcaggcagggaagtcgaaaagaggatctatccttcagttatgcgaggagattgcaggagaaattgaatctgacaacgtggaggtgaaaaaggaaagcagtcagatggaatctgtgaaggaggagaagccaaccgagatcaaattagaggaaacatctgtggaaaggcagatcctacaccagaaggagaccaatcaggatgtccagtgtaaccggttcttccccagccggaagactaagcccgtgaaatgcatcctgaatggaatcaattcttccgccaaaaaaaacagcaattggaccaagattaaactgtcaaagttcaattcagttcaacataacaagctggactcccaggtgagcccgaaactaggcttgctgagaacgtctttttcaccgcctgccttggaaatgcaccacccagtgacccaatccactttcctgggaaccaaattgcacgatagaaatatcacctgtcagcaggaaaaaatgaaggaaatcaatagcgaggaggtcaagatcaacgacatcacagtcgagatcaataaaactaccgaaagagccccggagaactgtcacttggctaacgagatcaagccttcagatccgccacttgataatcaaatgaaacacagctttgactccgcgtccaacaaaaatttttcccagtgtcttgagagcaagttagagaactcaccagtggaaaatgttaccgccgcctccacattactgagtcaggccaagattgataccggtgagaacaagttccccggctcggctcctcaacagcacagcatactgagtaaccagacatcaaaaagctccgacaatcgcgagacacctcgtaatcactccttgcctaagtgcaactcacacctggagatcaccattccaaaggacctaaagctgaaggaagctgaaaaaaccgatgaaaagcaattgatcatcgatgccggccagaagaggttcggcgccgtatcctgcaatgtatgtgggatgctgtataccgcctctaatcctgaagatgaaacccagcacctactttttcacaaccaatttattagcgcagtgaaatatgtggtcctgctgattaatcaccatgaatgtgggagtgaggaggagtttattacaagtctgtttctgagcatgttcaattttaggtatacccagcggtctttttccttcccaattaggtttcttgaaggtctggaagagcggaagaattctggctag

SEQ ID NO: 318663 - DNA, 2106 bp, Artificial Sequence
  derived and/or modified sequence
atgatgagcatccaggagaagagcaaggagaacagcagcaaggtgaccaagaagagtgatgacaagaacagcgagacagagatccaggacagccagaagaacctggccaagaagagcggccccaaggagaccatcaagagccaggccaagagcagcagcgagagcaagatcaaccagcctgagctggagaccaggatgagcaccaggagcagcaaggccgccagcaatgacaaggccaccaagagcatcaacaagaacacagtgacagtgcggggctacagccaggagagcaccaagaagaagctgagccagaagaagctggtgcatgagaaccccaaggccaatgagcagctgaacagaagaagccagaggctgcagcagctgacagaggtgtccagaagaagcctgcggagccgggagatccagggccaggtgcaggccgtgaagcagagcctgccccccaccaagaaggagcagtgcagcagcacccagagcaagagcaacaagaccagccagaagcacgtgaagaggaaggtgctggaggtgaagagtgacagcaaggaggatgagaacctggtgatcaatgaagtcatcaacagccccaagggcaagaagaggaaggtggagcaccagacagcctgtgcctgcagcagccagtgcacccagggcagcgagaagtgcccccagaagaccaccaggagagatgagaccaagcctgtgcctgtgaccagcgaggtgaagaggagcaagatggccacctctgtggtgcccaagaagaatgagatgaagaagtctgtgcacacccaggtgaacaccaacaccaccctgcccaagagcccccagcccagcgtgcctgagcagagcgacaatgagctggagcaggccggcaagagcaagaggggcagcatcctgcagctgtgtgaggagattgctggggagattgaaagtgacaacgtggaggtgaagaaggagagcagccagatggagagcgtgaaggaggagaagcccacagagatcaagctggaggagacctctgtggagcggcagatcctgcaccagaaggagaccaaccaggatgtgcagtgcaaccgcttcttccccagcaggaagaccaagcctgtgaagtgcatcctgaatggcatcaacagcagcgccaagaagaacagcaactggaccaagatcaagctgagcaagttcaacagcgtgcagcacaacaagctggacagccaggtgagccccaagctgggcctgctgcggaccagcttcagccccccagccctggagatgcaccaccctgtgacccagagcaccttcctgggcaccaagctgcatgacaggaacatcacctgccagcaggagaagatgaaggagatcaacagcgaggaggtgaagatcaatgacatcaccgtggagatcaacaagaccacagagcgggcccctgagaactgccacctggccaatgagatcaagcccagcgacccccccctggacaaccagatgaagcacagctttgacagcgccagcaacaagaacttcagccagtgcctggagagcaagctggagaacagccctgtggagaatgtgacagctgccagcaccctgctgagccaggccaagattgacaccggggagaacaagtttcctggcagcgccccccagcagcacagcatcctgagcaaccagaccagcaagagcagtgacaaccgggagaccccaagaaaccacagcctgcccaagtgcaacagccacctggagatcaccatccccaaggacctgaagctgaaggaggccgagaagacagatgagaagcagctgatcattgatgctggccagaagagatttggagctgtgtcctgcaatgtgtgtggcatgctgtacacagccagcaacccagaagatgagacccagcacctgctcttccacaaccagttcatctctgctgtgaagtatgtggtgctgctgatcaaccaccatgaatgtggcagcgaggaggagttcatcaccagcctcttcctgtccatgttcaacttccgctacacccagaggagcttctccttccccatccgcttcctggagggcctggaggagaggaagaacagcggctag

SEQ ID NO: 318664 - DNA, 2106 bp, Artificial Sequence
  derived and/or modified sequence
atgatgagcatccaggagaagagcaaggagaacagcagcaaggtgaccaagaaaagtgatgataaaaactctgagactgaaatccaagattctcagaagaacctggccaaaaagtctggccctaaggaaacaattaaaagccaagccaaaagttctagcgagagtaagatcaatcaaccagagctggaaaccagaatgagcactcgaagttcaaaagctgcaagtaacgataaggcaacaaagagtatcaataagaacacggtgaccgtcaggggctactctcaggaatccactaagaaaaagcttagtcagaagaaactcgtccatgagaaccctaaggctaatgaacagcttaaccggaggtctcaaaggttacaacagttgacagaggtgtcgaggagatctctgagatcacgcgagattcaggggcaggtgcaggccgttaagcagagcctgccaccgacaaagaaggagcagtgttcttccacccagagtaaatccaacaagacatcacagaaacatgttaaacgcaaagtgctggaggtcaaatcagactctaaggaggatgaaaatctggtcattaatgaagtcattaacagccccaagggtaaaaaaagaaaggtcgagcaccagacagcttgcgcctgttcatctcagtgtactcaaggtagcgagaaatgcccacagaaaaccacccgcagagacgaaactaagcccgtcccagttacttcggaggtgaagcgctccaaaatggccaccagcgttgtgcctaaaaagaatgaaatgaaaaagagcgtccacacccaggtcaacacaaacacaaccctaccgaaatctcctcagcctagtgtgcccgagcagagcgacaacgagctcgagcaggcagggaagtccaaaagggggtcgatactccagctgtgcgaagaaatcgctggggaaatcgagtcagataatgtggaagtcaagaaggagtcttcgcagatggaaagcgtcaaagaggagaagccgaccgaaataaagctggaggagacctccgtggaacgccagatactgcaccagaaagaaacaaatcaagatgtacagtgcaatcgtttctttccatcacggaagacgaaaccagtgaagtgtatcctgaacgggatcaattctagtgctaaaaaaaactctaactggaccaagatcaaactgagcaaattcaacagcgtgcagcacaataagttagatagccaggtgtctcctaaacttggacttctgagaacctccttttccccacctgccctagagatgcatcatcctgtcactcagtcaaccttcttggggaccaagctgcacgatcgaaacatcacatgtcagcaggaaaagatgaaagagattaattccgaggaggttaaaattaatgacatcaccgttgagatcaataaaacgacggaacgcgctcctgaaaattgccacctggctaatgagatcaaacccagcgacccaccattagacaaccagatgaagcatagcttcgattcagccagcaataagaattttagtcagtgtcttgaatctaaactcgagaacagtcccgtcgagaatgtaaccgctgctagtaccttgcttagtcaggctaagattgacaccggggagaataagtttcccggcagtgctccgcagcagcattctatcttgagcaaccagacctccaaatcctctgataaccgtgagactccacgcaaccatagtctcccgaaatgtaattcccacctggagatcactatcccgaaagacttaaaactgaaggaggccgaaaaaaccgatgagaaacagcttattatcgatgcgggccaaaagcggttcggagctgtgagttgcaacgtgtgcggcatgctttataccgcttcaaatcctgaagacgagacacagcacctgttgtttcacaaccagtttatctctgcggtaaaatacgtcgtcctgctgattaaccaccacgaatgcggctcagaagaagagtttattacgtccctcttcctgtccatgtttaactttcgctatacacaaaggtcattctcgtttccaataaggttcctagagggattggaagaaagaaagaactccgggtag

SEQ ID NO: 318665 - DNA, 2106 bp, Artificial Sequence
  derived and/or modified sequence
atgatgtccatccaggaaaaaagcaaggagaactcgagcaaggtgacaaaaaagtctgacgacaagaacagcgagaccgaaatccaggacagccaaaagaatcttgcaaaaaaatctggtccaaaagagaccatcaagagccaagccaagtccagttcggaaagcaaaatcaaccagcccgagctggaaactcggatgagcacacggtcatctaaggctgcatccaacgacaaggcaaccaaatcaatcaataaaaataccgttacagtgagaggctactcgcaggaaagcaccaagaaaaaactttcacagaaaaagctggtgcacgaaaaccccaaagcaaatgagcagctgaacaggaggagccagcgtctccagcagctgactgaggtgtcacggagaagcttgcgaagtagggaaattcagggccaggtccaggccgtgaaacagagcctgcctcccactaaaaaggaacaatgtagctctacacaatcaaagagcaacaagacatcccaaaagcacgttaaacggaaagtgctggaggttaaatccgactctaaagaggatgaaaatctggttataaacgaagttattaatagccctaaaggaaagaagcggaaggtagagcatcagaccgcttgcgcttgtagcagccagtgtacccagggcagcgaaaaatgtccccagaaaacaacccggagagatgagacaaagccggtccccgtgacatctgaggtgaaaagaagtaagatggccacctccgtagttccaaaaaagaacgagatgaagaaaagcgtgcatacccaggtgaacacaaatacaacattacccaagtctcctcagccctcagtgcctgagcagtccgacaacgagctcgagcaagctgggaagagcaagcgcggttctatcctccagttatgcgaggagatcgccggagaaatcgagagcgacaatgtggaagtgaagaaggagtccagccagatggagtcagtgaaggaggaaaaacctacagagataaaattggaggagacttccgtggaacgtcagattcttcatcaaaaagaaaccaatcaggatgttcaatgtaatcggttcttcccgtctagaaaaaccaagcccgtcaagtgtatcctcaacggtattaacagctctgccaaaaaaaacagcaactggacaaagatcaaactctcaaaattcaacagtgttcagcataacaaacttgactcacaggtaagcccaaagctgggcttgctgaggaccagcttttctccgccagccttagagatgcaccacccggttacccagtctacctttctgggaactaagcttcatgatcgcaatattacctgtcagcaagaaaagatgaaagagatcaactccgaagaggtcaagatcaatgacatcacggtggagatcaataagaccactgagcgagcccctgaaaattgccatttagctaatgagattaagccgtcagatccgcctctggataaccaaatgaaacactcgttcgatagcgcgagcaacaagaactttagccaatgtcttgaaagcaagctggagaattcccctgtggaaaatgttacagccgcaagcacgctcctgagccaagccaaaatcgacaccggagagaataagtttcctggttcagccccacaacagcactctatcctgtctaaccagacctctaagtccagcgataatcgcgaaacacctcggaatcacagcctccccaagtgcaactcacacctggaaatcactattcccaaagaccttaagcttaaagaggctgaaaagacagacgaaaagcaactgatcatcgatgccggacagaaaagatttggtgccgtgtcatgtaatgtctgtggcatgttgtacacagcctctaatccagaggatgagacccaacacctattatttcacaaccagttcatatctgcggtaaagtatgtagtgctcctgatcaaccatcacgaatgtggcagcgaggaagaattcataactagcctgttcctcagtatgttcaattttcgctacactcaaagaagcttctcctttcctatccggttcctagaaggactagaagagcgcaagaactccggttag

SEQ ID NO: 318666 - DNA, 2106 bp, Artificial Sequence
  derived and/or modified sequence
atgatgagcatccaggagaagagcaaggagaacagcagcaaggtgaccaagaagagcgacgacaagaacagcgagaccgagatccaggacagccagaagaacctggccaagaagagcggccccaaggagaccatcaagagccaggccaagagcagcagcgagagcaagatcaaccagcccgagctggagaccagaatgagcaccagaagcagcaaggccgccagcaacgacaaggccaccaagagcatcaacaagaacaccgtgaccgtgagaggctacagccaggagagcaccaagaagaagctgagccagaagaagctggtgcacgagaaccccaaggccaacgagcagctgaacagaagaagccagagactgcagcagctgaccgaggtgagcagaagaagcctgagaagcagagagatccagggccaggtgcaggccgtgaagcagagcctgccccccaccaagaaggagcagtgcagcagcacccagagcaagagcaacaagaccagccagaagcacgtgaagagaaaggtgctggaggtgaagagcgacagcaaggaggacgagaacctggtgatcaacgaggtgatcaacagccccaagggcaagaagagaaaggtggagcaccagaccgcctgcgcctgcagcagccagtgcacccagggcagcgagaagtgcccccagaagaccaccagaagagacgagaccaagcccgtgcccgtgaccagcgaggtgaagagaagcaagatggccaccagcgtggtgcccaagaagaacgagatgaagaagagcgtgcacacccaggtgaacaccaacaccaccctgcccaagagcccccagcccagcgtgcccgagcagagcgacaacgagctggagcaggccggcaagagcaagagaggcagcatcctgcagctgtgcgaggagatcgccggcgagatcgagagcgacaacgtggaggtgaagaaggagagcagccagatggagagcgtgaaggaggagaagcccaccgagatcaagctggaggagaccagcgtggagagacagatcctgcaccagaaggagaccaaccaggacgtgcagtgcaacagattcttccccagcagaaagaccaagcccgtgaagtgcatcctgaacggcatcaacagcagcgccaagaagaacagcaactggaccaagatcaagctgagcaagttcaacagcgtgcagcacaacaagctggacagccaggtgagccccaagctgggcctgctgagaaccagcttcagcccccccgccctggagatgcaccaccccgtgacccagagcaccttcctgggcaccaagctgcacgacagaaacatcacctgccagcaggagaagatgaaggagatcaacagcgaggaggtgaagatcaacgacatcaccgtggagatcaacaagaccaccgagagagcccccgagaactgccacctggccaacgagatcaagcccagcgacccccccctggacaaccagatgaagcacagcttcgacagcgccagcaacaagaacttcagccagtgcctggagagcaagctggagaacagccccgtggagaacgtgaccgccgccagcaccctgctgagccaggccaagatcgacaccggcgagaacaagttccccggcagcgccccccagcagcacagcatcctgagcaaccagaccagcaagagcagcgacaacagagagacccccagaaaccacagcctgcccaagtgcaacagccacctggagatcaccatccccaaggacctgaagctgaaggaggccgagaagaccgacgagaagcagctgatcatcgacgccggccagaagagattcggcgccgtgagctgcaacgtgtgcggcatgctgtacaccgccagcaaccccgaggacgagacccagcacctgctgttccacaaccagttcatcagcgccgtgaagtacgtggtgctgctgatcaaccaccacgagtgcggcagcgaggaggagttcatcaccagcctgttcctgagcatgttcaacttcagatacacccagagaagcttcagcttccccatcagattcctggagggcctggaggagagaaagaacagcggctag

SEQ ID NO: 318667 - DNA, 4773 bp, Artificial Sequence
  derived and/or modified sequence
agtgagcgtggcggccatcttcgtcttctgggcacgtcagctgagccggttagggctgaagaggagcgttgcgcaagcgcacccaagacggtcacaggtaactcccatctgacgagcgaggcgtcgccgtcgtcgccggaagtttggtgtttgcgccgcgggggaggcggcggccgcagcagaagcagctgagtgtctcctgatacccggatgtgaggcgatccgctggcgctagtctgaccctccgccaggcaaaaggaagattgtctttggctatagagtttttttttttaaagattactaaacatacaggaagtgataagaagtatcattcatcagaagcatcattcatcaatcaacttgaagaaaaaggtgatatattatttctttaaggtgctgtgtgatgtgttaagagcatattagaaggaatggttttgtctaattttcttcatgagttatggtggctgagacatcgagtctatattttggggcaaaaactaaacggcagcacaaaaggaaatctatattaatagaatattttgttgaacaaaggaggttagataagaactgcaaaccaacagactcagcaaacaaggaaagaaacgtgttagccataagacatgtttcaagtgaatcgaagtccaataactgtagacttcagaagaaaaaagttttcaaaaattttatcaaaacaggtcactgataaataactcctccagtaatagagctaggcctgaaaccaaaattaattaaaaaattaacaaaacagattgaacctgaattaaatttcttttgataaaaaaacttattaaaaataatcaaaattttcctcaaatttttattaccttgtccaaagtaaagcaagtgtcttttagcattcatgccagcttttctcatgttctaggaatgacagaaaccttacttgaagcaaactagtatttttgttgaaaatgtatatcagcatcagttaaagttgatttttcagacctgctcctcagtaataatactagctagtcagcattcacgcctaccaggacacaaaaatcctcttcaaaactactcagaaaagaaagtcattactcaggaatgatgtccattcaggagaaatcaaaagagaattcctccaaagttactaaaaaaagtgacgataagaattcagaaacagaaattcaggattctcaaaagaatctagcaaaaaaatcaggtccaaaggagactataaaatcacaggctaaatcttccagtgaaagtaaaataaatcagccagaattggaaacacgcatgagtacaaggtcatcaaaggcagcatctaatgataaagctactaaatccattaataaaaatacggtgactgtgaggggatattcacaagaatctacaaaaaagaaattatctcagaaaaaattagtacatgaaaaccctaaagcaaatgaacagcttaaccggagatcacaaaggctacaacaattaacagaggtttcaagaaggtcgttacgcagtagagaaattcagggtcaagttcaagcagttaaacagagtttgccaccaactaaaaaagagcagtgtagcagtactcagagtaaatctaataaaacaagtcaaaaacatgtgaagagaaaagtactggaagtaaagtctgactctaaagaagatgaaaatctagtaattaatgaagtaataaattctcccaaagggaaaaaacgcaaggtagaacatcagacagcttgtgcttgtagttctcaatgcacgcaaggatctgaaaagtgtcctcagaagactactagaagagacgaaacgaaacctgtgcctgtaacttctgaggtgaaaagatcaaaaatggctacttcagtggtcccgaaaaagaatgagatgaagaagtcggttcatacacaagtgaatactaacacaacactcccaaaaagtccacagccatcagtgcctgaacaaagtgataatgagctggagcaagcaggaaagagcaaacgaggtagtattctccagctctgtgaagaaattgctggtgaaattgagtcagataatgtagaggtaaaaaaggaatcttcacaaatggaaagtgtaaaggaagaaaagcccacagaaataaaattggaagagaccagtgttgaaagacaaatacttcatcagaaggaaacaaatcaggatgtgcaatgtaatcgttttttcccaagtagaaaaacaaagcctgtgaaatgtatactaaatggaataaacagctcagccaagaagaactccaactggactaaaattaaactctcaaaatttaactctgtgcagcacaataagttggactctcaagtttcccctaaattaggcttattacgaaccagtttttcaccaccagctttagaaatgcatcatccagtgactcaaagtacgtttttagggacaaagctacatgatagaaatataacttgccagcaggaaaaaatgaaagaaattaattctgaagaagtgaaaattaatgatattacagtagaaattaataaaaccacagaaagggctcctgaaaattgtcatttggccaatgagataaaaccttctgacccaccattggataatcagatgaaacattcttttgattcagcatcaaataagaatttcagccaatgtttggaatccaagctagaaaacagtccagtggaaaatgttactgctgcttcgactctgctcagtcaagcaaaaattgatacaggagagaataaatttccaggttcagctccccaacagcatagtattctcagtaaccagacatctaaaagcagtgataacagggagacaccacgaaatcattctttgcctaagtgtaattcccatttggagataacaattccaaaggacttgaaactaaaagaagcagagaaaactgatgaaaaacagttgattatagatgcaggacaaaaaagatttggagcagtttcttgtaatgtttgtggaatgctgtatacagcttcaaatccagaagatgaaacacagcatctgcttttccacaaccagtttataagtgctgttaaatatgtggttctgctcattaatcaccacgagtgtggatctgaagaagagtttattacctctctttttttgagtatgtttaacttcagatacacacaacgtagcttctccttccctattagattcttagaagggctggaagaaagaaagaattctggctgaataccctgatggcaggataataatggttcttcctgaagacccaaagtatgccctgaaaaaggttgacgagattagagagatggttgacaatgatttaggttttcaacaggctccactaatgtgctattccagaactaaaacacttctcttcatttccaatgacaaaaaagtagttggctgcctaattgcggaacatatccaatggggctacagagttatagaagagaaacttccagttatcaggtcagaagaagaaaaagtcagatttgaaaggcaaaaagcctggtgctgctcaacattaccagagcctgcaatctgcgggatcagtcgaatatgggtattcagcatgatgcgtcggaagaaaattgcttctcgcatgattgaatgcctaaggagtaactttatatatggctcatatttgagcaaagaagaaattgctttctcagatcccactcctgatggaaagctgtttgcaacacagtactgtggcactggtcaatttctggtatataattttattaatggacagaatagcacgtaaaacaaattcttgcctacaccactagaagacatctattgaagagaatggattggttgctgactttaaccaggaactagggccatttttattacaatgaactcaggactggcaacaaccatatggttgttccattttcataaaattggaaacaatgcagtaatagcttattgttttgttttttaaagaagatattttattatcttttacagaaatttatgattgatgtattttatctatagttatttagacatgtttacatgcagcagataattgttcatagtggactgaaaactaatgcaaggactatggtctcagtgataagtatattttgaagttcttaatatggaaatataccagtgtagcttggtactgtatttttttatattgatctgctgataccagtgataggcttaaagattgtattttcacagagtggaaaccaatttttttagttattgttcaaggagggtgcaatattaagtgttttggaatttgaagctaatttttaaaaggcctgaactatactttgaagaaacccctatagaaaaggaaagctccagctaaataggaagaattagaatattgagcttttttttcctgatttttctctttcctatctttgatggaaggaggaagtagaaagtggtaaagaattgaggctttccttcttggagagctgtaaatgacaagcattaggaaaggtaccctcctagattcattattctttcattctggtttcacttttaaaataaatggcaacttggcacacctaggctgttaacaaatctcaaagaggtttataaaaacgtatagaatacttggaagcaaagtatggatgactcggtatctgctttgttattcctcagaaatactgcactgagtatatgccctcattactggacttcattttgatacttgtctatccttcatagtgccctctacttttaaagggtttatatgttgaaaaactgctgtggccttttatgacctgtatataatgtagaataaaaataataaaatacttgatagctttttctaag

SEQ ID NO: 318668 - DNA, 303 bp, Artificial Sequence
  derived and/or modified sequence
atgaatacggaagctgaacaacaactccttcaccacgcgcggaacgggaatgccgaggaggtgaggcaattgttagaaacgatggctcgcaatgaagtgattgccgacatcaactgcaagggcagatcaaagtcaaatctgggatggactcctctgcacctggcgtgctacttcggacatcgccaggttgtgcaagacctgctcaaggccggcgctgaagtcaacgtcctgaatgatatgggagacacccctctgcaccgcgccgctttcaccgggcgcaaaatctgttcccaaggcagttag

SEQ ID NO: 318669 - DNA, 303 bp, Artificial Sequence
  derived and/or modified sequence
atgaacacagaagctgagcagcagctgctgcaccacgccagaaatggaaatgctgaggaggtgcggcagctgctggagaccatggccagaaatgaggtgattgctgacatcaactgcaagggccgcagcaagagcaacctgggctggacccccctgcacctggcctgctacttcggccaccggcaggtggtgcaggacctgctgaaggccggggctgaggtgaatgtgctgaatgacatgggagacacccccctgcaccgggccgccttcaccggcaggaagatctgcagccagggcagctag

SEQ ID NO: 318670 - DNA, 303 bp, Artificial Sequence
  derived and/or modified sequence
atgaacaccgaggccgagcagcagctgctgcaccacgcccggaacggcaatgccgaagaggtgcgccagctcctcgagactatggcccgcaatgaggtgatcgccgacattaattgtaaaggacggagtaagagcaacctcggttggacccccttacacttggcctgctattttggccatcgacaggttgtccaagatctgctgaaagcaggggcagaggtcaatgttcttaatgacatgggggacacacccctgcaccgtgccgctttcactgggcgcaagatctgctcccaggggagctag

SEQ ID NO: 318671 - DNA, 1886 bp, Artificial Sequence
  derived and/or modified sequence
gcgggctcgagcgtcctcggggagtgccagccagagttggtgacgaccacttcctcgacgtggggcgggcggacgggaagcctggggtcgtggccaccgcctcgggagctctgggagcccgggtgaccgcgtaggtcagtttctcgcggctgtccacgcctggagttcgaggccggttcccgcgctgacgggttcccgccgggctgcgctcgggagaaatgaacacagaagcggagcaacagcttctccatcacgccagaaatggcaatgctgaagaagtaagacaactattagagaccatggcgaggaatgaagtgattgctgacattaattgcaaaggaagaagtaagtctaacttgggctggacacctctacatctggcatgctattttggacacagacaagtggtccaggatctgttgaaggctggtgcagaagtgaatgtgttgaatgacatgggagacacgccgcttcatcgagctgcctttacaggacgaaagatctgttctcagggaagctgagatggagatgagtgggcagcaggtttatggagtgctcgtggcatcacacctgtgcacgagggtggggaagaagtggacaggagtggacaagtcaagtagtgctgccggctcaagcgatgcctcagcctttctgctgtgtgcgaagctttgcagaggagatgatgcttcaaagttgtccctgttggggatgagcagccaggcctttatacactgggacagtcagtcatggatacgtggatactctggaaaccctcatccctggaggtctgagcccctggataccatgcccttcttaggctggagttgctgcccttgtccatttaccataaaaattggacaagagaataccaggacacacctgagtttctcatcgtatgctaaacctgttcttccacgtacatccccaatgtgtacagccctacttttttctgctgatcaagttcaattacttctgctaagatggtgactattcttgcctgctggtccttggatgcaaggaccccaatgttcaggcagcctttggtgccttctagcatacgaatcagagcattatctttaggtgtggaataagctgccccaaaacctgttgaagccaaccaggcactgtgctcccttctgttatgggaagtgcaagatgcagtaatttattcttctgaggaagtgtcttgtcattgcccagaccagtgaacttctaaaaatttactgacatggaaaagctcctgaattcttcctaagttttacctcccacccactggatcagatatgtcttaccaaggctttgaacatcctagcctcgtggagaagaagcctcttctcctggttctgttagcatgatgttatgaaaggaaattaaattttgggaccccaaactcattttgccaaagggaaaaatcaagctgagaactgggtcatgcaaacctgcctcccccttttggttcctaaataaggtggctacaagaggaaaagctacatgcctcccccatattttgctcacaaggaaattcctagtgagcaatgcaaagtgatagcttatctttacaggtgcagtcacccaggcccaccacacgcaaatgcatatctaattgttcccctgccccattttgtctgtgttatgtagaatgcagattccctacgtttttcttctgccccgtttatgtcatcttatgtaaaaacatgcagattcatggagccagacaaaggcatgactatcttttcccacccacccccttacctgaaaattgtgtacttctcaatatcctgccctttcccctttaaatttgaagccctcaaaaatcatcttcagagaaagatgtctgtctcctgggtgcgtgtccttaactttggcaaataaatctaaaatgattg

SEQ ID NO: 318672 - DNA, 303 bp, Artificial Sequence
  derived and/or modified sequence
atgaacactgaagctgagcagcaactgttacaccacgccaggaacggcaatgcagaagaagtgaggcagctcctggaaacaatggcacggaatgaggttatcgccgacatcaattgcaaaggtaggtcgaagagtaacctggggtggacacccttgcacctcgcgtgctatttcgggcaccgacaggtggtgcaagacttgcttaaagcaggagccgaagttaacgtactgaatgacatgggtgacacccccttacaccgcgcagccttcaccgggaggaaaatttgttcgcaggggtcctag

SEQ ID NO: 318673 - DNA, 303 bp, Artificial Sequence
  derived and/or modified sequence
atgaacaccgaggccgagcagcagctgctgcaccacgccagaaacggcaacgccgaggaggtgagacagctgctggagaccatggccagaaacgaggtgatcgccgacatcaactgcaagggcagaagcaagagcaacctgggctggacccccctgcacctggcctgctacttcggccacagacaggtggtgcaggacctgctgaaggccggcgccgaggtgaacgtgctgaacgacatgggcgacacccccctgcacagagccgccttcaccggcagaaagatctgcagccagggcagctag

SEQ ID NO: 318674 - protein, 1947 aa, Artificial Sequence
  derived and/or modified sequence
MMQLTLNTLFPVVSTPAITYIVTVFTGDVRGAGTKSKIYLVMYGARGNKNSGKIFLEGGVFDRGRTDIFHIELAVLLSPLSRVSVGHGNVGVNRGWFCEKVVILCPFTGIQQTFPCSNWLDEKKADGLIERQLYEMVSLRKKRLKKFPWSLWVWTTDLKKAGTNSPIFIQIYGQKGRTDEILLNPNNKWFKPGIIEKFRIELPDLGRFYKIRVWHDKRSSGSGWHLERMTLMNTLNKDKYNFNCNRWLDANEDDNEIVREMTAEGPTVRRIMGMARYHVTVCTGELEGAGTDANVYLCLFGDVGDTGERLLYNCRNNTDLFEKGNADEFTIESVTMRNVRRVRIRHDGKGSGSGWYLDRVLVREEGQPESDNVEFPCLRWLDKDKDDGQLVRELLPSDSSATLKNFRYHISLKTGDVSGASTDSRVYIKLYGDKSDTIKQVLLVSDNNLKDYFERGRVDEFTLETLNIGNINRLVIGHDSTGMHASWFLGSVQIRVPRQGKQYTFPANRWLDKNQADGRLEVELYPSEVVEIQKLVHYEVEIWTGDVGGAGTSARVYMQIYGEKGKTEVLFLSSRSKVFERASKDTFQLEAADVGEVYKLRLGHTGEGFGPSWFVDTVWLRHLVVREVDLTPEEEARKKKEKDKLRQLLKKERLKAKLQRKKKKRKGSDEEDEGEEEESSSSEESSSEEEEMEEEEEEEEFGPGMQEVIEQHKFEAHRWLARGKEDNELVVELVPAGKPGPERNTYEVQVVTGNVPKAGTDANVYLTIYGEEYGDTGERPLKKSDKSNKFEQGQTDTFTIYAIDLGALTKIRIRHDNTGNRAGWFLDRIDITDMNNEITYYFPCQRWLAVEEDDGQLSRELLPVDESYVLPQSEEGRGGGDNNPLDNLALEQKDKSTTFSVTIKTGVKKNAGTDANVFITLFGTQDDTGMTLLKSSKTNSDKFERDSIEIFTVETLDLGDLWKVRLGHDNTGKAPGWFVDWVEVDAPSLGKCMTFPCGRWLAKNEDDGSIIRDLFHAELQTRLYTPFVPYEITLYTSDVFAAGTDANIFIIIYGCDAVCTQQKYLCTNKREQKQFFERKSASRFIVELEDVGEIIEKIRIGHNNTGMNPGWHCSHVDIRRLLPDKDGAETLTFPCDRWLATSEDDKKTIRELVPYDIFTEKYMKDGSLRQVYKEVEEPLDIVLYSVQIFTGNIPGAGTDAKVYITIYGDLGDTGERYLGKSENRTNKFERGTADTFIIEAADLGVIYKIKLRHDNSKWCADWYVEKVEIWNDTNEDEFLFLCGRWLSLKKEDGRLERLFYEKEYTGDRSSNCSSPADFWEIALSSKMADVDISTVTGPMADYVQEGPIIPYYVSVTTGKHKDAATDSRAFIFLIGEDDERSKRIWLDYPRGKRGFSRGSVEEFYVAGLDVGIIKKIELGHDGASPESCWLVEELCLAVPTQGTKYMLNCNCWLAKDRGDGITSRVFDLLDAMVVNIGVKVLYEMTVWTGDVVGGGTDSNIFMTLYGINGSTEEMQLDKKKARFEREQNDTFIMEILDIAPFTKMRIRIDGLGSRPEWFLERILLKNMNTGDLTMFYYGDWLSQRKGKKTLVCEMCAVIDEEEMMEWTSYTVAVKTSDILGAGTDANVFIIIFGENGDSGTLALKQSANWNKFERNNTDTFNFPDMLSLGHLCKLRVWHDNKGIFPGWHLSYVDVKDNSRDETFHFQCDCWLSKSEGDGQTVRDFACANNKICDELEETTYEIVIETGNGGETRENVWLILEGRKNRSKEFLMENSSRQRAFRKGTTDTFEFDSIYLGDIASLCVGHLAREDRFIPKRELAWHVKTITITEMEYGNVYFFNCDCLIPLKRKRKYFKVFEVTKTTESFASKVQSLVPVKYEVIVTTGYEPGAGTDANVFVTIFGANGDTGKRELKQKMRNLFERGSTDRFFLETLELVVTRLGLAAECG

SEQ ID NO: 318675 - protein, 916 aa, Artificial Sequence
  derived and/or modified sequence
MQRPVVKLYATDGRRVPSLQAVILSSGAVVAAGREPFKPGNYDIQKYLLPARLPGISQRVYPKGNAKSESRKSSNWKVFIITSDLPDAGTSSQIYIILYGQHRSSAPIYLYGTDGARFQVGHEDIFTITVGDIGALFKIRIGHTNSGSSPSWHCKEIQLHNMNSGKQFYVPVQRWLARDQEDGEICREFPLLSKGQPVLPVTIYEVNVATGELWNAGTVANVYISIHGEKGDTGSRQLFRSKSSFNFLRGQTDTFFLEAVHLGDLCKIVIGHDGLGPGNGWFLDDVVIKDPTTNYEYAFFCHRWLDQGEDDCKIVRELYARDNSIFSARQKLELKRKETWTAESWKFTKGNTLQFYNKLTGGFVRLHPDGTVDAIGEKTDKYGVFDVIFNKRNICIFQSHEMRHLSLALDNGIVTGMVSGEATTELRVLYQPNRCALLESALVPGHTVVFDRHGKIADASSAGYANLSKEFVIFVKGVFLNSAVVLLATSLCQALCLQPDGSCTGVGSQSEKSYWKVHKISSGICMFESVKNAQMYLRIKDGRCDGTGTGDVDCHFKIKKNLKNASISLESTKSPGLFVGLQSDGQAKPMIYTKDENVCFYPQVIQFGRENPMGMSATPSQEEEKIHESKKQKKIPPESEARSPLPSSTAKEIRHFQSSETLLSEDEWKVLVLTGNTGTQANVTLWVYGDKGVTGPISLRKDSSEQLFLPGHEDEFQVEIRNTGNIYKIRIGHDGTSEQPEWNLQRVTMQHMKSKKILDFAANVWLSRIQADGDVVCELPVVKGGQAIFPLVRYQVDVYTGQLKHAETESEVFLCLFGERGDSGLRQLYKSNMQVKFQRGQIDKFQVAAVSLGKLQKVLLRCEASDKSQYWYCEQVIVREPGTTSESIFTCQRWLPFMSQGIIHSEIELYLQGEDY

SEQ ID NO: 318676 - protein, 512 aa, Artificial Sequence
  derived and/or modified sequence
MTVWTGDVVGGGTDSNIFMTLYGINGSTEEMQLDKKKARFEREQNDTFIMEILDIAPFTKMRIRIDGLGSRPEWFLERILLKNMNTGDLTMFYYGDWLSQRKGKKTLVCEMCAVIDEEEMMEWTSYTVAVKTSDILGAGTDANVFIIIFGENGDSGTLALKQSANWNKFERNNTDTFNFPDMLSLGHLCKLRVWHDNKGIFPGWHLSYVDVKDNSRDETFHFQCDCWLSKSEGDGQTVRDFACANNKICDELEETTYEIVIETGNGGETRENVWLILEGRKNRSKEFLMENSSRQRAFRKGTTDTFEFDSIYLGDIASLCVGHLAREDRFIPKRELAWHVKTITITEMEYGNVYFFNCDCLIPLKRKRKYFKVFEVTKTTESFASKVQSLVPVKYEVIVTTGYEPGAGTDANVFVTIFGANGDTGKRELKQKMRNLFERGSTDRFFLETLELGELRKVRLEHDSSGYCSGWLVEKVEVTNTSTGVATIFNCGRWLDKKRGDGLTWRDLFPSV

SEQ ID NO: 318677 - protein, 457 aa, Artificial Sequence
  derived and/or modified sequence
MTVWTGDVVGGGTDSNIFMTLYGINGSTEEMQLDKKKARFEREQNDTFIMEILDIAPFTKMRIRIDGLGSRPEWFLERILLKNMNTGDLTMFYYGDWLSQRKGKKTLVCEMCAVIDEEEMMEWTSYTVAVKTSDILGAGTDANVFIIIFGENGDSGTLALKQSANWNKFERNNTDTFNFPDMLSLGHLCKLRVWHDNKGIFPGWHLSYVDVKDNSRDETFHFQCDCWLSKSEGDGQTVRDFACANNKICDELEETTYEIVIETGNGGETRENVWLILEGRKNRSKEFLMENSSRQRAFRKGTTDTFEFDSIYLGDIASLCVGHLAREDRFIPKRELAWHVKTITITEMEYGNVYFFNCDCLIPLKRKRKYFKVFEVTKTTESFASKVQSLVPVKYEVIVTTGYEPGAGTDANVFVTIFGANGDTGKRELKQKMRNLFERGSTDRFFLETLELGELRK

SEQ ID NO: 318678 - DNA, 5844 bp, Artificial Sequence
  derived and/or modified sequence
atgatgcagctcaccctgaataccctgtttcccgtggtctcaacacctgcaataacgtacatcgtgacagtatttaccggcgatgtcaggggagccggcaccaagtcgaaaatctacttggtgatgtacggagcacgaggaaacaagaattccgggaagatcttcctagagggcggcgtcttcgacagaggccggaccgacatcttccacatagaactcgcagtactgctgagcccactctcgagagtttcagttggacacggcaacgttggggtcaataggggttggttctgtgaaaaggtagtcattctttgcccttttacagggattcagcagacgtttccctgcagtaactggctggatgaaaagaaggcggacggtctgatcgagcgtcagctgtatgagatggtgtcattacgcaagaagagattaaagaaattcccgtggtccctatgggtgtggacaactgatctgaagaaagctggaaccaactctccgatcttcatccagatctatggtcaaaaaggaagaacagacgaaatcctgctaaaccctaataataagtggtttaaaccaggaatcattgaaaagttcagaattgagttgcctgacttgggccgattctataagatccgcgtctggcacgacaaacgctcgagtggttccggctggcacctcgaaaggatgacgctcatgaatacactaaataaagacaagtacaactttaattgcaaccgctggcttgatgccaatgaagacgataacgaaattgttcgcgagatgaccgccgaggggcccaccgtccgacgcatcatggggatggccaggtatcacgtaaccgtctgtactggcgaattagaaggcgctggtactgacgccaacgtttatttatgcctttttggcgatgtcggagatacaggtgaacgtctgctttacaactgcagaaacaataccgacctgtttgagaaaggaaatgcggatgaattcaccatcgaaagcgtcaccatgcggaacgtgagacgcgttcgcatcagacacgatgggaagggtagtggaagcggctggtacttagacagggtcctggtgcgggaggaagggcagcccgaatccgataatgtcgaattcccatgcttacgctggcttgataaggataaagacgatggccagcttgtcagagagctcctgccgtctgattcatctgcgactctaaagaattttaggtatcacatctctctgaagaccggcgacgtgtcaggggcctctaccgattcgcgagtatatatcaaactgtacggagacaagagtgacaccatcaaacaggtcctcctggtctctgacaataacctcaaagattacttcgaacgggggcgcgttgacgagttcaccctagagaccctcaacattggaaatatcaatcgcctcgtaataggccatgactccacgggtatgcatgcttcgtggtttctcgggtcagtgcagatcagagtcccgcgccaaggcaaacagtatacgttcccagctaataggtggcttgacaagaaccaggctgatggaagacttgaggtcgaactgtatcctagtgaggtggtagagatacaaaagctagtgcactacgaagtggagatttggacaggagacgtggggggagccgggacctcggccagagtttatatgcagatatacggtgaaaagggcaaaacggaggtgctgttcctgtcctctcgatcaaaggtttttgagagagcgtccaaggatacctttcaactagaggccgccgatgtcggcgaggtatacaagctgcggctcggacacacaggggagggcttcggccctagttggtttgtggacaccgtctggttaaggcatctggttgtgcgtgaggtggacctaacacccgaggaggaggcccgaaaaaaaaaagaaaaggacaaactccggcaattactcaagaaggagagactgaaggcaaagctccagagaaagaaaaagaagagaaaggggtccgatgaggaggacgagggcgaggaggaagaatcctctagcagtgaggaatcttcctctgaggaggaggagatggaggaagaagaggaggaagaagagttcgggcccggcatgcaggaggttattgaacagcataaatttgaggcccacagatggctagcgagaggtaaggaagataacgaactggtggtggaactcgtccctgccggcaagcccgggcccgaaagaaacacatacgaagtacaggtggtcacaggaaatgtcccgaaagcaggcactgatgccaatgtatatctgacaatctatggtgaggagtacggcgatacgggtgaaagaccccttaaaaagtccgataaatctaacaaatttgaacagggtcagacagacacattcacaatatatgctatagacttgggcgcactgacgaagatacggatacgccacgacaacactggcaatcgcgcaggttggtttctagatcgcatagacataacagatatgaataatgagattacatactattttccatgtcaacggtggctggccgtggaggaagatgacggacaactctccagagagttattgccagtggacgagtcttatgtgctgccccagagcgaggaaggccggggtggcggggacaacaaccccctggataatctggccttagagcaaaaggataagtcaaccacattttctgtaaccattaagaccggggtgaaaaaaaacgccggcactgatgcaaacgtgttcatcactctttttggcactcaagacgacaccggtatgaccctgctaaagagcagtaaaacgaactctgacaaattcgaacgcgactccatcgaaatcttcaccgtggagactcttgatctgggagatctatggaaagtccgcctgggtcacgacaataccggaaaagctcctggatggttcgttgattgggtggaggtggacgctccctccctgggaaagtgcatgacttttccatgtggacgatggttggccaagaacgaggacgatggtagtatcattcgggatctcttccacgcagagctacaaacgcggctatatacccccttcgttccctacgagatcactctgtacaccagcgatgtctttgctgctgggacagatgctaatatcttcattattatttacggctgcgacgcagtgtgcacacagcagaaatacctttgcacaaataagcgtgagcaaaaacaatttttcgagcggaagagcgcttccaggtttatagtggagttggaagatgtgggcgagatcattgagaagattcggatcggccacaacaacactgggatgaaccccggatggcattgctcccatgtcgacatccggagactcctgcccgataaggacggggctgaaaccttgacattcccatgtgataggtggctggctacgtcagaggacgataagaaaactatccgcgaactggtgccttacgacatttttacagagaaatatatgaaagacggatcactccgccaggtctacaaagaggtcgaggaacccttagacatcgtgctgtactctgtgcagatatttacaggcaacataccaggagcaggaactgatgcaaaggtgtacattacaatctacggggatctaggagacacaggcgaaaggtacctgggaaagtctgagaatcgcacgaacaagttcgaacgtggtactgcggataccttcattatagaagcggcggacctcggagtcatctacaagataaagcttcggcatgataattctaagtggtgcgccgattggtacgtcgaaaaggtggaaatttggaatgacacaaatgaagatgagttcctgtttctatgtgggagatggctctccttgaaaaaagaggacgggcgcctcgaacgactcttttacgagaaagaatacactggggataggtcctcaaactgctccagccctgcagatttctgggaaatagcactttcctcaaaaatggccgacgtggacatatccacagtgaccggtcccatggccgattacgttcaagaaggccccattatcccttattacgtctctgttaccaccggtaagcacaaagacgctgccacggatagtagagcattcatcttcttgataggcgaggatgatgaaagaagcaagcggatctggttagactacccgaggggaaagcggggcttctctagaggatccgtcgaggaattctacgttgcggggcttgatgtcgggatcattaagaagatcgagcttggccacgacggcgcatccccagagagctgttggctcgtcgaggagctgtgcttagccgtaccaacccagggaacaaagtacatgttgaattgtaactgttggctggccaaggatcgcggagacgggatcacgagtcgagtgttcgacctgttggacgccatggtcgtgaatattggggtgaaggtgttatacgaaatgaccgtgtggaccggcgatgtggtgggaggtggcacagattccaatatcttcatgacgctttatggcatcaacggcagcactgaagagatgcaactagataagaagaaggccagattcgaaagagagcagaacgacaccttcatcatggaaattctggacattgcccctttcacaaagatgagaatccgtattgacggactgggctcaagacctgagtggttcctcgagaggatattgctgaaaaatatgaacacaggcgacttaacaatgttctattatggagactggctcagccaaaggaaaggaaagaaaacactggtctgtgagatgtgcgcagtgattgacgaagaggaaatgatggaatggacctcatacactgttgctgtgaagactagcgacatcctaggcgccgggaccgacgcaaacgtctttattataattttcggcgagaatggcgacagtggtaccctggcgctcaagcaaagcgccaactggaacaagtttgagcggaataatacggataccttcaatttccctgacatgcttagtctggggcacctgtgcaagctcagggtctggcacgacaacaagggtatttttcctggttggcacctctcatacgtagacgtgaaagacaattcccgcgatgagacctttcacttccagtgcgactgctggctgagtaaatccgagggcgatggtcagacagtccgggatttcgcctgtgccaacaataagatttgcgacgaactggaggagactacctacgaaattgtaatcgaaacagggaacggcggggaaaccagagagaacgtatggttgatattggaaggaagaaaaaatagaagcaaggagttcttgatggaaaactcttcccgccagcgcgccttcagaaaggggaccaccgatacttttgaattcgatagtatctacctgggagacattgccagcttgtgtgttggccacctcgccagagaggaccgatttattcccaaacgcgagctcgcctggcacgtcaagacaattactattactgagatggaatacggcaacgtgtatttcttcaattgtgattgcctgattcccttgaaacgaaaacgcaaatattttaaagtgttcgaggtgaccaaaacgacagagtcattcgcctccaaggtacagtcattggtcccggttaaatacgaagtgatagtcactactgggtatgaacccggcgcaggcaccgacgccaacgtgtttgttaccatttttggtgctaatggcgacacgggtaagagagagcttaagcagaagatgcggaatctatttgagaggggttctactgatcggtttttccttgagacactggagttggttgttacccgcctgggcctggccgccgagtgtggatag

SEQ ID NO: 318679 - DNA, 5844 bp, Artificial Sequence
  derived and/or modified sequence
atgatgcagctgaccctgaacaccctcttccctgtggtgtccaccccagccatcacctacatcgtgacagtgttcaccggagatgtgcggggggccggcaccaagagcaagatctacctggtgatgtatggagcccggggcaacaagaacagcggcaagatcttcctggagggcggcgtgtttgaccggggccgcacagacatcttccacatcgagctggccgtgctgctgagccccctgagccgggtgtctgtgggccatggaaatgtgggcgtgaacagaggctggttctgtgagaaggtggtgatcctgtgccccttcaccggcatccagcagaccttcccctgcagcaactggctggatgagaagaaggcagatggcctgattgagcggcagctgtatgagatggtgtccctgaggaagaagaggctgaagaagttcccctggagcctgtgggtgtggaccacagacctgaagaaggccggcaccaacagccccatcttcatccagatctacggccagaagggccgcacagatgagatcctgctgaaccccaacaacaagtggttcaagccaggcatcatcgagaagttccgcatcgagctgcctgacctgggccgcttctacaagatccgggtgtggcatgacaagaggagcagcggcagcggctggcacctggagaggatgaccctgatgaacaccctgaacaaggacaagtacaacttcaactgcaaccgctggctggatgccaatgaagatgacaatgaaattgtgcgggagatgacagctgagggccccaccgtgcggcgcatcatgggcatggcccgctaccacgtgacagtgtgcacaggagagctggagggcgccggcacagatgccaacgtgtacctgtgcctgtttggagatgtgggggacaccggggagcggctgctgtacaactgcaggaacaacacagacctgtttgagaagggaaatgctgatgagttcaccattgaatctgtgaccatgagaaatgtgcggcgggtgcgcatcagacatgatggaaaaggaagtggcagcggctggtacctggacagagtgctggtgcgggaggagggccagcctgagagtgacaacgtggagttcccctgcctgcgctggctggacaaggacaaggatgatggccagctggtgcgggagctgctgcccagcgacagcagcgccaccctgaagaacttccgctaccacatcagcctgaagacaggagatgtgtctggggccagcacagacagccgggtgtacatcaagctgtatggagacaagagtgacaccatcaagcaggtgctgctggtgtctgacaacaacctgaaggactactttgagcggggccgggtggatgagttcaccctggagaccctgaacatcggcaacatcaaccggctggtgattggacatgacagcacaggcatgcacgcctcctggttcctgggctctgtgcagatccgggtgccccggcagggcaagcagtacaccttccctgccaaccgctggctggacaagaaccaggctgatggccgcctggaggtggagctgtaccccagcgaggtggtggagatccagaagctggtgcactatgaggtggagatctggacaggagatgtgggcggggccggcaccagcgcccgggtgtacatgcagatctatggagagaagggcaagacagaggtgctcttcctgagcagccgcagcaaggtgtttgagcgggccagcaaggacaccttccagctggaggccgcagatgtgggggaggtgtacaagctgcggctgggccacactggagagggcttcggccccagctggtttgtggacacagtgtggctgcggcacctggtggtgcgggaggtggacctgaccccagaggaggaggccaggaagaagaaggagaaggacaagctgcggcagctgctgaagaaggagcggctgaaggccaagctgcagaggaagaagaagaagaggaagggcagtgatgaagaagatgaaggagaggaggaggagagcagcagcagcgaggagagcagcagcgaggaggaggagatggaggaggaggaggaggaggaggagtttggacctggcatgcaggaggtgattgagcagcacaagtttgaggcccaccgctggctggcccggggcaaggaggacaatgagctggtggtggagctggtgcctgctgggaagccaggccctgagaggaacacctatgaggtgcaggtggtgactggaaatgtgcccaaggccggcacagatgccaacgtgtacctgaccatctatggagaggagtatggagacaccggggagcggcccctgaagaagagtgacaagagcaacaagtttgagcagggccagacagacaccttcaccatctatgccatcgacctgggcgccctgaccaagatccgcatcagacatgacaacacaggcaacagagctggctggttcctggacagaattgacatcacagacatgaacaatgagatcacctactacttcccctgccagcgctggctggccgtggaggaggatgatggccagctgagccgggagctgctgcctgtggatgagagctatgtgctgccccagagcgaggagggccggggcggcggggacaacaaccccctggacaacctggccctggagcagaaggacaagagcaccaccttctctgtgaccatcaagacaggagtgaagaagaatgccggcacagatgccaacgtgttcatcaccctgtttggcacccaggatgacaccggcatgaccctgctgaagagcagcaagaccaacagcgacaagtttgagcgggacagcattgagatcttcaccgtggagaccctggacctgggggacctgtggaaggtgcggctgggccatgacaacacaggcaaggcccctggctggtttgtggactgggtggaggtggatgcccccagcctgggcaagtgcatgaccttcccctgtggccgctggctggccaagaatgaagatgatggcagcatcatccgggacctcttccacgccgagctgcagacccggctgtacaccccatttgtgccctatgagatcaccctgtacaccagtgatgtgtttgctgctggaacagatgccaacatcttcatcatcatctacggctgtgatgctgtgtgcacccagcagaagtacctgtgcaccaacaagcgggagcagaagcagttctttgagaggaagagcgccagccgcttcatcgtggagctggaggatgtgggggagatcatcgagaagatccgcatcggccacaacaacacaggcatgaaccctggctggcactgcagccacgtggacatccggcggctgctgcctgacaaggatggagctgagaccctgaccttcccctgtgaccgctggctggccaccagtgaagatgacaagaagaccatccgggagctggtgccctatgacatcttcacagagaagtacatgaaggatggcagcctgcggcaggtgtacaaggaggtggaggagcccctggacatcgtgctgtacagcgtgcagatcttcaccggcaacatccctggggccggcacagatgccaaggtgtacatcaccatctatggagacctgggggacacaggagagcgctacctgggcaagtctgagaacagaaccaacaagtttgagcggggcacagctgacaccttcatcatcgaggccgctgacctgggcgtcatctacaagatcaagctgcggcatgacaacagcaagtggtgtgccgactggtacgtggagaaggtggagatctggaatgacaccaatgaagatgagttcctgttcctgtgtggccgctggctgagcctgaagaaggaggatggccgcctggagcggctcttctatgagaaggagtacacaggagacaggagcagcaactgcagcagccctgctgacttctgggagatcgccctgagcagcaagatggctgatgtggacatcagcacagtgacaggccccatggctgactatgtgcaggagggccccatcatcccctactacgtgtctgtgaccaccgggaagcacaaggatgctgccacagacagccgggccttcatcttcctgattggagaagatgatgagaggagcaagaggatctggctggactacccccggggcaagaggggcttcagccggggctctgtggaggagttctacgtggccggcctggatgtgggcatcatcaagaagattgagctgggccatgatggagccagccctgagagctgctggctggtggaggagctgtgcctggccgtgcccacccagggcaccaagtacatgctgaactgcaactgctggctggccaaggacagaggagatggcatcaccagccgggtgtttgacctgctggatgccatggtggtgaacatcggcgtgaaggtgctgtatgagatgacagtgtggacaggagatgtggtgggcggcggcacagacagcaacatcttcatgaccctgtatggcatcaatggcagcacagaggagatgcagctggacaagaagaaggccaggtttgagcgggagcagaatgacaccttcatcatggagatcctggacatcgcccccttcaccaagatgaggatcagaattgatggcctgggcagcaggcctgagtggttcctggagcgcatcctgctgaagaacatgaacacaggagacctgaccatgttctactatggagactggctgagccagaggaagggcaagaagaccctggtgtgtgagatgtgtgctgtgattgatgaggaggagatgatggagtggaccagctacacagtggccgtgaagaccagtgacatcctgggcgccggcacagatgccaacgtgttcatcatcatctttggagaaaatggagacagcggcaccctggccctgaagcagagcgccaactggaacaagtttgagaggaacaacacagacaccttcaacttcccagacatgctgagcctgggccacctgtgcaagctgcgggtgtggcatgacaacaagggcatcttccctggctggcacctgtcctatgtggatgtgaaggacaacagcagagatgagaccttccacttccagtgtgactgctggctgagcaagtcagaaggagatggccagacagtgcgggactttgcctgtgccaacaacaagatctgtgatgagctggaggagaccacctatgagatcgtcatcgagactggaaatggaggagagacccgggagaatgtgtggctgatcctggagggcaggaagaacagaagcaaggagttcctgatggagaacagcagccggcagagggccttcaggaagggcaccacagacacctttgaatttgacagcatctacctgggggacatcgccagcctgtgtgtgggccacctggcccgggaggaccgcttcatccccaagcgggagctggcctggcacgtgaagaccatcaccatcacagagatggagtatggaaatgtgtacttcttcaactgtgactgcctgatccccctgaagaggaagaggaagtacttcaaggtgtttgaggtgaccaagaccacagagagctttgccagcaaggtgcagagcctggtgcctgtgaagtatgaggtgattgtgaccaccggctatgagcccggggccggcacagatgccaacgtgtttgtgaccatctttggagccaacggggacaccgggaagcgggagctgaagcagaagatgaggaacctgtttgagcggggcagcacagaccgcttcttcctggagaccctggagctggtggtgacccggctgggcctggccgcagaatgtggctag

SEQ ID NO: 318680 - DNA, 6202 bp, Artificial Sequence
  derived and/or modified sequence
acacaaactctggaaaagatgaaatgaggtcgagagggacattaggtggcatctggaggagtaggacatgatggggaaagaggatgtgtggaggaggagggctttgggggtgttgtaaccaggaaggggaggagggggtgggatattatgatgcagctcacattgaacactctctttcctgttgtttccacaccagctattacgtatattgtcaccgtcttcactggggatgtccggggggctggtaccaaatccaaaatctacttggtcatgtatggggccagagggaataagaacagtgggaaaatcttcctggagggcggcgtgtttgaccgaggccgcacggacatcttccacatcgagctggctgtcctccttagccccctgagtcgggtctccgtcgggcatggcaatgtgggtgtcaacagaggctggttctgtgagaaggtggtgattctgtgccccttcactggtatccagcagaccttcccttgtagcaactggctggatgagaagaaagcggatgggttgattgagaggcagctctatgagatggtgtctctcaggaagaagcggctgaaaaaattcccttggtccctgtgggtctggacaaccgacctaaagaaagctggtaccaactctcccatcttcatccagatttatgggcagaaggggcggacagatgagattctcctgaatcccaacaacaagtggttcaaacccggcataatcgagaagtttaggattgagctcccggatcttggcaggttttataagattcgagtatggcatgataaaaggagttctggttctggatggcatttagaaaggatgaccctgatgaacactctgaacaaagacaagtacaacttcaattgcaaccgctggctggatgccaatgaggatgacaatgagatagtgagggaaatgactgcagaaggcccaacagtgcgcaggatcatgggcatggcccggtaccatgtgactgtgtgcacaggtgaacttgaaggtgctgggaccgatgccaacgtctatctctgcctttttggtgatgtgggggacacgggggaacggctgctctacaactgcaggaataacacagacctgtttgaaaagggcaatgctgacgagttcactatcgagtctgtcaccatgcggaatgtgaggcgggtgaggatcagacacgatggcaaaggctccggcagcggctggtacctggacagagtgctggtgagagaggaggggcagcctgagagcgacaacgtggagttcccatgtctcaggtggttggacaaggataaggatgatgggcagctggtccgagagttgctacccagtgacagcagcgcgacactgaagaactttcgctatcacatcagcttgaagactggggatgtctctggggccagcacggattctagagtctacatcaagctctatggggataaatctgacaccatcaagcaagttcttcttgtctctgacaacaacctcaaagactactttgaacgtggccgggtggatgagttcaccctcgagaccctgaacattggaaatatcaaccggctggtgattgggcatgacagcactggcatgcatgccagctggttcctgggcagcgttcagatccgtgtgccccgtcaaggcaagcagtacacctttcccgccaaccgctggctggacaagaaccaggctgacgggcgcctggaggtggagctgtatcccagcgaggtggtggagatccagaaattggtccactatgaggttgagatttggacaggagatgtgggtggcgcaggcaccagtgcccgagtctacatgcagatctatggagagaaaggcaagacagaagtgctcttcctctccagccgctcaaaagtttttgaacgggcgtccaaggacacattccagcttgaggcggccgacgtgggcgaggtctataagctccggctcgggcacacgggcgagggctttgggcccagctggttcgtggacaccgtgtggctgcggcacctggtggtgcgggaggtggacctcacgccggaggaggaggcccggaagaagaaggagaaggacaagctgcggcagctgctcaagaaggagcggctgaaggccaagctgcagaggaagaagaagaagaggaagggcagcgacgaagaggacgagggggaggaagaggagtcgtcctcatcagaggagtcctcgtcagaggaggaggagatggaagaagaggaggaagaggaggagtttgggccggggatgcaggaggtgattgagcagcacaagttcgaagcccaccgctggctggcccggggcaaggaggacaacgaacttgtcgtggagttggtgccagctggcaagccgggtcctgagcgaaacacctatgaggttcaggtggtcacggggaatgtgcccaaggccggcactgatgctaacgtctacctaaccatctacggcgaggagtatggagacacgggcgaacgacccctgaagaagtcagacaagtccaacaaatttgagcaggggcagacagacaccttcaccatctatgccattgacctgggggccctgaccaagattcggattcgccacgacaacacaggcaacagagcaggctggttcctggacagaatagacattactgacatgaacaacgagatcacgtactactttccatgccaacgttggctggcagtggaggaagatgatggccagctgtccagggagctgttgccagtggatgagtcctatgtgctgccacagagcgaggagggtaggggaggcggtgacaacaaccccctcgacaacctggccctggagcagaaagataaatctaccacattctcagtgaccataaagactggggttaagaagaatgcgggcacagatgctaatgtcttcatcacactctttggcacacaggatgacactggaatgaccctcctgaagtcctccaagacaaacagcgataagtttgagagggacagcattgaaatcttcacggtggagacgctggatctgggagacctgtggaaagtccggcttggccatgacaacacaggcaaggccccaggctggtttgtagactgggtagaggtggatgccccatctcttgggaagtgcatgacgtttccctgtggccgctggctggccaaaaacgaagacgacgggtccatcatcagagacctcttccatgcagagcttcagacgaggctgtacacaccatttgttccttacgagatcaccctctacaccagtgatgtctttgctgctgggacagatgccaacatcttcatcatcatctatggctgcgatgccgtgtgcacccagcagaagtatctgtgtaccaacaagagggaacagaagcagttctttgagaggaagtctgcctcccgcttcatcgtagagttagaagatgtgggagaaatcattgaaaaaattcggattggccataataacacgggcatgaatcctgggtggcactgctctcacgtggacatccgcaggctcctcccggataaagacggtgcagagaccttgactttcccatgcgatcggtggcttgccacctctgaggatgacaaaaagaccattcgagaactggttccatatgacatcttcactgagaaatacatgaaagatgggtccttacggcaagtctacaaggaagtagaagagcctctggacattgtgctgtactcggtgcagatcttcacagggaacattcctggggcagggacggatgccaaggtgtacatcaccatctatggagacctcggggacactggggagcgataccttggcaagtcagagaaccggaccaacaagttcgagagaggaacggctgacaccttcatcatcgaggccgctgacctaggcgtcatctacaagatcaagctccgccatgacaactccaagtggtgcgcagactggtacgtggagaaggtggagatctggaatgacaccaacgaggacgagttcctgttcctatgcgggcgctggctctccctgaagaaggaggatgggcgactcgagaggctcttttacgagaaggagtacactggggaccgcagcagcaactgcagcagccctgctgacttctgggagatcgccctgagctccaagatggccgatgtcgacatcagcacagtgaccgggcccatggctgactacgttcaagagggcccaattattccctactatgtgtcagtcaccactgggaagcacaaggacgcggccactgacagccgagccttcatctttctcatcggggaggatgatgaacgtagtaagcgcatctggttggactacccccgagggaagaggggcttcagccgtggctctgtggaggagttctacgtcgcaggcttggatgtgggcatcatcaagaaaatagagctgggccatgacggggcctcccctgagagctgctggctggtggaagagttgtgtttggcagtgcccacccagggcaccaagtacatgttgaactgtaactgctggctggccaaggacagaggcgacggcatcacctcccgtgtcttcgacctcttggatgccatggtggtgaacattggggtgaaggttctctatgaaatgacggtgtggacaggggatgtggttggcgggggcactgactccaacatcttcatgaccctctacggcatcaacgggagcacagaggagatgcagctggacaaaaagaaagccaggtttgagcgggagcagaacgacaccttcatcatggagatcctagacattgctccattcaccaagatgcggatccggattgatggcctgggcagtcggccggagtggttcctggagaggatcctactgaagaacatgaacactggagacctgaccatgttctactatggagactggctgtcccagcggaagggcaagaagaccctggtgtgtgaaatgtgtgccgttatcgatgaggaagaaatgatggagtggacctcctacaccgtcgcagttaagaccagcgacatcctgggagcaggcactgatgccaacgtgttcatcatcatcttcggggagaacggggatagtgggacactggccctgaagcagtcggcaaactggaacaagtttgagcggaacaacacggacacattcaacttccctgacatgctgagcttgggccacctctgcaagctgagggtctggcacgacaacaaagggatatttcctggctggcatctgagctatgtcgatgtgaaggacaactcccgcgacgagaccttccacttccagtgtgactgctggctctccaagagtgagggtgacgggcagacggtccgcgactttgcctgtgccaacaacaagatctgtgatgagctggaagagaccacctacgagatcgtcatagaaacgggcaacggaggcgaaaccagggagaacgtctggctcatcctggagggcaggaagaaccgatccaaagagtttctcatggaaaattcttctaggcagcgggcctttaggaaggggaccacagacacgtttgagtttgacagcatctacttgggggacattgcctccctctgtgtgggccaccttgccagggaagaccggtttatccccaagagagaacttgcctggcatgtcaagaccatcaccatcaccgagatggagtacggcaatgtgtacttctttaactgtgactgcctcatccccctcaagaggaagaggaagtacttcaaggtattcgaggttaccaagacgacagagagctttgccagcaaggtccagagcctggtgcccgtcaagtacgaagtcatcgtgacaacaggctatgagccaggggcaggcactgatgccaacgtcttcgtgaccatctttggggccaacggagacacaggcaagcgggagctgaagcagaaaatgcgcaacctcttcgagcggggcagcacagaccgcttcttcctggagacgctggagctggtagtgaccaggctgggacttgctgcagagtgtggatgagaaattgagtcttcacccaggggatagaagtggagaagcagaggccatcaagatggtgtattttaagcaaaaactaattaacacttttccccaaaaaagctaggctaattaaattattaccaaccatatcctataaagaactcatcttagcatctgcttgctaagaagtgtatacttttccccagtttcaataaacccagtggcaagtgga

SEQ ID NO: 318681 - DNA, 3970 bp, Artificial Sequence
  derived and/or modified sequence
agtacctcttcagtaacactgatactttgtggaggggttatgagagaattgcaggcagggccccagcacctagagcccatgggccagctgacccacaggaacaaacagagaatggcgttgagtggcagatgctgaggcacttggttcctggtgtggtctgcttcctcccgtgcatggagcagtgtgtgcattcacatggtgtgatccatatggccctcttcacacctaaatggtgggcaaatccgtcttcagtttctgacagtcactttggatttgcacagcaccagctcatagcagacagacaccttcaccatctatgccattgacctgggggccctgaccaagattcggattcgccacgacaacacaggcaacagagcaggctggttcctggacagaatagacattactgacatgaacaacgagatcacgtactactttccatgccaacgttggctggcagtggaggaagatgatggccagctgtccagggagctgttgccagtggatgagtcctatgtgctgccacagagcgaggagggtaggggaggcggtgacaacaaccccctcgacaacctggccctggagcagaaagataaatctaccacattctcagtgaccataaagactggggttaagaagaatgcgggcacagatgctaatgtcttcatcacactctttggcacacaggatgacactggaatgaccctcctgaagtcctccaagacaaacagcgataagtttgagagggacagcattgaaatcttcacggtggagacgctggatctgggagacctgtggaaagtccggcttggccatgacaacacaggcaaggccccaggctggtttgtagactgggtagaggtggatgccccatctcttgggaagtgcatgacgtttccctgtggccgctggctggccaaaaacgaagacgacgggtccatcatcagagacctcttccatgcagagcttcagacgaggctgtacacaccatttgttccttacgagatcaccctctacaccagtgatgtctttgctgctgggacagatgccaacatcttcatcatcatctatggctgcgatgccgtgtgcacccagcagaagtatctgtgtaccaacaagagggaacagaagcagttctttgagaggaagtctgcctcccgcttcatcgtagagttagaagatgtgggagaaatcattgaaaaaattcggattggccataataacacgggcatgaatcctgggtggcactgctctcacgtggacatccgcaggctcctcccggataaagacggtgcagagaccttgactttcccatgcgatcggtggcttgccacctctgaggatgacaaaaagaccattcgagaactggttccatatgacatcttcactgagaaatacatgaaagatgggtccttacggcaagtctacaaggaagtagaagagcctctggacattgtgctgtactcggtgcagatcttcacagggaacattcctggggcagggacggatgccaaggtgtacatcaccatctatggagacctcggggacactggggagcgataccttggcaagtcagagaaccggaccaacaagttcgagagaggaacggctgacaccttcatcatcgaggccgctgacctaggcgtcatctacaagatcaagctccgccatgacaactccaagtggtgcgcagactggtacgtggagaaggtggagatctggaatgacaccaacgaggacgagttcctgttcctatgcgggcgctggctctccctgaagaaggaggatgggcgactcgagaggctcttttacgagaaggagtacactggggaccgcagcagcaactgcagcagccctgctgacttctgggagatcgccctgagctccaagatggccgatgtcgacatcagcacagtgaccgggcccatggctgactacgttcaagagggcccaattattccctactatgtgtcagtcaccactgggaagcacaaggacgcggccactgacagccgagccttcatctttctcatcggggaggatgatgaacgtagtaagcgcatctggttggactacccccgagggaagaggggcttcagccgtggctctgtggaggagttctacgtcgcaggcttggatgtgggcatcatcaagaaaatagagctgggccatgacggggcctcccctgagagctgctggctggtggaagagttgtgtttggcagtgcccacccagggcaccaagtacatgttgaactgtaactgctggctggccaaggacagaggcgacggcatcacctcccgtgtcttcgacctcttggatgccatggtggtgaacattggggtgaaggttctctatgaaatgacggtgtggacaggggatgtggttggcgggggcactgactccaacatcttcatgaccctctacggcatcaacgggagcacagaggagatgcagctggacaaaaagaaagccaggtttgagcgggagcagaacgacaccttcatcatggagatcctagacattgctccattcaccaagatgcggatccggattgatggcctgggcagtcggccggagtggttcctggagaggatcctactgaagaacatgaacactggagacctgaccatgttctactatggagactggctgtcccagcggaagggcaagaagaccctggtgtgtgaaatgtgtgccgttatcgatgaggaagaaatgatggagtggacctcctacaccgtcgcagttaagaccagcgacatcctgggagcaggcactgatgccaacgtgttcatcatcatcttcggggagaacggggatagtgggacactggccctgaagcagtcggcaaactggaacaagtttgagcggaacaacacggacacattcaacttccctgacatgctgagcttgggccacctctgcaagctgagggtctggcacgacaacaaagggatatttcctggctggcatctgagctatgtcgatgtgaaggacaactcccgcgacgagaccttccacttccagtgtgactgctggctctccaagagtgagggtgacgggcagacggtccgcgactttgcctgtgccaacaacaagatctgtgatgagctggaagagaccacctacgagatcgtcatagaaacgggcaacggaggcgaaaccagggagaacgtctggctcatcctggagggcaggaagaaccgatccaaagagtttctcatggaaaattcttctaggcagcgggcctttaggaaggggaccacagacacgtttgagtttgacagcatctacttgggggacattgcctccctctgtgtgggccaccttgccagggaagaccggtttatccccaagagagaacttgcctggcatgtcaagaccatcaccatcaccgagatggagtacggcaatgtgtacttctttaactgtgactgcctcatccccctcaagaggaagaggaagtacttcaaggtattcgaggttaccaagacgacagagagctttgccagcaaggtccagagcctggtgcccgtcaagtacgaagtcatcgtgacaacaggctatgagccaggggcaggcactgatgccaacgtcttcgtgaccatctttggggccaacggagacacaggcaagcgggagctgaagcagaaaatgcgcaacctcttcgagcggggcagcacagaccgcttcttcctggagacgctggagctggtagtgaccaggctgggacttgctgcagagtgtggatgagaaattgagtcttcacccaggggatagaagtggagaagcagaggccatcaagatggtgtattttaagcaaaaactaattaacacttttccccaaaaaagctaggctaattaaattattaccaaccatatcctataaagaactcatcttagcatctgcttgctaagaagtgtatacttttccccagtttcaataaacccagtggcaagtgga

SEQ ID NO: 318682 - DNA, 5844 bp, Artificial Sequence
  derived and/or modified sequence
atgatgcagctgaccctgaacaccctgttccccgtggtgagcacccccgcaattacctatatcgtcaccgttttcacaggagatgtgcggggggccggcaccaaatcaaagatctatttggtgatgtacggcgctcgcggcaacaagaactcgggaaagatctttcttgaggggggagtctttgatagaggccgtacagatatattccatattgaactagcagtgctgctgtccccattgagtagggtgtctgttggccatgggaacgttggtgtgaatagaggctggttctgcgaaaaggtagttattctctgtccattcactgggatccaacagacgtttccctgcagcaactggctcgatgagaagaaggccgatggtctgatcgagcggcagctctatgagatggtcagcctgagaaagaaaaggttaaagaaattcccctggagtctttgggtgtggacaactgacctcaaaaaggcgggaacaaattctccaattttcatccagatttatggacagaagggtagaacggacgagattctgttgaaccctaataataaatggttcaagcccggcatcatcgaaaagtttaggatagaactacctgacttggggcggttctataagataagggtgtggcacgataagcgcagttcaggatctggttggcatctggagcggatgaccctcatgaacacactgaataaggataaatacaattttaactgtaatagatggctcgatgccaacgaggatgacaatgagatcgtcagggagatgacggctgaagggcccaccgtgaggcgcataatgggaatggctcgctatcacgttacggtttgtacaggagagcttgagggtgctgggacagacgctaacgtatacctgtgcctgtttggagacgtgggagatacaggagagagactgctctacaattgccgaaacaacaccgatctgtttgaaaaaggaaatgcagatgagttcacaatcgagagcgtcacaatgaggaacgtccggagagttagaatccggcacgacggcaagggatctggttcagggtggtacttggatagggtactcgtccgtgaagagggacaacccgagtccgataacgtcgaatttccctgcttgaggtggctggacaaggacaaggacgatggccagttagtccgcgaactgctccccagtgacagctctgcaacactgaagaatttcaggtaccacatctctctgaagaccggagacgtcagtggcgcgtctaccgactctagggtctacattaagttgtatggcgacaagtccgataccataaagcaggtcctgcttgtttccgacaataatctcaaagattattttgaacgtggccgagtggacgagttcacattagagacactgaacatagggaatattaaccggttagttataggacacgacagtaccggtatgcatgcaagttggtttctcggctcggtgcagatccgggtccctagacagggaaaacagtataccttccctgccaatcggtggcttgacaagaaccaggctgatggccggctggaagtggaactgtatccctctgaagttgtggaaatccaaaagctagttcactacgaggtcgagatatggacaggcgatgttggcggcgcgggcacatcagcacgcgtgtatatgcagatctacggtgaaaagggcaaaaccgaggtcttattcctcagcagccgttccaaggtctttgagcgtgccagcaaagatacctttcagttggaagctgctgacgtcggagaagtatataagctgcgattaggccacactggtgagggattcggcccgagctggttcgtcgatacagtctggctccggcatctagtggttcgggaagttgatttgactcccgaggaggaggcacggaagaagaaggaaaaggacaaactcagacagttgctgaagaaagagagactcaaagcgaagcttcagagaaagaagaaaaaaagaaagggttctgacgaggaggatgagggcgaggaggaagagagttctagctcagaggaaagttcatccgaggaagaggaaatggaagaagaagaggaggaggaagagtttggacctggaatgcaggaggtcatcgaacagcataaattcgaggcgcaccgctggctggcgagaggaaaggaagataacgagctggtggttgagctggtcccagcaggcaaaccgggtccagaacgcaacacgtatgaggtccaagtggtcaccggaaacgttcccaaagccggcacagatgcgaatgtgtatctgacaatctatggtgaagaatatggggataccggtgagcgacccctaaagaaatccgataaaagcaataagttcgaacagggccagacggatacctttaccatttatgcgattgatctgggtgccctaaccaagatccgaatccggcacgataacacagggaaccgggccggttggtttttggaccggatagatataaccgatatgaataatgaaataacgtactacttcccctgccaaaggtggcttgccgtggaggaggatgacgggcaactgtcaagagagcttctgccagtcgatgagagctacgtgctgccccagagcgaggagggccgcgggggtggcgacaataacccccttgataacctggcactggagcagaaggacaagtccaccaccttttctgtgaccatcaaaacgggtgtgaagaagaatgctggcacagatgcaaatgtgttcattacgctgtttggcacgcaggatgacaccggtatgacactgctgaaatcctcaaaaacaaattcggacaaattcgaacgcgactcaatcgagattttcaccgtggaaaccctggatctcggggatctctggaaagttagactgggccacgataatacgggaaaggcccccggatggttcgtggattgggtggaggttgatgccccgagcctgggcaagtgcatgacattcccctgtggtagatggctcgctaagaacgaagatgatggttccatcataagagacttatttcatgctgagctacagactcgactgtacacgccctttgttccctacgagataactctttacactagcgatgtgtttgccgcagggacggacgcaaatatttttatcatcatctacggatgtgatgccgtgtgcacgcagcagaagtacctctgcaccaacaagcgggagcagaaacagttcttcgagcggaaatcagccagccgcttcatagtggagcttgaagatgtgggggagatcattgagaagattcgtatcgggcataacaatacgggcatgaaccccgggtggcactgtagccacgtagacattcgtcgcttgctgcccgataaggatggagccgaaacccttacatttccctgtgaccgttggctggccacaagtgaagacgataaaaagacaatcagagagctggtgccttacgacatcttcacggaaaagtacatgaaggacggatcacttagacaggtatacaaggaggtggaggagcccctggacatagtgctgtactctgtgcagattttcacaggaaacattcccggcgctgggacagacgccaaggtttacatcaccatttatggcgatttgggcgacactggcgagcggtacttagggaagtccgagaacagaacaaataaatttgagcggggcaccgccgatacttttattatcgaggcggcggacttgggtgtgatatataaaattaagctgcgtcacgacaattccaagtggtgcgcagattggtacgtggaaaaagtggaaatctggaacgacacgaatgaggatgaattcttattcctgtgcggcaggtggctctctctgaaaaaggaggacgggcggctggaacgtctcttctacgagaaagagtatacaggcgaccgatcatctaattgttcttcccctgcggatttttgggagatagccctgtcgagcaaaatggcggatgttgacatctccacagttacaggccccatggccgactatgtgcaggaagggcccatcataccttactacgtcagtgtcaccacagggaaacataaggacgctgctacagactcccgggcattcatcttcctcattggtgaagacgacgagcgctctaagcgaatttggctcgactacccccgcggcaagcgcgggttctctaggggctccgttgaagaattctacgtagctggccttgacgttggtatcattaagaagatagagctgggtcacgatggagcaagtccagagtcctgctggctggttgaagaactttgtttggcggtgcctacacaaggtaccaagtatatgctcaactgtaactgttggctggccaaagaccgtggggacggaattacatcccgggtgttcgatctcttagacgctatggtagtgaacataggcgtgaaagtgttgtacgagatgacagtgtggactggggatgtggtcgggggcggaacagacagcaacatttttatgacgctgtacgggattaacggctcaacagaagagatgcaattagacaaaaaaaaggctcggttcgagagagagcagaacgacacattcattatggagattttagacattgctcccttcaccaaaatgcgcataagaattgatggattaggctcccgaccagaatggttcctcgaacgaattctcctgaagaacatgaatactggggacctaactatgttctattacggagactggcttagtcagaggaaagggaaaaagaccttggtttgtgaaatgtgcgcagtgattgacgaagaggagatgatggagtggaccagctacacagtcgccgtcaaaacctcggatatcctaggggccggcactgacgcaaacgtattcatcattatcttcggcgaaaacggggactcaggcacgctggcactgaagcagtcagcgaactggaacaaattcgaacggaacaacacagatacatttaactttcctgacatgctctccctcggccatctgtgtaaactacgggtgtggcacgataataagggaatcttccccgggtggcatctgagttatgtcgatgtaaaggacaactctcgcgatgaaacattccatttccaatgtgattgttggctgtccaaatccgaaggagatgggcagaccgtgcgggactttgcctgtgctaacaataagatctgcgacgagttggaggagactacatatgaaattgtcatagaaactgggaacgggggggagacacgcgagaatgtatggcttattctagaagggcgcaaaaaccggtctaaggagttcctaatggaaaactcctctaggcagcgggcattcaggaaaggtacaaccgatacattcgaattcgacagtatttatttgggagacattgcaagcctgtgcgtcggacatctagcccgggaggaccgctttatcccaaagagagagctcgcgtggcacgtgaagaccataacaattacagaaatggagtatgggaatgtgtatttcttcaattgtgattgtttgatccccctaaagagaaaacgcaaatacttcaaagtttttgaggtgacaaaaaccacggaatccttcgctagtaaagtccagtccctggttcccgtcaaatacgaagtcatcgtaacaaccgggtacgagccaggcgcaggaaccgatgccaacgtgttcgtgaccatcttcggggccaatggagacaccgggaaacgggaattaaagcagaaaatgagaaatttgtttgagaggggatccaccgaccggttcttcctcgagacccttgaactcgtagtgacgaggcttggcctggcggctgagtgcggctag

SEQ ID NO: 318683 - DNA, 5843 bp, Artificial Sequence
  derived and/or modified sequence
atgatgcagttaacccttaatactctgtttccggtggtcagcaccccagcaatcacttatatcgtaacagtctttaccggagacgtgaggggggctggcaccaagtcaaaaatttacctggtgatgtacggtgccagagggaataagaacagcgggaagatatttttagaaggcggtgtgttcgatcgtgggagaacggatatcttccacatcgagctggcagtcctgctcagtcctttatcccgcgtctcagttggccatgggaacgtaggtgtgaataggggttggttttgcgagaaggtagtgatactatgtccctttactggcatacagcagacttttccctgctccaactggttggacgaaaagaaggctgacggattaattgaacggcagctttacgaaatggtgagtctgaggaaaaaaagacttaagaaatttccctggtccctttgggtttggacaactgatctgaagaaagcaggaactaacagtccaattttcattcaaatatacgggcaaaagggtagaactgatgagatattgttgaaccctaacaacaagtggttcaagcctggaattatcgagaaattcagaattgagctccctgacctggggaggttctataagatccgcgtgtggcatgacaagaggagctctggcagcgggtggcatttggagagaatgaccttgatgaacactttgaacaaggacaaatataacttcaactgcaatcgctggcttgacgctaatgaggatgataatgagatagttcgtgagatgactgccgagggcccaaccgtcagaaggataatgggtatggccaggtaccacgtcactgtgtgcaccggggaactagaaggagctggcactgacgccaacgtgtatctctgcctctttggagatgtcggcgacaccggagagcgcctgctgtacaattgtaggaacaacaccgacctgtttgaaaagggtaatgcggatgagttcactattgaaagcgtgaccatgcgcaacgttaggagagtgagaatccgacatgacggcaagggctctgggtccggctggtacttagaccgcgtactggtgcgcgaggagggacagccagagtcggataacgtggagttcccctgcttacgctggctcgataaggataaggacgacggacagctggtgagagagttgcttccaagcgacagctccgctaccctaaaaaattttaggtaccatattagcttgaagaccggggacgtttccggagcaagcaccgacagcagagtgtacattaagttgtacggggataagtccgacacgatcaagcaggttctcctggttagtgataacaatcttaaggactactttgaacgtggcagagtcgacgagttcactctggagacattaaacattggaaatatcaaccgactggttattggacatgatagcaccggcatgcatgccagttggtttttagggtcagtacagattagagtccctcgccaaggcaagcaatacaccttccctgctaacagatggctcgataagaatcaggcagacggtcggctggaggtggagctgtatcctagcgaagtcgtggaaatccaaaagttggtgcactacgaagtcgaaatctggacgggggacgtggggggagccggtacatcggccagagtatatatgcagatttatggcgagaagggcaaaactgaggtgctttttttgtcgagtcgaagcaaagtcttcgaacgtgcctctaaagacaccttccagctggaagcagccgatgtcggtgaagtgtataagttgcgactgggccataccggcgagggattcggtcctagttggtttgtggacaccgtgtggttaaggcatctggttgtgcgggaagtggacctcaccccggaggaggaggctaggaagaagaaagagaaagacaagctgaggcaactgctgaagaaggagcgattgaaggccaaactgcagaggaagaagaaaaaaagaaagggaagcgatgaggaagacgagggagaagaggaggagtcctcgtcttccgaagaaagttcctccgaagaagaggagatggaggaggaggaggaagaagaagagttcgggcctggaatgcaagaagttatagagcaacacaagtttgaggcccacagatggcttgccagaggtaaggaggataatgagctggtggtagaactcgtgcccgctggcaagcctggacccgagagaaatacctacgaagttcaagtggtcaccggtaacgtgccaaaggctggcacggacgccaacgtttatctgacgatttacggcgaagaatacggggataccggagagagacctcttaaaaaaagtgataaaagtaataaattcgagcagggacaaacagacacatttaccatctacgcaatcgatctgggagcactgacaaagatcaggatccgtcacgacaatacaggtaaccgagccggttggttcttggatagaatcgacatcactgacatgaataacgaaattacctattatttcccttgccagcgctggcttgccgttgaggaggacgatggccagttatcacgagaactgctgcctgtcgacgaaagttatgttctgccacaatcagaggaaggccgaggcggaggggataacaatccgctggataatcttgccctggaacagaaggacaagtccaccacattctccgtgacaattaagactggagtgaagaaaaatgcgggtacagacgcaaacgtctttatcactttgttcggcacgcaagacgatactgggatgactctgctgaaaagctccaagacaaactcagataaatttgagcgcgacagcatagaaatcttcaccgttgagacgctcgacctgggcgatttgtggaaggttagactcggccacgacaacacagggaaggcacccggatggtttgtcgattgggtcgaagtggatgcccctagtctggggaagtgtatgacgtttccttgtggacgttggctggcaaaaaacgaagacgatggctctatcattcgagatctgttccacgcggagctccagacccgattgtatacaccattcgttccatacgagattacactgtacactagtgatgtgtttgcagcgggaactgatgcaaacattttcatcattatttatggctgtgacgcggtttgcacccagcagaaatacttgtgcactaacaaaagggaacaaaagcaattttttgaacgcaaatccgctagccgatttatcgttgaactggaggatgtcggagagatcattgaaaagatccggatcggtcataataacaccggcatgaaccccggatggcactgttcacacgttgacataagacgacttctaccagacaaggatggcgcagagaccctgactttcccatgcgatcgatggttagccacatccgaggatgataaaaagacaatcagggaattagtaccatatgacatcttcacagagaaatatatgaaagacggttcgttaaggcaggtgtacaaagaggtggaggaaccgctcgatattgtactatactccgtgcaaattttcacaggtaacatccctggcgctggaactgatgctaaagtgtacatcacaatctatggcgatttgggagatacaggtgaaagatacctgggaaagagtgagaacagaactaacaagttcgagagagggaccgccgacacattcatcatcgaggctgccgatttgggcgtcatatacaagatcaaactgaggcatgataacagcaagtggtgtgcggattggtatgttgagaaagtggagatatggaatgacacaaatgaagacgaattcctttttctgtgtggcaggtggctgtcactcaagaaagaggatggacgtctcgagagacttttttatgaaaaagagtacaccggcgatcggtcaagcaactgctcttccccagccgatttttgggagatcgctctgtccagtaagatggcagacgtggacatctctacggtcactggccctatggccgactacgtgcaggaagggccaatcataccatactacgtgagtgtcaccaccgggaagcataaagatgcagccactgactctcgtgctttcatatttctcattggggaagacgatgaacggagcaagaggatctggctggattacccccgaggaaagcgcggatttagccggggatccgttgaagagttttatgtggccggtctggacgtcggcattataaaaaaaatcgagctcgggcatgatggtgcctcacctgaaagctgttggcttgtggaagaactctgccttgccgtgccgacgcaaggcactaagtacatgctgaactgcaattgttggcttgctaaagaccggggtgatggcatcacctctcgggttttcgatctgctcgacgctatggtggttaatattggagtcaaggtcttgtacgagatgacggtttggaccggagatgtggtgggcggaggcacagactcgaacatctttatgaccttatacggcattaacgggtcgacagaggagatgcagttggacaaaaagaaggctcgttttgaaagggagcagaatgacacattcattatggagattctcgacattgcaccctttactaaaatgagaattcgaattgacgggctcggaagcaggccagaatggtttctggaacgtattctcctcaagaacatgaacactggggatctgaccatgttctattatggcgactggttgtcacagagaaaggggaagaagaccctggtgtgcgaaatgtgcgcagtgatcgacgaagaagagatgatggaatggaccagttatacagtagccgtgaaaacttccgacatattgggagcaggcacagatgccaacgtgttcatcatcattttcggcgaaaacggcgactccggcacactcgcactcaagcagtccgcgaattggaacaagtttgagaggaataatacggatacgtttaactttccggatatgctgagcctggggcacttgtgtaagttgagggtgtggcatgacaacaaaggcatcttcccaggatggcacctgtcatacgttgacgttaaagataatagcagagacgagacatttcactttcagtgtgactgctggctcagtaaaagcgaaggagacggtcaaacagtgcgagacttcgcctgtgccaacaataaaatctgcgacgaactggaagaaacaacatatgagatcgtaatcgagaccggcaacggtggcgagacaagagagaacgtctggctgatcctagagggaagaaaaaatcggtcaaaggagtttttgatggaaaatagcagccgacagagagcatttagaaagggcaccaccgatacattcgagttcgactccatatacctgggggacattgcaagcttatgtgttggccatctcgccagggaggataggttcatccctaagcgagagctcgcctggcacgttaagactattactataacagagatggaatatggtaatgtgtactttttcaactgcgactgcttaattcccctgaaacgcaaacgtaagtactttaaagtcttcgaagtgacgaagacaacagaaagtttcgcttctaaggttcaaagcctcgtgcccgttaaatatgaggtgattgtgacaacaggctacgaacccggagctggtacagacgccaatgtgtttgtcacaatcttcggagctaacggcgacacgggcaaacgcgagctgaagcagaaaatgcgtaatctttttgagcggggatccacagaccgcttcttcttggagacactggagttggtcgtgacacgactgggtctggccgcagagtgtggcta

SEQ ID NO: 318684 - DNA, 5844 bp, Artificial Sequence
  derived and/or modified sequence
atgatgcagctgaccctgaacaccctgttccccgtggtgagcacccccgccatcacctacatcgtgaccgtgttcaccggcgacgtgagaggcgccggcaccaagagcaagatctacctggtgatgtacggcgccagaggcaacaagaacagcggcaagatcttcctggagggcggcgtgttcgacagaggcagaaccgacatcttccacatcgagctggccgtgctgctgagccccctgagcagagtgagcgtgggccacggcaacgtgggcgtgaacagaggctggttctgcgagaaggtggtgatcctgtgccccttcaccggcatccagcagaccttcccctgcagcaactggctggacgagaagaaggccgacggcctgatcgagagacagctgtacgagatggtgagcctgagaaagaagagactgaagaagttcccctggagcctgtgggtgtggaccaccgacctgaagaaggccggcaccaacagccccatcttcatccagatctacggccagaagggcagaaccgacgagatcctgctgaaccccaacaacaagtggttcaagcccggcatcatcgagaagttcagaatcgagctgcccgacctgggcagattctacaagatcagagtgtggcacgacaagagaagcagcggcagcggctggcacctggagagaatgaccctgatgaacaccctgaacaaggacaagtacaacttcaactgcaacagatggctggacgccaacgaggacgacaacgagatcgtgagagagatgaccgccgagggccccaccgtgagaagaatcatgggcatggccagataccacgtgaccgtgtgcaccggcgagctggagggcgccggcaccgacgccaacgtgtacctgtgcctgttcggcgacgtgggcgacaccggcgagagactgctgtacaactgcagaaacaacaccgacctgttcgagaagggcaacgccgacgagttcaccatcgagagcgtgaccatgagaaacgtgagaagagtgagaatcagacacgacggcaagggcagcggcagcggctggtacctggacagagtgctggtgagagaggagggccagcccgagagcgacaacgtggagttcccctgcctgagatggctggacaaggacaaggacgacggccagctggtgagagagctgctgcccagcgacagcagcgccaccctgaagaacttcagataccacatcagcctgaagaccggcgacgtgagcggcgccagcaccgacagcagagtgtacatcaagctgtacggcgacaagagcgacaccatcaagcaggtgctgctggtgagcgacaacaacctgaaggactacttcgagagaggcagagtggacgagttcaccctggagaccctgaacatcggcaacatcaacagactggtgatcggccacgacagcaccggcatgcacgccagctggttcctgggcagcgtgcagatcagagtgcccagacagggcaagcagtacaccttccccgccaacagatggctggacaagaaccaggccgacggcagactggaggtggagctgtaccccagcgaggtggtggagatccagaagctggtgcactacgaggtggagatctggaccggcgacgtgggcggcgccggcaccagcgccagagtgtacatgcagatctacggcgagaagggcaagaccgaggtgctgttcctgagcagcagaagcaaggtgttcgagagagccagcaaggacaccttccagctggaggccgccgacgtgggcgaggtgtacaagctgagactgggccacaccggcgagggcttcggccccagctggttcgtggacaccgtgtggctgagacacctggtggtgagagaggtggacctgacccccgaggaggaggccagaaagaagaaggagaaggacaagctgagacagctgctgaagaaggagagactgaaggccaagctgcagagaaagaagaagaagagaaagggcagcgacgaggaggacgagggcgaggaggaggagagcagcagcagcgaggagagcagcagcgaggaggaggagatggaggaggaggaggaggaggaggagttcggccccggcatgcaggaggtgatcgagcagcacaagttcgaggcccacagatggctggccagaggcaaggaggacaacgagctggtggtggagctggtgcccgccggcaagcccggccccgagagaaacacctacgaggtgcaggtggtgaccggcaacgtgcccaaggccggcaccgacgccaacgtgtacctgaccatctacggcgaggagtacggcgacaccggcgagagacccctgaagaagagcgacaagagcaacaagttcgagcagggccagaccgacaccttcaccatctacgccatcgacctgggcgccctgaccaagatcagaatcagacacgacaacaccggcaacagagccggctggttcctggacagaatcgacatcaccgacatgaacaacgagatcacctactacttcccctgccagagatggctggccgtggaggaggacgacggccagctgagcagagagctgctgcccgtggacgagagctacgtgctgccccagagcgaggagggcagaggcggcggcgacaacaaccccctggacaacctggccctggagcagaaggacaagagcaccaccttcagcgtgaccatcaagaccggcgtgaagaagaacgccggcaccgacgccaacgtgttcatcaccctgttcggcacccaggacgacaccggcatgaccctgctgaagagcagcaagaccaacagcgacaagttcgagagagacagcatcgagatcttcaccgtggagaccctggacctgggcgacctgtggaaggtgagactgggccacgacaacaccggcaaggcccccggctggttcgtggactgggtggaggtggacgcccccagcctgggcaagtgcatgaccttcccctgcggcagatggctggccaagaacgaggacgacggcagcatcatcagagacctgttccacgccgagctgcagaccagactgtacacccccttcgtgccctacgagatcaccctgtacaccagcgacgtgttcgccgccggcaccgacgccaacatcttcatcatcatctacggctgcgacgccgtgtgcacccagcagaagtacctgtgcaccaacaagagagagcagaagcagttcttcgagagaaagagcgccagcagattcatcgtggagctggaggacgtgggcgagatcatcgagaagatcagaatcggccacaacaacaccggcatgaaccccggctggcactgcagccacgtggacatcagaagactgctgcccgacaaggacggcgccgagaccctgaccttcccctgcgacagatggctggccaccagcgaggacgacaagaagaccatcagagagctggtgccctacgacatcttcaccgagaagtacatgaaggacggcagcctgagacaggtgtacaaggaggtggaggagcccctggacatcgtgctgtacagcgtgcagatcttcaccggcaacatccccggcgccggcaccgacgccaaggtgtacatcaccatctacggcgacctgggcgacaccggcgagagatacctgggcaagagcgagaacagaaccaacaagttcgagagaggcaccgccgacaccttcatcatcgaggccgccgacctgggcgtgatctacaagatcaagctgagacacgacaacagcaagtggtgcgccgactggtacgtggagaaggtggagatctggaacgacaccaacgaggacgagttcctgttcctgtgcggcagatggctgagcctgaagaaggaggacggcagactggagagactgttctacgagaaggagtacaccggcgacagaagcagcaactgcagcagccccgccgacttctgggagatcgccctgagcagcaagatggccgacgtggacatcagcaccgtgaccggccccatggccgactacgtgcaggagggccccatcatcccctactacgtgagcgtgaccaccggcaagcacaaggacgccgccaccgacagcagagccttcatcttcctgatcggcgaggacgacgagagaagcaagagaatctggctggactaccccagaggcaagagaggcttcagcagaggcagcgtggaggagttctacgtggccggcctggacgtgggcatcatcaagaagatcgagctgggccacgacggcgccagccccgagagctgctggctggtggaggagctgtgcctggccgtgcccacccagggcaccaagtacatgctgaactgcaactgctggctggccaaggacagaggcgacggcatcaccagcagagtgttcgacctgctggacgccatggtggtgaacatcggcgtgaaggtgctgtacgagatgaccgtgtggaccggcgacgtggtgggcggcggcaccgacagcaacatcttcatgaccctgtacggcatcaacggcagcaccgaggagatgcagctggacaagaagaaggccagattcgagagagagcagaacgacaccttcatcatggagatcctggacatcgcccccttcaccaagatgagaatcagaatcgacggcctgggcagcagacccgagtggttcctggagagaatcctgctgaagaacatgaacaccggcgacctgaccatgttctactacggcgactggctgagccagagaaagggcaagaagaccctggtgtgcgagatgtgcgccgtgatcgacgaggaggagatgatggagtggaccagctacaccgtggccgtgaagaccagcgacatcctgggcgccggcaccgacgccaacgtgttcatcatcatcttcggcgagaacggcgacagcggcaccctggccctgaagcagagcgccaactggaacaagttcgagagaaacaacaccgacaccttcaacttccccgacatgctgagcctgggccacctgtgcaagctgagagtgtggcacgacaacaagggcatcttccccggctggcacctgagctacgtggacgtgaaggacaacagcagagacgagaccttccacttccagtgcgactgctggctgagcaagagcgagggcgacggccagaccgtgagagacttcgcctgcgccaacaacaagatctgcgacgagctggaggagaccacctacgagatcgtgatcgagaccggcaacggcggcgagaccagagagaacgtgtggctgatcctggagggcagaaagaacagaagcaaggagttcctgatggagaacagcagcagacagagagccttcagaaagggcaccaccgacaccttcgagttcgacagcatctacctgggcgacatcgccagcctgtgcgtgggccacctggccagagaggacagattcatccccaagagagagctggcctggcacgtgaagaccatcaccatcaccgagatggagtacggcaacgtgtacttcttcaactgcgactgcctgatccccctgaagagaaagagaaagtacttcaaggtgttcgaggtgaccaagaccaccgagagcttcgccagcaaggtgcagagcctggtgcccgtgaagtacgaggtgatcgtgaccaccggctacgagcccggcgccggcaccgacgccaacgtgttcgtgaccatcttcggcgccaacggcgacaccggcaagagagagctgaagcagaagatgagaaacctgttcgagagaggcagcaccgacagattcttcctggagaccctggagctggtggtgaccagactgggcctggccgccgagtgcggctag

SEQ ID NO: 318685 - protein, 224 aa, Artificial Sequence
  derived and/or modified sequence
MQAPGRGPLGLRLMMPGRRGALREPGGCGSCLGVALALLLLLLPACCPVRAQNDTEPIVLEGKCLVVCDSSPSADGAVTSSLGISVRSGSAKVAFSATRSTNHEPSEMSNRTMTIYFDQVLVNIGNHFDLASSIFVAPRKGIYSFSFHVVKVYNRQTIQVSLMQNGYPVISAFAGDQDVTREAASNGVLLLMEREDKVHLKLERGNLMGGWKYSTFSGFLVFPL

SEQ ID NO: 318686 - DNA, 675 bp, Artificial Sequence
  derived and/or modified sequence
atgcaggcccccggcagaggccccctgggcctgagactgatgatgcccggcagaagaggcgccctgagagagcccggcggctgcggcagctgcctgggcgtggccctggccctgctgctgctgctgctgcccgcctgctgccccgtgagagcccagaacgacaccgagcccatcgtgctggagggcaagtgcctggtggtgtgcgacagcagccccagcgccgacggcgccgtgaccagcagcctgggcatcagcgtgagaagcggcagcgccaaggtggccttcagcgccaccagaagcaccaaccacgagcccagcgagatgagcaacagaaccatgaccatctacttcgaccaggtgctggtgaacatcggcaaccacttcgacctggccagcagcatcttcgtggcccccagaaagggcatctacagcttcagcttccacgtggtgaaggtgtacaacagacagaccatccaggtgagcctgatgcagaacggctaccccgtgatcagcgccttcgccggcgaccaggacgtgaccagagaggccgccagcaacggcgtgctgctgctgatggagagagaggacaaggtgcacctgaagctggagagaggcaacctgatgggcggctggaagtacagcaccttcagcggcttcctggtgttccccctgtag

SEQ ID NO: 318687 - DNA, 675 bp, Artificial Sequence
  derived and/or modified sequence
atgcaagcaccgggcaggggtccactggggctgcggcttatgatgcctgggaggcgaggagcactgagagagcctggcggctgtgggtcatgtctcggtgtggccctggcgctcctgctcctcctgctgcccgcttgttgtcccgtccgcgcccagaatgacaccgagccgatcgtgcttgagggaaagtgtcttgttgtgtgcgattctagccctagcgcagacggagcagtgacctcctctctggggatcagcgtgcggtccggcagtgctaaggtggcattttctgccaccaggtccactaatcacgagccttcagagatgtccaataggactatgacaatctattttgaccaggtcctcgtgaacattggcaaccacttcgatctggcatcctctatattcgtcgctccaagaaaaggtatctattccttcagcttccacgtcgtgaaagtgtacaaccgccagacgatccaagtcagcctgatgcagaacggctaccccgtgatcagcgccttcgcgggggaccaagatgttacccgggaggcagcctccaatggcgtccttttactaatggagcgagaggacaaagtgcatctgaagctggagagagggaatcttatggggggctggaaatactcaacattcagcgggttcctggtatttccactttag

SEQ ID NO: 318688 - DNA, 675 bp, Artificial Sequence
  derived and/or modified sequence
atgcaggcccctggccggggccccctgggcctgcggctgatgatgcctggccggcggggggccctgcgggagcccggcggctgcggcagctgcctgggcgtggccctggccctgctgctgctgctgctgcctgcctgctgccctgtgcgggcccagaatgacacagagcccatcgtgctggagggcaagtgcctggtggtgtgtgacagcagccccagcgcagatggagctgtgaccagcagcctgggcatctctgtgcgcagcggcagcgccaaggtggccttcagcgccaccaggagcaccaaccacgagcccagcgagatgagcaacagaaccatgaccatctactttgaccaggtgctggtgaacatcggcaaccactttgacctggccagcagcatctttgtggcccccaggaagggcatctacagcttctccttccacgtggtgaaggtgtacaaccggcagaccatccaggtgtccctgatgcagaatggctaccctgtgatcagcgcctttgctggggaccaggatgtgacccgggaggccgccagcaatggagtgctgctgctgatggagcgggaggacaaggtgcacctgaagctggagcggggcaacctgatgggcggctggaagtacagcaccttcagcggcttcctggtgttccccctgtag

SEQ ID NO: 318689 - DNA, 675 bp, Artificial Sequence
  derived and/or modified sequence
atgcaggcccccggccggggccccctgggcctgcggctgatgatgccagggagacgaggcgctttacgggagcccggcggatgcggcagctgtctgggtgttgccctagcactgcttctcctattgcttcccgcatgttgcccagtccgcgctcaaaatgacactgaacctatcgttctggaaggaaagtgtctggtggtttgtgatagctcaccgagcgctgatggcgctgtgacttctagtctgggtatctccgtacggtctggctcggccaaggtagctttctccgcgacgagatcaacaaaccatgagccatctgagatgtccaatcgcacaatgactatctactttgaccaggtcctcgtaaacattggcaaccacttcgacctggccagcagcatttttgttgcaccaagaaagggcatctacagttttagtttccacgttgtgaaagtctataatcggcagactatccaggtctcactcatgcagaatgggtatccagtgatctctgcctttgctggcgaccaggacgtgacacgcgaggccgcttctaatggggtgttgttgctcatggaacgggaagacaaagtgcacttaaagctggagcgcgggaacctcatggggggctggaagtatagcacattcagtggcttcctggtgttccctctgtag

SEQ ID NO: 318690 - DNA, 675 bp, Artificial Sequence
  derived and/or modified sequence
atgcaggcccctggcagaggcccacttggcctccgcctaatgatgcctggccgtagaggcgctttacgggaacccggagggtgcggctcgtgcctcggtgtcgccctggccctgctgcttctgctgctgccggcttgctgtcccgtgagagcacaaaacgacactgagccaatagtgctggagggaaagtgtctcgtggtctgtgattcctctccatccgctgacggcgctgtcacaagctccttagggatcagtgtgagaagtggatcagctaaggtagccttttctgccaccaggagtaccaatcatgaaccaagcgagatgagcaaccgtacgatgactatctacttcgaccaggtcctggttaatattggcaatcattttgatctggcaagctccatcttcgtagcacccagaaagggcatctactcattctctttccatgtggtcaaagtgtacaatcggcagacaatccaggtctctctgatgcagaacggttatcccgtcatcagtgcattcgccggtgaccaggatgtaacaagagaagccgcaagtaacggcgtcctgttgttaatggagcgtgaagacaaggtacatcttaaattggagcgcggaaatttgatgggcggatggaagtatagtacatttagcggattcttggttttccccctgtag

SEQ ID NO: 318691 - DNA, 2945 bp, Artificial Sequence
  derived and/or modified sequence
gtcttctgtcggagtccgccggtccgcagcctgcggcagggaggcccgggcacccgcaggtggcgccccacgtccgtgtttgcgccctcagccgagctccaggcgcagctgggaaacccagcgcgtctccccgggtcctttgagcgagcgcggacaccgcaatttaataaataagcgcaagcgccagccgctccaccagtccgaggtccagaggagcagacacacagacccgggccggaggcccctcttctagccctgcgggaaccggacagttccccaactgggactctggaaccacagctcctaaatcatcaaattctcaagctttttttttccctctcttcgtcccagccatcccagtcttcttcttcttttttttttttttaacttattgtttttttcgctcctgtcattatgaaagtggtcacgccattcaatattaagacttggagggaattggggaaagaaaagaaagaatctaaaagaagagaagcgaccggtgcttttaagggtgtctaattttcaaaagagacgtctgggagtattttgctctgggcgtttggagcaacttcgcggacagcggagctcgcccagcatggatgttccaggttcacaggcgcctttcttctgagaacgaccctggccttgaacgtcagagccggggacgaaggcccccggaggctgctgcgagctccgcgcgttccttcgcgcccttccgcgccgctcgcgccggcgccggcctccacccccgcgcgccgcctcccaccagtcccgatgcaggcgcccggccgggggccactcgggctgcggctgatgatgcccgggcgccggggggcgctgcgcgagccgggcggctgcggatcctgcctgggggtggcgctggccctgctgttgctgctactgcccgcctgctgccccgtgcgggcgcagaacgacacggagcccatcgtgctggagggcaagtgcctggtggtgtgcgactccagcccgtcggcggacggcgccgtcacctcctccctaggcatctccgtgcgctccggcagcgccaaggtggccttctccgccacgcggagcaccaaccacgagccgtccgagatgagcaaccgcaccatgaccatctatttcgaccaggtattagtaaatattggcaaccactttgatcttgcttccagtatatttgtagcaccgagaaaagggatttatagcttcagcttccacgtggtcaaagtgtataacagacaaaccatccaggtcagtttaatgcagaatggctacccagtgatctcggcctttgcaggagaccaggatgtcaccagagaagctgctagcaatggcgtgctgctgctcatggaaagggaagacaaagtgcatctcaaacttgagagaggcaacctcatggggggctggaaatactccacattctcgggcttcttggtgtttcctctataaacacagagccccctagatggtgggggaatggcaaactggacccaggactccgccctttaaaacaccctgaacttactggaattggacaccttgtttccaacctccgtcagactgttgcagtagaagaatgatttcctttgaaacctccagtacttttgtttttgttttttggaatactgacaattcctcgggaacctggcctctaattagttttagatgacaaggtcttaaggagaaatgaaattatcgatttgagcaatttgtacctgtgattgtaaagtcaatatcggattttattgttgggaccatggacctcttttgtttgtatgttgtattgtcgtcccaacggaaggagagctcctgactccaggatgggctgcaggttgcagtcagggcttgaagtaggagcccagcaaagaaccacctgctggacagtccttgacatgtgttctgtgtgtgtctgtatagccttaagaaaaagaatggcttcactttcattctgtattcttccccccaccatgtggctgggaggacttgggagggggatggggacattgggaacctgtcaagaagtgctttatccagagaagcaaattttgcacgattggactgcaatttttgttttgtattgtttgtgttttttcttgaaaagctttacttttctttccacactcagctctccctcctcaaccccacttttatttttcttgctggggttgaggagagaaaatatagaattcctggataagaccaaacaaaacaaaacattaaaatacctgtatgttttgttttagacgagaccaaactaaacaaaaagtatctgtttatcaaagtaaaagtaacacaatggacaattctgcttattctctcaaagagattctaagatgcacctttagaactattaatagcaacctgcatttttttttaatttatacttcagaatcctttaagaacctggtgttcctgagtggtcctgaatcatataagttggtaatggaagctgtaatgaccaagtcccctaaacatactatgtctttgccacgtgtgctgtgacttctctgtgggtgatttaatttatttggatccacctctgagtgagcgcacagtgatcaggtgcttcaaagccaacagaccagctcctcttcctccggatcctcttttgatctgcccaggaaagggatgcattgacactctcctgcatgcacctggcgagaagccacctgaaagtcactgtggttaaagatattggtggaggtaccccaggagcactgttacaaatccttcttgttttggcatctcgtacaacattattaagacacagctgagagttgatgggtgtgtaatgcatatgccaaggaaatgtcactaatcccaaagcaatcaaaaaggagacctcaaaccagatgttaatttgttctttgtgtaacaatgtaaccaaaatattgatgataaaagtcataatttaagattcagaataaatgggtttgatgtctggc

SEQ ID NO: 318692 - protein, 98 aa, Artificial Sequence
  derived and/or modified sequence
MAEQSDEAVKYYTLEEIQKHNHSKSTWLILHHKVYDLTKFLEEHPGGEEVLREQAGGDATENFEDVGHSTDAREMSKTFIIGELHPDDRPKLNKPPKP

SEQ ID NO: 318693 - DNA, 297 bp, Artificial Sequence
  derived and/or modified sequence
atggccgaacagagcgacgaagctgttaaatactacacccttgaggagatccaaaagcacaatcatagtaaaagcacatggctgattttgcatcacaaggtgtacgatttaacgaagttcttagaggagcatccagggggagaagaggtgctcagggagcaggccggcggggatgctaccgagaacttcgaagatgtcggccactccacagacgctcgagaaatgtccaagacctttatcatcggcgagctgcatcccgacgatcggcccaaactcaataagccccccaagccatag

SEQ ID NO: 318694 - DNA, 297 bp, Artificial Sequence
  derived and/or modified sequence
atggctgaacagtcagacgaagcagttaagtactatacactcgaggaaatccaaaaacataatcattctaaaagcacctggctcatccttcaccacaaggtgtacgatttgacaaagtttttggaggaacatcctggtggcgaggaggtcctgagggaacaggctgggggcgacgcaacagagaattttgaggatgtcggacatagcacagacgcccgggagatgtcaaaaacatttattattggcgagcttcacccggacgaccgcccaaaactcaataaacctccggagccctag

SEQ ID NO: 318695 - DNA, 297 bp, Artificial Sequence
  derived and/or modified sequence
atggccgagcagagtgatgaggccgtgaagtactacaccctggaggagatccagaagcacaaccacagcaagagcacctggctgatcctgcaccacaaggtgtatgacctgaccaagttcctggaggagcaccctggaggagaggaggtgctgcgggagcaggccggaggagatgccacagaaaattttgaagatgtgggccacagcacagatgcccgggagatgagcaagaccttcatcattggagagctgcacccagatgaccggcccaagctgaacaagccacccaagccctag

SEQ ID NO: 318696 - DNA, 297 bp, Artificial Sequence
  derived and/or modified sequence
atggccgagcagagtgatgaggccgtgaagtactacaccctggaggagatccagaagcacaaccacagcaagagcacctggctgatcctgcaccacaaggtgtatgacctgaccaagttcctggaggagcaccctggaggagaggaggtgctgcgggagcaggccggaggagatgccacagaaaattttgaagatgtgggccacagcacagatgcccgggagatgagcaagaccttcatcattggagagctgcacccagatgaccggcccaagctgaacaagcccccagagccctag

SEQ ID NO: 318697 - DNA, 297 bp, Artificial Sequence
  derived and/or modified sequence
atggccgagcagagcgacgaggccgtgaagtactacaccctggaggagatccaaaagcataaccacagcaaatccacatggctgattttacaccataaggtgtacgatctcactaagtttctggaagagcatccgggcggagaagaagtcctgagagaacaggccggcggcgatgccacagagaattttgaggacgtgggccattccacggatgcccgcgagatgagcaaaaccttcataatcggcgaactccacccggacgaccggcctaaactgaataagcctcccaagccttag

SEQ ID NO: 318698 - DNA, 297 bp, Artificial Sequence
  derived and/or modified sequence
atggccgagcagagcgacgaggccgtgaagtactacaccctggaggagatccaaaaacataatcactcaaaatcaacttggctcatcctgcatcataaagtttatgatcttactaagttcctcgaggaacatcctggcggtgaggaggtgctccgggaacaggctggcggcgatgctacagagaacttcgaagacgtggggcacagcaccgacgcacgtgagatgtcaaaaacttttataataggcgagctacacccagatgatcgacctaagcttaacaagccccccgagccttag

SEQ ID NO: 318699 - DNA, 297 bp, Artificial Sequence
  derived and/or modified sequence
atggctgagcagtcggacgaggctgtgaagtattacacactagaggagatccagaaacacaatcacagcaagtcaacatggctcatcctccatcataaagtctacgacctgactaaatttctggaggagcatcccggaggcgaagaggtactcagagaacaggcgggaggcgacgcaactgagaattttgaggatgtggggcatagcactgatgcccgtgaaatgtcaaagaccttcatcattggagagctgcatcccgacgaccgcccaaagctgaataaacctccaaagccctag

SEQ ID NO: 318700 - DNA, 297 bp, Artificial Sequence
  derived and/or modified sequence
atggctgaacaaagtgatgaagccgttaagtattatactcttgaggaaatccagaagcacaatcatagcaagtctacctggcttatcctgcatcacaaggtctatgatctgacaaagtttctggaagaacaccccggaggggaggaggtccttagggagcaagcgggaggcgatgcaacagagaacttcgaggacgtgggacactccaccgatgcccgtgaaatgtctaaaaccttcattatcggagaattacaccccgacgaccgcccaaagctgaataagcccccagagccatag

SEQ ID NO: 318701 - DNA, 363 bp, Artificial Sequence
  derived and/or modified sequence
ggctgagtcgcgcgctctgctccacccgacggggctgtgtgtgctgggcctggctcgcggcgaaccgagatggcagagcagtcggacgaggccgtgaagtactacaccctagaggagattcagaagcacaaccacagcaagagcacctggctgatcctgcaccacaaggtgtacgatttgaccaaatttctggaagagcatcctggtggggaagaagttttaagggaacaagctggaggtgacgctactgagaactttgaggatgtcgggcactctacagatgccagggaaatgtccaaaacattcatcattggggagctccatccagatgacagaccaaagttaaacaagcctccgaaacct

SEQ ID NO: 318702 - DNA, 297 bp, Artificial Sequence
  derived and/or modified sequence
atggccgagcagagcgacgaggccgtgaagtactacaccctggaggagatccagaagcacaaccacagcaagagcacctggctgatcctgcaccacaaggtgtacgacctgaccaagttcctggaggagcaccccggcggcgaggaggtgctgagagagcaggccggcggcgacgccaccgagaacttcgaggacgtgggccacagcaccgacgccagagagatgagcaagaccttcatcatcggcgagctgcaccccgacgacagacccaagctgaacaagccccccaagccctag

SEQ ID NO: 318703 - DNA, 297 bp, Artificial Sequence
  derived and/or modified sequence
atggccgagcagagcgacgaggccgtgaagtactacaccctggaggagatccagaagcacaaccacagcaagagcacctggctgatcctgcaccacaaggtgtacgacctgaccaagttcctggaggagcaccccggcggcgaggaggtgctgagagagcaggccggcggcgacgccaccgagaacttcgaggacgtgggccacagcaccgacgccagagagatgagcaagaccttcatcatcggcgagctgcaccccgacgacagacccaagctgaacaagccccccgagccctag

SEQ ID NO: 318704 - protein, 897 aa, Artificial Sequence
  derived and/or modified sequence
MGDTVLLKCEVIGEPMPTIHWQKNQQDLTPIPGDSRVVVLPSGALQISRLQPGDIGIYRCSARNPASSRTGNEAEVRILSDPGLHRQLYFLQRPSNVVAIEGKDAVLECCVSGYPPPSFTWLRGEEVIQLRSKKYSLLGGSNLLISNVTDDDSGMYTCVVTYKNENISASAELTVLVPPWFLNHPSNLYAYESMDIEFECTVSGKPVPTVNWMKNGDVVIPSDYFQIVGGSNLRILGVVKSDEGFYQCVAENEAGNAQTSAQLIVPKPAIPSSSVLPSAPRDVVPVLVSSRFVRLSWRPPAEAKGNIQTFTVFFSREGDNRERALNTTQPGSLQLTVGNLKPEAMYTFRVVAYNEWGPGESSQPIKVATQPELQVPGPVENLQAVSTSPTSILITWEPPAYANGPVQGYRLFCTEVSTGKEQNIEVDGLSYKLEGLKKFTEYSLRFLAYNRYGPGVSTDDITVVTLSDVPSAPPQNVSLEVVNSRSIKVSWLPPPSGTQNGFITGYKIRHRKTTRRGEMETLEPNNLWYLFTGLEKGSQYSFQVSAMTVNGTGPPSNWYTAETPENDLDESQVPDQPSSLHVRPQTNCIIMSWTPPLNPNIVVRGYIIGYGVGSPYAETVRVDSKQRYYSIERLESSSHYVISLKAFNNAGEGVPLYESATTRSITDLSTPMLPPVGVQAVALTHDAVRVSWADNSVPKNQKTSEVRLYTVRWRTSFSASAKYKSEDTTSLSYTATGLKPNTMYEFSVMVTKNRRSSTWSMTAHATTYEAAPTSAPKDLTVITREGKPRAVIVSWQPPLEANGKITAYILFYTLDKNIPIDDWIMETISGDRLTHQIMDLNLDTMYYFRIQARNSKGVGPLSDPILFRTLKVEHPDKMANDQDTGVTINLVNEVLLG

SEQ ID NO: 318705 - DNA, 2316 bp, Artificial Sequence
  derived and/or modified sequence
ggcgtgcccgtgatcaagtggaagaaggacggcatccacctggccctgggcatggacgagagaaagcagcagctgagcaacggcagcctgctgatccagaacatcctgcacagcagacaccacaagcccgacgagggcctgtaccagtgcgaggccagcctgggcgacagcggcagcatcatcagcagaaccgccaaggtggccgtggccggccccctgagattcctgagccagaccgagagcgtgaccgccttcatgggcgacaccgtgctgctgaagtgcgaggtgatcggcgagcccatgcccaccatccactggcagaagaaccagcaggacctgacccccatccccggcgacagcagagtggtggtgctgcccagcggcgccctgcagatcagcagactgcagcccggcgacatcggcatctacagatgcagcgccagaaaccccgccagcagcagaaccggcaacgaggccgaggtgagaatcctgagcgaccccggcctgcacagacagctgtacttcctgcagagacccagcaacgtggtggccatcgagggcaaggacgccgtgctggagtgctgcgtgagcggctaccccccccccagcttcacctggctgagaggcgaggaggtgatccagctgagaagcaagaagtacagcctgctgggcggcagcaacctgctgatcagcaacgtgaccgacgacgacagcggcatgtacacctgcgtggtgacctacaagaacgagaacatcagcgccagcgccgagctgaccgtgctggtgcccccctggttcctgaaccaccccagcaacctgtacgcctacgagagcatggacatcgagttcgagtgcaccgtgagcggcaagcccgtgcccaccgtgaactggatgaagaacggcgacgtggtgatccccagcgactacttccagatcgtgggcggcagcaacctgagaatcctgggcgtggtgaagagcgacgagggcttctaccagtgcgtggccgagaacgaggccggcaacgcccagaccagcgcccagctgatcgtgcccaagcccgccatccccagcagcagcgtgctgcccagcgcccccagagacgtggtgcccgtgctggtgagcagcagattcgtgagactgagctggagaccccccgccgaggccaagggcaacatccagaccttcaccgtgttcttcagcagagagggcgacaacagagagagagccctgaacaccacccagcccggcagcctgcagctgaccgtgggcaacctgaagcccgaggccatgtacaccttcagagtggtggcctacaacgagtggggccccggcgagagcagccagcccatcaaggtggccacccagcccgagctgcaggtgcccggccccgtggagaacctgcaggccgtgagcaccagccccaccagcatcctgatcacctgggagccccccgcctacgccaacggccccgtgcagggctacagactgttctgcaccgaggtgagcaccggcaaggagcagaacatcgaggtggacggcctgagctacaagctggagggcctgaagaagttcaccgagtacagcctgagattcctggcctacaacagatacggccccggcgtgagcaccgacgacatcaccgtggtgaccctgagcgacgtgcccagcgcccccccccagaacgtgagcctggaggtggtgaacagcagaagcatcaaggtgagctggctgcccccccccagcggcacccagaacggcttcatcaccggctacaagatcagacacagaaagaccaccagaagaggcgagatggagaccctggagcccaacaacctgtggtacctgttcaccggcctggagaagggcagccagtacagcttccaggtgagcgccatgaccgtgaacggcaccggcccccccagcaactggtacaccgccgagacccccgagaacgacctggacgagagccaggtgcccgaccagcccagcagcctgcacgtgagaccccagaccaactgcatcatcatgagctggaccccccccctgaaccccaacatcgtggtgagaggctacatcatcggctacggcgtgggcagcccctacgccgagaccgtgagagtggacagcaagcagagatactacagcatcgagagactggagagcagcagccactacgtgatcagcctgaaggccttcaacaacgccggcgagggcgtgcccctgtacgagagcgccaccaccagaagcatcaccgtgagaagacacaacatcagcaagctgcacagcaacagaccccagaccaagcacaacgtgtag

SEQ ID NO: 318706 - DNA, 2694 bp, Artificial Sequence
  derived and/or modified sequence
atgggcgacaccgtgctgctgaagtgcgaggtgatcggcgagcccatgcccaccatccactggcagaagaaccagcaggacctgacccccatccccggcgacagcagagtggtggtgctgcccagcggcgccctgcagatcagcagactgcagcccggcgacatcggcatctacagatgcagcgccagaaaccccgccagcagcagaaccggcaacgaggccgaggtgagaatcctgagcgaccccggcctgcacagacagctgtacttcctgcagagacccagcaacgtggtggccatcgagggcaaggacgccgtgctggagtgctgcgtgagcggctaccccccccccagcttcacctggctgagaggcgaggaggtgatccagctgagaagcaagaagtacagcctgctgggcggcagcaacctgctgatcagcaacgtgaccgacgacgacagcggcatgtacacctgcgtggtgacctacaagaacgagaacatcagcgccagcgccgagctgaccgtgctggtgcccccctggttcctgaaccaccccagcaacctgtacgcctacgagagcatggacatcgagttcgagtgcaccgtgagcggcaagcccgtgcccaccgtgaactggatgaagaacggcgacgtggtgatccccagcgactacttccagatcgtgggcggcagcaacctgagaatcctgggcgtggtgaagagcgacgagggcttctaccagtgcgtggccgagaacgaggccggcaacgcccagaccagcgcccagctgatcgtgcccaagcccgccatccccagcagcagcgtgctgcccagcgcccccagagacgtggtgcccgtgctggtgagcagcagattcgtgagactgagctggagaccccccgccgaggccaagggcaacatccagaccttcaccgtgttcttcagcagagagggcgacaacagagagagagccctgaacaccacccagcccggcagcctgcagctgaccgtgggcaacctgaagcccgaggccatgtacaccttcagagtggtggcctacaacgagtggggccccggcgagagcagccagcccatcaaggtggccacccagcccgagctgcaggtgcccggccccgtggagaacctgcaggccgtgagcaccagccccaccagcatcctgatcacctgggagccccccgcctacgccaacggccccgtgcagggctacagactgttctgcaccgaggtgagcaccggcaaggagcagaacatcgaggtggacggcctgagctacaagctggagggcctgaagaagttcaccgagtacagcctgagattcctggcctacaacagatacggccccggcgtgagcaccgacgacatcaccgtggtgaccctgagcgacgtgcccagcgcccccccccagaacgtgagcctggaggtggtgaacagcagaagcatcaaggtgagctggctgcccccccccagcggcacccagaacggcttcatcaccggctacaagatcagacacagaaagaccaccagaagaggcgagatggagaccctggagcccaacaacctgtggtacctgttcaccggcctggagaagggcagccagtacagcttccaggtgagcgccatgaccgtgaacggcaccggcccccccagcaactggtacaccgccgagacccccgagaacgacctggacgagagccaggtgcccgaccagcccagcagcctgcacgtgagaccccagaccaactgcatcatcatgagctggaccccccccctgaaccccaacatcgtggtgagaggctacatcatcggctacggcgtgggcagcccctacgccgagaccgtgagagtggacagcaagcagagatactacagcatcgagagactggagagcagcagccactacgtgatcagcctgaaggccttcaacaacgccggcgagggcgtgcccctgtacgagagcgccaccaccagaagcatcaccgacctgagcacccccatgctgccccccgtgggcgtgcaggccgtggccctgacccacgacgccgtgagagtgagctgggccgacaacagcgtgcccaagaaccagaagaccagcgaggtgagactgtacaccgtgagatggagaaccagcttcagcgccagcgccaagtacaagagcgaggacaccaccagcctgagctacaccgccaccggcctgaagcccaacaccatgtacgagttcagcgtgatggtgaccaagaacagaagaagcagcacctggagcatgaccgcccacgccaccacctacgaggccgcccccaccagcgcccccaaggacctgaccgtgatcaccagagagggcaagcccagagccgtgatcgtgagctggcagccccccctggaggccaacggcaagatcaccgcctacatcctgttctacaccctggacaagaacatccccatcgacgactggatcatggagaccatcagcggcgacagactgacccaccagatcatggacctgaacctggacaccatgtactacttcagaatccaggccagaaacagcaagggcgtgggccccctgagcgaccccatcctgttcagaaccctgaaggtggagcaccccgacaagatggccaacgaccaggacaccggcgtgaccatcaacctggtgaacgaggtgctgctgggctag

SEQ ID NO: 318707 - DNA, 2874 bp, Artificial Sequence
  derived and/or modified sequence
ggagttccagtgatcaagtggaagaaagatggcattcatctggccttgggaatggatgaaaggaagcagcaactttcaaatgggtctctgctgatacaaaacatacttcattccagacaccacaagccagatgagggactttaccaatgtgaggcatctttaggagattctggctcaattattagtcggacagcaaaagttgcagtagcaggaccactgaggttcctttcacagacagaatctgtcacagccttcatgggagacacagtgctactcaagtgtgaagtcattggggagcccatgccaacaatccactggcagaagaaccaacaagacctgactccaatcccaggtgactcccgagtggtggtcttgccctctggagcattgcagatcagccgactccaaccgggggacattggaatttaccgatgctcagctcgaaatccagccagctcaagaacaggaaatgaagcagaagtcagaattttatcagatccaggactgcatagacagctgtattttctgcaaagaccatccaatgtagtagccattgaaggaaaagatgctgtcctggaatgttgtgtttctggctatcctccaccaagttttacctggttacgaggcgaggaagtcatccaactcaggtctaaaaagtattctttattgggtggaagcaacttgcttatctccaatgtgacagatgatgacagtggaatgtatacctgtgttgtcacatataaaaatgagaatattagtgcctctgcagagctcacagtcttggttccgccatggtttttaaatcatccttccaacctgtatgcctatgaaagcatggatattgagtttgaatgtacagtctctggaaagcctgtgcccactgtgaattggatgaagaatggagatgtggtcattcctagtgattattttcagatagtgggaggaagcaacttacggatacttggggtggtgaagtcagatgaaggcttttatcaatgtgtggctgaaaatgaggctggaaatgcccagaccagtgcacagctcattgtccctaagcctgctatcccaagctccagtgtcctcccttcggctcccagagatgtggtccctgtcttggtttccagccgatttgtccgtctcagctggcgcccacctgcagaagcgaaagggaacattcaaactttcacggtctttttctccagagaaggtgacaacagggaacgagcattgaatacaacacagcctgggtcccttcagctcactgtgggaaacctgaagccagaagccatgtacacctttcgagttgtggcttacaatgaatggggaccgggagagagttctcaacccatcaaggtggccacacagcctgagttgcaagttccagggccagtagaaaacctgcaagctgtatctacctcacctacctcaattcttattacctgggaaccccctgcctatgcaaacggtccagtccaaggttacagattgttctgcactgaggtgtccacaggaaaagaacagaatatagaggttgatggactatcttataaactggaaggcctgaaaaaattcaccgaatatagtcttcgattcttagcttataatcgctatggtccgggcgtctctactgatgatataacagtggttacactttctgacgtgccaagtgccccgcctcagaacgtctccctggaagtggtcaattcaagaagtatcaaagttagctggctgcctcctccatcaggaacacaaaatggatttattaccggctataaaattcgacacagaaagacgacccgcaggggtgagatggaaacactggagccaaacaacctctggtacctattcacaggactggagaaaggaagtcagtacagtttccaggtgtcagccatgacagtcaatggtactggaccaccttccaactggtatactgcagagactccagagaatgatctagatgaatctcaagttcctgatcaaccaagctctcttcatgtgaggccccagactaactgcatcatcatgagttggactcctcccttgaacccaaacatcgtggtgcgaggttatattatcggttatggcgttgggagcccttacgctgagacagtgcgtgtggacagcaagcagcgatattattccattgagaggttagagtcaagttcccattatgtaatctccctaaaagcttttaacaatgccggagaaggagttcctctttatgaaagtgccaccaccaggtctataaccgtcagaagacacaacatctctaagttacacagcaacaggcctcaaaccaaacacaatgtatgaattctcggtcatggtaacaaaaaacagaaggtccagtacttggagcatgactgcacatgccaccacgtatgaagcagcccccacctctgctcccaaggacttgacagtcattactagggaagggaagcctcgtgccgtcattgtgagttggcagcctcccttggaagccaatgggaaaattactgcttacatcttattttataccttggacaagaacatcccaattgatgactggattatggaaacaatcagtggtgataggcttactcatcaaatcatggatctcaaccttgatactatgtattactttcgaattcaagcacgaaattcaaaaggagtggggccactctctgatcctatcctcttcaggactctgaaagtggaacaccctgacaaaatggctaatgaccaagacactggcgtgacgattaatcttgttaatgaagttctgcttggctgaggctgcggctctgataaggaagatgtaaattttcttgagaggaaattgttttgtctccattctgaaggaccaattaaaatgtcaagcttctttgtatg

SEQ ID NO: 318708 - DNA, 3169 bp, Artificial Sequence
  derived and/or modified sequence
gttccagtgatcaagtggaagaaagatggcattcatctggccttgggaatggatgaaaggaagcagcaactttcaaatgggtctctgctgatacaaaacatacttcattccagacaccacaagccagatgagggactttaccaatgtgaggcatctttaggagattctggctcaattattagtcggacagcaaaagttgcagtagcagactaggtgtcatgtgatataactggacccaggagaatgaccccacaactgaaagatttttatgaaggatgatttactattctccaacgtactgacatttttctacagcccaatcattgctggggagaccactgaggttcctttcacagacagaatctgtcacagccttcatgggagacacagtgctactcaagtgtgaagtcattggggagcccatgccaacaatccactggcagaagaaccaacaagacctgactccaatcccaggtgactcccgagtggtggtcttgccctctggagcattgcagatcagccgactccaaccgggggacattggaatttaccgatgctcagctcgaaatccagccagctcaagaacaggaaatgaagcagaagtcagaattttatcagatccaggactgcatagacagctgtattttctgcaaagaccatccaatgtagtagccattgaaggaaaagatgctgtcctggaatgttgtgtttctggctatcctccaccaagttttacctggttacgaggcgaggaagtcatccaactcaggtctaaaaagtattctttattgggtggaagcaacttgcttatctccaatgtgacagatgatgacagtggaatgtatacctgtgttgtcacatataaaaatgagaatattagtgcctctgcagagctcacagtcttggttccgccatggtttttaaatcatccttccaacctgtatgcctatgaaagcatggatattgagtttgaatgtacagtctctggaaagcctgtgcccactgtgaattggatgaagaatggagatgtggtcattcctagtgattattttcagatagtgggaggaagcaacttacggatacttggggtggtgaagtcagatgaaggcttttatcaatgtgtggctgaaaatgaggctggaaatgcccagaccagtgcacagctcattgtccctaagcctgctatcccaagctccagtgtcctcccttcggctcccagagatgtggtccctgtcttggtttccagccgatttgtccgtctcagctggcgcccacctgcagaagcgaaagggaacattcaaactttcacggtctttttctccagagaaggtgacaacagggaacgagcattgaatacaacacagcctgggtcccttcagctcactgtgggaaacctgaagccagaagccatgtacacctttcgagttgtggcttacaatgaatggggaccgggagagagttctcaacccatcaaggtggccacacagcctgagttgcaagttccagggccagtagaaaacctgcaagctgtatctacctcacctacctcaattcttattacctgggaaccccctgcctatgcaaacggtccagtccaaggttacagattgttctgcactgaggtgtccacaggaaaagaacagaatatagaggttgatggactatcttataaactggaaggcctgaaaaaattcaccgaatatagtcttcgattcttagcttataatcgctatggtccgggcgtctctactgatgatataacagtggttacactttctgacgtgccaagtgccccgcctcagaacgtctccctggaagtggtcaattcaagaagtatcaaagttagctggctgcctcctccatcaggaacacaaaatggatttattaccggctataaaattcgacacagaaagacgacccgcaggggtgagatggaaacactggagccaaacaacctctggtacctattcacaggactggagaaaggaagtcagtacagtttccaggtgtcagccatgacagtcaatggtactggaccaccttccaactggtatactgcagagactccagagaatgatctagatgaatctcaagttcctgatcaaccaagctctcttcatgtgaggccccagactaactgcatcatcatgagttggactcctcccttgaacccaaacatcgtggtgcgaggttatattatcggttatggcgttgggagcccttacgctgagacagtgcgtgtggacagcaagcagcgatattattccattgagaggttagagtcaagttcccattatgtaatctccctaaaagcttttaacaatgccggagaaggagttcctctttatgaaagtgccaccaccaggtctataaccgatctctccacccccatgctcccaccagtaggtgtacaggctgtggctcttacccatgatgctgtgagggtcagctgggcagacaactctgtccctaagaaccaaaagacgtctgaggtgcgactttacaccgtccggtggagaaccagcttttctgcaagtgcaaaatacaagtcagaagacacaacatctctaagttacacagcaacaggcctcaaaccaaacacaatgtatgaattctcggtcatggtaacaaaaaacagaaggtccagtacttggagcatgactgcacatgccaccacgtatgaagcagcccccacctctgctcccaaggacttgacagtcattactagggaagggaagcctcgtgccgtcattgtgagttggcagcctcccttggaagccaatgggaaaattactgcttacatcttattttataccttggacaagaacatcccaattgatgactggattatggaaacaatcagtggtgataggcttactcatcaaatcatggatctcaaccttgatactatgtattactttcgaattcaagcacgaaattcaaaaggagtggggccactctctgatcctatcctcttcaggactctgaaagtggaacaccctgacaaaatggctaatgaccaagacactggcgtgacgattaatcttgttaatgaagttctgcttggctgaggctgcggctctgataaggaagatgtaaattttcttgagaggaaattgttttgtctccattctgaaggaccaattaaaatgtcaagcttctttgtatg

SEQ ID NO: 318709 - DNA, 2316 bp, Artificial Sequence
  derived and/or modified sequence
ggtgtgcccgtgatcaaatggaagaaagacggcattcatctcgcactgggtatggacgaacgcaaacagcagctcagcaacggctcactgcttattcaaaatatcctgcactccaggcaccataagcctgatgagggtctgtaccagtgtgaggcgtcactgggtgattcagggtctattatctcgaggacagcgaaggttgccgtggcaggaccgctgcgtttcctgtcgcagaccgagtccgtgaccgcattcatgggtgatactgtgctgctgaaatgcgaagtgatcggggaacccatgcctacaatacattggcagaagaaccagcaggatctgaccccaatcccaggcgactcgagagtcgttgtgctgccaagcggcgcactgcaaatatcacggctgcaacccggagatattggtatttaccggtgcagcgcaagaaacccagcatcctcaagaaccggcaacgaggccgaagttcggatcttgagcgaccctggacttcaccgccagctgtattttctccagcggccctcgaacgtggtggccattgagggaaaagacgccgtacttgaatgctgcgtctcagggtaccccccacctagctttacgtggctccggggagaggaggtaattcagctaaggagcaagaaatattcgctgttggggggcagcaaccttctcatcagcaatgtaacggacgacgatagcgggatgtacacatgcgtcgtcacatacaagaatgagaatatttccgcgtcagccgagcttactgtcctggtgccaccttggttcctcaaccacccgtccaacttgtacgcttacgagagtatggacatagaatttgagtgcactgtgagcggaaagcctgtgcctaccgtaaactggatgaagaatggggacgttgttatcccctcggactacttccagatcgtcggagggtctaacttaaggatattaggtgtggtaaaatccgacgagggcttctaccagtgtgtggccgagaatgaggctgggaacgcccagacgtcagcccagctcatcgtgcctaagcctgcgattccctcctctagcgtgctgccgagcgccccaagagacgtcgtgcctgtcctggttagctcacgttttgtgagactgtcctggagaccacctgccgaggccaaggggaacatccagaccttcacagttttctttagcagggagggcgataatcgcgagagggcgctcaacacaacccagcccggatcgttgcagttaacagtggggaatctaaagcctgaagcaatgtatacgtttcgagtggttgcctacaacgagtggggacccggagagtctagtcagccaatcaaagtggctacccagcccgaactgcaggtaccagggccagtcgagaatttacaggctgtaagcacatctccgacttcgattctcattacctgggagccacctgcctatgctaacggccccgtacagggttataggttgttttgcacggaagtgtctactggaaaggaacaaaatattgaagtggatggtctcagttacaaattggaagggctgaaaaagttcacagaatactctctgaggttcctggcttacaacagatacgggccaggagtgtcaaccgacgacatcactgtcgttactttgagcgacgtgccatcggcgcctcctcagaatgtttctctcgaagtggtcaattctaggtccattaaagtgtcatggctccctccacccagtggaactcagaacggtttcatcaccggctacaagatccgacacaggaagacaacaaggcggggggagatggagaccttagagccaaataatctgtggtacttgtttaccggtctggagaaaggatctcagtacagttttcaggtttccgctatgacggtgaatggtacagggccgcccagcaactggtatacagcggaaacccccgaaaatgacctggatgaatcccaggtgcctgaccagccctcgtccctacatgtgcgcccacagacaaattgtatcattatgagttggactcctccactgaaccccaatatcgttgtccgggggtatataatcggctatggagtgggcagtccttacgcggagacagtacgggtggactcaaagcagcggtactattctatcgaaagactcgagtccagctcccactacgtgatcagcctaaaggcctttaataacgctggagagggagtccccctgtacgagagcgctacaacccgctctatcacagtccggcgtcacaatatcagcaaactgcattctaacaggccccagacgaagcataacgtttag

SEQ ID NO: 318710 - DNA, 2694 bp, Artificial Sequence
  derived and/or modified sequence
atgggcgataccgtactgctgaaatgtgaagttatcggcgagccaatgcctaccatccactggcagaagaaccagcaggacctcacgcccattccgggcgattcgcgggtcgtggtgcttcccagtggcgcactgcagatatcaaggctccagcccggcgatatcggaatctaccggtgctcagccaggaaccctgctagctctcgcacaggcaatgaagcggaagtgaggattttgtcggaccccggtctgcacagacagctgtacttcctacagaggccatcaaatgtcgtggccatcgagggcaaagatgccgtattggagtgttgtgtatcaggctatcctcccccatcttttacttggttgcgaggagaggaagtcattcagttgcgcagcaagaaatacagtctgttgggtggaagcaatttacttatttccaacgtgaccgacgacgattccgggatgtatacctgtgttgtcacttacaagaacgaaaatatctctgcaagtgccgagctaaccgtgctggtgcctccatggtttttgaatcacccatcaaatctctacgcatacgagtcaatggacattgagttcgagtgcacagtgagcggtaagcctgtacccacggtgaattggatgaagaacggcgatgtggtaatcccttctgactactttcagatagtaggcggctccaacctccgaatacttggcgtggtgaagtccgatgagggcttctatcagtgtgttgctgagaacgaggcgggaaatgctcagaccagcgcacagctcatcgttcctaaacctgcaatcccctcctcctcagttctgccttctgcccctcgggacgtcgtaccagttttagtcagctcgcgatttgtgcggctgtcttggagaccaccggcggaggctaagggcaatatacagacgtttaccgtgttcttttcccgggagggggataatcgagagagagcactcaacactacccaaccagggtcactgcagctcactgtgggcaatctgaaacctgaggcaatgtatactttccgggttgtggcttataacgagtgggggcccggagaaagtagtcagccgataaaggttgcaacacaacccgagcttcaagtgccaggtcctgtggagaatctgcaggcggtgagtacttctcctaccagcatcttaatcacctgggaaccacccgcatatgccaatgggccagtccaggggtacagactcttctgtaccgaagtatcaactggaaaggaacaaaatatcgaagtggacggactgagctataagctggaagggctaaagaagttcaccgagtattctcttagattcctcgcatacaacagatatgggcccggggttagtacagacgatatcactgtcgtgacattgagtgacgtgccatctgcccccccacaaaacgtctcattggaggtcgtgaactccaggtccatcaaagtgtcatggcttccccccccgtctgggacccagaacgggtttataaccggatacaaaattcgccaccgaaagacaacacgtcggggcgagatggagacacttgaacccaacaatctgtggtacctgttcactggacttgagaaaggtagtcagtactcatttcaggtctcagcgatgactgttaacggcaccgggccaccctctaattggtacacagctgagacgccagagaatgatctggacgaatcccaggtaccagatcaaccgtcttcactgcatgtgagaccacagacaaattgcattatcatgtcgtggacaccacccctcaatccaaatatagtagttcgtggctatatcattggatacggggtgggatctccttatgccgagacagtgcgggttgactctaagcagcgatactactcaattgaaaggctcgaaagttcttctcattacgtgatctcgctgaaggcgttcaataacgcaggggaaggagtgcccctgtatgagtccgcgaccacacggagcatcacggacctctcaaccccaatgcttccccctgtgggggtgcaggctgtagccctgacccatgacgcggttcgggtgtcatgggctgataacagtgtgcccaaaaaccagaagacaagtgaagtgagattgtatactgtgaggtggagaacatcgttctctgcaagcgccaagtataaaagcgaagacacgacttctctttcttatacagcaaccggcctcaagcctaataccatgtacgaattttccgtcatggtaacaaagaaccgccgctccagcacctggtcaatgaccgctcacgccacgacctacgaggccgctcctacatctgcccctaaggatctgactgtgatcactcgggaaggaaagcccagagccgtgattgtgtcttggcagccacccctggaggccaacggaaagattaccgcctatatcctgttctacactctggacaaaaacatcccgattgacgactggattatggagaccatttctggagaccggctgacacatcagattatggatctgaatcttgatacgatgtactactttcgcattcaggctcgaaattccaagggggtcggtcccctcagtgaccccatcctttttcggacactgaaagtggaacatcctgataagatggctaacgatcaagatactggtgttaccatcaacctcgtgaacgaagtgttgctggggtag

SEQ ID NO: 318711 - DNA, 2316 bp, Artificial Sequence
  derived and/or modified sequence
ggtgtgcctgtgatcaagtggaagaaggatggcatccacctggccctgggcatggatgagaggaagcagcagctgagcaatggcagcctgctgatccagaacatcctgcacagccgccaccacaagccagatgagggcctgtaccagtgtgaggccagcctgggggacagcggcagcatcatcagcaggacagccaaggtggccgtggccggccccctgcgcttcctgagccagacagaatctgtgacagccttcatgggagacacagtgctgctgaagtgtgaggtgattggagagcccatgcccaccatccactggcagaagaaccagcaggacctgacccccatccctggggacagccgggtggtggtgctgcccagcggggccctgcagatcagccggctgcagcccggggacatcggcatctaccgctgcagcgccaggaacccagccagcagcaggactggaaatgaagctgaggtgcgcatcctgagtgaccccggcctgcaccggcagctgtacttcctgcagaggcccagcaatgtggtggccatcgagggcaaggatgctgtgctggagtgctgcgtgtctggctacccacctccttccttcacctggctgcggggggaggaggtgatccagctgcggagcaagaagtacagcctgctgggcggcagcaacctgctgatcagcaatgtgacagatgatgacagcggcatgtacacctgtgtggtgacctacaagaatgaaaacatcagcgccagcgctgagctgactgtgctggtgcccccctggttcctgaaccaccccagcaacctgtatgcctatgagagcatggacattgaatttgagtgcaccgtgtctgggaagcctgtgcccaccgtgaactggatgaagaatggagatgtggtgatccccagcgactacttccagatcgtgggcggcagcaacctgcgcatcctgggcgtggtgaagagtgatgagggcttctaccagtgtgtggccgagaatgaagctggaaatgcccagaccagcgcccagctgattgtgcccaagccagccatccccagcagctctgtgctgcccagcgcccccagagatgtggtgcctgtgctggtgagcagcagatttgtgcggctgtcctggaggcccccagctgaggccaagggcaacatccagaccttcaccgtcttcttcagccgggagggggacaaccgggagcgggccctgaacaccacccagcccggcagcctgcagctgactgtgggcaacctgaagccagaggccatgtacaccttccgggtggtggcctacaatgagtggggccctggagagagcagccagcccatcaaggtggccacccagcctgagctgcaggtgcccggccctgtggagaacctgcaggccgtgtccaccagccccaccagcatcctgatcacctgggagcccccagcctatgccaacggccctgtgcagggctaccgcctcttctgcacagaggtgtccacaggcaaggagcagaacatcgaggtggatggcctgagctacaagctggagggcctgaagaagttcacagagtacagcctgcgcttcctggcctacaacagatatggccctggggtgtccacagatgacatcaccgtggtgaccctgagtgatgtgcccagcgccccaccccagaatgtgtccctggaggtggtgaacagccgcagcatcaaggtgtcctggctgcccccaccttctggcacccagaatggcttcatcaccggctacaagatccgccacaggaagaccacccggcggggggagatggagaccctggagcccaacaacctgtggtacctgttcaccggcctggagaagggcagccagtacagcttccaggtgtctgccatgacagtgaatggaactggaccacccagcaactggtacacagctgagaccccagaaaatgacctggatgagagccaggtgcctgaccagcccagcagcctgcacgtgcggccccagaccaactgcatcatcatgtcctggaccccacccctgaaccccaacatcgtggtgcggggctacatcatcggctatggagtgggcagcccctatgcagagaccgtgcgggtggacagcaagcagcgctactacagcattgaaaggctggagagcagcagccactacgtgatcagcctgaaggccttcaacaatgctggggagggcgtgcccctgtatgagagcgccaccaccaggagcatcaccgtgagaagacacaacatcagcaagctgcacagcaaccggccccagaccaagcacaacgtgtag

SEQ ID NO: 318712 - DNA, 2694 bp, Artificial Sequence
  derived and/or modified sequence
atgggagacacagtgctgctgaagtgtgaggtgattggagagcccatgcccaccatccactggcagaagaaccagcaggacctgacccccatccctggggacagccgggtggtggtgctgcccagcggggccctgcagatcagccggctgcagcccggggacatcggcatctaccgctgcagcgccagaaatcctgccagcagcaggactggaaatgaggccgaggtgcgcatcctgagtgaccccggcctgcaccggcagctgtacttcctgcagaggcccagcaatgtggtggccatcgagggcaaggatgctgtgctggagtgctgcgtgtctggctaccccccacccagcttcacctggctgcggggggaggaggtgatccagctgcggagcaagaagtacagcctgctgggcggcagcaacctgctgatcagcaatgtgacagatgatgattctggcatgtacacctgtgtggtgacctacaagaatgaaaacatcagcgccagcgctgagctgactgtgctggtgcccccctggttcctgaaccaccccagcaacctgtatgcctatgaatccatggacatcgagtttgaatgtactgtgtctgggaagcctgtgcccaccgtgaactggatgaagaatggagatgtggtgatccccagcgactacttccagatcgtgggcggcagcaacctgcgcatcctgggcgtggtgaagagtgatgagggcttctaccagtgtgtggctgaaaatgaggccggaaatgcccagaccagcgcccagctgattgtgcccaagccagccatccccagcagctctgtgctgcccagcgcccccagagatgtggtgcctgtgctggtgagcagcagatttgtgcggctgtcctggaggcctcctgctgaggccaagggcaacatccagaccttcaccgtcttcttcagccgggagggggacaaccgggagcgggccctgaacaccacccagcccggcagcctgcagctgactgtgggcaacctgaagccagaggccatgtacaccttccgggtggtggcctacaatgagtggggccctggagagagcagccagcccatcaaggtggccacccagcctgagctgcaggtgcccggccctgtggagaacctgcaggccgtgtccaccagccccaccagcatcctgatcacctgggagcccccagcctatgccaatggacctgtgcagggctaccgcctcttctgcacagaggtgtccacaggcaaggagcagaacatcgaggtggatggcctgagctacaagctggagggcctgaagaagttcacagagtacagcctgcgcttcctggcctacaacagatatggccctggggtgtccacagatgacatcaccgtggtgaccctgagtgatgtgcccagcgccccaccccagaatgtgtccctggaggtggtgaacagccgcagcatcaaggtgtcctggctgcccccacccagcggcacccagaatggcttcatcaccggctacaagatccgccacaggaagaccaccaggagaggagagatggagaccctggagcccaacaacctgtggtacctgttcaccggcctggagaagggcagccagtacagcttccaggtgtctgccatgacagtgaatggcaccggcccccccagcaactggtacacagctgagaccccagaaaatgacctggatgagagccaggtgcctgaccagcccagcagcctgcacgtgcggccccagaccaactgcatcatcatgtcctggaccccacccctgaaccccaacatcgtggtgcggggctacatcatcggctacggcgtgggcagcccctatgcagagaccgtgcgggtggacagcaagcagcgctactacagcattgagcggctggagagcagcagccactacgtgatcagcctgaaggccttcaacaatgctggggagggcgtgcccctgtatgaaagtgccaccaccaggagcatcacagacctgagcacccccatgctgccccctgtgggcgtgcaggccgtggccctgacccatgatgctgtgcgggtgtcctgggccgacaacagcgtgcccaagaaccagaagaccagcgaggtgcggctgtacacagtgcgctggaggaccagcttcagcgccagcgccaagtacaagtctgaggacaccaccagcctgagctacacagccaccggcctgaagcccaacaccatgtatgagttctctgtgatggtgaccaagaacagaagaagcagcacctggagcatgacagcccacgccaccacctatgaggccgcccccaccagcgcccccaaggacctgaccgtcatcacccgggagggcaagccccgggccgtcatcgtgtcctggcagccccccctggaggccaacgggaagatcacagcctacatcctcttctacaccctggacaagaacatccccattgatgactggatcatggagaccatcagcggggaccggctgacccaccagatcatggacctgaacctggacaccatgtactacttccgcatccaggccaggaacagcaagggcgtgggccccctgagtgaccccatcctcttccgcaccctgaaggtggagcacccagacaagatggccaatgaccaggacaccggggtgaccatcaacctggtgaatgaggtgctgctgggctag

SEQ ID NO: 318713 - DNA, 2316 bp, Artificial Sequence
  derived and/or modified sequence
ggcgtgcccgtgatcaagtggaagaaggacggcatccacctggccctgggcatggatgagcgcaagcaacagctctctaacggcagcctgctcatacaaaatatattacactcgcgccaccataaacccgacgagggtctctatcagtgtgaagcttccttgggagactctggatctatcatcagccgaaccgccaaggtggcggtggccggccccttgaggtttctatcacagacagagagcgtgactgccttcatgggagacaccgtactcttgaagtgtgaggttatcggcgagcctatgccgactattcactggcagaagaaccagcaagacttgacacctattcctggagatagtcgcgttgtggtccttccttccggcgcccttcagatttctcgcttgcaacctggagacattggcatttatcggtgcagcgcccgcaatcctgcttcttcaagaacggggaatgaggccgaggtgcggatattgtctgatccaggtctgcataggcagctgtactttctgcaacgcccatctaatgttgtggctatagaggggaaggacgcagtgttggaatgctgcgttagcgggtatccccctcccagcttcacgtggctgcgcggtgaagaggtaattcagctcagaagcaagaaatacagcctcctgggaggctcaaacctgctcatttccaacgtgacagatgacgattccggcatgtacacatgtgtggttacctacaaaaacgagaatatatccgcttctgccgagctgaccgttttggtgccaccttggtttctcaatcaccccagcaacttatatgcctacgaatctatggatatcgaattcgagtgcactgtgagtggcaagcccgtgcccacagtaaattggatgaagaatggcgacgtcgtaatccctagtgactattttcagatcgtcggtggctccaatctacgcattctgggagttgtgaaatccgacgagggattctaccagtgtgtcgcggaaaatgaggccggcaacgcacagaccagtgctcagctcattgtgccaaagcctgcgatcccctcctcttccgtcttgccgagcgccccccgtgacgtcgtgcccgtgctggtctcgtcccggtttgtcaggctcagttggcggccgccggcggaagccaaaggcaatatccaaaccttcactgtatttttttctagggaaggtgacaacagagagcgcgcgctcaatacgacacagccgggcagcctgcagctgaccgtgggcaacttaaagccggaggcgatgtacaccttccgcgtggtcgcttacaacgaatgggggcccggagagtcatctcagcctattaaggtggccacccagcctgaactgcaagtgcctggacccgtagagaatctgcaggccgtgtctaccagcccgacttcaattttgatcacttgggaaccccccgcctacgccaacggccccgtacagggctaccgactgttctgcactgaggtctcaactggcaaagagcagaacatcgaagtggatggactgagttacaaactggagggcctgaaaaagtttacggagtacagcctgcggtttctggcatacaatagatacgggcccggcgttagtaccgatgacatcaccgtggttacactcagcgatgtccccagcgctccacctcagaatgtctcgcttgaggtggtcaactcccggagcataaaagtgtcttggctgcctcctcccagtgggacgcagaatgggtttattacagggtataagatccgccacaggaagacaacacgccgcggtgaaatggaaacattggaacctaacaacctgtggtacttgttcaccggactcgagaagggatcacagtacagtttccaggttagcgccatgactgtcaacggaacagggccgccctctaactggtacacagcggagacgcccgagaatgacttagatgaaagccaggtgccagatcagccatctagtctgcacgtgcgccctcagacgaattgtattattatgagctggaccccccccttgaacccaaacattgtggtgaggggctacattatcgggtacggggtcggctctccatacgctgaaaccgtgcgtgtggatagtaagcagcggtattacagtatcgagcgcctcgagtcttcgtcccattacgtaattagcttgaaagcttttaacaacgctggtgagggcgtcccactatacgagagcgcaactaccagaagcattacggtcaggcgtcataacatctctaagctgcacagcaaccggccccaaactaagcacaacgtctag

SEQ ID NO: 318714 - DNA, 2694 bp, Artificial Sequence
  derived and/or modified sequence
atgggcgacaccgtgctgctgaagtgcgaggtgatcggcgagcccatgccaaccattcattggcagaagaatcagcaggacctgactccaatccccggcgacagcagagtggtcgtgttgccatccggggctctgcagattagtcggctgcagcctggtgatattggcatttatagatgtagtgcacggaatccggcctcttcacgtacgggaaatgaagcggaggtgagaatcctgtctgatccagggctccacagacagctttattttttgcagaggccaagcaatgtcgtggccatagagggcaaagacgccgtactagagtgttgtgtgtccggataccccccaccctcatttacttggctgcgaggtgaggaggtaatccaactgagatccaaaaagtattccttgctcggaggttccaatctgctcatttccaacgtgaccgacgatgattcagggatgtatacttgtgttgtaacatacaagaatgagaacatctcagcttcagctgaattgactgtacttgtcccaccctggtttctaaaccaccccagtaatctgtatgcttatgagtcaatggacattgagttcgagtgcacagtttccggaaaaccagtgcccacagtgaactggatgaagaatggtgatgtcgtgattccttctgactacttccagatcgtggggggatccaatctcaggatccttggtgtagttaagtccgatgagggattctaccagtgcgtcgcggagaacgaagccggcaatgctcagacatctgctcagctcatcgttccgaagcccgcaattccttccagctccgtgctgccaagcgcaccgagagatgttgtccccgtcttagtcagctcccgcttcgttaggctgagctggcgtccccccgccgaagccaagggaaacatccagacctttactgtgttttttagcagggaaggagacaatagagagcgggctcttaatacgacacagccaggcagcttgcagctgactgtcgggaacctgaaaccagaggccatgtacaccttccgggtggtagcctataacgaatggggccccggcgagtcgagccagcccataaaggtggctactcagccagagctgcaggtgccagggcctgtagagaaccttcaggcagtgtccaccagcccaactagcattctgatcacctgggagccaccagcttacgccaatggaccagtacagggatatcgcctgttttgcactgaggtatctactggcaaagaacaaaacatcgaggtcgacggcctgagctacaaactcgaaggcttgaagaaattcactgagtattcacttagatttctggcctacaatcggtacggccccggcgtctctacagatgatattacggttgtgaccctatccgatgtgccctcagcccctccgcaaaacgtgtcactcgaggttgtgaatagccggtcaatcaaggtctcttggctgcctcctccttctggtacccaaaacggcttcatcactggatacaagattcggcatcggaaaacaacacgacgaggggagatggaaacactggagcctaataatctatggtatctcttcactgggttagagaaggggagtcagtactctttccaggtgtcagcaatgacggtcaacgggacaggccctccaagcaattggtacaccgctgagacccctgagaacgacctcgatgagtctcaggtacccgatcagcccagctccctccacgtgcggccacagaccaattgtattattatgtcctggacacctcctctgaaccccaacatagtcgtccgggggtacattataggatacggggtggggtctccgtatgccgaaacagtccgagtggacagtaaacagcggtactacagcattgagagattggagtcaagctcccattacgtgatctctcttaaagcctttaataatgcaggtgagggagtcccgctttacgagtcagcaaccacaagatcaatcacggacttaagcacaccaatgctacctccagtcggggtccaggctgtggccctgacacacgacgcagtaagagtgagctgggctgacaacagcgtgcctaagaaccagaagacctcagaggtgcgattgtacacagtccggtggaggaccagtttctctgcatctgcgaagtacaaatccgaggacactaccagtttgtcatatactgccaccgggctgaagccaaatacaatgtatgagtttagtgtgatggtgactaagaatcggaggtcgtcaacatggtcgatgacagctcatgccaccacatatgaagctgcgccaaccagtgctccaaaggacctgacggtgatcacaagagaagggaagccccgggccgttatcgttagttggcagcccccccttgaagcgaacggcaaaatcactgcctatatcctgttttacaccctggataaaaatatccccatcgatgattggatcatggagacgatcagcggagatcggctcacccaccaaataatggacctcaatcttgataccatgtattattttcgcattcaagcccgcaattcaaaaggggtcggcccattgagcgacccaatcctgtttcgcacacttaaagtcgagcatcctgataaaatggctaatgatcaggataccggtgttactatcaacctggtaaatgaggtgctgttagggtag

SEQ ID NO: 318715 - DNA, 2316 bp, Artificial Sequence
  derived and/or modified sequence
ggagtgcccgtgataaaatggaagaaagatgggatacatctcgccttgggcatggatgagaggaaacagcaactctctaacgggtctctgcttatccaaaatatccttcacagccgccaccataagcctgacgaggggctctaccaatgtgaagcgagccttggagattccggatcaattataagcagaactgcaaaagtggcggttgcgggtcctctgagattcctttcccagactgaaagtgttactgcctttatgggcgacacggttcttcttaaatgtgaggtgattggagagccaatgccaaccatccattggcagaaaaatcagcaagatttgactcctattccaggcgactcccgcgtggtggtgctccccagtggcgcactgcagatcagccgcctgcagcctggggatataggtatttaccggtgctcagcaaggaacccggctagctctagaactggcaacgaggcagaagtaaggattctgtccgacccgggtttgcatagacagctgtacttcctccaacgcccttctaatgtagtggccattgaaggcaaggatgcagtcctcgaatgctgcgtttcagggtatccaccgcctagctttacatggttacggggagaggaagttatccagctacggtccaaaaagtattccctcctggggggtagcaacctactgatctccaacgtcactgatgatgacagcggaatgtacacatgcgtggttacctataaaaacgagaatatttccgctagcgccgagttgaccgtactcgtgcccccttggtttctgaaccacccgtctaatctgtacgcctacgagtcaatggatatcgagttcgaatgtaccgtctctggtaagccggtgcccacggtgaactggatgaagaacggcgacgtggtcataccaagcgactattttcaaatcgtcggcggatctaacctccgcatcttgggcgtggtgaaatcagatgaaggcttctatcaatgcgtggccgagaatgaggctgggaacgctcaaacgagtgcccagctcattgtgccaaagcctgctataccctcctccagcgtgcttccctccgctcctcgcgatgtggtccccgtcctcgtgtcaagtcgttttgtcaggctgtcctggcgaccccctgccgaagccaaaggaaatatccagacattcaccgtgtttttcagtcgagaaggtgataatcgggagcgggctctcaacacgacccaaccaggctccctgcagctgacggtgggcaacctgaagcccgaagctatgtatacattccgcgtcgtggcatacaatgaatgggggcctggtgaatctagccaacccattaaggtagcaacccagcccgagctgcaggtgcccggtccagtggagaatctgcaggcagtctcaaccagtcccacctcaatcttaatcacatgggagccacctgcttatgctaatgggcctgtgcaaggataccgcttattctgcacagaggtcagcacagggaaggagcagaacattgaagtagatggtctgtcgtacaaactggaaggcttgaaaaagtttactgagtactctcttcgattcctcgcctacaacaggtatggtccaggcgtgagcacagacgatatcacagtggttacgctctcagatgtcccctcagcgcctccccagaacgtctccctcgaggtcgtgaatagcagaagtataaaggtgtcgtggctgcccccaccatcaggcacccagaacggatttattactggctacaagatccggcaccggaaaaccactaggcggggagaaatggaaaccctggagcccaacaatctgtggtatctttttaccggcctggaaaagggttctcagtattcattccaggtctccgctatgaccgtgaatgggacagggcctccatcgaactggtacactgccgagacccctgaaaacgaccttgatgaatcacaggtgcctgatcagccttcctcactgcacgtcagaccccagaccaattgtatcataatgagttggacacctccgctgaatccaaacatcgtcgtgaggggatacattatcggctatggagtcgggtccccctacgctgagaccgtgcgagtggattccaaacagcggtactacagtattgagaggctagaatctagcagccactacgtgatttcactgaaggccttcaacaatgccggtgagggtgtgcccctttatgagtccgcaacaaccaggtcaataaccgtgcggaggcataacattagcaaactgcactccaaccggcctcaaacaaagcataatgtctag

SEQ ID NO: 318716 - DNA, 2694 bp, Artificial Sequence
  derived and/or modified sequence
atgggcgacaccgtgttactcaagtgcgaggtgatcggggagccaatgcctacaattcattggcaaaagaatcaacaggatctgactccgatccctggcgacagcagagtggtcgtgctgccatccggcgcactccagatctctagacttcagcccggtgacatcgggatctatcgttgcagtgccaggaatcctgcaagctcccgcactgggaacgaggcggaggtgcgcattctcagcgatcctggactgcaccggcagctgtactttctgcagcgaccgtcgaatgtggtggcaattgagggtaaagatgccgtgcttgaatgctgtgtatcaggctacccacctccttcatttacatggctgagaggggaagaagtaatccagttgcgttccaaaaagtattctcttctcggcggttctaaccttctgattagcaacgtcacagacgacgactccggcatgtatacctgcgtggtgacttacaagaatgagaatatttctgcgagtgctgagctgacagtgctagtgccgccatggttcctgaaccacccttccaacctttatgcctacgagagcatggatatagagtttgagtgcaccgtctccggaaagcctgtccccaccgtgaactggatgaaaaatggtgatgttgtcatcccttctgattactttcagatagtcggagggagtaatctgcggatcctaggagtggttaaaagcgatgagggcttctaccagtgcgtggccgagaatgaagctggcaatgcacagacgagtgcacaactcatagtccccaagcctgctattcccagcagctccgtcctgcccagcgcacctcgggacgtggttccagtgctcgtgagttccaggttcgtgagattgagttggagaccaccagccgaagctaaagggaatatccagacctttacagtttttttttctcgcgaaggggataatagagagcgcgctctgaataccacacagccagggtctctccaactcaccgtcggaaacctgaaaccggaagccatgtatacattcagagtggtagcgtataacgaatggggacctggggagtccagccagcctatcaaagtggccacccagcctgagttgcaggtgcccggaccagtcgaaaacctacaagctgtgtccaccagtcccaccagtattctgatcacctgggaacctcctgcatacgcaaatggacccgtacagggctaccgattgttttgcactgaggttagcacaggcaaggagcagaacatagaggtcgatggtctgtcatacaaactcgagggtctgaaaaagttcactgagtattctttaaggtttcttgcctataaccgatatggtcctggggtaagtaccgacgatatcacggttgttactttaagcgacgtgccctccgctcctccccagaacgtgtcactggaagtggtgaattctagatccattaaggtctcctggctgcccccaccctccgggacgcaaaacggattcattactggatacaaaattcgacataggaaaaccacaagacgtggagaaatggaaacactggagcctaataatttgtggtacctgttcactggattagagaaagggagtcagtattcattccaagtgagtgctatgactgtgaacggcaccgggcctccctcaaattggtacaccgccgagacaccagaaaatgaccttgatgaaagccaggtaccagaccaacctagcagcttacacgtccggccacagactaattgcattataatgagttggacaccaccactaaatcccaatatcgtagttaggggctacatcattgggtacggagttggttctccttacgctgagacagtgagggtggactccaagcagagatactatagcatcgagaggctcgaatcctcttctcactacgtgatctctctgaaggcttttaataacgccggtgagggagtccctctgtatgagtcagctacaacacgcagcataacagacctctcaacccctatgctccctcctgtcggcgtccaggctgtcgcactcactcacgacgcagtccgagtgtcttgggcagataacagcgtgccgaaaaaccagaaaacctccgaagtcagattgtacaccgtccggtggagaacctccttctccgcttccgccaagtataagagcgaagacaccacaagcctgtcttataccgccaccggactcaagccaaatactatgtatgagtttagtgtcatggtgacaaaaaatcgacggtcctcgacctggagcatgacagcccatgccactacttacgaggccgctcccacctcagcaccgaaggacttgacagtcataactagagaaggtaagcccagggctgtgatcgtgtcatggcaacctcctttagaggccaacgggaaaatcaccgcgtacatacttttctacaccttggacaagaacattcccattgatgattggatcatggagaccatttccggcgaccggctgactcaccagattatggacttaaacctcgatacaatgtattactttcggatccaagctcgcaacagcaagggggtgggacccctcagcgatcccattttgttccggactctcaaggtcgaacacccagataagatggccaacgaccaggacactggtgtcaccatcaatctggtgaacgaggtattgcttggctag

SEQ ID NO: 318717 - protein, 25 aa, Artificial Sequence
  derived and/or modified sequence
MANDIDELIGIPFPNHSSEVLCSLN

SEQ ID NO: 318718 - DNA, 78 bp, Artificial Sequence
  derived and/or modified sequence
atggccaacgacatcgacgagctgatcggcatccccttccccaaccacagcagcgaggtgctgtgcagcctgaactag

SEQ ID NO: 318719 - DNA, 57 bp, Artificial Sequence
  derived and/or modified sequence
atggccaacgacatcgacgagctgatcggcatccccttccccaaccacagcagctag

SEQ ID NO: 318720 - DNA, 78 bp, Artificial Sequence
  derived and/or modified sequence
atggcgaatgacatagacgagctgatcgggatacctttcccgaaccacagctcggaggtcctatgttctctgaattag

SEQ ID NO: 318721 - DNA, 57 bp, Artificial Sequence
  derived and/or modified sequence
atggccaatgacattgatgaactcatcggcattccttttccgaaccactcgagttag

SEQ ID NO: 318722 - DNA, 78 bp, Artificial Sequence
  derived and/or modified sequence
atggccaatgacattgatgagctgattggcatccccttccccaaccacagcagcgaggtgctgtgcagcctgaactag

SEQ ID NO: 318723 - DNA, 57 bp, Artificial Sequence
  derived and/or modified sequence
atggccaatgacattgatgagctgattggcatccccttccccaaccacagcagctag

SEQ ID NO: 318724 - DNA, 78 bp, Artificial Sequence
  derived and/or modified sequence
atggccaacgacatcgacgagctgatcggcatccccttccccaaccacagtagtgaagtcctgtgttccctgaactag

SEQ ID NO: 318725 - DNA, 57 bp, Artificial Sequence
  derived and/or modified sequence
atggccaacgacatcgacgagctgatcggcatccccttccccaaccactcatcctag

SEQ ID NO: 318726 - DNA, 78 bp, Artificial Sequence
  derived and/or modified sequence
atggcaaacgatattgatgaactcattgggatcccatttccaaatcacagtagcgaagtactctgttctttaaattag

SEQ ID NO: 318727 - DNA, 57 bp, Artificial Sequence
  derived and/or modified sequence
atggctaatgatattgacgagctgatcgggattcccttcccaaatcattcctcgtag

SEQ ID NO: 318728 - DNA, 704 bp, Artificial Sequence
  derived and/or modified sequence
aggaggacgccaggactgcgtcccggagccaagtgcgggaggcgcgcagggccggcggcgcgcggagatcccctctgagcagctgggagctcagaagctctgtccaaccctgaggagtgggtcagccacaagagcaagaagtgatggcgtggagtccacccagggcctgaggcatgagcagaatccacgcccattagacctggagcctgggcgtttggggctgcactgctggggagatccaagaagaatcaatgctttggcccctggtgacatgtacatggtgtaatgacaggaaatgagcagatttgcagaaaaactggtgtcctgaaatttaaaactaaggcatcggtgcttgtgccaggcagcacctggaagctctgggaaatccacgagaagcagcaggcattggctctgttttggaggagctttcagtccagttcaggaagagaagacacctgcatatgagacaaagaactttatgaccagacagagctgctctaagctgtgggccaacaggaggctgggagctctcctctaaattgctttgtgaccttggacaagaaccctccccttcctggactgcaaatttcctcctctgtaaaatgaagggttgggctctggctgagaacatggccaatgacattgatgagctcattggcattcccttccccaaccacagcagtgaggtcctgtgcagcctcaat

SEQ ID NO: 318729 - protein, 619 aa, Artificial Sequence
  derived and/or modified sequence
MANDIDELIGIPFPNHSSEVLCSLNEQRHDGLLCDVLLVVQEQEYRTHRSVLAACSKYFKKLFTAGTLASQPYVYEIDFVQPEALAAILEFAYTSTLTITAGNVKHILNAARMLEIQCIVNVCLEIMEPGGDGGEEDDKEDDDDDEDDDDEEDEEEEEEEEEDDDDDTEDFADQENLPDPQDISCHQSPSKTDHLTEKAYSDTPRDFPDSFQAGSPGHLGVIRDFSIESLLRENLYPKANIPDRRPSLSPFAPDFFPHLWPGDFGAFAQLPEQPMDSGPLDLVIKNRKIKEEEKEELPPPPPPPFPNDFFKDMFPDLPGGPLGPIKAENDYGAYLNFLSATHLGGLFPPWPLVEERKLKPKASQQCPICHKVIMGAGKLPRHMRTHTGEKPYMCTICEVRFTRQDKLKIHMRKHTGERPYLCIHCNAKFVHNYDLKNHMRIHTGVRPYQCEFCYKSFTRSDHLHRHIKRQSCRMARPRRGRKPAAWRAASLLFGPGGPAPDKAAFVMPPALGEVGGHLGGAAVCLPGPSPAKHFLAAPKGALSLQELERQFEETQMKLFGRAQLEAERNAGGLLAFALAENVAAARPYFPLPDPWAAGLAGLPGLAGLNHVASMSEANN

SEQ ID NO: 318730 - protein, 18 aa, Artificial Sequence
  derived and/or modified sequence
MANDIDELIGIPFPNHSS

SEQ ID NO: 318731 - DNA, 3759 bp, Artificial Sequence
  derived and/or modified sequence
ggctctggctgagaacatggccaatgacattgatgagctcattggcattcccttccccaaccacagcagtgaggtcctgtgcagcctcaatgagcaacggcacgatggcctgctgtgtgacgtgctcctggtggtgcaggagcaggagtatcggacccaccgctccgtcctggctgcctgcagcaagtacttcaagaagcttttcacagccggcaccctagccagccagccctacgtctatgagatcgactttgtccagcctgaggctctggctgctatcctggagttcgcctacacctccacgctcaccatcaccgctggcaatgtcaagcacatcctcaacgcagccaggatgctggagatccagtgcatcgtgaacgtgtgcctggagatcatggagcctgggggggacgggggggaggaggatgacaaggaggacgatgacgacgacgaagatgatgatgatgaggaggacgaagaggaggaggaggaagaggaggaggatgacgatgatgacacggaggactttgctgaccaagaaaacttgcctgacccccaggacatcagctgccaccaaagcccttccaagacagaccatctcacagagaaggcctattcagacacccccagggacttccctgactccttccaggctggcagtcctggccatctgggggtgatccgggacttctccatcgaatctctgctaagggagaacctgtaccccaaggccaacatccccgacaggagaccctccttgtctccattcgccccggacttctttccacacctctggccaggggacttcggtgcctttgcccagctgcctgagcagcccatggacagtgggccactggatctggtcatcaagaatcggaagatcaaggaggaggagaaggaggagctgcccccacccccaccgccacccttccctaatgacttcttcaaggacatgttccctgacctgccgggggggcctctgggacccatcaaggcggagaacgactacggtgcctatctcaacttcctgagtgccacccacctgggaggcctcttcccaccctggcccctggtagaagagcgcaagctgaagcccaaggcctctcagcagtgccccatctgccacaaagtcatcatgggggccgggaagctgccgcggcacatgaggacccataccggggagaagccatacatgtgcaccatctgcgaggtccgcttcaccaggcaggacaagctgaaaatccacatgcggaagcacacaggggagcggccctacctgtgcatccactgcaacgccaagttcgtgcacaactacgacctcaagaaccacatgcgcatccacacgggcgtgcggccctaccagtgcgagttctgctacaagagcttcacgcgctctgaccacctgcaccgccacatcaagcgccagagctgccgcatggcacggccccgacgcggccgcaagcctgctgcgtggagggccgccagcctgctcttcgggcccggcggcccggcccccgacaaggcggccttcgtgatgccccctgcgctgggcgaggtgggcggccacctgggcggcgcagctgtgtgcctcccgggccccagccccgccaagcacttcctggcagcgcccaagggcgccctgagcctgcaagagctggagcggcagttcgaggagacacagatgaagctgttcgggcgcgcgcagctggaggctgagaggaacgcggggggcctcctggccttcgcgctggccgagaacgtggcggcggcgcggccctacttcccgctgcccgacccttgggccgccggcctggccggcctccctgggctcgccggcctcaaccacgtggcctccatgtccgaagccaacaactaggctggtccctgtcggctccagcccaccagccctccagtccttctccctccaggcccactctaccctaccccatggatctgaacttttcattttaaaaacacaaagggaaaatgggaaaataataataatactatcagtgatggcattttcccgggctcctaaagcagctgcctccttttgctggtctgagacgggcatcttttcccaaaaggccaggagcccgggcctccctccctgtctctctggctctcatatagaaacttgcaccggcccatgccacaaagaactgggtgcccaggggcacttaggagctgggtgagtcatgaggggtcagggggtggttggcctggtgcccagccagccacagcaggaggaggtaggggctgggcatgcaccttggttaagccccaccccctatggcaaagtctctgccaacactcctctgagggctcattttccagtctccagtggccccggggtctttttgagaactacccacctgccacatagaaagaaatgctctgttggcagggaggcctcctggaaccagtcaggaaccaggctctggaaggcccgggccatttcttccctgacctgtcctgtgaccttgacaggtcagccctctgtagctcagtgtcacctggctatggaaggggctggtaactgaggtttccgccctccacctctaaacacatacacacctatccccccagagaatcacagagatggtagaagctttgtactccccaagtccatggggaaacagtttatctttctggacttagttttatcacatccagctctatattagcatattagcataggtgagaaatatggccagactagacagagatcaggtcatcaggggagcttccgagcttcagcaaagcccacaggtagctctgcgaactcagaatgctaccctaccttccctgcaggccgctgttcatgtctggactcctgggggcgctatttaatgtttacccccatctccagtgccccctccaaggctgtgcagtgtcttggggctctcagggccaacatcgaagagatgggggccacctcttaacacctggcaacagtctcccctcatcctgattcctgacaacagacaaaacaccggtttctagggtttatctgtttgttttttgagttgagggttcctcagggccttggcattgctagtgatggtcccctttgctgtgtgagaaccccctcaaccccttcctcctccctctggggatgaagtgggagtatttggctccccatttttgacaaaagggctcagtgcagggaggtggaggcctctgaggtttgaagggctctgtgagttagagttgtcacatgttctcctggttcttgaatttgcagcaggtcctgaaaaggaaggctctgctggccccgtgccttcctgaccttctctctccttccctcccctctcttttcttgccaagtttgctttggtttctgagcagcccagagaggaggagggttcgtccccagggagagcccagggctggagtccccaatccctgtgctatgggcacaaagagacttcagctcttcctgttgccttggctttttcctgagcaaaaacacaacaaacaaaaaggccagagaagagcacagactctgtccctctcacaactctccagaagagaccccctgattcttcacaccaccggatgccactccagccagcaggattgctacacacaccctctgttctcagaagtcatctgcctgggcagccgcctctcagattcctgtcttcgtttcagacacttttctctgaagcatgcccatgtccaccagccaacgtgcccccgtgttcccccccatcagccaagtgattggggctgaaccagactttaaaagagagg

SEQ ID NO: 318732 - DNA, 4158 bp, Artificial Sequence
  derived and/or modified sequence
taaagtgaagcgtaacgcgcgagtggtgagatcgtcctgtcctgcgcttaacagtacaggtggaccaaaggggctcccggccaaatacttctggttggagggtggggagggagtgctctctcaaaaccactcctggaatggcttaactcgcccagcacgaatcaatgacaacctcccgccggctgcggcaggctcccgcgagcagcgcggccgcgtggattcccagcccgggaccctggcggcgctcaggacacggcccgggcacgagcgcggcgtccccggggcggccagggctctggctgagaacatggccaatgacattgatgagctcattggcattcccttccccaaccacagcagtgaggtcctgtgcagcctcaatgagcaacggcacgatggcctgctgtgtgacgtgctcctggtggtgcaggagcaggagtatcggacccaccgctccgtcctggctgcctgcagcaagtacttcaagaagcttttcacagccggcaccctagccagccagccctacgtctatgagatcgactttgtccagcctgaggctctggctgctatcctggagttcgcctacacctccacgctcaccatcaccgctggcaatgtcaagcacatcctcaacgcagccaggatgctggagatccagtgcatcgtgaacgtgtgcctggagatcatggagcctgggggggacgggggggaggaggatgacaaggaggacgatgacgacgacgaagatgatgatgatgaggaggacgaagaggaggaggaggaagaggaggaggatgacgatgatgacacggaggactttgctgaccaagaaaacttgcctgacccccaggacatcagctgccaccaaagcccttccaagacagaccatctcacagagaaggcctattcagacacccccagggacttccctgactccttccaggctggcagtcctggccatctgggggtgatccgggacttctccatcgaatctctgctaagggagaacctgtaccccaaggccaacatccccgacaggagaccctccttgtctccattcgccccggacttctttccacacctctggccaggggacttcggtgcctttgcccagctgcctgagcagcccatggacagtgggccactggatctggtcatcaagaatcggaagatcaaggaggaggagaaggaggagctgcccccacccccaccgccacccttccctaatgacttcttcaaggacatgttccctgacctgccgggggggcctctgggacccatcaaggcggagaacgactacggtgcctatctcaacttcctgagtgccacccacctgggaggcctcttcccaccctggcccctggtagaagagcgcaagctgaagcccaaggcctctcagcagtgccccatctgccacaaagtcatcatgggggccgggaagctgccgcggcacatgaggacccataccggggagaagccatacatgtgcaccatctgcgaggtccgcttcaccaggcaggacaagctgaaaatccacatgcggaagcacacaggggagcggccctacctgtgcatccactgcaacgccaagttcgtgcacaactacgacctcaagaaccacatgcgcatccacacgggcgtgcggccctaccagtgcgagttctgctacaagagcttcacgcgctctgaccacctgcaccgccacatcaagcgccagagctgccgcatggcacggccccgacgcggccgcaagcctgctgcgtggagggccgccagcctgctcttcgggcccggcggcccggcccccgacaaggcggccttcgtgatgccccctgcgctgggcgaggtgggcggccacctgggcggcgcagctgtgtgcctcccgggccccagccccgccaagcacttcctggcagcgcccaagggcgccctgagcctgcaagagctggagcggcagttcgaggagacacagatgaagctgttcgggcgcgcgcagctggaggctgagaggaacgcggggggcctcctggccttcgcgctggccgagaacgtggcggcggcgcggccctacttcccgctgcccgacccttgggccgccggcctggccggcctccctgggctcgccggcctcaaccacgtggcctccatgtccgaagccaacaactaggctggtccctgtcggctccagcccaccagccctccagtccttctccctccaggcccactctaccctaccccatggatctgaacttttcattttaaaaacacaaagggaaaatgggaaaataataataatactatcagtgatggcattttcccgggctcctaaagcagctgcctccttttgctggtctgagacgggcatcttttcccaaaaggccaggagcccgggcctccctccctgtctctctggctctcatatagaaacttgcaccggcccatgccacaaagaactgggtgcccaggggcacttaggagctgggtgagtcatgaggggtcagggggtggttggcctggtgcccagccagccacagcaggaggaggtaggggctgggcatgcaccttggttaagccccaccccctatggcaaagtctctgccaacactcctctgagggctcattttccagtctccagtggccccggggtctttttgagaactacccacctgccacatagaaagaaatgctctgttggcagggaggcctcctggaaccagtcaggaaccaggctctggaaggcccgggccatttcttccctgacctgtcctgtgaccttgacaggtcagccctctgtagctcagtgtcacctggctatggaaggggctggtaactgaggtttccgccctccacctctaaacacatacacacctatccccccagagaatcacagagatggtagaagctttgtactccccaagtccatggggaaacagtttatctttctggacttagttttatcacatccagctctatattagcatattagcataggtgagaaatatggccagactagacagagatcaggtcatcaggggagcttccgagcttcagcaaagcccacaggtagctctgcgaactcagaatgctaccctaccttccctgcaggccgctgttcatgtctggactcctgggggcgctatttaatgtttacccccatctccagtgccccctccaaggctgtgcagtgtcttggggctctcagggccaacatcgaagagatgggggccacctcttaacacctggcaacagtctcccctcatcctgattcctgacaacagacaaaacaccggtttctagggtttatctgtttgttttttgagttgagggttcctcagggccttggcattgctagtgatggtcccctttgctgtgtgagaaccccctcaaccccttcctcctccctctggggatgaagtgggagtatttggctccccatttttgacaaaagggctcagtgcagggaggtggaggcctctgaggtttgaagggctctgtgagttagagttgtcacatgttctcctggttcttgaatttgcagcaggtcctgaaaaggaaggctctgctggccccgtgccttcctgaccttctctctccttccctcccctctcttttcttgccaagtttgctttggtttctgagcagcccagagaggaggagggttcgtccccagggagagcccagggctggagtccccaatccctgtgctatgggcacaaagagacttcagctcttcctgttgccttggctttttcctgagcaaaaacacaacaaacaaaaaggccagagaagagcacagactctgtccctctcacaactctccagaagagaccccctgattcttcacaccaccggatgccactccagccagcaggattgctacacacaccctctgttctcagaagtcatctgcctgggcagccgcctctcagattcctgtcttcgtttcagacacttttctctgaagcatgcccatgtccaccagccaacgtgcccccgtgttcccccccatcagccaagtgattggggctgaaccagactttaaaagagaggaaaaaaaaaaaaaaaggaaacatgaataaattggaatccagtggtgttggggcttttgtttttattttgtaaaggtgatgacttcttataaactcaatttttcagatg

SEQ ID NO: 318733 - DNA, 430 bp, Artificial Sequence
  derived and/or modified sequence
gtgtgtgtgtgtatgtgtacacacacagaacatgaagaactacatccagaagctgcccagaaaggatgcagatcccctctgagcagctgggagctcagaagctctgtccaaccctgaggagtgggtcagccacaagagcaagaagtgatggcgtggagtccacccagggcctgaggcatgagcagaatccacgcccattagacctggagcctgggcgtttggggctgcactgctggggagatccaagaagaatcaatgctttggcccctggtgacatgtacatggtgtaatgacaggaaatgagcagatttgcagaaaaactggtgtcctgaaatttaaaactaaggcatcggtgcttggctctggctgagaacatggccaatgacattgatgagctcattggcattcccttccccaaccacagcagtga

SEQ ID NO: 318734 - DNA, 8406 bp, Artificial Sequence
  derived and/or modified sequence
gccatttccagagaggaacaaccgtgtagactgctttcctgggagtcaagttaaaacttctctcctgtgaccttgtcacccggcagtggaaagttacccttggctgcagccacgacttccgcatactcttcagaacttgctctgcccttgagttttccagctttcctttaatgcactaaacctttaatattgtattctcctaaatgagacgtctcgcatttgagcaggtaacactcgggagagtcccgtattctcagagtaaaagttgtttctggaattgatctcgccaaaaaggacatctttggagccagcttctgctccattgctgttgaacttttttttggtcgtgacatcagaaaaataaccaagtgtgagtctgataatagcaatgatccgtatgtgaaactttcattgtacgtagcggatgagaatagagaacttgctttggtccagacaaaaacaattaaaaagacactgaacccaaaatggaatgaagaattttatttcagggtaaacccatctaatcacagactcctatttgaagtatttgacgaaaatagactgacacgagacgacttcctgggccaggtggacgtgccccttagtcaccttccgacagaagatccaaccatggagcgaccctatacatttaaggactttctcctcagaccaagaagtcataagtctcgagttaagggatttttgcgattgaaaatggcctatatgccaaaaaatggaggtcaagatgaagaaaacagtgaccagagggatgacatggagcatggatgggaagttgttgactcaaatgactcggcttctcagcaccaagaggaacttcctcctcctcctctgcctcccgggtgggaagaaaaagtggacaatttaggccgaacttactatgtcaaccacaacaaccggaccactcagtggcacagaccaagcctgatggacgtgtcctcggagtcggacaataacatcagacagatcaaccaggaggcagcacaccggcgcttccgctcccgcaggcacatcagcgaagacttggagcccgagccctcggagggcggggatgtccccgagccttgggagaccatttcagaggaagtgaatatcgctggagactctctcggtctggctctgcccccaccaccggcctccccaggatctcggaccagccctcaggagctgtcagaggaactaagcagaaggcttcagatcactccagactccaatggggaacagttcagctctttgattcaaagagaaccctcctcaaggttgaggtcatgcagtgtcaccgacgcagttgcagaacagggccatctaccaccgccatcagtggcctatgtacataccacgccgggtctgccttcaggctgggaagaaagaaaagatgctaaggggcgcacatactatgtcaatcataacaatcgaaccacaacttggactcgacctatcatgcagcttgcagaagatggtgcgtccggatcagccacaaacagtaacaaccatctaatcgagcctcagatccgccggcctcgtagcctcagctcgccaacagtaactttatctgccccgctggagggtgccaaggactcacccgtacgtcgggctgtgaaagacaccctttccaacccacagtccccacagccatcaccttacaactcccccaaaccacaacacaaagtcacacagagcttcttgccacccggctgggaaatgaggatagcgccaaacggccggcccttcttcattgatcataacacaaagactacaacctgggaagatccacgtttgaaatttccagtacatatgcggtcaaagacatctttaaaccccaatgaccttggcccccttcctcctggctgggaagaaagaattcacttggatggccgaacgttttatattgatcataatagcaaaattactcagtgggaagacccaagactgcagaacccagctattactggtccggctgtcccttactccagagaatttaagcagaaatatgactacttcaggaagaaattaaagaaacctgctgatatccccaataggtttgaaatgaaacttcacagaaataacatatttgaagagtcctatcggagaattatgtccgtgaaaagaccagatgtcctaaaagctagactgtggattgagtttgaatcagagaaaggtcttgactatgggggtgtggccagagaatggttcttcttactgtccaaagagatgttcaacccctactacggcctctttgagtactctgccacggacaactacacccttcagatcaaccctaattcaggcctctgtaatgaggatcatttgtcctacttcacttttattggaagagttgctggtctggccgtatttcatgggaagctcttagatggtttcttcattagaccattttacaagatgatgttgggaaagcagataaccctgaatgacatggaatctgtggatagtgaatattacaactctttgaaatggatcctggagaatgaccctactgagctggacctcatgttctgcatagacgaagaaaactttggacagacatatcaagtggatttgaagcccaatgggtcagaaataatggtcacaaatgaaaacaaaagggaatatatcgacttagtcatccagtggagatttgtgaacagggtccagaagcagatgaacgccttcttggagggattcacagaactacttcctattgatttgattaaaatttttgatgaaaatgagctggagttgctcatgtgcggcctcggtgatgtggatgtgaatgactggagacagcattctatttacaagaacggctactgcccaaaccaccccgtcattcagtggttctggaaggctgtgctactcatggacgccgaaaagcgtatccggttactgcagtttgtcacagggacatcgcgagtacctatgaatggatttgccgaactttatggttccaatggtcctcagctgtttacaatagagcaatggggcagtcctgagaaactgcccagagctcacacatgctttaatcgccttgacttacctccatatgaaacctttgaagatttacgagagaaacttctcatggccgtggaaaatgctcaaggatttgaaggggtggattaagcaccctgtgcctcgggggtggttgttcttcaagcaagttctgcttgcacttttgcatttgcctaacagacttttgcagaggcgatggcagagagcagctgcaggcatggtccctggagccgagccttcaccacgcactcgtccaagttcggatgcgggaacctggtcccagcttgagttcctgcctttcccaccacaaattatcaactggttgatgtgtacactaattacatttcaggaggacttaatgctatttatgttgtgcctctgcaggcaaagcccttaataaatattttacatcctttctaatgacaatgaatggaattaatcactcaacaggtatagtattacgactcatgtttactttttaaaatgatttagaccgattttcagattttatttcgttatgattaaagatgtctcatgtacttggaaaagtgagcattttttttttttttgtatttcactttcataccaggcttaatgtcaatgacatttttatttttgaagtactctgacacctccaccctctactttattagaattggaaggcaaatttttgtccaaaaacctacagacaagtactttgagagaatttccaatataatattagacataatgataattttttccatactcagaatgaaaaactggatattacgtttttgttttggggtttttttgtacaaatttagctaatagctacaggctgagagaattgtaacatagcatgacaaattttgtgttgacttgaaaggaatcacaccattattccttagaagtaattacatgtgttctaacacatttgagacagggttggactcccatttctcatccgagaaattacttaacccttcctggcgctgtacagtcatcttttattctatttcctctttgctgtttgtagtagagacattttgaatgaaacttggcactgcttgattcaaaactgtggaaaccagatctgtttagtctcctgtttgtatgcgtttgctaatggtagctaaataaccagtttttgttgtaaatgcaccaattctgaaggcactttatgtactacatggaggtcatatctggttttgtttttatttttttatcatgaacattaaatgtgatgatgatttcttttccctgcacacatctttccggtgcaatatctatcaattgtgaatctggctgctggtgtataaaaacctggatgtaaagctgagcctacagacctgtcctcaccaactgttttgtgatttctactcaactacaaagatttatttaatgtactcttaatctaactgagttttgttaccaatgacctgttgcatgcttcaataccgtgtactgcctgagttgtgcctcttgtgtgctagattaaaagtgagacagagacttgacttgatcctctgagctcaagctattgagctggtagtggcagaggactgagggtacctgcacagtttgattcttttccacgtgtaagtctccattgcagaattgtcgtgctttgagaaaacacctgaggcagtgtgggagttgaacgaccctgctgtcctttttaacctgtgttgtcctagaccctgtcggggcagtcaggggacactagagatttgatctcatgcgagtcatcaataggacaaaaaagttgtggtttggggaggtctgtttgttacataaaaaggacctttcggtgtaagaaattgccgtttttaccctgccctggctggcatgtgagaagccatggaaggttgtggttgtaaatgagttgtctaaaggggtgcagaggcctgaggtttctaaaagaaggtagatttctacagagctgagtgttggttcctttttcttattggttgaaaattacctggtagtgatcagaaaacttagatgctatgtaactaaaaaaaaaaaaaaaaaaaaaaaaaaaaaaaaaaaaattcccgctcatgagttttgactattggtgagatgttttccgctacagttaacatgacaaatgtctcagtggcaaaaatcccctttttgtaagcccccatagtctagaggcagttttctttttaagaatcatgccagagcctgagtcgagcagtatgctttcttggtttttgagagtaattgtgtaattgtagagggagaaatccaattctaacctaagaactgggattcttctgtcatcttgtaaaccgtatattgaaaaaaacagaatgtcactaaatgcatattaagtcaagtattggaaagtataaaagaaaaatcattctgacaatttctaagccagaagcaaacaagaattactgaaatctaccccatgaatacttggaaggcagtaattgtgagtgacacctcagttcatcaaccccttaataatatcagcttaattttaatgacaactaaatatgctgaagtgaggatttagtattttttaaaaaagcaaaacaaggttcagtagtcctcagcaattctccaagtttctctctttgcctaaaatggtcatagatcttgatttctctgaatcgtgatgaccacacccagtcatcttcacagcataattgcaggtggcagtaaagagagtgtgctgggtaaggagcagttgctgggtcattccttgggccccgacctgcccggggagtagccctgggggagagagggcagtgttgcctatcccagaggtcccagcagtcacactgctctgcaggccgggctctctttatagccagagaaatcaccttaatgcagtctctttagttgtctgctgaagctgtagttattatgggccacttacatgaggctgagaagtacgtgccggagctcacacactgcctgttgcggttctcttaacatcagttatcacagctgcctgtgggtcccgggtatttccattcctgccccttgttggcccgaggaaggatgtggaaagagcacctggtgggatgaaggtccaacagcctgtgcctctccactgctggccctggagccggcagcagtgaggcattcattgtctgtgttgcggtgtattcccagcttcagtgctcttttcctttttgcctgaaatgtttatgcttctctgcagccagtcctctaacaaatctcaagaacaaaggtaagacacttggtttttgtttccaggacccttcagaaggtgacatcagatattccctaaattcagacaatgagggatacagagcgacttggcatgtattatttctcccatgtaaggacaaagggacagattattattgttatttctgagacagagtcttgctctgtagctcaggctggagtgcagtggctcaatctcagctcaccacaacctctgcctcctggcttcaagcgattcttctgcctcagcctccccgaatagttgggattacaggcacccaccaccacgcctggctaatttttgtatttttagtagagatggtttcaccatgctggccaggctggtcttgaactcctgacctcaggtgatcctcccgcctcagccttccaaagtgctgggattacaagcatgagccaccgcacccggcctcacagtgacagattctgagaaacagcatgcaaaacatttgaaccattttctacatctcccattgttgcatagagagtgtgcaccgctgctatcttgccagatccacactggtcctcccgaaagccaggttcatacacagcaactttttaattattctaacagttacccattaacagtcgactcctgtatttctgagagtcttgtactcacctctgaaatttaaaaacgtataaagagagcctgggttaatcagttctgcagcccctacgtgacactgtgctagttctccttcttctgtctcctccttaccctggccctgcacccctgtacttaagagggagaggtgggaggtgctgtctggtatcatttgctgcctcgccagtagagggtgccgctgtgcagggtaactgcccgcctgctcccttcctgacctcccctgaccccgaagatcactacctctgtcattcaggcattggggtacatcctgataagtcgtgtcagaactgccaatttcaggactgagatgtgtttttaaaaaacaaatccttataaactccactttgtactttagattttaaaactggggaaaaatgtgatattctttggaccacttttttaatttatataagccttaatgaacagtgtctatacatttgcatacacacacccccaccccagagtgttctcagtatgtcagagaaagtgccacagcattaggacgggagcttggagaacgttttctagaaaagggttagcttcctgttggcatgaaattttccaagcaaacctcattaaacatctgttgtttgttaaagatgttccactgaaagcaacgcatgtttcaaaggcacgtctttccgttcgttggttttctgtgtgtaaggagtagcattgctgttggcgcctaacctcgcgtgcactgcattctcaaccccgtaccagtgcatcatcagaagccttcctcgtgaccataactctgtgtctgcagatatgtgttcccgtgtaagccagttttccccttttactcagactgatttcacctagattgtcacggtttccttcatgttaactttgcgtgactttgttcttcctttactactctgtatgtaatatatatacatatatacgtacatatgctgtccaaatatatttgtatatatttgtatagcatttttacacctttattgagtaatctggtttcgaaaggaggtgagagtttagtcccttctgcagttttctccaagctgtgtcctgtgaatttcaacccttggagcctaagaaaaccctaggaagatgatgttaatttgctgtcatttcctaattcaggatctatcatcaaatgaaacatgaaaaaaacagtgacttttaaggtgaaaagagtttcaagcattccaaataaattatcaatgtttcataactttttattataaacccacctcctaataggaagccaagtactatttgatacagtggtaaaaaccaaactaccttgaatttttttaaggcaacttatgaataatgctcattttcacagtcagaatagctttaaaatatggttgaatttgatacacacaggaagttttcttgaagaacaatcctttcgcttttcttttttcttgagagatctaaagagaaactgtagattgttttcctgacagcaaaagactaatgtgacaaaatgaagtcattgtaaagaagcgatgcaacttgtcaaatatttaataaagaattatggaagctggaacattttctac

SEQ ID NO: 318735 - protein, 755 aa, Artificial Sequence
  derived and/or modified sequence
MARKLSVILILTFALSVTNPLHELKAAAFPQTTEKISPNWESGINVDLAISTRQYHLQQLFYRYGENNSLSVEGFRKLLQNIGIDKIKRIHIHHDHDHHSDHEHHSDHERHSDHEHHSEHEHHSDHDHHSHHNHAASGKNKRKALCPDHDSDSSGKDPRNSQGKGAHRPEHASGRRNVKDSVSASEVTSTVYNTVSEGTHFLETIETPRPGKLFPKDVSSSTPPSVTSKSRVSRLAGRKTNESVSEPRKGFMYSRNTNENPQECFNASKLLTSHGMGIQVPLNATEFNYLCPAIINQIDARSCLIHTSEKKAEIPPKTYSLQIAWVGGFIAISIISFLSLLGVILVPLMNRVFFKFLLSFLVALAVGTLSGDAFLHLLPHSHASHHHSHSHEEPAMEMKRGPLFSHLSSQNIEESAYFDSTWKGLTALGGLYFMFLVEHVLTLIKQFKDKKKKNQKKPENDDDVEIKKQLSKYESQLSTNEEKVDTDDRTEGYLRADSQEPSHFDSQQPAVLEEEEVMIAHAHPQEVYNEYVPRGCKNKCHSHFHDTLGQSDDLIHHHHDYHHILHHHHHQNHHPHSHSQRYSREELKDAGVATLAWMVIMGDGLHNFSDGLAIGAAFTEGLSSGLSTSVAVFCHELPHELGDFAVLLKAGMTVKQAVLYNALSAMLAYLGMATGIFIGHYAENVSMWIFALTAGLFMYVALVDMVPEMLHNDASDHGCSRWGYFFLQNAGMLLGFGIMLLISIFEHKIVFRINF

SEQ ID NO: 318736 - DNA, 1173 bp, Artificial Sequence
  derived and/or modified sequence
atgaatactacgtcacaccatatcggtcagttgagatctgatcttgataacggcaacaactccttccagtacaaactcttgggggcaggtgctgggagtacctttatcatcgacgaacgaaccggcgacatttatgcaattcagaagctggatagggaggagcgcagcctctatatcctgagggcgcaggtgatcgacatcgcaaccggcagggcagtggagccggagtctgagtttgtgatcaaggtgtcagacatcaatgacaacgagcccaaattcctggacgaaccctatgaagccattgtccccgaaatgagccctgagggcactttagtcatccaagtcaccgcaagtgacgcggatgatcccagctcgggcaataacgccaggttactttattcgctgcttcaaggccagccctatttttccgtggagccaacaaccggggttatcaggatctcttcaaagatggacagggagctgcaagacgagtattgggtgattattcaagccaaagacatgatcggccagccgggagctctgtcagggaccaccagcgtcctcataaaactcagcgatgtaaatgataacaagcctattttcaaggagagcctgtatcgcctgacagtaagtgagtcagcgcccactggcacgagtatcggaactatcatggcctacgataatgacatcggggagaatgctgagatggattactccattgaagaggacgatagccaaacgttcgatataataacgaatcatgaaactcaggaaggcatagtaatcctgaaaaagaaggtcgatttcgagcatcagaaccactacgggattcgagcgaaggtcaagaaccatcatgtaccagagcagctgatgaagtaccacaccgaagccagcacaacatttataaagatacaagtagaagacgtagacgaacctcctctgtttcttcttccctactacgttttcgaagtcttcgaagagacaccgcagggctcgtttgtgggtgtagttagcgccactgacccggataatcggaaaagccccattaggtactccataaccaggtccaaagtcttcaacatcaatgataatggaacaatcaccaccagtaattctcttgaccgggaaatttccgcatggtacaatttgtctatcaccgccaccgaaaagtag

SEQ ID NO: 318737 - DNA, 1173 bp, Artificial Sequence
  derived and/or modified sequence
atgaacaccaccagccaccacatcggccagctgcggagtgacctggacaatggaaacaacagcttccagtacaagctgctgggcgctggggccggcagcaccttcatcattgatgagaggactggagacatctatgccatccagaagctggaccgggaggagaggagcctgtacatcctgcgggcccaggtgattgatattgccaccggccgggctgtggagcctgagagcgagtttgtgatcaaggtgtctgacatcaatgacaatgagcccaagttcctggatgagccctatgaggccatcgtgcctgagatgagccctgagggcaccctggtgatccaggtgacagccagtgatgctgatgaccccagcagcggcaacaatgcccggctgctgtacagcctgctgcagggccagccctacttctctgtggagcccaccaccggggtcatccgcatcagcagcaagatggaccgggagctgcaggatgagtactgggtgatcatccaggccaaggacatgattggccagcccggggccctgagcggcaccacctctgtgctgatcaagctgagtgatgtgaatgacaacaagcccatcttcaaggagagcctgtaccgcctgactgtgtctgagagcgcccccaccggcaccagcatcggcaccatcatggcctatgacaatgacatcggggagaatgctgagatggactacagcattgaggaggatgacagccagacctttgacatcatcaccaaccacgagacccaggagggcatcgtcatcctgaagaagaaggtggactttgagcaccagaaccactacggcatccgggccaaggtgaagaaccaccacgtgcctgagcagctgatgaagtaccacacagaggccagcaccaccttcatcaagatccaggtggaggatgtggatgagcccccactcttcctgctgccctactacgtgtttgaggtgtttgaggagaccccccagggcagctttgtgggcgtggtgtctgccacagatcctgacaacaggaagagccccatccgctacagcatcaccaggagcaaggtgttcaacatcaatgacaatggcaccatcaccaccagcaacagcctggaccgggagatcagcgcctggtacaacctgagcatcacagccacagagaagtag

SEQ ID NO: 318738 - DNA, 1173 bp, Artificial Sequence
  derived and/or modified sequence
atgaacaccaccagccaccacatcggccagctgcggagcgacctggacaatggaaataatagcttccagtacaagctcctgggagctggtgccggcagcacatttattatcgatgaacgtacaggcgacatctatgcaatccagaagctggaccgagaggagcgaagcttgtacatactccgggcacaggtgatcgatattgcaactggtcgggcagttgaacccgaaagcgaatttgtgataaaggtcagtgatattaacgacaacgagccgaaatttctggatgaaccttacgaagccatagtacccgagatgtcacctgaggggacattagtcatacaagtgaccgcttctgatgcagatgatccttcttcagggaataacgcccgtctgctgtatagcttacttcagggacagccatacttcagtgtggaacctacaacgggcgtcattcgaatttcatccaaaatggaccgcgaactgcaggatgagtactgggtgattattcaagccaaagacatgatcggtcaacccggcgccttgtcgggcacaaccagcgtgctgattaagctgagtgacgtcaacgacaacaagccaatcttcaaagagagtctgtaccgtctgaccgtgagcgagtccgcccctaccggcacttccataggtaccattatggcctacgataacgacatcggcgagaacgctgaaatggactactctatcgaagaggacgactcacagactttcgatatcatcacgaaccacgagacgcaggagggcatcgttattcttaagaaaaaggtggactttgagcatcagaaccactacggaatccgggctaaggtgaagaaccaccatgtgccggagcagctgatgaaataccacacagaggcttctaccactttcataaagatccaagtggaagatgtggatgaaccccccctgttcctcctcccctactacgtatttgaggtgtttgaggagacccctcagggctcctttgtgggcgtcgtgagcgctacagatcccgacaacagaaagtctcctatccgatattctattaccaggtctaaggtgtttaacatcaacgacaatggcaccatcaccaccagtaactctcttgaccgggagatctccgcgtggtacaaccttagcatcacagccaccgaaaagtag

SEQ ID NO: 318739 - DNA, 1173 bp, Artificial Sequence
  derived and/or modified sequence
atgaacaccacatcccaccatattgggcaactgaggtccgacctagacaacggcaataatagtttccagtataagctgctgggcgcaggcgcaggatcgacctttattatcgacgaacgaaccggagatatttatgctattcaaaaactggatagggaagaacgatccctatacatcctgcgggctcaggtgatcgacatcgcgaccggcagggcagtcgaacccgaatccgagtttgttataaaggtaagcgatatcaatgacaacgagcctaaattcttagatgaaccttacgaagccattgttccagagatgagccctgaaggcacgctagtaatccaagtcaccgcatcagacgccgatgacccctcatccggcaataatgccaggctcctgtactcattactccagggacagccttacttttctgtcgaaccgaccacaggagtcattaggataagtagtaaaatggaccgggagttgcaggatgaatactgggtgatcatccaagctaaggacatgatcggacagccaggtgctctaagtggcacaaccagtgtgctcattaagctctccgatgtaaacgacaataagccaatctttaaagagagcttataccgactaacagtgtccgaatctgcccctacaggaacctccattggaactattatggcctacgataatgacattggcgaaaacgcggaaatggactattctatcgaggaggacgacagccagaccttcgacatcatcactaatcatgaaacgcaggagggaatcgtaatcctcaagaaaaaagttgatttcgaacatcaaaaccactatggaattagagctaaggtgaagaatcaccacgtgcctgagcaattgatgaagtaccatacggaggcatccacaaccttcatcaaaatccaggtcgaggacgtggacgagccccctctattccttctcccttactacgtttttgaggtattcgaagagacaccgcagggatcattcgtgggggtggtgagcgccactgaccctgacaatagaaaatcacccattcgctattccattaccagatctaaggtgtttaatattaatgacaacggaaccataacaacctccaactctctagaccgggaaatttccgcttggtacaacctgagcatcactgctaccgagaagtag

SEQ ID NO: 318740 - DNA, 1892 bp, Artificial Sequence
  derived and/or modified sequence
agagaacccaaaatagcattgagtaagcagtgacatactgacagtgttgtggtactaaaagcacaagcgtctgtaactctgggcaatggggcacatcgagagtttgctgagaagactgtgaagcaaaaagaagaaagtttttcctactcttccttatgtgtccaacacgaagtttgctgttcagttttcacagaacttctagaagttgaagttacaaaggaattcctctcctatggccttgtcttggagcaacagaaaactctcaaacaaagaaagtcaagcagccagtgcgatctcatttgagagtgaagcgtggctgggtgtggaaccaattttttgtaccagaggaaatgaatacgactagtcatcacatcggccagctaagatctgatttagacaatggaaacaattctttccagtacaagcttttgggagctggagctggaagtacttttatcattgatgaaagaacaggtgacatatatgccatacagaagcttgatagagaggagcgatccctctacatcttaagagcccaggtaatagacatcgctactggaagggctgtggaacctgagtctgagtttgtcatcaaagtttcggatatcaatgacaatgaaccaaaattcctagatgaaccttatgaggccattgtaccagagatgtctccagaaggaacattagttatccaggtgacagcaagtgatgctgacgatccctcaagtggtaataatgctcgtctcctctacagcttacttcaaggccagccatatttttctgttgaaccaacaacaggagtcataagaatatcttctaaaatggatagagaactgcaagatgagtattgggtaatcattcaagccaaggacatgattggtcagccaggagcgttgtctggaacaacaagtgtattaattaaactttcagatgttaatgacaataagcctatatttaaagaaagtttataccgcttgactgtctctgaatctgcacccactgggacttctataggaacaatcatggcatatgataatgacataggagagaatgcagaaatggattacagcattgaagaggatgattcgcaaacatttgacattattactaatcatgaaactcaagaaggaatagttatattaaaaaagaaagtggattttgagcaccagaaccactacggtattagagcaaaagttaaaaaccatcatgttcctgagcagctcatgaagtaccacactgaggcttccaccactttcattaagatccaggtggaagatgttgatgagcctcctcttttcctccttccatattatgtatttgaagtttttgaagaaaccccacagggatcatttgtaggcgtggtgtctgccacagacccagacaataggaaatctcctatcaggtattctattactaggagcaaagtgttcaatatcaatgataatggtacaatcactacaagtaactcactggatcgtgaaatcagtgcttggtacaacctaagtattacagccacagaaaaatgatatagggatgctgtattccttgaagattacatttcaaagagatggtcaccattacttgataaatacaatcctggatcctaaagcttccaagaaacttgttgaacttttgaaagatttccatacgcttcaaagggacaaagaaaaaacttacatacaaagctttttttttccctctctctctctctttctctgtgtgtgtgtgtgtgtgtgtgtgtgtgtgtatgaatgctctgagaaaaggaaggaaagaaaaaatattttcccttgctttcaacaagtacaaggcctctaatttttaatttgttttgttctttcaaattatcattgcaaatagtacatatattttaaataaaaacactaaaacaaact

SEQ ID NO: 318741 - DNA, 1173 bp, Artificial Sequence
  derived and/or modified sequence
atgaacaccaccagccaccacatcggccagctgagaagcgacctggacaacggcaacaacagcttccagtacaagctgctgggcgccggcgccggcagcaccttcatcatcgacgagagaaccggcgacatctacgccatccagaagctggacagagaggagagaagcctgtacatcctgagagcccaggtgatcgacatcgccaccggcagagccgtggagcccgagagcgagttcgtgatcaaggtgagcgacatcaacgacaacgagcccaagttcctggacgagccctacgaggccatcgtgcccgagatgagccccgagggcaccctggtgatccaggtgaccgccagcgacgccgacgaccccagcagcggcaacaacgccagactgctgtacagcctgctgcagggccagccctacttcagcgtggagcccaccaccggcgtgatcagaatcagcagcaagatggacagagagctgcaggacgagtactgggtgatcatccaggccaaggacatgatcggccagcccggcgccctgagcggcaccaccagcgtgctgatcaagctgagcgacgtgaacgacaacaagcccatcttcaaggagagcctgtacagactgaccgtgagcgagagcgcccccaccggcaccagcatcggcaccatcatggcctacgacaacgacatcggcgagaacgccgagatggactacagcatcgaggaggacgacagccagaccttcgacatcatcaccaaccacgagacccaggagggcatcgtgatcctgaagaagaaggtggacttcgagcaccagaaccactacggcatcagagccaaggtgaagaaccaccacgtgcccgagcagctgatgaagtaccacaccgaggccagcaccaccttcatcaagatccaggtggaggacgtggacgagccccccctgttcctgctgccctactacgtgttcgaggtgttcgaggagaccccccagggcagcttcgtgggcgtggtgagcgccaccgaccccgacaacagaaagagccccatcagatacagcatcaccagaagcaaggtgttcaacatcaacgacaacggcaccatcaccaccagcaacagcctggacagagagatcagcgcctggtacaacctgagcatcaccgccaccgagaagtag

SEQ ID NO: 318742 - protein, 817 aa, Artificial Sequence
  derived and/or modified sequence
MTENKTVSSSSTRDDQTNIGLTCQEVKALREKAWSRTNEGNAMSQSLVLYGASKENSEGFHESKMTNTEGVNKGIYFSYPCRRHSCAVVNIPAPCVNKMISHIQDVESKIQEHLKRFETSFEEWSRTSSTKDLKEDWSVTTPVKEVKPGEKRDEKCPELKQEMETLLSEAIRLIKSLETDRADAEEALKQQRSRKNMINMKIDSWSVWKLQELPLAVQKEHEAYLSDVIELQWHLEDKANQLQHFEKQKTELEEANAKIQADIDYMNEHGPLLDSKQNQELQDLKNHYKKKMEVMDLHRKVNEELEEALEACENARLKAQQIKEEIDKDIYQDEKTIEAYKREIYQLNSLFDHYSSSVINVNTNIEEKEEEVTEAIRETKSSKNELHSLSKMLEDLRRVYDQLTWKQKSHENQYLEAVNDFYAAKKTWDIELSDVAKDFSAISLACTKLTEDNKKLEIDINKITVKTNESIRKKSKYESEIKYLTIMKLKNDKHLKNIYKEAYRIGTLFHLTKHKTDEMEDKIAEVRRKFKGREEFLKKLTQGEVAAGMVLQKKLYSIYEVQALERKELIKNRAICAMSLAELQEPLLQLEDEAERIRSLDKEHSVMLNNIIDQKDLIRRKVGKVKKKLRKKGKKTLDALIETESKRSAIFKDLEATKSKTMIFYAKINELNEELKAKEEEKKSFDQTLEILKNKFITMRFKREHAQTVFDHYMQEKKDCEERIFEEDQRFRVLLAVRQKTLQDTQLCQLQRRMHTLWQEHFKLVVLFSQMRLANFQTDSQESIQKILAVQEESSNLMQHILGFFQTLTDGTCENDG

SEQ ID NO: 318743 - DNA, 2454 bp, Artificial Sequence
  derived and/or modified sequence
atgactgaaaacaagacagtttcctcttcttccactagagatgatcaaaccaatataggtttaacatgtcaggaagtaaaggctctcagagagaaggcatggtcaaggacaaatgaaggcaatgccatgtctcaaagtttggttctatatggagcctctaaggagaacagtgaaggttttcatgaaagtaaaatgacaaatactgaaggggtgaataaaggcatttactttagctacccatgtcgacgtcacagctgtgccgtagtaaatattccagcaccttgtgtcaacaaaatgatttcacacatccaagatgtggagtccaaaatacaggagcatttgaaaaggtttgaaacttcttttgaagaatggagcagaacttcttccacaaaagacctgaaagaagattggagtgtaactacaccagtgaaagaggtcaaaccaggagaaaagagagatgaaaagtgtccagagttaaagcaggaaatggaaacattgctctcagaggccattcgtctcattaaaagtctagaaactgaccgggcagacgctgaagaagctttaaaacaacagagatcaagaaagaatatgattaacatgaaaattgactcttggtcagtctggaaacttcaagaactcccattggctgtgcagaaagaacatgaggcctatttgagtgatgttatagaattacaatggcatcttgaagataaagctaatcaactacaacattttgaaaaacaaaagacagagttagaagaagcaaatgcaaagattcaagcagacatagactacatgaatgaacatggccctctactggactctaagcagaatcaggaacttcaagatctgaagaaccattataaaaaaaaaatggaggtaatggacctacacagaaaagttaatgaagaacttgaagaagctttagaagcctgtgaaaatgccagattgaaggctcagcaaattaaagaagagattgataaggatatttaccaggatgaaaaaaccatagaggcctacaagagagagatatatcaacttaacagtctatttgatcattactcttcatcagtgataaatgttaatactaatattgaggagaaggaagaggaagtgactgaagcaataagggaaacaaagtcatcaaaaaatgaattacattctctatcaaaaatgctggaagatttgagaagagtttatgaccaactaacctggaagcaaaaaagtcatgaaaatcagtatctggaagcagttaatgatttttatgctgcaaaaaaaacatgggatattgagctttctgatgttgcaaaagatttttcagctatttctttggcatgtacaaaactgacggaagacaataaaaaacttgagattgatattaacaaaataacagtaaaaaccaatgaaagcatacggaaaaaatcaaaatacgaatctgaaataaaatatttgacaataatgaagttaaagaatgataaacatctcaagaacatctataaggaggcttatcgcattggtactcttttccacctaaccaaacacaagacagatgaaatggaagataaaatagcagaagtgagaagaaagttcaagggtagagaagaattcctgaaaaaactcactcaaggtgaagtggctgctggaatggtgcttcagaaaaaactatattccatttacgaagtccaggcacttgagcggaaagagcttataaaaaatagagcaatatgtgccatgtcactggcagaactacaggaacctctgcttcaactagaagatgaagctgaaagaatcagaagtctcgacaaagaacattctgttatgcttaataatataattgatcagaaagatcttattagaagaaaggtgggaaaagtaaagaaaaaattacgaaaaaaggggaagaaaacccttgatgcattaatagaaactgagagtaaacgctcagcaatttttaaagacctagaagcaactaaaagtaagacaatgattttttatgcaaaaataaatgaattgaatgaggaattaaaagcaaaagaagaagaaaagaaaagttttgatcagacacttgaaatattaaagaacaaatttataactatgagatttaaaagggaacatgcacaaactgtgtttgatcattatatgcaagagaaaaaagactgtgaagagagaatctttgaggaagatcagagatttagagtgctccttgctgtaagacaaaaaactcttcaagatacccaactctgtcagctgcagagaaggatgcacacactgtggcaggagcacttcaaactggtggtcctcttcagccagatgaggctggccaacttccagacagactctcaggagagtattcagaaaatattagctgtgcaggaggaatcttcaaatttaatgcaacacatcttaggtttcttccagactttgacagatggcacatgcgaaaacgatggttaa

SEQ ID NO: 318744 - DNA, 2454 bp, Artificial Sequence
  derived and/or modified sequence
atgaccgagaacaagaccgtgagcagcagcagcaccagagacgaccagaccaacatcggcctgacctgccaggaggtgaaggccctgagagagaaggcctggagcagaaccaacgagggcaacgccatgagccagagcctggtgctgtacggcgccagcaaggagaacagcgagggcttccacgagagcaagatgaccaacaccgagggcgtgaacaagggcatctacttcagctacccctgcagaagacacagctgcgccgtggtgaacatccccgccccctgcgtgaacaagatgatcagccacatccaggacgtggagagcaagatccaggagcacctgaagagattcgagaccagcttcgaggagtggagcagaaccagcagcaccaaggacctgaaggaggactggagcgtgaccacccccgtgaaggaggtgaagcccggcgagaagagagacgagaagtgccccgagctgaagcaggagatggagaccctgctgagcgaggccatcagactgatcaagagcctggagaccgacagagccgacgccgaggaggccctgaagcagcagagaagcagaaagaacatgatcaacatgaagatcgacagctggagcgtgtggaagctgcaggagctgcccctggccgtgcagaaggagcacgaggcctacctgagcgacgtgatcgagctgcagtggcacctggaggacaaggccaaccagctgcagcacttcgagaagcagaagaccgagctggaggaggccaacgccaagatccaggccgacatcgactacatgaacgagcacggccccctgctggacagcaagcagaaccaggagctgcaggacctgaagaaccactacaagaagaagatggaggtgatggacctgcacagaaaggtgaacgaggagctggaggaggccctggaggcctgcgagaacgccagactgaaggcccagcagatcaaggaggagatcgacaaggacatctaccaggacgagaagaccatcgaggcctacaagagagagatctaccagctgaacagcctgttcgaccactacagcagcagcgtgatcaacgtgaacaccaacatcgaggagaaggaggaggaggtgaccgaggccatcagagagaccaagagcagcaagaacgagctgcacagcctgagcaagatgctggaggacctgagaagagtgtacgaccagctgacctggaagcagaagagccacgagaaccagtacctggaggccgtgaacgacttctacgccgccaagaagacctgggacatcgagctgagcgacgtggccaaggacttcagcgccatcagcctggcctgcaccaagctgaccgaggacaacaagaagctggagatcgacatcaacaagatcaccgtgaagaccaacgagagcatcagaaagaagagcaagtacgagagcgagatcaagtacctgaccatcatgaagctgaagaacgacaagcacctgaagaacatctacaaggaggcctacagaatcggcaccctgttccacctgaccaagcacaagaccgacgagatggaggacaagatcgccgaggtgagaagaaagttcaagggcagagaggagttcctgaagaagctgacccagggcgaggtggccgccggcatggtgctgcagaagaagctgtacagcatctacgaggtgcaggccctggagagaaaggagctgatcaagaacagagccatctgcgccatgagcctggccgagctgcaggagcccctgctgcagctggaggacgaggccgagagaatcagaagcctggacaaggagcacagcgtgatgctgaacaacatcatcgaccagaaggacctgatcagaagaaaggtgggcaaggtgaagaagaagctgagaaagaagggcaagaagaccctggacgccctgatcgagaccgagagcaagagaagcgccatcttcaaggacctggaggccaccaagagcaagaccatgatcttctacgccaagatcaacgagctgaacgaggagctgaaggccaaggaggaggagaagaagagcttcgaccagaccctggagatcctgaagaacaagttcatcaccatgagattcaagagagagcacgcccagaccgtgttcgaccactacatgcaggagaagaaggactgcgaggagagaatcttcgaggaggaccagagattcagagtgctgctggccgtgagacagaagaccctgcaggacacccagctgtgccagctgcagagaagaatgcacaccctgtggcaggagcacttcaagctggtggtgctgttcagccagatgagactggccaacttccagaccgacagccaggagagcatccagaagatcctggccgtgcaggaggagagcagcaacctgatgcagcacatcctgggcttcttccagaccctgaccgacggcacctgcgagaacgacggctag

SEQ ID NO: 318745 - DNA, 2454 bp, Artificial Sequence
  derived and/or modified sequence
atgaccgaaaataaaacagtgtcctcaagtagtacccgcgatgatcagaccaacatagggttgacatgccaggaagtgaaagctctcagggagaaggcttggagccgcaccaacgaaggtaacgctatgtctcagtctctggtgttatacggcgctagcaaagagaactcagaaggttttcacgagtccaagatgaccaacaccgagggcgtgaataagggcatctatttctcatacccatgtcggaggcatagctgcgcagtggtgaacattcctgccccatgtgtgaataaaatgattagccatatccaggacgtggaaagtaagatacaggagcatctcaagcggttcgagacatctttcgaagaatggtcaaggacgtctagtacaaaggatctgaaggaggactggagcgtaactactcctgtcaaggaggtgaaaccaggggaaaagagggatgaaaaatgtcctgagctcaaacaggagatggaaacactcctgagcgaggcgattaggctgataaagtcactggagacagatagagcagacgcggaggaggccctcaaacagcaaaggtcccgtaagaatatgatcaacatgaagattgactcatggagcgtgtggaaactgcaggaactccccttagccgtgcaaaaggaacatgaggcttacctgtccgatgtcatcgagctgcagtggcacctggaggacaaggccaatcagttgcagcattttgagaagcagaagacagaacttgaagaggctaacgccaagatccaggcagacatcgactatatgaatgagcatgggcctctgcttgacagtaaacagaatcaggagctgcaagacttaaagaaccattacaagaagaaaatggaagtcatggaccttcatagaaaagtcaatgaggagctcgaagaggccctggaggcgtgtgagaatgcacgtctcaaagcccagcagatcaaggaggaaatcgataaggatatttaccaggacgagaaaaccatcgaggcctacaaacgggaaatttatcaactcaattcactgtttgatcattacagcagcagtgtaatcaatgtcaataccaacatcgaggagaaggaagaggaagtgacagaggccatccgcgagacgaaatcttcaaaaaacgaattgcattctttgtccaagatgctcgaggacctgagacgtgtctatgaccagctgacctggaagcagaagagccacgaaaatcagtacctggaggccgtaaatgacttttatgcagccaaaaagacctgggacatcgagctgtcagacgtggctaaggacttctccgcaatttctctggcatgtacaaaactcactgaggataataaaaaactggaaatagacatcaataagatcactgttaagaccaatgaatccattagaaagaaatcaaagtacgagtccgagattaagtacttgaccatcatgaagctcaaaaacgataaacacctgaagaacatatacaaagaagcctaccggatcggcaccctctttcacttgacaaagcataaaaccgatgagatggaggataaaattgcggaggtgcggcgcaaattcaaaggcagggaggagtttttgaaaaagttaacacagggtgaggtcgccgccggaatggtgcttcaaaaaaaactgtactcaatctacgaggtccaagcgctcgagcgcaaggaattaatcaagaacagggccatttgcgcaatgtctttggccgaactacaggagcctctgctgcagctcgaagacgaggccgagcgcataaggagccttgacaaagagcactccgtcatgcttaacaatatcattgaccagaaagacttaattagacgaaaggttggtaaggttaagaaaaaactgagaaagaaagggaagaagacgctggatgccctgatagagactgaaagtaagcggagtgcgatttttaaggacctggaagccaccaaaagcaagaccatgattttctacgccaagatcaatgagcttaacgaggagctcaaggcgaaagaggaggaaaagaaatcatttgaccagaccctggagatccttaagaataaatttatcacaatgcgctttaagagagagcacgcccagaccgtgttcgaccactacatgcaggaaaagaaagactgtgaggaaaggatttttgaggaagaccagcggttccgcgtcctcttagcggttcgacaaaaaaccctccaggacactcagctgtgccagctgcagcgcaggatgcatacgctgtggcaggaacactttaaattggtggtactattctcccagatgcgattggcaaacttccagaccgacagtcaggaatctatccagaaaattctagcagttcaggaagagagcagcaatttaatgcagcatatcctcggtttttttcaaactttaacagacggcacctgcgagaacgacggttag

SEQ ID NO: 318746 - DNA, 2454 bp, Artificial Sequence
  derived and/or modified sequence
atgacagagaacaagacagtgagcagcagcagcaccagagatgaccagaccaacatcggcctgacctgccaggaggtgaaggccctgcgggagaaggcctggagcaggaccaatgaaggaaatgccatgagccagagcctggtgctgtatggagccagcaaagaaaattctgagggcttccacgagagcaagatgaccaacacagagggcgtgaacaagggcatctacttctcctacccctgccgccgccacagctgtgctgtggtgaacatcccagccccctgtgtgaacaagatgatcagccacatccaggatgtggagagcaagatccaggagcacctgaagagatttgagaccagctttgaggagtggagcaggaccagcagcaccaaggacctgaaggaggactggagcgtgaccacccctgtgaaggaggtgaagccaggagagaagagagatgagaagtgcccagagctgaagcaggagatggagaccctgctgtctgaggccatccgcctcatcaagagcctggagacagacagagcagatgctgaggaggccctgaagcagcagaggagcaggaagaacatgatcaacatgaagattgacagctggagcgtgtggaagctgcaggagctgcccctggccgtgcagaaggagcacgaggcctacctgagtgatgtgattgagctgcagtggcacctggaggacaaggccaaccagctgcagcactttgagaagcagaagacagagctggaggaggccaatgccaagatccaggccgacatcgactacatgaatgaacatggccccctgctggacagcaagcagaaccaggagctgcaggacctgaagaaccactacaagaagaagatggaggtgatggacctgcacaggaaggtgaatgaggagctggaggaggccctggaggcctgtgaaaatgcccggctgaaggcccagcagatcaaggaggagattgacaaggacatctaccaggatgagaagaccatcgaggcctacaagcgggagatctaccagctgaacagcctgtttgaccactacagcagcagcgtcatcaacgtgaacaccaacatcgaggagaaggaggaggaggtgacagaggccatccgggagaccaagagcagcaagaatgagctgcacagcctgagcaagatgctggaggacctgcggcgggtgtatgaccagctgacctggaagcagaagagccatgagaaccagtacctggaggccgtgaatgacttctatgctgccaagaagacctgggacatcgagctgagtgatgtggccaaggacttcagcgccatcagcctggcctgcaccaagctgacagaggacaacaagaagctggagattgacatcaacaagatcaccgtgaagaccaatgaaagcatcaggaagaagagcaaatatgaaagtgagatcaagtacctgaccatcatgaagctgaagaatgacaagcacctgaagaacatctacaaggaggcctacagaattggcaccctcttccacctgaccaagcacaagacagatgagatggaggacaagattgctgaggtgcggaggaagttcaagggccgggaggagttcctgaagaagctgacccagggcgaggtggccgccggcatggtgctgcagaagaagctgtacagcatctatgaggtgcaggccctggagaggaaggagctgatcaagaacagagccatctgtgccatgagcctggccgagctgcaggagcccctgctgcagctggaggatgaggccgagcgcatccgcagcctggacaaggagcacagcgtgatgctgaacaacatcatcgaccagaaggacctgatccggaggaaggtgggcaaggtgaagaagaagctgaggaagaagggcaagaagaccctggatgccctgattgaaacagagagcaagaggtctgccatcttcaaggacctggaggccaccaagagcaagaccatgatcttctacgccaagatcaatgagctgaatgaggagctgaaggccaaggaggaggagaagaagagctttgaccagaccctggagatcctgaagaacaagttcatcaccatgaggttcaagcgggagcacgcccagacagtgtttgaccactacatgcaggagaagaaggactgtgaggagcgcatctttgaggaggaccagcgcttccgggtgctgctggccgtgcggcagaagaccctgcaggacacccagctgtgccagctgcagaggaggatgcacaccctgtggcaggagcacttcaagctggtggtgctcttcagccagatgaggctggccaacttccagacagacagccaggagagcatccagaagatcctggccgtgcaggaggagagcagcaacctgatgcagcacatcctgggcttcttccagaccctgacagatggcacctgtgaaaatgatggatag

SEQ ID NO: 318747 - DNA, 2454 bp, Artificial Sequence
  derived and/or modified sequence
atgaccgagaacaagaccgtgagcagcagcagcacccgggacgaccaaaccaacatcggtctaacctgccaggaagtcaaggcactgcgcgagaaagcctggtctagaaccaacgagggaaacgccatgtctcagagtcttgtcctttacggcgcctcaaaagagaacagcgaaggcttccacgagtctaagatgactaacactgaaggcgtgaacaaaggtatctacttttcttacccctgtcgccggcactcgtgcgccgtggttaatataccagcaccttgcgtaaataaaatgatttcgcatattcaggatgtcgaatctaagatacaggaacacttgaagagatttgaaacaagcttcgaggagtggtcgcgcacatcttccaccaaggacttaaaggaggattggtccgtcacgactccagtgaaggaggttaaacctggagaaaaacgggacgaaaaatgtccagaactgaagcaggagatggagactcttctgagcgaagccataaggctcattaagagcctggagacagaccgcgccgacgccgaggaggccctgaagcagcagagatcccggaaaaatatgatcaacatgaaaattgacagctggagcgtttggaagttacaagagctcccattggccgtgcagaaagagcacgaagcctatctgtccgacgtgatcgaattgcagtggcatctcgaagacaaggcgaaccagctgcagcattttgagaagcagaagacagaactggaggaggccaacgcaaagattcaggcagacatagattacatgaacgagcatggcccgctcctagacagcaaacagaaccaggaactccaggaccttaaaaaccattataaaaaaaagatggaggtaatggatctccatcggaaagtcaatgaggagctcgaggaggccctggaggcatgtgagaatgcgcgcctgaaagcccagcagatcaaagaagaaattgacaaggatatctaccaagatgaaaaaactattgaggcttataagagagaaatctaccagctcaattcgttatttgaccattacagctctagcgtgataaacgttaatacaaacatcgaggagaaagaggaagaagtaaccgaagccattcgggaaacgaagagctctaaaaacgagttgcatagcttgtcaaaaatgctagaagacctgaggcgggtttacgaccagttaacctggaaacaaaagagtcatgagaatcagtatctggaagcagtgaatgatttttatgctgctaagaaaacttgggacattgaactgtcagatgtggcaaaagatttcagcgcaatcagtcttgcctgcacaaagctgaccgaggacaacaaaaagttggaaattgacataaacaaaataaccgtaaagaccaacgaatcaatacgcaagaagtcaaagtatgagtcagagattaaatacctgacaattatgaagctcaagaatgacaaacacctgaaaaacatttataaagaggcctatagaataggaaccctctttcatctgaccaagcataagacagacgagatggaggacaagattgctgaggtgcgaagaaagttcaaaggccgggaagaattccttaaaaagcttacccagggagaggtcgctgcagggatggtgctccaaaaaaaattgtatagcatctacgaggtgcaagccctggagagaaaggaactcattaagaaccgtgctatatgtgctatgagtctggccgaactgcaggagcccctgctgcaactcgaagacgaggcggagaggatccggtccctcgataaggaacattccgtgatgctgaacaatatcatcgaccagaaggacctgatacgacgcaaggtgggcaaggtaaaaaaaaagctacggaaaaagggaaaaaagactctcgacgcgctgattgaaacagagtctaaaagaagtgcaatctttaaagacttagaagcgacaaagtctaaaaccatgatcttctatgccaagattaacgaattgaatgaggagctgaaggccaaagaggaggagaagaaatcatttgaccagactctggagattctgaagaataaattcatcacaatgcgctttaaacgtgaacacgctcagactgtgttcgatcattacatgcaggaaaaaaaagactgtgaggaacgcatcttcgaagaagaccagaggttccgcgtgctattggctgtgcgacagaaaacattacaggacacgcaactgtgtcagttgcaacggcgcatgcacacactatggcaagaacacttcaaactcgtggttctgttttcccagatgaggctcgccaattttcaaactgactctcaagagagcattcagaagatcctggccgtgcaggaggagtcttcaaatctaatgcagcatattctgggcttctttcaaaccctcaccgacggcacatgcgagaacgatggctag

SEQ ID NO: 318748 - DNA, 2454 bp, Artificial Sequence
  derived and/or modified sequence
atgaccgaaaataaaacagtaagctcttcaagcactagagatgaccagactaatatcggcttgacatgccaagaagtgaaggccctgcgcgaaaaagcctggtcccggactaacgagggcaacgccatgtctcaatcactcgtgctgtatggcgcttccaaagagaatagcgaaggtttccatgaatcaaagatgactaatactgagggggtgaataaggggatctatttctcctacccctgtcgtaggcattcctgtgccgtggttaacatcccagcgccttgcgtgaataagatgatttcacacattcaggatgtcgaatccaaaatccaggagcatttaaaaaggtttgagacatcatttgaggagtggtcacgcacatcatccactaaagacttgaaggaagattggtctgtcactacccctgtgaaggaagtgaagcccggagagaaaagagacgagaaatgccccgagttaaagcaggaaatggaaactttgctctcagaggcgattcggctgattaagagtctggaaactgatcgagctgacgcagaagaagcacttaaacagcagcggagtaggaaaaacatgatcaatatgaaaattgactcgtggtctgtctggaagctgcaggaactgccattagcagtacagaaggagcacgaggcttacctgagtgatgtcatagagctgcaatggcacctggaggacaaggcgaatcaactccagcatttcgagaagcagaaaaccgagctcgaggaggccaatgctaagattcaggccgacattgactatatgaatgagcatggccctctgctggattccaagcagaaccaggaattgcaggacctcaagaaccattataaaaaaaaaatggaggtcatggaccttcaccggaaagtcaacgaagaattagaggaggctcttgaggcgtgcgagaacgctaggcttaaggcccagcaaatcaaggaggagattgataaggacatctaccaggatgaaaagactatagaggcctataaaagagaaatttatcagctgaacagtctgttcgaccactacagttctagcgtgatcaatgtgaatacaaacatcgaagagaaagaagaggaggtcaccgaggccattcgcgagactaagtcttcaaaaaatgaactgcattccctgtcaaaaatgctcgaggacctgcgccgtgtctacgatcagctaacatggaagcagaagtctcatgaaaaccagtacctagaggccgtcaacgacttctacgcagctaagaaaacctgggatatagagctctctgatgtagccaaggattttagtgcaatcagtctcgcctgcacaaagctgactgaggacaacaaaaaactggaaattgacattaataagattaccgtaaaaactaatgagtccattaggaagaagtcgaaatacgagtctgaaataaagtatctgacaatcatgaaactgaagaacgataaacatctgaagaatatctacaaggaagcctataggataggcactctgtttcatttgacaaaacataagacagacgagatggaagataagatcgcggaagtcagacggaaattcaaaggtcgtgaagaattcctgaaaaagctgacacaaggcgaagtggccgcagggatggtactccagaagaagctgtactctatttatgaagtgcaggcactggaacgaaaagagctgattaagaatcgagctatatgcgcaatgagcctggccgaactgcaggaacctcttcttcagctggaagacgaggccgagcggatccggtccctggataaggaacactctgtcatgctgaataatatcatcgatcagaaagatctgatcagacgtaaagtgggaaaagtgaagaaaaagcttcgcaaaaagggcaagaaaaccctggacgccctgattgagacagaatccaagcgcagcgcaattttcaaagatctagaggctacaaaatccaagacaatgatcttttacgccaagattaacgagctaaatgaggagttaaaggctaaagaagaagagaagaagtcattcgaccagaccctcgagattttgaagaacaagttcatcaccatgcgatttaagcgcgaacacgcccaaaccgttttcgatcattacatgcaggagaagaaagattgtgaagagaggatatttgaggaggatcagcgcttcagggtgttactggctgtgagacagaaaactctccaagacacgcagttgtgtcagctgcaacggcgtatgcacaccctttggcaggagcatttcaagctggtcgtgttgtttagccaaatgcgtttagcgaacttccaaacagatagccaagaatctattcagaagatcctggctgttcaggaagaaagttccaacctgatgcagcacatcttgggattctttcagacactcactgacgggacctgtgagaatgatggatag

SEQ ID NO: 318749 - DNA, 1033 bp, Artificial Sequence
  derived and/or modified sequence
tgtctgctcaatcaagtcaaatactgaacaacttcctggcggagaggctgagaattttatacttgcttgctcgaaagcaccccaaataagatgatccacgccaacacctcccctttacaggttttaaaatattcttataactatgactgaaaacaagacagtttcctcttcttccactagagatgatcaaaccaatataggtttaacatgtcaggaagtaaaggctctcagagagaaggcatggtcaaggacaaatgaaggcaatgccatgtctcaaagtttggttctatatggagcctctaaggagaacagtgaaggttttcatgaaagtaaaatgacaaatactgaaggggtgaataaaggcatttactttagctacccatgtcgacgtcacagctgtgccgtagtaaatattccagcaccttgtgtcaacaaaatgatttcacacatccaagatgtggagtccaaaatacaggagcatttgaaaaggtttgaaacttcttttgaagaatggagcagaacttcttccacaaaagacctgaaagaagattggagtgtaactacaccagtgaaagaggtcaaaccaggagaaaagagagatgaaaagtgtccagagttaaagcaggaaatggaaacattgctctcagaggccattcgtctcattaaaagtctagaaactgaccgggcagacgctgaagaagctttaaaacaacagagatcaagaaagaatatgattaacatgaaaattgactcttggtcagtctggaaacttcaagaactcccattggctgtgcagaaagaacatgaggcctatttgagtgatgttatagaattacaatggcatcttgaagataaagctaatcaactacaacattttgaaaaacaaaagacagagttagaagaagcaaatgcaaagattcaagcagacatagactacatgaatgaacatggccctctactggactctaagcagaatcaggaacttcaagatctgaagaaccattataaaaaaaaaataaaaaaaaaaaaaaaa

SEQ ID NO: 318750 - DNA, 894 bp, Artificial Sequence
  derived and/or modified sequence
atgaccgagaacaagaccgtgagcagcagcagcaccagagacgaccagaccaacatcggcctgacctgccaggaggtgaaggccctgagagagaaggcctggagcagaaccaacgagggcaacgccatgagccagagcctggtgctgtacggcgccagcaaggagaacagcgagggcttccacgagagcaagatgaccaacaccgagggcgtgaacaagggcatctacttcagctacccctgcagaagacacagctgcgccgtggtgaacatccccgccccctgcgtgaacaagatgatcagccacatccaggacgtggagagcaagatccaggagcacctgaagagattcgagaccagcttcgaggagtggagcagaaccagcagcaccaaggacctgaaggaggactggagcgtgaccacccccgtgaaggaggtgaagcccggcgagaagagagacgagaagtgccccgagctgaagcaggagatggagaccctgctgagcgaggccatcagactgatcaagagcctggagaccgacagagccgacgccgaggaggccctgaagcagcagagaagcagaaagaacatgatcaacatgaagatcgacagctggagcgtgtggaagctgcaggagctgcccctggccgtgcagaaggagcacgaggcctacctgagcgacgtgatcgagctgcagtggcacctggaggacaaggccaaccagctgcagcacttcgagaagcagaagaccgagctggaggaggccaacgccaagatccaggccgacatcgactacatgaacgagcacggccccctgctggacagcaagcagaaccaggagctgcaggacctgaagaaccactacaagaagaagatcaagaagaagaagaagtag

SEQ ID NO: 318751 - DNA, 894 bp, Artificial Sequence
  derived and/or modified sequence
atgactgagaacaaaacagtgagctctagttcaacacgcgacgaccaaactaatatcgggttgacttgtcaagaggtgaaagctttacgagagaaagcatggagccggaccaatgaaggcaacgccatgtctcaaagtctggtgttgtacggtgcctcaaaggaaaacagcgaggggttccacgagagtaagatgaccaataccgagggcgtgaataagggtatttacttcagctacccatgccgaaggcacagttgcgccgtagtgaatattcccgccccttgcgtgaacaagatgatcagccacatccaggacgtggagtctaagattcaggaacatcttaagaggttcgagacatcatttgaagagtggagccgaacctcatccacaaaggacctgaaggaggattggtccgtaaccacccccgtgaaagaggtgaaacctggagagaaacgcgacgagaagtgtccggaactgaaacaagaaatggaaactctgctaagtgaagctataaggctgatcaaatcactggagacggatagagctgacgccgaggaagctcttaagcagcaacgaagcagaaagaatatgatcaatatgaaaattgacagttggtcggtgtggaaactgcaggaactgcctctggccgtgcagaaagagcatgaggcttacctgtccgacgtgattgaacttcagtggcatcttgaggacaaagctaaccagctgcagcacttcgagaaacagaaaactgagctagaggaggctaacgccaagatccaggcagacatcgattacatgaatgagcatgggcccttgcttgactccaagcagaaccaggagctccaagaccttaaaaaccattacaaaaagaagatcaaaaagaaaaaaaaatag

SEQ ID NO: 318752 - DNA, 894 bp, Artificial Sequence
  derived and/or modified sequence
atgacagagaacaagacagtgagcagcagcagcaccagagatgaccagaccaacatcggcctgacctgccaggaggtgaaggccctgcgggagaaggcctggagcaggaccaatgaaggaaatgccatgagccagagcctggtgctgtatggagccagcaaagaaaattctgagggcttccacgagagcaagatgaccaacacagagggcgtgaacaagggcatctacttctcctacccctgccgccgccacagctgtgctgtggtgaacatcccagccccctgtgtgaacaagatgatcagccacatccaggatgtggagagcaagatccaggagcacctgaagagatttgagaccagctttgaggagtggagcaggaccagcagcaccaaggacctgaaggaggactggagcgtgaccacccctgtgaaggaggtgaagccaggagagaagagagatgagaagtgcccagagctgaagcaggagatggagaccctgctgtctgaggccatccgcctcatcaagagcctggagacagacagagcagatgctgaggaggccctgaagcagcagaggagcaggaagaacatgatcaacatgaagattgacagctggagcgtgtggaagctgcaggagctgcccctggccgtgcagaaggagcacgaggcctacctgagtgatgtgattgagctgcagtggcacctggaggacaaggccaaccagctgcagcactttgagaagcagaagacagagctggaggaggccaatgccaagatccaggccgacatcgactacatgaatgaacatggccccctgctggacagcaagcagaaccaggagctgcaggacctgaagaaccactacaagaagaagatcaagaagaagaagaagtag

SEQ ID NO: 318753 - DNA, 894 bp, Artificial Sequence
  derived and/or modified sequence
atgaccgagaacaagaccgtgagcagcagcagcacccgggacgaccagacgaacatagggctcacctgtcaggaggtgaaagcattgcgagagaaggcctggtctaggacaaacgagggtaatgccatgtcccagagtcttgtcctgtacggcgcaagcaaagaaaactccgaagggtttcatgaatccaagatgaccaatacagagggtgttaataaagggatctattttagttacccctgtaggaggcactcctgtgccgtggtgaacatccctgcaccctgcgtcaataaaatgataagccacatccaagatgtggagtctaaaatacaagaacatcttaaacggttcgaaacgtcattcgaagagtggtccaggacatcttcaactaaagatttgaaggaggattggagcgtcaccactcctgtgaaagaggtgaagcccggagagaaaagagacgagaagtgccccgaactcaaacaagaaatggaaaccctgctgagcgaagccatccgactgatcaaatccttagagactgatcgagctgatgccgaggaagccctcaagcaacagaggagccgcaagaatatgattaatatgaagattgattcatggagcgtgtggaaacttcaggaactgccgctggccgtacagaaagagcatgaggcctacctatccgacgtgattgagttgcaatggcatctcgaagataaggcaaaccagctgcagcatttcgagaaacagaaaacagaactggaagaggctaacgctaagatccaagccgacatcgactacatgaacgagcacggacctctgctggatagcaaacaaaaccaggaactccaggatttgaaaaatcactacaagaagaagatcaagaagaagaaaaaatag

SEQ ID NO: 318754 - DNA, 894 bp, Artificial Sequence
  derived and/or modified sequence
atgacagaaaacaagacagtgtcctcatcctcaactcgggatgatcagactaacattgggctcacttgtcaggaggtgaaggccctccgagaaaaggcatggtcccgaacaaacgagggcaacgccatgtcacagagcttggtcttatatggggcttctaaggaaaactccgaaggctttcacgagtccaagatgacaaataccgagggcgtaaacaagggaatctacttctcctatccatgcagaagacattcctgcgccgtagtgaatataccggctccatgcgtaaataaaatgatttctcatatccaggacgtggaatcaaagatccaggaacacttaaaacggtttgaaaccagctttgaagagtggagtagaactagttctacaaaggacctcaaagaagattggtctgtaactaccccggtcaaagaggtgaagccaggtgaaaagagggacgagaaatgccctgagctgaagcaggaaatggaaaccctactatccgaggccatccgcttgattaagtctctagagaccgatcgggcagacgctgaggaagctttgaaacagcaaaggtccagaaagaatatgattaatatgaaaattgactcatggtccgtctggaagctccaggagctgcccctagcggtgcagaaggagcacgaagcctatctgtccgatgtgatcgagctgcagtggcaccttgaagataaggctaatcagctgcagcattttgagaaacagaagaccgaactagaagaagccaatgcaaagattcaggcggatattgactatatgaacgaacatggcccactcctggacagcaagcagaatcaagagctgcaggatctcaagaaccactataagaagaagataaagaagaagaagaagtag

SEQ ID NO: 318755 - protein, 135 aa, Artificial Sequence
  derived and/or modified sequence
MQAVFSSVFYFASVPLYQGFLMVGYATIYTMFPVFSLVLDQDVKPEMAMLYPELYKDLTKSQQDGRSNRRQHERLTSGTSGHVWDPGSFFRIRVSGKGARNAGKILVLQNLPHLGFNKYLPRRHPHVWGPGALRV

SEQ ID NO: 318756 - protein, 202 aa, Artificial Sequence
  derived and/or modified sequence
MQRKRGLEWFVCDGWKFLCTSCCGWLINICRRKKELKARTVWLGCPEKCEEKHPRNSIKNQKYNVFTFIPGVLYEQFKFFLNLYFLVISCSQFVPALKIGYLYTYWAPLGFVLAVTMTREAIDEFRRFQRDKEVNSQLYSKLTVRGKVQVKSSDIQVGDLIIVEKNQRIPSDMVFLRTSEKAVSNNLDYCSHLVLFIFCFLN

SEQ ID NO: 318757 - protein, 136 aa, Artificial Sequence
  derived and/or modified sequence
MPLMMSEEGFENEESDYHTLPRARIMQRKRGLEWFVCDGWKFLCTSCCGWLINICRRKKELKARTVWLGCPEKCEEKHPRNSIKNQKYNVFTFIPGVLYEQFKFFLNLYFLVISCSQFVPALKIGYLYTYWAPLMT

SEQ ID NO: 318758 - DNA, 411 bp, Artificial Sequence
  derived and/or modified sequence
atgcctctcatgatgtcagaggagggatttgaaaacgaagagtctgattatcataccctgccaagggcgagaatcatgcaaagaaagcggggcctggagtggtttgtgtgtgacggatggaagttcctgtgtacttcctgttgtgggtggctgataaatatctgccggcgcaagaaagaattgaaagcccggaccgtgtggctggggtgtccggaaaagtgtgaagagaaacatcctcgcaattccataaaaaatcagaagtataatgtttttacattcatcccgggggtcttgtacgagcagttcaaattctttctcaacctgtacttcctggtgatctcatgtagtcagtttgtgcctgccttgaaaattggttacttgtacacgtattgggcgcctcttatgacttag

SEQ ID NO: 318759 - DNA, 609 bp, Artificial Sequence
  derived and/or modified sequence
atgcaacgcaagagggggcttgaatggtttgtatgcgacgggtggaaattcctgtgcacttcatgctgtgggtggcttatcaacatatgccgacggaaaaaagagttgaaggcgcgcactgtgtggttggggtgtccagagaaatgtgaagagaaacacccacgaaactctattaagaatcagaagtacaacgtctttacatttatcccgggcgtgctatacgaacaatttaagttctttctgaatctgtatttcctggtgatcagctgtagccagttcgtgccagcgcttaagatcgggtacctttatacctattgggctccactgggttttgtgctagcggtcaccatgaccagggaagcaatcgacgagttccggaggtttcagcgagataaagaagtaaactcacaactatactctaagttgactgtgcgaggaaaagtccaagtgaaatcctctgacattcaggtcggcgatctaatcatcgttgaaaaaaaccagaggatccccagcgatatggtgttcctgcgcacatcagaaaaggctgtgtccaataatctcgactactgcagtcatctggtgttgtttattttttgttttttaaactag

SEQ ID NO: 318760 - DNA, 411 bp, Artificial Sequence
  derived and/or modified sequence
atgcccctgatgatgtctgaggagggctttgaaaatgaggagagtgactaccacaccctgccccgggcccgcatcatgcagaggaagaggggcctggagtggtttgtgtgtgatggctggaagttcctgtgcaccagctgctgcggctggctgatcaacatctgcaggaggaagaaggagctgaaggccaggacagtgtggctgggctgcccagagaagtgtgaggagaagcaccccaggaacagcatcaagaaccagaagtacaacgtgttcaccttcatccctggggtgctgtatgagcagttcaagttcttcctgaacctgtacttcctggtgatcagctgcagccagtttgtgcctgccctgaagattggctacctgtacacctactgggcccccctgatgacctag

SEQ ID NO: 318761 - DNA, 609 bp, Artificial Sequence
  derived and/or modified sequence
atgcagaggaagaggggcctggagtggtttgtgtgtgatggctggaagttcctgtgcaccagctgctgcggctggctgatcaacatctgcaggaggaagaaggagctgaaggccaggacagtgtggctgggctgcccagagaagtgtgaggagaagcaccccagaaattccatcaagaaccagaagtacaacgtgttcaccttcatccctggggtgctgtatgagcagttcaagttcttcctgaacctgtacttcctggtgatcagctgcagccagtttgtgcctgccctgaagattggctacctgtacacctactgggcccccctgggctttgtgctggccgtgaccatgacccgggaggccattgatgagttccgccgcttccagagggacaaggaggtgaacagccagctgtacagcaagctgactgtgcggggcaaggtgcaggtgaagagcagtgacatccaggtgggggacctgatcatcgtggagaagaaccagaggatccccagcgacatggtgttcctgcggaccagcgagaaggctgtgagcaacaacctggactactgcagccacctggtgctcttcatcttctgcttcctgaactag

SEQ ID NO: 318762 - DNA, 411 bp, Artificial Sequence
  derived and/or modified sequence
atgcccctgatgatgagcgaggagggcttcgagaacgaggagagcgattaccacacactgccacgggcacggattatgcagcgaaagaggggcctggagtggttcgtgtgtgatggatggaaattcctttgcacctcatgttgtggttggctgatcaatatctgccggcgtaaaaaagagctgaaggcacgcacggtgtggcttgggtgtcccgaaaagtgtgaggagaaacacccacgaaactctatcaagaaccagaaatataatgtttttactttcatacccggtgttctatacgaacagttcaagttctttctcaacttgtattttctagtgatctcttgctctcagttcgtgcccgcgctgaagataggatatctgtacacttactgggccccactcatgacttag

SEQ ID NO: 318763 - DNA, 609 bp, Artificial Sequence
  derived and/or modified sequence
atgcagcggaagcggggcctggagtggttcgtgtgcgacggctggaagttcctgtgtacctcttgctgtggctggctgattaacatatgtaggcgcaagaaggaacttaaggcaagaacagtctggctcggatgtcccgagaagtgcgaggagaagcatccaagaaattctattaagaaccagaagtacaatgtgtttactttcataccgggtgtgctgtacgagcaattcaagtttttcctaaatctctactttctggtgatctcatgctcccagtttgtccctgccctgaagatcggctatctgtacacatactgggctccactggggtttgttttggccgttaccatgacaagggaagccattgacgagtttcgtcggtttcagcgggacaaagaagtgaatagccagctgtacagcaaactaaccgtgaggggcaaggtccaggtgaaatcatccgacatacaggtcggagacctgattattgttgagaaaaatcagcgcatcccctccgacatggtgtttctcagaacatctgaaaaggcagtcagtaataatctcgactactgtagccatctagtgctttttatcttttgcttcctcaattag

SEQ ID NO: 318764 - DNA, 411 bp, Artificial Sequence
  derived and/or modified sequence
atgcctttaatgatgtctgaagaagggtttgagaacgaagagtcggattaccatacattaccgagggctaggatcatgcaacgaaagagggggctcgagtggtttgtgtgcgacggatggaagtttttgtgcacttcctgctgcgggtggttgattaacatttgcaggcgaaaaaaggagctcaaggccagaaccgtgtggctaggctgtccagaaaagtgtgaggaaaagcatccacgtaattctattaagaatcagaaatataacgtgtttaccttcattcccggtgtcctctacgagcagttcaagttcttcctgaatctttactttcttgtgatctcttgcagtcaattcgttcctgccctgaagataggctatctgtacacttattgggccccactgatgacatag

SEQ ID NO: 318765 - DNA, 609 bp, Artificial Sequence
  derived and/or modified sequence
atgcagagaaaacgtggtctggaatggttcgtttgcgacggatggaagtttctttgtacgtcttgttgcggctggcttatcaacatatgcagaaggaagaaggagcttaaagcccgaacggtttggttagggtgcccggagaaatgtgaagagaagcacccgaggaatagtatcaaaaaccaaaaatataatgtgttcaccttcatccccggtgtgctgtacgaacagttcaaatttttcttaaacctgtattttctcgttatttcatgttctcaattcgtgcctgcactgaaaattggatacctctatacctactgggcgcctctgggattcgtccttgccgtgacaatgactcgggaggctatcgatgagttcagaagatttcagcgggacaaggaggttaattcacagctgtactcaaagctgaccgtaagaggcaaggtgcaggtaaagagcagtgacatccaggtcggcgatctgattatcgtggagaagaaccagagaattccatcagatatggtgtttctccggacgtctgagaaggccgttagtaataatcttgattattgctctcacctcgtactctttattttctgtttcctgaattag

SEQ ID NO: 318766 - DNA, 411 bp, Artificial Sequence
  derived and/or modified sequence
atgcccctgatgatgagcgaggagggcttcgagaacgaggagagcgactaccacaccctgcccagagccagaatcatgcagagaaagagaggcctggagtggttcgtgtgcgacggctggaagttcctgtgcaccagctgctgcggctggctgatcaacatctgcagaagaaagaaggagctgaaggccagaaccgtgtggctgggctgccccgagaagtgcgaggagaagcaccccagaaacagcatcaagaaccagaagtacaacgtgttcaccttcatccccggcgtgctgtacgagcagttcaagttcttcctgaacctgtacttcctggtgatcagctgcagccagttcgtgcccgccctgaagatcggctacctgtacacctactgggcccccctgatgacctag

SEQ ID NO: 318767 - DNA, 609 bp, Artificial Sequence
  derived and/or modified sequence
atgcagagaaagagaggcctggagtggttcgtgtgcgacggctggaagttcctgtgcaccagctgctgcggctggctgatcaacatctgcagaagaaagaaggagctgaaggccagaaccgtgtggctgggctgccccgagaagtgcgaggagaagcaccccagaaacagcatcaagaaccagaagtacaacgtgttcaccttcatccccggcgtgctgtacgagcagttcaagttcttcctgaacctgtacttcctggtgatcagctgcagccagttcgtgcccgccctgaagatcggctacctgtacacctactgggcccccctgggcttcgtgctggccgtgaccatgaccagagaggccatcgacgagttcagaagattccagagagacaaggaggtgaacagccagctgtacagcaagctgaccgtgagaggcaaggtgcaggtgaagagcagcgacatccaggtgggcgacctgatcatcgtggagaagaaccagagaatccccagcgacatggtgttcctgagaaccagcgagaaggccgtgagcaacaacctggactactgcagccacctggtgctgttcatcttctgcttcctgaactag

SEQ ID NO: 318768 - DNA, 408 bp, Artificial Sequence
  derived and/or modified sequence
atgcaagccgtgttctctagcgtcttctactttgcctctgttccactctatcagggattcctgatggtcgggtacgcgacaatctataccatgtttcctgtcttttcgctcgtgctcgatcaggatgttaaaccggaaatggctatgttgtacccagagctgtacaaggaccttacaaagagccagcaagacggtcgatctaatcggcggcagcatgaaaggctgacttccggtacatcagggcacgtttgggaccccggaagcttcttccgcatacgagtgagtggaaagggtgctagaaacgccggtaagattcttgtgcttcagaatttgcctcacctgggttttaacaagtacctcccaagacgccacccccatgtctggggacccggggccctaagggtctag

SEQ ID NO: 318769 - DNA, 408 bp, Artificial Sequence
  derived and/or modified sequence
atgcaggccgtgttcagctctgtgttctactttgcctctgtgcccctgtaccagggcttcctgatggtgggctacgccaccatctacaccatgtttcctgtgttcagcctggtgctggaccaggatgtgaagccagagatggccatgctgtacccagagctgtacaaggacctgaccaagagccagcaggacggccgcagcaacagacggcagcacgagcggctgaccagcggcaccagcggccacgtgtgggaccccggcagcttcttccgcatccgggtgtctggaaaaggagccagaaatgctgggaagatcctggtgctgcagaacctgccccacctgggcttcaacaagtacctgccccggcggcacccccacgtgtggggccctggggccctgcgggtgtag

SEQ ID NO: 318770 - DNA, 408 bp, Artificial Sequence
  derived and/or modified sequence
atgcaggccgtgttcagcagcgtgttctacttcgccagcgtgcccttgtaccagggcttcctcatggttggctacgctacgatctataccatgtttcccgttttcagtttagtgctggatcaagatgtcaaacccgagatggcaatgttgtatcctgaactctacaaagaccttacaaaatcccaacaggacggccgatctaaccgtcgacagcacgaaagactcacctctggtacaagcggtcatgtctgggatccagggtcattcttccgaatccgggtttccgggaagggagccagaaatgctggaaagatattagttcttcagaaccttcctcacttgggcttcaataagtacctcccgcggcgtcaccctcacgtgtgggggcctggggcactcagagtctag

SEQ ID NO: 318771 - DNA, 408 bp, Artificial Sequence
  derived and/or modified sequence
atgcaggctgttttttccagtgttttttatttcgcttcagtgcccctatatcaagggtttctgatggtcgggtacgccaccatttacaccatgttcccggtgttctcactggtgctagatcaggacgtgaaacctgaaatggcaatgctctatcctgagctgtacaaagatctgaccaaaagccaacaggatgggcgttcaaaccgacgtcagcacgagcggctgacgtctgggacttcagggcacgtatgggatcccggaagctttttccggatccgagtcagcgggaagggcgcacgaaacgcaggtaagattctcgtcctccagaacctgccgcacctgggttttaacaaataccttccaaggcgccacccccatgtctggggcccaggggctctgagagtgtag

SEQ ID NO: 318772 - DNA, 408 bp, Artificial Sequence
  derived and/or modified sequence
atgcaggccgtgttcagcagcgtgttctacttcgccagcgtgcccctgtaccagggcttcctgatggtgggctacgccaccatctacaccatgttccccgtgttcagcctggtgctggaccaggacgtgaagcccgagatggccatgctgtaccccgagctgtacaaggacctgaccaagagccagcaggacggcagaagcaacagaagacagcacgagagactgaccagcggcaccagcggccacgtgtgggaccccggcagcttcttcagaatcagagtgagcggcaagggcgccagaaacgccggcaagatcctggtgctgcagaacctgccccacctgggcttcaacaagtacctgcccagaagacacccccacgtgtggggccccggcgccctgagagtgtag

SEQ ID NO: 318773 - protein, 580 aa, Artificial Sequence
  derived and/or modified sequence
MAAAARPRGRALGPVLPPTPLLLLVLRVLPACGATARDPGAAAGLSLHPTYFNLAEAARIWATATCGERGPGEGRPQPELYCKLVGGPTAPGSGHTIQGQFCDYCNSEDPRKAHPVTNAIDGSERWWQSPPLSSGTQYNRVNLTLDLGQLFHVAYILIKFANSPRPDLWVLERSVDFGSTYSPWQYFAHSKVDCLKEFGREANMAVTRDDDVLCVTEYSRIVPLENGEVVVSLINGRPGAKNFTFSHTLREFTKATNIRLRFLRTNTLLGHLISKAQRDPTVTRRYYYSIKDISIGGQCVCNGHAEVCNINNPEKLFRCECQHHTCGETCDRCCTGYNQRRWRPAAWEQSHECEACNCHGHASNCYYDPDVERQQASLNTQGIYAGGGVCINCQHNTAGVNCEQCAKGYYRPYGVPVDAPDGCIPCSCDPEHADGCEQGSGRCHCKPNFHGDNCEKCAIGYYNFPFCLRIPIFPVSTPSSEDPVAGDIKGNWCDCNLEGVLPEICDAHGRCLCRPGVEGPRCDTCRSGFYSFPICQGPSEKVAIYKPESRPSAETEPASTWILDFPASRTGEINFYCLSP

SEQ ID NO: 318774 - protein, 437 aa, Artificial Sequence
  derived and/or modified sequence
MSSILPFTPPVVKRLLGWKKSAGGSGGAGGGEQNGQEEKWCEKAVKSLVKKLKKTGRLDELEKAITTQNCNTKCVTIPRSLDGRLQVSHRKGLPHVIYCRLWRWPDLHSHHELKAIENCEYAFNLKKDEVCVNPYHYQRVETPVLPPVLVPRHTEILTELPPLDDYTHSIPENTNFPAGIEPQSNYIPETPPPGYISEDGETSDQQLNQSMDTGSPAELSPTTLSPVNHSLDLQPVTYSEPAFWCSIAYYELNQRVGETFHASQPSLTVDGFTDPSNSERFCLGLLSNVNRNATVEMTRRHIGRGVRLYYIGGEVFAECLSDSAIFVQSPNCNQRYGWHPATVCKIPPGCNLKIFNNQEFAALLAQSVNQGFEAVYQLTRMCTIRMSFVKGWGAEYRRQTVTSTPCWIELHLNGPLQWLDKVLTQMGSPSVRCSSMS

SEQ ID NO: 318775 - DNA, 1314 bp, Artificial Sequence
  derived and/or modified sequence
atgagcagcatcctgcccttcaccccccccgtggtgaagagactgctgggctggaagaagagcgccggcggcagcggcggcgccggcggcggcgagcagaacggccaggaggagaagtggtgcgagaaggccgtgaagagcctggtgaagaagctgaagaagaccggcagactggacgagctggagaaggccatcaccacccagaactgcaacaccaagtgcgtgaccatccccagaagcctggacggcagactgcaggtgagccacagaaagggcctgccccacgtgatctactgcagactgtggagatggcccgacctgcacagccaccacgagctgaaggccatcgagaactgcgagtacgccttcaacctgaagaaggacgaggtgtgcgtgaacccctaccactaccagagagtggagacccccgtgctgccccccgtgctggtgcccagacacaccgagatcctgaccgagctgccccccctggacgactacacccacagcatccccgagaacaccaacttccccgccggcatcgagccccagagcaactacatccccgagacccccccccccggctacatcagcgaggacggcgagaccagcgaccagcagctgaaccagagcatggacaccggcagccccgccgagctgagccccaccaccctgagccccgtgaaccacagcctggacctgcagcccgtgacctacagcgagcccgccttctggtgcagcatcgcctactacgagctgaaccagagagtgggcgagaccttccacgccagccagcccagcctgaccgtggacggcttcaccgaccccagcaacagcgagagattctgcctgggcctgctgagcaacgtgaacagaaacgccaccgtggagatgaccagaagacacatcggcagaggcgtgagactgtactacatcggcggcgaggtgttcgccgagtgcctgagcgacagcgccatcttcgtgcagagccccaactgcaaccagagatacggctggcaccccgccaccgtgtgcaagatcccccccggctgcaacctgaagatcttcaacaaccaggagttcgccgccctgctggcccagagcgtgaaccagggcttcgaggccgtgtaccagctgaccagaatgtgcaccatcagaatgagcttcgtgaagggctggggcgccgagtacagaagacagaccgtgaccagcaccccctgctggatcgagctgcacctgaacggccccctgcagtggctggacaaggtgctgacccagatgggcagccccagcgtgagatgcagcagcatgagctag

SEQ ID NO: 318776 - DNA, 1314 bp, Artificial Sequence
  derived and/or modified sequence
atgagctctatcctgcccttcacgccaccggtcgtgaagcgactgttagggtggaaaaaaagtgcgggtggctccgggggggcaggaggaggcgagcaaaacggccaagaggagaaatggtgcgagaaagcggtaaaatccctcgtgaaaaagctgaaaaagacggggcgcctcgacgagctggagaaggcaattaccacgcagaactgcaacactaaatgtgtcacaatcccgaggtctttggacggcaggctgcaggtgagtcaccggaaagggctgcctcatgtgatctattgtcggctctggcgctggcccgatctgcactctcatcacgaactcaaagctatcgagaactgcgaatacgcgttcaatctgaaaaaggacgaggtatgtgttaatccttatcactatcagagggtggaaaccccggtgctgccccccgttctggtaccacgccataccgagatcctcacggagctgcctccactggatgactatacccactcaataccagaaaacactaattttccagcaggcattgagccccagagtaattacatcccagaaacgccacctccgggttacatctccgaggacggcgagacctccgatcaacagctgaaccagagcatggacaccgggagccccgcggaactttctcctactaccctgtccccagtaaatcatagtttggatctgcagcctgtaacatatagtgagccagccttctggtgtagtatagcatactacgagctgaaccaacgggtgggggagacattccacgcatctcagccgagtctgactgtggatggtttcacagatcccagtaatagcgaacgattttgcctgggactgctctccaatgttaaccgaaatgccacagtagaaatgactagaagacacatcggcaggggagtgaggctgtattatatcggaggcgaggtatttgcagagtgcttgagcgactcggcgatcttcgttcagagcccaaactgcaatcagcgctacggctggcatcctgctacagtgtgcaagattccccccgggtgcaacttgaagatctttaacaatcaagagttcgctgccctactggcacagagcgtaaatcaaggattcgaagctgtgtaccagttgacccgaatgtgtaccattcgaatgtcattcgtcaaagggtggggtgccgagtacagaagacaaaccgtcacaagtactccatgttggattgagctgcacttgaatggccccttgcaatggctggacaaggtcttgacacagatggggtctccctctgtgcgctgttcttccatgtcatag

SEQ ID NO: 318777 - DNA, 1314 bp, Artificial Sequence
  derived and/or modified sequence
atgagcagcatcctgcccttcaccccacctgtggtgaagaggctgctgggctggaagaagtctgctgggggcagcggcggggccggcggcggggagcagaatggccaggaggagaagtggtgtgagaaggctgtgaagagcctggtgaagaagctgaagaagacaggccgcctggatgagctggagaaggccatcaccacccagaactgcaacaccaagtgtgtgaccatccccaggagcctggatggccgcctgcaggtgagccacaggaagggcctgccccacgtgatctactgccgcctgtggcgctggccagacctgcacagccaccacgagctgaaggccatcgagaactgtgaatatgccttcaacctgaagaaggatgaggtgtgtgtgaacccctaccactaccagagggtggagacccctgtgctgccccctgtgctggtgcccaggcacacagagatcctgacagagctgccccccctggatgactacacccacagcatccctgagaacaccaacttccctgctggcatcgagccccagagcaactacatccctgagaccccacctcctggctacatcagtgaagatggagagaccagtgaccagcagctgaaccagagcatggacaccggcagccctgctgagctgagccccaccaccctgagccctgtgaaccacagcctggacctgcagcctgtgacctacagcgagcccgccttctggtgcagcatcgcctactatgagctgaaccagagggtgggggagaccttccacgccagccagcccagcctgactgtggatggcttcacagaccccagcaacagcgagcgcttctgcctgggcctgctgagcaatgtgaacagaaatgccaccgtggagatgaccaggaggcacatcggccggggcgtgcggctgtactacatcggcggggaggtgtttgctgagtgcctgagtgacagcgccatctttgtgcagagccccaactgcaaccagagatatggctggcacccagccaccgtgtgcaagatccccccaggctgcaacctgaagatcttcaacaaccaggagtttgctgccctgctggcccagagcgtgaaccagggctttgaggccgtgtaccagctgaccaggatgtgcaccatccgcatgagctttgtgaagggctggggcgctgagtaccgccggcagacagtgaccagcaccccctgctggattgagctgcacctgaatggccccctgcagtggctggacaaggtgctgacccagatgggcagccccagcgtgcgctgcagctccatgtcctag

SEQ ID NO: 318778 - DNA, 1314 bp, Artificial Sequence
  derived and/or modified sequence
atgagcagcatcctgcccttcaccccccccgtggtgaagcggctgctgggctggaagaaatccgccgggggctcagggggcgccggcggaggcgaacagaatggacaagaagagaagtggtgcgaaaaagcagtcaagtcactcgttaagaaacttaaaaagactggcaggctggacgaactggaaaaggcaattacaacacagaattgtaatactaagtgcgtgaccatcccccggtctctggacggtcgcctgcaggtgagccatcgcaaggggcttccccatgtgatctattgcagactttggaggtggccagaccttcattcccatcatgagctaaaggctattgaaaactgcgaatatgccttcaatttaaagaaggacgaggtatgcgtgaacccctaccattaccaacgggtcgaaacacctgtcttaccccctgtcttggtccctaggcacaccgagatactgacagagctgcctcccttagacgattacacacactctataccagaaaacacaaatttcccagcaggcattgagccacagtcaaattacattccagaaactcctcctcctggatacattagtgaagatggggagacctctgaccagcagttaaatcagagtatggacacaggaagccccgccgaactgagtcctaccacgctgtcaccagtgaaccattccctggatttgcaacccgttacatattctgaacccgccttttggtgctccatcgcctactacgagttaaaccagcgggtgggggagacattccatgcctcccagccctccttaacggtggacgggttcactgaccctagtaattcggaacgtttctgtctcggcctgttgtccaacgttaaccgcaacgccacggtagaaatgacccgtagacacattggacggggcgtgcgcttatattacattggtggcgaggtgttcgcagagtgtctctcagattccgctatttttgtgcaatcacctaactgtaaccaaaggtacggatggcatccagccaccgtgtgtaagatccccccaggctgcaatctcaagatttttaataatcaggagtttgccgccctccttgctcagtcagtcaatcagggatttgaagccgtgtatcagcttactaggatgtgtacaatccgcatgagcttcgtgaaggggtggggtgccgaataccggagacagaccgtaacctctaccccctgttggatcgaactgcatctgaatgggccgcttcagtggctggataaggtgctgacgcagatggggtctccatcagtgagatgtagtagtatgtcgtag

SEQ ID NO: 318779 - DNA, 1314 bp, Artificial Sequence
  derived and/or modified sequence
atgtcatccattctcccattcactccccctgtggttaagagactgctcggatggaaaaagtctgcaggagggtcagggggtgctggaggcggagaacagaatggccaggaggagaagtggtgtgaaaaggcggtaaaaagtctggtgaagaagctgaagaaaacgggtcgcttggacgagctcgagaaggccatcaccacccagaattgcaatactaaatgtgtgacgatccccaggtctctggacggtcgcctgcaggtatcacacaggaaagggttgccgcacgtcatctattgcaggctatggagatggcctgatctacacagtcaccacgagttgaaggcaatcgaaaactgtgagtacgccttcaatcttaagaaggatgaagtctgcgttaacccttatcattaccaaagagtggagacacccgtcctgccacccgtcctggtcccaagacacacagaaatcctcaccgagctcccgccactggacgactacacacatagtatccctgagaacaccaattttccagccggaatcgagcctcaatctaattacatccccgaaacacccccaccaggttatatctccgaagacggtgaaacatctgaccaacagcttaatcagtcaatggataccggctcacccgcagaactgagcccaaccactctgtcgcccgtaaaccattctctagatctgcagccggtgacttacagcgaaccagctttctggtgctctatagcctactatgagttgaaccaacgagtaggcgagacattccacgcctcacagccttccctcacagtcgacggatttactgatcccagcaatagcgaaagattctgcctgggccttctgtcaaatgtcaataggaacgctacggtcgagatgacccgcagacatatcggtaggggggtacggctgtactacatcggcggagaagtgttcgcagaatgtcttagcgatagtgcaatcttcgtgcagtcacccaactgtaatcagcggtatggttggcatcccgctacagtttgcaagattccacctgggtgtaacctgaagatcttcaacaatcaagagtttgccgctctgttggcccagagcgtgaatcaaggattcgaggctgtgtatcaacttacccggatgtgcacaattaggatgagttttgttaaggggtggggtgcggaataccgccgacagacagttactagtacaccttgctggatcgagctgcacctaaacgggcctttgcaatggctggataaggtgctgacacagatgggcagtccctccgtgaggtgcagttcgatgagctag

SEQ ID NO: 318780 - DNA, 10444 bp, Artificial Sequence
  derived and/or modified sequence
gccgggaggcggggcgggccgtaggcaaagggaggtggggaggcggtggccggcgactccccgcgccccgctcgccccccggcccttcccgcggtgctcggcctcgttcctttcctcctccgctccctccgtcttccatacccgccccgcgcggctttcggccggcgtgcctcgcgccctaacgggcggctggaggcgccaatcagcgggcggcagggtgccagccccggggctgcgccggcgaatcggcggggcccgcggcccagggtggcaggcgggtctacccgcgcggccgcggcggcggagaagcagctcgccagccagcagcccgccagccgccgggaggttcgatacaagaggctgttttcctagcgtggcttgctgcctttggtaagaacatgtcgtccatcttgccattcacgccgccagttgtgaagagactgctgggatggaagaagtcagctggtgggtctggaggagcaggcggaggagagcagaatgggcaggaagaaaagtggtgtgagaaagcagtgaaaagtctggtgaagaagctaaagaaaacaggacgattagatgagcttgagaaagccatcaccactcaaaactgtaatactaaatgtgttaccataccaaggtctcttgatggtcgtctccaggtatcccatcgaaaaggattgccacatgttatatattgccgattatggcgctggcctgatcttcacagtcatcatgaactcaaggcaattgaaaactgcgaatatgcttttaatcttaaaaaggatgaagtatgtgtaaacccttaccactatcagagagttgagacaccagttttgcctccagtattagtgccccgacacaccgagatcctaacagaacttccgcctctggatgactatactcactccattccagaaaacactaacttcccagcaggaattgagccacagagtaattatattccagaaacgccacctcctggatatatcagtgaagatggagaaacaagtgaccaacagttgaatcaaagtatggacacaggctctccagcagaactatctcctactactctttcccctgttaatcatagcttggatttacagccagttacttactcagaacctgcattttggtgttcgatagcatattatgaattaaatcagagggttggagaaaccttccatgcatcacagccctcactcactgtagatggctttacagacccatcaaattcagagaggttctgcttaggtttactctccaatgttaaccgaaatgccacggtagaaatgacaagaaggcatataggaagaggagtgcgcttatactacataggtggggaagtttttgctgagtgcctaagtgatagtgcaatctttgtgcagagccccaattgtaatcagagatatggctggcaccctgcaacagtgtgtaaaattccaccaggctgtaatctgaagatcttcaacaaccaggaatttgctgctcttctggctcagtctgttaatcagggttttgaagccgtctatcagctaactagaatgtgcaccataagaatgagttttgtgaaagggtggggagcagaataccgaaggcagacggtaacaagtactccttgctggattgaacttcatctgaatggacctctacagtggttggacaaagtattaactcagatgggatccccttcagtgcgttgctcaagcatgtcataaagcttcaccaatcaagtcccatgaaaagacttaatgtaacaactcttctgtcatagcattgtgtgtggtccctatggactgtttactatccaaaagttcaagagagaaaacagcacttgaggtctcatcaattaaagcaccttgtggaatctgtttcctatatttgaatattagatgggaaaattagtgtctagaaatactctcccattaaagaggaagagaagattttaaagacttaatgatgtcttattgggcataaaactgagtgtcccaaaggtttattaataacagtagtagttatgtgtacaggtaatgtatcatgatccagtatcacagtattgtgctgtttatatacatttttagtttgcatagatgaggtgtgtgtgtgcgctgcttcttgatctaggcaaacctttataaagttgcagtacctaatctgttattcccacttctctgttatttttgtgtgtcttttttaatatataatatatatcaagattttcaaattatttagaagcagattttcctgtagaaaaactaatttttctgccttttaccaaaaataaactcttgggggaagaaaagtggattaacttttgaaatccttgaccttaatgtgttcagtggggcttaaacagtcattctttttgtggttttttgtttttttttgtttttttttttaactgctaaatcttattataaggaaaccatactgaaaacctttccaagcctcttttttccattcccatttttgtcctcataatcaaaacagcataacatgacatcatcaccagtaatagttgcattgatactgctggcaccagttaattctgggatacagtaagaattcatatggagaaagtccctttgtcttatgcccaaatttcaacaggaataattggcttgtataatctagcagtctgttgatttatccttccacctcataaaaaatgcataggtggcagtataattattttcagggatatgctagaattacttccacatatttatccctttttaaaaaagctaatctataaataccgtttttccaaaggtattttacaatatttcaacagcagaccttctgctcttcgagtagtttgatttggtttagtaaccagattgcattatgaaatgggccttttgtaaatgtaattgtttctgcaaaatacctagaaaagtgatgctgaggtaggatcagcagatatgggccatctgtttttaaagtatgttgtattcagtttataaattgattgttattctacacataattatgaattcagaattttaaaaattgggggaaaagccatttatttagcaagttttttagcttataagttacctgcagtctgagctgttcttaactgatcctggttttgtgattgacaatatttcatgctctgtagtgagaggagatttccgaaactctgttgctagttcattctgcagcaaataattattatgtctgatgttgactcattgcagtttaaacatttcttcttgtttgcatcttagtagaaatggaaaataaccactcctggtcgtcttttcataaattttcatatttttgaagctgtctttggtacttgttctttgaaatcatatccacctgtctctataggtatcattttcaatactttcaacatttggtggttttctattgggtactccccattttcctatatttgtgtgtatatgtatgtgttcatgtaaatttggtatagtaattttttattcattcaacaaatatttattgttcacctgtttgtaccaggaacttttcttagtctttgggtaaaggtgaacaagacaactacagttcctgcctttgctgagacagcagttacactaacccttaattatcttacttgtctatgaaggagataaacagggtactgtactggagaataacagatgggatgcttcaggtaggacatcaaggaaagcctctaaggaaaggatgcatgagctaacacctgacattaaagaagcaagccaagtgaggagccaggggagataagcattcctggcaaagagaatagcatcaaatgcaaaaaggttcacactaaaggaaactcctgattaggtattaatgctttatacagaaacctctatacaaatccaaacttgaagatcagaatggttctacagttcataacattttgaaggtggccttattttgtgatagtctgcttcatgtgattctcactaacatatctccttcctcaacctttgctgtaaaaatttcatttgcaccacatcagtactacttaatttaacaagcttttgttgtgtaagctctcactgttttagtgccctgctgcttgcttccagactttgtgctgtccagtaattatgtcttccactacccatcttgtgagcagagtaaatgtcctaggtaataccactatcaggcctgtaggagatactcagtggagcctctgcccttctttttcttacttgagaacttgtaatggtgttagggaacagttgtaggggcagaaaacaactctgaaagtggtagaaggtcctgatcttggtggttactcttgcattactgtgttaggtcaagcagtgcctactatgctgtttcagtagtggagcgcatctctacagttctgatgcgatttttctgtacagtatgaaattgggactcaactctttgaaaacacctattgagcagttatacctgttgagcagtttacttcctggttgtaattacatttgtgtgaatgtgtttgatgctttttaacgagatgatgttttttgtattttatctactgtggcctgattttttttttgttttctgcccctccccccatttataggtgtggttttcatttttctaagtgatagaatcccctctttgttgaatttttgtctttatttaaattagcaacattacttaggatttattcttcacaatactgttaattttctaggaatgatgacctgagaaccgaatggccatgctttctatcacatttctaagatgagtaatattttttccagtaggttccacagagacaccttgggggctggcttaggggaggctgttggagttctcactgacttagtggcatatttattctgtactgaagaactgcatggggtttcttttggaaagagtttcattgctttaaaaagaagctcagaaagtctttataaccactggtcaacgattagaaaaatataactggatttaggcctaccttctggaataccgctgattgtgctctttttatcctactttaaagaagctttcatgattagatttgagctatatcagttataccgattataccttataatacacattcagttagtaaacatttattgatgcctgttgtttgcccagccactgtgatggatattgaataataaaaagatgactaggacggggccctgacccttgagctgtgcttggtcttgtagaggttgtgttttttttcctcaggacctgtcactttggcagaaggaaatctgcctaatttttcttgaaagctaaattttctttgtaagtttttacaaattgtttaatacctagttgtattttttaccttaagccacattgagttttgcttgatttgtctgtcttttaaacactgtcaaatgctttcccttttgttaaaattattttaatttcactttttttgtgcccttgtcaatttaagactaagactttgaaggtaaaacaaacaaacaaacatcagtcttagtctcttgctagttgaaatcaaataaaagaaaatatatacccagttggtttctctacctcttaaaagcttcccatatatacctttaagatccttctcttttttctttaactactaaataggttcagcatttattcagtgttagataccctcttcgtctgagggtggcgtaggtttatgttgggatataaagtaacacaagacaatcttcactgtacataaaatatgtcttcatgtacagtctttactttaaaagctgaacattccaatttgcgccttccctcccaagcccctgcccaccaagtatctctttagatatctagtctgtggacatgaacaatgaatacttttttcttactctgatcgaaggcattgatacttagacatatcaaacatttcttcctttcatatgctttactttgctaaatctattatattcattgcctgaattttattcttcctttctacctgacaacacacatccaggtggtacttgctggttatcctctttcttgttagccttgttttttgttttttttttttttttttgagagggagtctcgctctgttgcccaacctggagtgcagtggtgcgatcttggttcactgcaagctccgcctcccgggttcacgccatgcttctgcctcagcctcccaagtagctgggactacaggcgcccaccaccacactcggctaattttttgtatttttagtagagacggggtttcaccgtgttggccaggatggtctcgatctcctgacctcgtgatctgtccacctcggcttcccaaagtgctgggattacaggcatgagccaccgcgcccagcctagccatatttttatctgcatatatcagaatgtttctctcctttgaacttattaacaaaaaaggaacatgcttttcatacctagagtcctaatttcttcatcatgaaggttgctattcaaattgatcaatcattttaattttacaaatggctcaaaaattctgttcagtaaatgtctttgtgactggcaaatggcataaattatgtttaagattatgaacttttctgacagttgcagccaatgttttccctacgataccagatttccatcttggggcatattggattgttgtatttaagacagtcagaataatgatagtgtgtggtctccagaggtagtcagaatcctgctattgagttctttttatatcttccttttcaattttttattaccattttgtttgtttagactacactttgtagggattgaggggcaaattatctcttggagtggaattcctgtgttttgagccttacaaccaggaaatatgagctatactagatagcctcatgatagcatttacgataagaacttatctcgtgtgttcatgtaattttttgagtaggaactgttttatcttgaatattgtagctaactatatatagcagaactgcctcagtctttttaagaaggaaataaataatatatgtgtatgaatttatatatacatatacactcatagacaaacttaacagttggggtcattctaacagttaaaacaattgttccattgtttaaatctcagatcctggtaaaatgttcttaatttgtctgtgtacattttcctttcatggacagaccattggagtacattaattttcttaatctgccatttggcagttcatttaatataccattttttggcaacttggtaactaagaatcacagccaaaatttgttaacatcaaagaaagctctgccatataccccgttactaaattattatacatccagcagattctgggatgtactaacttagggttaactttgttgttgttgataatactagattgctccctctttaattcttcttctggtgcaaggttgctgcttaagttaccctgggaaatactactacaaggtcaaattttctagtatcttacagcctgattgaaggtgattcagatctttgctcaatataaatggattttccaagattctctgggccatccttgacccacaggtgatctcgctggagtatattaacttaacttcagtgccagttggtttggtgccatgagatccataatgaatccagaacttcaccattgcttagatataagagtcccttggaagaataatgccactgatgatgggggtcagaaggtgtattaactcaacatagagggcttttagatttttcttcaaaaaaatttcgagaaaagtattcttttaccctccaaacagttaacagctcttagtttctccaaatatgctctttgatttacttatttttaattaaagatggtaatttattgaacaatgaaatccgtaatatattgatttaaggacaaaagtgaagttttagaattataaaagtacttaaatattatatattttccatttcataattgttttcctttctctgtggctttaaagtttttgactattttacaatgttaatcactaggtaacttgccatatttctggttctatattaagttctatcctttataatgctgttattataaagctggtttttagcatttgtctgtagcaatagaaattttactaagtctctgttctcccagtaagttttttcttttctcagtaagtccctaagaaaacatttgtttgccactcttactattcccaatcttggattgttcgagctgaaaaaaaatttgatgagaaacaggaggatccttttctggtgaatataggttcctgctttaagaatgtggaaatccattgctttatataactaatatacacacagattaattaaaattgtgagaaataattcacacatgacaagtaggtaacatgcatgagttttgaatttttttaaaaacccaactgtttgacaaaatatagaacccaaattggtactttcttagaccagtgtaacctcacacctcagttttgcttttccaaccctgacttgaaaggcatatttgtatctttttattagtgatagtgaagctgtgacactaaccttttatacaaaagagtaaagaaagaaaaactacagcgattaagatgagaacagttctgcagttgttgaactagatcacagcattgtaggcagaataaaaaatgttcatatctgagaatattcctttcgccatcttttcccaaggccagacctcctggtggagcacagttaaaagtaacattctgggcctttgtaatcggagggctgtgtctccagctggcagcctttgttttaatatataatgcaggactgtggaaaacagttggcatagaatattttcacctaaaaaagaaagaaaagacatacaaaactggattaattgcaaaaagagaatacagtaaaataccatataactggacaaagctagaagaacctttagaagatttgtctgaaaacagatttcaagagtgagcttttatacactgctcactaatttgcttgattactaccaactcttcttaaagttaacacgtttaaggtatttctggacttcctagccttttagcaagcttagaggaactagccattagctagtgatgtaaaaatattttggggactgatgcccttaaaggttatgcccttgaaagttcttaccttttctctagtgatattaaggaacgagtgggtagtgttctcagggtgaccagctgccctaaagtgcctgggattgagggtttccctggatgcgggactttccctggatacaaaacttttagcagagttttgtatatatgtggatttttctgataagtagcacatcagaggccttaaccactgcccaaaagcgattctccattgagagtacatatcttgaacttaagaaattcatttgctctgatttttaatcttgtaaagtttttgctaaactcaaaacaagtcccaggcacaccagaaggagctgaccaccttaggtgttcttgtgatttatccttacttccctatgttgtcatagttgcttctaaactcagctgcactatggctgtcaacatttctgatacttattgggatatgtgccatccagtcatttagtactttgaatggaacatgagatttataacacaggtaatagctgaaggtaccagtatggtggtgagactcacacttagtgatccagctaaggtaactgatgttataatggaacagagaagaggccaactagatagctaagttcttctgaacctatgtgtatatgtaagtacaaatcatgcgtccttatggggttaaacttaatctgaaatttacatttttcatagtaaaaggaaaccaattgttgcagatttcttttcttgtgaggaaatacatggcctttgatgctctggcgtctactgcatttcccagtctgttctgctcgagaagccagaatgtgttgttaacatttttccgtgaatgttgtgttaaaatgattaaatgcatcagccaatggcaagtgaaggaattgggtgtcctgatgcagactgagcagtttctctcaattgtagcctcatactcataaggtgcttaccagctagaacattgagcacgtgaggtgagattttttttctctgatggcattaactttgtaatgcaatatgatggatgcagaccctgttcttgtttccctctggaagtccttagtggctgcatccttggtgcactgtgatggagatattaaatgtgttctttgtgagctttcgttctatgattgtcaaaagtacgatgtggttccttttttatttttattaaacaatgagctgaggctttattacagctggttttcaagttaaaattgttgaatactgatgtctttctcccacctacaccaaatattttagtctatttaaagtacaaaaaaagttctgcttaagaaaacattgcttacatgtcctgtgatttctggtcaatttttatatatatttgtgtgcatcatctgtatgtgctttcactttttaccttgtttgctcttacctgtgttaacagccctgtcaccgttgaaaggtggacagttttcctagcattaaaagaaagccatttgagttgtttaccatgtta

SEQ ID NO: 318781 - DNA, 2179 bp, Artificial Sequence
  derived and/or modified sequence
attgtggctcagaacgctgacggggaggaatgaagggccctcaggccgataagggggaggaatggcggcgtcggaatactgacgaggagaaatggggggatttaggctgaggacgggaaggaatgcagctctgaactctgacaggctactgctgcttcctgtggcctccatggctgaggactggctggactgcccggccctgggccctggctggaagcgccgcgaagtctttcgcaagtcaggggccacctgtggacgctcagacacctattaccagagccccacaggagacaggatccgaagcaaagttgagctgactcgatacctgggccctgcgtgtgatctcaccctcttcgacttcaaacaaggcatcttgtgctatccagcccccaaggcccatcccgtggcggttgccagcaagaagcgaaagaagccttcaaggccagccaagactcggaaacgtcaggttggaccccagagtggtgaggtcaggaaggaggccccgagggatgagaccaaggctgacactgacacagccccagcttcattccctgctcctgggtgctgtgagaactgtggaatcagcttctcaggggatggcacccaaaggcagcggctcaaaacgttgtgcaaagactgtcgagcacagagaattgccttcaaccgggaacagagaatgtttaagcgtgtgggctgtggggagtgtgcagcctgccaggtaacagaagactgtggggcctgctccacctgcctcctgcagctgccccatgatgtggcatcggggctgttctgcaagtgtgaacggagacgctgcctccggattgtggaaaggagccgagggtgtggagtatgccggggctgtcagacccaagaggattgtggccattgccccatctgccttcgccctccccgccctggtctcaggcgccagtggaaatgtgtccagcgacgttgcctacggcaccttgctcaccgcctgcgtcgccgtcatcagagatgtcagcgacgcactcccctggctgtggctcccccaactggtaaacatgcccgccgcaagggaggctgtgactccaagatggctgccaggcggcgccccggagcccagccactgcctccaccacccccatcacagtccccagagcccacagagccgcaccccagagccctggccccctcgccacctgccgagttcatctattactgtgtagacgaggacgagctacagccctacacgaaccgccggcagaaccgcaagtgcggggcctgtgcagcctgcctacggcggatggactgtggccgctgcgacttctgctgcgacaagcccaaattcgggggcagcaaccagaagcgccagaagtgtcgttggcgccaatgcctgcagtttgccatgaagcggctgctgcccagtgtctggtcagagtctgaggatggggcaggatcgcccccaccttaccgtcgtcgaaagaggcccagctctgcccgacggcaccatcttggccctaccttgaagcccaccttggctacacgcacagcccaaccagaccatacccaggctccaacgaagcaggaagcaggtggtggctttgtgctgcccccgcctggcactgaccttgtgtttttacgggaaggcgcaagcagtcctgtgcaggtgccgggccctgttgcagcttccacagaagccctgttgcaggaggcccagtgctctggcctgagttgggttgtggccttaccccaggtgaagcaagagaaggcggatacccaggacgagtggacaccaggcacagctgtcctgacttctcccgtattggtgcctggctgccctagcaaggcagtagacccaggcctgccttctgtgaagcaagagccacctgacccagaggaggacaaggaggagaacaaggatgattctgcctccaaattggccccagaggaagaggcaggaggggctggcacacccgtgatcacggagattttcagcctgggtggaacccgcttccgagatacagcagtctggttgccaaggtccaaagaccttaaaaaacctggagctagaaagcagtagactggaggcttctacagactgtaggattcaagtctgcagggcaggcactcgggaagggaagatggatgtaaagtgtgggagaccgaggacacagtggagcccacgagcacgagctgg

SEQ ID NO: 318782 - protein, 656 aa, Artificial Sequence
  derived and/or modified sequence
MGGFRLRTGRNAALNSDRLLLLPVASMAEDWLDCPALGPGWKRREVFRKSGATCGRSDTYYQSPTGDRIRSKVELTRYLGPACDLTLFDFKQGILCYPAPKAHPVAVASKKRKKPSRPAKTRKRQVGPQSGEVRKEAPRDETKADTDTAPASFPAPGCCENCGISFSGDGTQRQRLKTLCKDCRAQRIAFNREQRMFKRVGCGECAACQVTEDCGACSTCLLQLPHDVASGLFCKCERRRCLRIVERSRGCGVCRGCQTQEDCGHCPICLRPPRPGLRRQWKCVQRRCLRHLAHRLRRRHQRCQRRTPLAVAPPTGKHARRKGGCDSKMAARRRPGAQPLPPPPPSQSPEPTEPHPRALAPSPPAEFIYYCVDEDELQPYTNRRQNRKCGACAACLRRMDCGRCDFCCDKPKFGGSNQKRQKCRWRQCLQFAMKRLLPSVWSESEDGAGSPPPYRRRKRPSSARRHHLGPTLKPTLATRTAQPDHTQAPTKQEAGGGFVLPPPGTDLVFLREGASSPVQVPGPVAASTEALLQEAQCSGLSWVVALPQVKQEKADTQDEWTPGTAVLTSPVLVPGCPSKAVDPGLPSVKQEPPDPEEDKEENKDDSASKLAPEEEAGGAGTPVITEIFSLGGTRFRDTAVWLPRSKDLKKPGARKQ

SEQ ID NO: 318783 - protein, 630 aa, Artificial Sequence
  derived and/or modified sequence
MAEDWLDCPALGPGWKRREVFRKSGATCGRSDTYYQSPTGDRIRSKVELTRYLGPACDLTLFDFKQGILCYPAPKAHPVAVASKKRKKPSRPAKTRKRQVGPQSGEVRKEAPRDETKADTDTAPASFPAPGCCENCGISFSGDGTQRQRLKTLCKDCRAQRIAFNREQRMFKRVGCGECAACQVTEDCGACSTCLLQLPHDVASGLFCKCERRRCLRIVERSRGCGVCRGCQTQEDCGHCPICLRPPRPGLRRQWKCVQRRCLRHLAHRLRRRHQRCQRRTPLAVAPPTGKHARRKGGCDSKMAARRRPGAQPLPPPPPSQSPEPTEPHPRALAPSPPAEFIYYCVDEDELQPYTNRRQNRKCGACAACLRRMDCGRCDFCCDKPKFGGSNQKRQKCRWRQCLQFAMKRLLPSVWSESEDGAGSPPPYRRRKRPSSARRHHLGPTLKPTLATRTAQPDHTQAPTKQEAGGGFVLPPPGTDLVFLREGASSPVQVPGPVAASTEALLQEAQCSGLSWVVALPQVKQEKADTQDEWTPGTAVLTSPVLVPGCPSKAVDPGLPSVKQEPPDPEEDKEENKDDSASKLAPEEEAGGAGTPVITEIFSLGGTRFRDTAVWLPRSKDLKKPGARKQ

SEQ ID NO: 318784 - DNA, 1971 bp, Artificial Sequence
  derived and/or modified sequence
atgggcgggttcaggctaagaactggcagaaatgccgcgttaaacagcgatcggctgctgctgctacctgtggcatcaatggctgaagattggctcgactgtcctgccctgggtccaggctggaagcgtcgtgaggtctttagaaagtccggcgccacttgcggaagatccgatacatactaccaatcacccacaggtgacaggatccgcagcaaggtggagttaacaagatatctcggccccgcgtgcgatctcactctgtttgactttaagcaaggcattctgtgctaccctgcgccaaaagcacaccccgtagccgttgcttcgaaaaagcgtaagaagccttctcgtccagccaagacaaggaaaagacaggtgggaccccagtctggcgaagttcgcaaggaggcaccccgggatgagactaaggctgataccgacactgctccagcctcattcccagcccccggatgttgcgagaattgtggtatttcttttagcggagatggcacgcaaaggcagcggctgaaaaccctgtgcaaagattgtcgcgcccagagaatcgcattcaacagagaacagcggatgtttaagagggtgggctgtggagagtgtgcagcctgccaagtcacggaagattgtggtgcttgctctacctgcctacttcaactgcctcatgacgtcgcgtccggtttgttctgtaaatgtgagagacgacggtgtctccgcatcgtggagaggtccagggggtgcggggtctgcaggggatgccaaacgcaggaagactgtggacactgccccatctgccttaggccgcccaggcccggacttcgtcgacagtggaaatgtgtgcaaagaaggtgcctgcgacacctggcccacaggttacggcgccggcaccagaggtgtcagcgcagaactcccctggcagttgctccgcccaccggcaagcacgccaggcgaaaaggaggttgtgatagcaagatggctgcccgtcgacggccgggagcacaaccactgccacctccccccccctcccaaagccccgaaccaactgagcctcatccccgtgcccttgcaccttcaccaccggctgaatttatatactattgcgtggatgaggacgagttacagccctacactaatcggagacagaatcgtaagtgcggcgcttgtgctgcatgtctgcgacgaatggattgtggtagatgcgacttctgttgtgacaaacctaaatttggcggaagcaaccagaagcgtcaaaagtgtaggtggcgtcagtgcttgcaatttgcaatgaagagactgctgcctagcgtttggtccgaaagcgaagacggggccggaagcccaccaccttaccggcgccgcaagcgcccttcctcagctcgtagacaccacttgggtccaacgctgaagccaacactggcaactagaactgcccagccagatcacactcaagctccgactaagcaggaggcaggtggaggcttcgtgctgccaccaccgggcacagacctggtgtttttacgggagggggcatcatccccagtccaagtcccggggcctgtagcagctagtactgaggccttgctccaggaggcccagtgttctggactgagctgggtcgtcgccctccctcaggtgaaacaggagaaggccgatacccaggatgaatggacccctggaaccgcagtgcttacgtcccccgtgctcgtgccaggatgcccctctaaggcggtggatccaggtcttccaagcgtaaagcaggaaccccccgatccggaggaggacaaagaggagaataaggatgactctgcttccaagctcgcacctgaagaggaagccgggggggccggaactcccgtcatcactgaaatcttttctctaggtggcacacgcttcagggacacagccgtctggcttccgagatcaaaggacctgaagaagccgggcgctagaaagcaatag

SEQ ID NO: 318785 - DNA, 1893 bp, Artificial Sequence
  derived and/or modified sequence
atggccgaagattggctggactgcccagcccttgggcctggatggaagcgccgcgaagtgtttcggaagagcggagccacctgtgggaggagcgacacatattaccagtccccgactggggacaggatacgcagcaaagtcgagctgacccgctatctgggaccggcgtgtgatctgactctcttcgatttcaagcaggggattctgtgctaccctgcccccaaagcccaccctgtggcagtggccagcaagaagcgcaagaagcctagtcgccccgccaagacaagaaaacgacaggtgggcccgcagtccggggaggtccgaaaggaggcacccagagacgagaccaaagcagacacggacaccgccccagcttccttcccagcaccgggatgttgcgaaaattgtggaatctctttctccggtgacgggactcagaggcagcgcctcaaaacgctctgcaaggattgtagggcccagaggattgcattcaatcgcgagcagcgtatgttcaagcgggtagggtgcggagagtgcgccgcatgccaggtgaccgaggattgcggcgcgtgcagcacctgcttgctgcaactccctcacgacgtggcgtcaggactgttttgcaaatgtgagcggcgaaggtgcctgcggatcgtggagaggtccagaggctgtggcgtctgtcgtggttgtcagacccaggaggactgtggccactgccccatttgcttacgcccacctagaccaggcctgaggagacaatggaagtgtgttcaaaggagatgtctacgacacctggcgcatcgcctgcggagacggcaccagcgatgccagcgaagaactcctctggcggtcgcgcctccaaccggaaagcatgctcgacggaaaggaggttgcgactctaagatggccgcccggcggcgacctggtgcccagccactgccccctccgcctccatcacagtcccccgaacctactgagccacacccgagggcgcttgcaccgagtccgcccgccgagttcatctactattgcgtggatgaagatgaactccaaccatacaccaatagaaggcaaaatagaaaatgcggcgcctgtgcagcttgtttgcgtagaatggactgcggcaggtgtgacttctgttgcgacaaacccaagtttggagggtctaatcagaagcgacagaaatgcaggtggagacagtgcttgcaattcgccatgaaaagattgctgccctcagtatggtctgaaagcgaagatggcgcaggctccccacccccatatcgaagaaggaagcggcctagttcggcaaggcgacatcacttgggtcctaccctaaagcctactcttgcaactcggaccgctcagccagatcatacacaagcccccacaaaacaagaggctggggggggcttcgtcttgccacctcccgggaccgatttggtgttcctcagagagggcgccagttctcctgttcaggttccagggccagtggcggcctctaccgaggccctcttgcaagaggcccagtgttctggcttatcatgggttgtcgcactgccacaggtcaaacaggagaaggccgatacacaagacgagtggactcctggcaccgctgtactgacttctcctgtcctcgtgccgggttgtcctagcaaggcggttgaccctggtcttccatctgtgaagcaggaacctcctgatccggaggaggacaaggaagagaataaggacgattccgcctctaagcttgcccctgaagaggaagcagggggtgccgggacaccagtgatcacagagatcttcagtctagggggcactcggtttagagacacagcagtgtggctgcctcgctccaaagacctgaaaaagcccggagctcggaagcaatag

SEQ ID NO: 318786 - DNA, 1971 bp, Artificial Sequence
  derived and/or modified sequence
atgggcggcttccggctgaggactggaagaaatgctgccctgaacagcgaccggctgctgctgctgcctgtggcctccatggccgaggactggctggactgcccagccctgggccctggctggaagagaagagaggtgttcaggaagagcggggccacctgtggccgcagtgacacctactaccagagccccactggagaccgcatccgcagcaaggtggagctgacccgctacctgggccctgcctgtgacctgaccctgtttgacttcaagcagggcatcctgtgctacccagcccccaaggcccaccctgtggccgtggccagcaagaagaggaagaagcccagcaggcctgccaagaccaggaagaggcaggtgggcccccagagcggggaggtgaggaaggaggcccccagagatgagaccaaggctgacacagacacagccccagccagcttccctgcccctggctgctgtgagaactgtggcatctccttctctggagatggcacccagaggcagaggctgaagaccctgtgcaaggactgccgggcccagagaattgccttcaaccgggagcagaggatgttcaagagggtgggctgtggggagtgtgccgcctgccaggtgacagaggactgtggggcctgcagcacctgcctgctgcagctgccccatgatgtggccagcggcctcttctgcaagtgtgagcggcggcgctgcctgcgcatcgtggagaggagccggggctgcggcgtgtgccggggctgccagacccaggaggactgtggccactgccccatctgcctgcggccccccaggcctggcctgcggcggcagtggaagtgtgtgcagaggcgctgcctgcggcacctggcccaccggctgcggcggcggcaccagcgctgccagaggaggacccccctggccgtggcccccccaacaggcaagcacgcccggaggaagggcggctgtgacagcaagatggccgccaggagaagacctggggcccagcccctgcccccacctccacccagccagagccctgagcccacagagccccacccccgggccctggcccccagccccccagctgagttcatctactactgtgtggatgaagatgagctgcagccctacaccaacagacggcagaacagaaaatgtggggcctgtgccgcctgcctgcggaggatggactgtggccgctgtgacttctgctgtgacaagcccaagtttggaggcagcaaccagaagaggcagaagtgccgctggaggcagtgcctgcagtttgccatgaagaggctgctgcccagcgtgtggagcgagagtgaagatggagctggcagccccccaccctacagaagaaggaagaggcccagcagcgcccggcggcaccacctgggccccaccctgaagcccaccctggccaccaggacagcccagcctgaccacacccaggcccccaccaagcaggaggccggcggcggctttgtgctgcccccacctggaacagacctggtgttcctgcgggagggcgccagcagccctgtgcaggtgcccggccctgtggccgccagcacagaggccctgctgcaggaggcccagtgcagcggcctgtcctgggtggtggccctgccccaggtgaagcaggagaaggctgacacccaggatgagtggaccccaggcacagctgtgctgaccagccctgtgctggtgcccggctgccccagcaaggctgtggaccccggcctgcccagcgtgaagcaggagcccccagaccctgaggaggacaaggaggagaacaaggatgacagcgccagcaagctggcccctgaggaggaggccggcggggccggcacccctgtgatcacagagatcttcagcctgggcggcacccgcttccgggacacagctgtgtggctgcccaggagcaaggacctgaagaagccaggggccaggaagcagtag

SEQ ID NO: 318787 - DNA, 1893 bp, Artificial Sequence
  derived and/or modified sequence
atggccgaggactggctggactgcccagccctgggccctggctggaagagaagagaggtgttcaggaagagcggggccacctgtggccgcagtgacacctactaccagagccccactggagaccgcatccgcagcaaggtggagctgacccgctacctgggccctgcctgtgacctgaccctgtttgacttcaagcagggcatcctgtgctacccagcccccaaggcccaccctgtggccgtggccagcaagaagaggaagaagcccagcaggcctgccaagaccaggaagaggcaggtgggcccccagagcggggaggtgaggaaggaggcccccagagatgagaccaaggctgacacagacacagccccagccagcttccctgcccctggctgctgtgagaactgtggcatctccttctctggagatggcacccagaggcagaggctgaagaccctgtgcaaggactgccgggcccagagaattgccttcaaccgggagcagaggatgttcaagagggtgggctgtggggagtgtgccgcctgccaggtgacagaggactgtggggcctgcagcacctgcctgctgcagctgccccatgatgtggccagcggcctcttctgcaagtgtgagcggcggcgctgcctgcgcatcgtggagaggagccggggctgcggcgtgtgccggggctgccagacccaggaggactgtggccactgccccatctgcctgcggccccccaggcctggcctgcggcggcagtggaagtgtgtgcagaggcgctgcctgcggcacctggcccaccggctgcggcggcggcaccagcgctgccagaggaggacccccctggccgtggcccccccaacaggcaagcacgcccggaggaagggcggctgtgacagcaagatggccgccaggagaagacctggggcccagcccctgcccccacctccacccagccagagccctgagcccacagagccccacccccgggccctggcccccagccccccagctgagttcatctactactgtgtggatgaagatgagctgcagccctacaccaacagacggcagaacagaaaatgtggggcctgtgccgcctgcctgcggaggatggactgtggccgctgtgacttctgctgtgacaagcccaagtttggaggcagcaaccagaagaggcagaagtgccgctggaggcagtgcctgcagtttgccatgaagaggctgctgcccagcgtgtggagcgagagtgaagatggagctggcagccccccaccctacagaagaaggaagaggcccagcagcgcccggcggcaccacctgggccccaccctgaagcccaccctggccaccaggacagcccagcctgaccacacccaggcccccaccaagcaggaggccggcggcggctttgtgctgcccccacctggaacagacctggtgttcctgcgggagggcgccagcagccctgtgcaggtgcccggccctgtggccgccagcacagaggccctgctgcaggaggcccagtgcagcggcctgtcctgggtggtggccctgccccaggtgaagcaggagaaggctgacacccaggatgagtggaccccaggcacagctgtgctgaccagccctgtgctggtgcccggctgccccagcaaggctgtggaccccggcctgcccagcgtgaagcaggagcccccagaccctgaggaggacaaggaggagaacaaggatgacagcgccagcaagctggcccctgaggaggaggccggcggggccggcacccctgtgatcacagagatcttcagcctgggcggcacccgcttccgggacacagctgtgtggctgcccaggagcaaggacctgaagaagccaggggccaggaagcagtag

SEQ ID NO: 318788 - DNA, 2473 bp, Artificial Sequence
  derived and/or modified sequence
aggaggaggaaggggaggagggcgaggcgggaggtgcaggagggaccctcgccatgggtccacgggcctagagtggcggaagataccggcctggtgccaaactggctactgctgcttcctgtggcctccatggctgaggactggctggactgcccggccctgggccctggctggaagcgccgcgaagtctttcgcaagtcaggggccacctgtggacgctcagacacctattaccagagccccacaggagacaggatccgaagcaaagttgagctgactcgatacctgggccctgcgtgtgatctcaccctcttcgacttcaaacaaggcatcttgtgctatccagcccccaaggcccatcccgtggcggttgccagcaagaagcgaaagaagccttcaaggccagccaagactcggaaacgtcaggttggaccccagagtggtgaggtcaggaaggaggccccgagggatgagaccaaggctgacactgacacagccccagcttcattccctgctcctgggtgctgtgagaactgtggaatcagcttctcaggggatggcacccaaaggcagcggctcaaaacgttgtgcaaagactgtcgagcacagagaattgccttcaaccgggaacagagaatgtttaagcgtgtgggctgtggggagtgtgcagcctgccaggtaacagaagactgtggggcctgctccacctgcctcctgcagctgccccatgatgtggcatcggggctgttctgcaagtgtgaacggagacgctgcctccggattgtggaaaggagccgagggtgtggagtatgccggggctgtcagacccaagaggattgtggccattgccccatctgccttcgccctccccgccctggtctcaggcgccagtggaaatgtgtccagcgacgttgcctacggcaccttgctcaccgcctgcgtcgccgtcatcagagatgtcagcgacgcactcccctggctgtggctcccccaactggtaaacatgcccgccgcaagggaggctgtgactccaagatggctgccaggcggcgccccggagcccagccactgcctccaccacccccatcacagtccccagagcccacagagccgcaccccagagccctggccccctcgccacctgccgagttcatctattactgtgtagacgaggacgagctacagccctacacgaaccgccggcagaaccgcaagtgcggggcctgtgcagcctgcctacggcggatggactgtggccgctgcgacttctgctgcgacaagcccaaattcgggggcagcaaccagaagcgccagaagtgtcgttggcgccaatgcctgcagtttgccatgaagcggctgctgcccagtgtctggtcagagtctgaggatggggcaggatcgcccccaccttaccgtcgtcgaaagaggcccagctctgcccgacggcaccatcttggccctaccttgaagcccaccttggctacacgcacagcccaaccagaccatacccaggctccaacgaagcaggaagcaggtggtggctttgtgctgcccccgcctggcactgaccttgtgtttttacgggaaggcgcaagcagtcctgtgcaggtgccgggccctgttgcagcttccacagaagccctgttgcaggaggcccagtgctctggcctgagttgggttgtggccttaccccaggtgaagcaagagaaggcggatacccaggacgagtggacaccaggcacagctgtcctgacttctcccgtattggtgcctggctgccctagcaaggcagtagacccaggcctgccttctgtgaagcaagagccacctgacccagaggaggacaaggaggagaacaaggatgattctgcctccaaattggccccagaggaagaggcaggaggggctggcacacccgtgatcacggagattttcagcctgggtggaacccgcttccgagatacagcagtctggttgccaaggtccaaagaccttaaaaaacctggagctagaaagcagtagactggaggcttctacagactgtaggattcaaggtgatatttgcagactggctttatgagagacaacactgatctactaggggctggaccctagattggttgccagggcttgtgtgtgaatcaaccctaggaggaaaaacctactaccaaaccagaagagcaggcctaagagtactttgagcttctagaagaagtaagcgggaaaggaagagaaagagtagaaagttggtgcatcttctcctccccaagagcctgagtataagaagttggattttaagggtgggggagctgggttggagaaaggtaatataattaaagccaccacaaaacaacctaaacaagccatgttcatgagtaattgtaagtggcttctggatgagacctggcagtgtctctacatacttcctcagggagatagcaattgaaaatgtaattgaataaataaggaaagg

SEQ ID NO: 318789 - DNA, 1971 bp, Artificial Sequence
  derived and/or modified sequence
atgggcggcttccggctgcggaccggccggaacgccgccctgaactccgatcgcctgttactgcttcctgtggcatccatggcagaagattggctcgactgtcctgcactaggtcctgggtggaagcggagagaggtgtttcgcaaatccggggccacttgcgggcgcagcgatacgtattaccaatcccctactggcgaccggattagatcgaaagtagagctgaccagatatctcggaccagcctgtgacctcaccctcttcgattttaaacagggaattctgtgctatccggctcccaaggcacaccccgtggcggtggcctccaaaaaacgtaagaagccatcgcgcccagcaaagaccagaaaaagacaagtgggcccccaatccggcgaggttagaaaggaggctcctagggacgaaacaaaggccgacacggatactgcaccagcctcttttcccgctcctggctgttgtgagaattgcggaatttctttctccggggatgggacccagagacagagactgaaaaccctctgcaaagactgccgggcacagagaattgcttttaacagggagcagcgtatgtttaagagggtgggttgcggtgagtgcgcagcatgtcaggtcaccgaggactgcggtgcttgttccacttgcctcctgcagctcccgcacgacgtcgccagcggcttgttctgtaagtgtgaacgcaggagatgcctgcggattgtggagcgatcccgggggtgtggagtgtgccgcggatgtcagacacaggaagattgcgggcattgcccgatctgtctgaggcctccccggccaggcctgcgccggcagtggaaatgtgtgcaaagaaggtgcctaaggcacctcgctcaccggcttaggcgcaggcatcagaggtgccaacgacggacgcctcttgctgtagctcccccgaccggaaaacatgctcggagaaagggaggctgtgactctaagatggctgcccgccggagacccggtgctcaaccacttccaccgccccctcccagccagagtccagaaccgactgaaccgcatcctagagcactagctcccagcccaccagccgagttcatatactattgcgtcgatgaggacgagttgcagccttatacaaacaggagacagaaccgtaaatgcggggcctgcgcagcatgcctcagacggatggattgcgggcggtgtgacttttgttgtgacaagccaaagttcgggggcagtaaccaaaagcggcaaaaatgcaggtggaggcaatgtcttcaattcgctatgaagcgactgctaccctctgtttggtccgagagtgaggacggcgcggggtccccccctccatatcggaggcggaaaagaccctcgtctgctcgccgtcaccacctgggcccaactttaaagcccactctcgccacgaggaccgcccagccggaccacacccaggctcccactaagcaggaggctgggggaggcttcgtcctaccgcctcctgggaccgatctggtctttttgagggaaggcgcttcttctcccgtgcaagtacccggacccgtagccgcgagcacagaggccctgctgcaggaagcccaatgtagcggcctgtcctgggtagttgccttgccccaggtgaagcaggaaaaggcagacacccaggatgaatggacccccggcactgccgttctgacttctccggtgctagtgccagggtgtccaagtaaggcagtggatcccgggctacccagcgtaaagcaggaacctccagacccggaggaagacaaggaggaaaacaaggatgactctgcttccaaattggcgcctgaagaagaagcggggggcgccggaacccctgtcatcaccgagatattctcactaggcggcactcgcttcagggataccgccgtgtggctgccaagaagtaaggatcttaaaaagcccggggcacggaaacagtag

SEQ ID NO: 318790 - DNA, 1893 bp, Artificial Sequence
  derived and/or modified sequence
atggccgaggactggctggactgccccgccctgggccccggctggaaacgacgcgaagtgtttcggaaatccggagctacttgcgggagatctgatacatattatcagagcccaactggcgatcgaatccgctcgaaggttgagctgactcgatatttggggcctgcctgtgacctgacactctttgatttcaaacagggaatcctgtgctatcccgccccgaaggctcacccagtagctgttgcttcaaagaagcgtaaaaagccctcccggcccgctaagactaggaaacgacaagtggggccccagtctggggaagtgcgaaaagaagccccccgggacgaaacaaaggctgacacagacaccgctcccgcaagctttccagccccagggtgctgcgagaattgcggaatttctttttcgggggatggcacccagagacagagactgaagaccctttgtaaagattgtcgagctcagagaattgcatttaaccgggaacagagaatgtttaaacgagtcgggtgtggtgagtgcgctgcctgccaagttactgaagattgtggcgcttgctctacctgtttactgcagctgccgcacgacgtagcatcaggccttttttgcaaatgcgaaagacgtcggtgccttagaattgttgagagaagtaggggctgtggggtctgtagaggatgtcaaactcaggaggattgtggccattgccctatctgcctccgaccaccacggcccggcttgaggcggcagtggaagtgtgtccaaaggcggtgtcttcgccatctcgcacaccggctgaggcgcaggcaccagcggtgccagagacgtacccctctggctgttgctccccctacaggtaagcacgcaaggcggaagggagggtgcgactcaaagatggccgccaggcgcagacccggcgcccaacccctacctcctccccccccctctcagtctccggagccaactgaaccccacccccgtgcactagctcccagccctccagctgaattcatttactattgtgtggatgaggacgagctgcagccttacacaaatagacgccaaaatagaaagtgcggcgcgtgcgcagcctgcttacggcggatggactgtggcagatgtgacttttgctgcgataagccgaagtttggtgggagcaaccaaaaacgtcagaagtgtagatggcgccagtgtctgcaatttgctatgaagaggttacttccatctgtatggagtgaatctgaggacggagccgggagcccacccccttatcgtcgcaggaaaagaccctccagcgctaggcgccatcacctggggcccactctaaagcccacgcttgcaacccggaccgcgcagccggaccacactcaggctcccactaaacaggaagcagggggcggctttgtactgccgccccctggtactgatttggtttttctgcgcgagggcgcgagctcacccgttcaggtcccaggaccagtggccgcctcgaccgaggcccttttgcaggaggctcagtgtagcggtctttcttgggtagtagcactaccccaagtaaagcaagagaaggcagacacccaggatgaatggactcctggcactgccgtgctcactagccctgttctggtccctggttgtcctagcaaggcagtggatcccggtctgcctagtgtcaaacaagagccgcccgatccggaagaggataaggaagagaacaaagacgactcagcaagtaaactagccccggaagaggaggccggcggcgcagggacacccgttatcactgagatcttttcacttggaggaacgcgattccgggacacggctgtttggctgccgaggtcaaaggatcttaagaaacccggggcccgaaagcagtag

SEQ ID NO: 318791 - DNA, 1971 bp, Artificial Sequence
  derived and/or modified sequence
atggggggtttccgcctgcgcaccggtaggaacgccgctctcaatagcgatcgcctccttctcctacctgttgcctccatggctgaggactggctggactgtcctgcgctgggtcctggatggaaacgacgggaagtgtttaggaaatccggggcaacgtgcgggagaagcgacacatactaccagtcacctaccggagaccgcattcgcagcaaggtcgagctgactcgctatctgggccctgcttgcgacctaactttgtttgacttcaaacagggcattctgtgctatccagctccgaaggctcatccagtcgccgtggcctcaaaaaaacggaagaaacccagccgtcctgcgaaaactcggaaaagacaagtgggaccccagtcaggggaggtgcgcaaagaggccccaagggacgaaacgaaagctgatactgataccgctcctgcaagctttcctgcgccaggttgctgcgagaactgcggcatcagctttagtggcgacgggacacagagacaacgattgaagaccctctgtaaagactgtcgagctcagaggatcgcgtttaatcgggaacagcgcatgttcaaacgtgtgggatgcggtgaatgcgctgcatgccaggttacggaggattgcggcgcttgtagtacctgcctcctgcagctcccccacgacgttgcaagcgggcttttttgtaaatgcgaacgcagacggtgcctgcgcatcgttgaacgttccagaggatgcggagtctgccgagggtgccagactcaggaggattgtgggcattgtccgatttgcctgagaccccctcgccctggcctgcgcagacagtggaaatgtgttcagaggcgatgcctcagacacctggcgcataggctccggagaagacatcagaggtgtcagcgtcggacgcccttggccgtggcccctccaactggtaaacatgcgaggcgcaagggcggatgcgactccaaaatggcagctcgccgtaggccaggcgcacagccactcccccctcctccaccaagtcagagtccagagccgacagaaccccatccgagagctcttgctcccagtcccccagcagaattcatttactactgcgtagatgaagacgaactccaaccttacaccaatagaaggcagaataggaagtgtggtgcttgtgccgcttgtctgaggagaatggattgcggccgatgcgacttttgctgcgacaaacctaagttcggcggatctaatcagaaaaggcagaagtgccgatggagacagtgccttcagtttgccatgaaacgcttgctgccatccgtctggtccgagagcgaagatggtgctggctcgcccccaccctacaggaggagaaagagaccctccagcgcacgtcggcaccacctcggccctacactgaagcctactttggccacaaggaccgcacagcccgaccacacccaagcccctaccaaacaggaagcaggtggagggttcgtgcttccccctcccggtaccgatttggtgtttctgagagaaggcgcatcgagcccagttcaggtccccggtccagtagcagctagcacggaggccctcttacaggaagcccagtgcagtggactatcttgggtagtcgctttgccgcaagtgaagcaggaaaaagccgatacgcaagatgaatggacgccaggcactgccgtccttacttcccctgtactcgtgcctggctgccccagtaaggccgtggacccgggattaccctcagtgaaacaagaaccacctgatccagaagaggataaggaggaaaataaggacgattccgcatctaagcttgccccagaggaagaagccggtggggctggcactcccgtaataacagagattttctctcttggcggtactagattccgggatactgccgtctggttgccaagatccaaggatctgaaaaaacctggcgctaggaaacagtag

SEQ ID NO: 318792 - DNA, 1893 bp, Artificial Sequence
  derived and/or modified sequence
atggccgaggactggcttgattgtcccgcactgggcccagggtggaaacgaagagaggtgtttagaaaatccggggctacatgcggtcgttctgatacctactaccaaagccccactggcgatcgaatcagatcgaaggtggagttgaccaggtacctgggaccagcatgtgacctcaccctcttcgattttaagcagggaatcctgtgctatccagctccaaaagcacaccccgtcgccgttgcctccaagaagagaaagaaaccatctagacctgcaaagacgaggaaacgccaggtcggacctcagtcaggagaagtgcggaaagaggcaccccgtgatgaaacaaaagccgatacggatacagctcctgcctcttttcctgcccctggctgttgcgagaattgcgggatatctttctctggggacgggacccaacggcagcgtctaaagacattgtgtaaagattgtcgcgctcagagaattgcttttaatcgcgagcaacggatgttcaagcgagtggggtgcggagaatgtgcagcttgtcaggttaccgaagactgtggcgcttgctctacatgccttctccagctcccacacgatgtggcgtctggtttgttttgcaagtgcgagcgaaggagatgtttgcgaattgtggagcgtagccgcggatgcggcgtctgccggggatgtcagacacaggaagactgcggacactgcccaatctgcctccggcctccgagacccggactccgtaggcagtggaaatgcgttcaaaggcgttgccttaggcacctggcacacaggctacggaggaggcaccaacggtgtcaaaggcggacacctctggcagtcgccccaccaacagggaaacatgctcgccgtaaaggaggctgcgattcgaaaatggccgctaggagacggccaggagcccaaccgcttccgccacccccaccgagtcagtcccccgaaccaacggaaccccatcccagggccttggcccctagtcccccagcagaattcatctactactgcgtggatgaagacgagctccagccctatactaacaggcggcagaacaggaagtgcggggcatgcgctgcatgccttcgcaggatggattgcggtcgttgcgacttttgttgtgacaaaccaaagtttgggggtagtaatcaaaagagacaaaagtgccgatggaggcagtgtttgcagttcgccatgaaacgactgctgccatccgtgtggtctgagtccgaagacggagcgggatctccaccaccttacagaagacggaaacgccctagttccgcccgaaggcatcacctcggtcccaccctgaagcccaccttggccaccaggactgcacagcctgaccatacccaggcacccactaaacaggaagcgggaggaggctttgtgctgcccccacccggtacagacttagtgtttttgagggagggcgctagctctccagttcaggtcccagggcctgtggcagctagcactgaggcactgcttcaggaggcacagtgctcaggcctgtcctgggttgtagcccttcctcaggtcaagcaggagaaggctgatactcaagacgagtggacaccgggaactgccgtgttaacctcccccgtactggtgcctggctgcccctcaaaagctgtggatccaggattgccttccgtcaagcaggagccgcctgacccggaggaagacaaggaagaaaataaagatgacagtgcatcaaagctcgctcccgaagaggaagccggaggagcgggaacgcccgtgataacagagatcttctccttaggaggtacccgtttcagggatacagccgtgtggcttccaaggtcgaaagacttaaaaaaaccaggtgccagaaagcaatag

SEQ ID NO: 318793 - DNA, 1971 bp, Artificial Sequence
  derived and/or modified sequence
atgggcggcttcagactgagaaccggcagaaacgccgccctgaacagcgacagactgctgctgctgcccgtggccagcatggccgaggactggctggactgccccgccctgggccccggctggaagagaagagaggtgttcagaaagagcggcgccacctgcggcagaagcgacacctactaccagagccccaccggcgacagaatcagaagcaaggtggagctgaccagatacctgggccccgcctgcgacctgaccctgttcgacttcaagcagggcatcctgtgctaccccgcccccaaggcccaccccgtggccgtggccagcaagaagagaaagaagcccagcagacccgccaagaccagaaagagacaggtgggcccccagagcggcgaggtgagaaaggaggcccccagagacgagaccaaggccgacaccgacaccgcccccgccagcttccccgcccccggctgctgcgagaactgcggcatcagcttcagcggcgacggcacccagagacagagactgaagaccctgtgcaaggactgcagagcccagagaatcgccttcaacagagagcagagaatgttcaagagagtgggctgcggcgagtgcgccgcctgccaggtgaccgaggactgcggcgcctgcagcacctgcctgctgcagctgccccacgacgtggccagcggcctgttctgcaagtgcgagagaagaagatgcctgagaatcgtggagagaagcagaggctgcggcgtgtgcagaggctgccagacccaggaggactgcggccactgccccatctgcctgagaccccccagacccggcctgagaagacagtggaagtgcgtgcagagaagatgcctgagacacctggcccacagactgagaagaagacaccagagatgccagagaagaacccccctggccgtggccccccccaccggcaagcacgccagaagaaagggcggctgcgacagcaagatggccgccagaagaagacccggcgcccagcccctgcccccccccccccccagccagagccccgagcccaccgagccccaccccagagccctggcccccagcccccccgccgagttcatctactactgcgtggacgaggacgagctgcagccctacaccaacagaagacagaacagaaagtgcggcgcctgcgccgcctgcctgagaagaatggactgcggcagatgcgacttctgctgcgacaagcccaagttcggcggcagcaaccagaagagacagaagtgcagatggagacagtgcctgcagttcgccatgaagagactgctgcccagcgtgtggagcgagagcgaggacggcgccggcagcccccccccctacagaagaagaaagagacccagcagcgccagaagacaccacctgggccccaccctgaagcccaccctggccaccagaaccgcccagcccgaccacacccaggcccccaccaagcaggaggccggcggcggcttcgtgctgcccccccccggcaccgacctggtgttcctgagagagggcgccagcagccccgtgcaggtgcccggccccgtggccgccagcaccgaggccctgctgcaggaggcccagtgcagcggcctgagctgggtggtggccctgccccaggtgaagcaggagaaggccgacacccaggacgagtggacccccggcaccgccgtgctgaccagccccgtgctggtgcccggctgccccagcaaggccgtggaccccggcctgcccagcgtgaagcaggagccccccgaccccgaggaggacaaggaggagaacaaggacgacagcgccagcaagctggcccccgaggaggaggccggcggcgccggcacccccgtgatcaccgagatcttcagcctgggcggcaccagattcagagacaccgccgtgtggctgcccagaagcaaggacctgaagaagcccggcgccagaaagcagtag

SEQ ID NO: 318794 - DNA, 1893 bp, Artificial Sequence
  derived and/or modified sequence
atggccgaggactggctggactgccccgccctgggccccggctggaagagaagagaggtgttcagaaagagcggcgccacctgcggcagaagcgacacctactaccagagccccaccggcgacagaatcagaagcaaggtggagctgaccagatacctgggccccgcctgcgacctgaccctgttcgacttcaagcagggcatcctgtgctaccccgcccccaaggcccaccccgtggccgtggccagcaagaagagaaagaagcccagcagacccgccaagaccagaaagagacaggtgggcccccagagcggcgaggtgagaaaggaggcccccagagacgagaccaaggccgacaccgacaccgcccccgccagcttccccgcccccggctgctgcgagaactgcggcatcagcttcagcggcgacggcacccagagacagagactgaagaccctgtgcaaggactgcagagcccagagaatcgccttcaacagagagcagagaatgttcaagagagtgggctgcggcgagtgcgccgcctgccaggtgaccgaggactgcggcgcctgcagcacctgcctgctgcagctgccccacgacgtggccagcggcctgttctgcaagtgcgagagaagaagatgcctgagaatcgtggagagaagcagaggctgcggcgtgtgcagaggctgccagacccaggaggactgcggccactgccccatctgcctgagaccccccagacccggcctgagaagacagtggaagtgcgtgcagagaagatgcctgagacacctggcccacagactgagaagaagacaccagagatgccagagaagaacccccctggccgtggccccccccaccggcaagcacgccagaagaaagggcggctgcgacagcaagatggccgccagaagaagacccggcgcccagcccctgcccccccccccccccagccagagccccgagcccaccgagccccaccccagagccctggcccccagcccccccgccgagttcatctactactgcgtggacgaggacgagctgcagccctacaccaacagaagacagaacagaaagtgcggcgcctgcgccgcctgcctgagaagaatggactgcggcagatgcgacttctgctgcgacaagcccaagttcggcggcagcaaccagaagagacagaagtgcagatggagacagtgcctgcagttcgccatgaagagactgctgcccagcgtgtggagcgagagcgaggacggcgccggcagcccccccccctacagaagaagaaagagacccagcagcgccagaagacaccacctgggccccaccctgaagcccaccctggccaccagaaccgcccagcccgaccacacccaggcccccaccaagcaggaggccggcggcggcttcgtgctgcccccccccggcaccgacctggtgttcctgagagagggcgccagcagccccgtgcaggtgcccggccccgtggccgccagcaccgaggccctgctgcaggaggcccagtgcagcggcctgagctgggtggtggccctgccccaggtgaagcaggagaaggccgacacccaggacgagtggacccccggcaccgccgtgctgaccagccccgtgctggtgcccggctgccccagcaaggccgtggaccccggcctgcccagcgtgaagcaggagccccccgaccccgaggaggacaaggaggagaacaaggacgacagcgccagcaagctggcccccgaggaggaggccggcggcgccggcacccccgtgatcaccgagatcttcagcctgggcggcaccagattcagagacaccgccgtgtggctgcccagaagcaaggacctgaagaagcccggcgccagaaagcagtag

SEQ ID NO: 318795 - DNA, 2434 bp, Artificial Sequence
  derived and/or modified sequence
aaagcgcatgcgccagctagatgggcagcgaggagagccgcaactgccagtccctcgaaggggttagctgtcgttgaacgtcagcacgcagatgcaactggctctcggcaggggggcgcgcgcaccgctgcggagcgccggcccgtaggcgcgggagcctccctattaagggcacgcgacatcgaggcaatagtgcgcaggtgcttagccagaggcggagcccgagaggcaggcagcggacttccggttccgggagcaacgaacagccgcggaggcgacagctaccgcttcagaggaggcggccgcggaggaggaggaaggggaggagggcgaggcgggaggtgcaggagggaccctcgccatgggtccacgggcctagagtggcggaagataccggcctggtgccaaactggctactgctgcttcctgtggcctccatggctgaggactggctggactgcccggccctgggccctggctggaagcgccgcgaagtctttcgcaagtcaggggccacctgtggacgctcagacacctattaccagagccccacaggagacaggatccgaagcaaagttgagctgactcgatacctgggccctgcgtgtgatctcaccctcttcgacttcaaacaaggcatcttgtgctatccagcccccaaggcccatcccgtggcggttgccagcaagaagcgaaagaagccttcaaggccagccaagactcggaaacgtcaggttggaccccagagtggtgaggtcaggaaggaggccccgagggatgagaccaaggctgacactgacacagccccagcttcattccctgctcctgggtgctgtgagaactgtggaatcagcttctcaggggatggcacccaaaggcagcggctcaaaacgttgtgcaaagactgtcgagcacagagaattgccttcaaccgggaacagagaatgtttaagcgtgtgggctgtggggagtgtgcagcctgccaggtaacagaagactgtggggcctgctccacctgcctcctgcagctgccccatgatgtggcatcggggctgttctgcaagtgtgaacggagacgctgcctccggattgtggaaaggagccgagggtgtggagtatgccggggctgtcagacccaagaggattgtggccattgccccatctgccttcgccctccccgccctggtctcaggcgccagtggaaatgtgtccagcgacgttgcctacggggtaaacatgcccgccgcaagggaggctgtgactccaagatggctgccaggcggcgccccggagcccagccactgcctccaccacccccatcacagtccccagagcccacagagccgcaccccagagccctggccccctcgccacctgccgagttcatctattactgtgtagacgaggacgagctacagccctacacgaaccgccggcagaaccgcaagtgcggggcctgtgcagcctgcctacggcggatggactgtggccgctgcgacttctgctgcgacaagcccaaattcgggggcagcaaccagaagcgccagaagtgtcgttggcgccaatgcctgcagtttgccatgaagcggctgctgcccagtgtctggtcagagtctgaggatggggcaggatcgcccccaccttaccgtcgtcgaaagaggcccagctctgcccgacggcaccatcttggccctaccttgaagcccaccttggctacacgcacagcccaaccagaccatacccaggctccaacgaagcaggaagcaggtggtggctttgtgctgcccccgcctggcactgaccttgtgtttttacgggaaggcgcaagcagtcctgtgcaggtgccgggccctgttgcagcttccacagaagccctgttgcaggaggcccagtgctctggcctgagttgggttgtggccttaccccaggtgaagcaagagaaggcggatacccaggacgagtggacaccaggcacagctgtcctgacttctcccgtattggtgcctggctgccctagcaaggcagtagacccaggcctgccttctgtgaagcaagagccacctgacccagaggaggacaaggaggagaacaaggatgattctgcctccaaattggccccagaggaagaggcaggaggggctggcacacccgtgatcacggagattttcagcctgggtggaacccgcttccgagatacagcagtctggttgccaaggtccaaagaccttaaaaaacctggagctagaaagcagtagactggaggcttctacagactgtaggattcaaggtattaccaccttgctcttgactggaaatgcaactgtggttaccacctgtgctgcaggtccgtcctggttccctgatttgtgtttcctgttctgcctggatcctgattctcagaaaccagttactggacttctgatccacatcctga

SEQ ID NO: 318796 - DNA, 3091 bp, Artificial Sequence
  derived and/or modified sequence
aaagcgcatgcgccagctagatgggcagcgaggagagccgcaactgccagtccctcgaaggggttagctgtcgttgaacgtcagcacgcagatgcaactggctctcggcaggggggcgcgcgcaccgctgcggagcgccggcccgtaggcgcgggagcctccctattaagggcacgcgacatcgaggcaatagtgcgcaggtgcttagccagaggcggagcccgagaggcaggcagcggacttccggttccgggagcaacgaacagccgcggaggcgacagctaccgcttcagaggaggcggccgcggaggaggaggaaggggaggagggcgaggcgggaggtgcaggagggaccctcgccatgggtccacgggcctagagtggcggaagataccggcctggtgccaaactggctactgctgcttcctgtggcctccatggctgaggactggctggactgcccggccctgggccctggctggaagcgccgcgaagtctttcgcaagtcaggggccacctgtggacgctcagacacctattaccagagccccacaggagacaggatccgaagcaaagttgagctgactcgatacctgggccctgcgtgtgatctcaccctcttcgacttcaaacaaggcatcttgtgctatccagcccccaaggcccatcccgtggcggttgccagcaagaagcgaaagaagccttcaaggccagccaagactcggaaacgtcaggttggaccccagagtggtgaggtcaggaaggaggccccgagggatgagaccaaggctgacactgacacagccccagcttcattccctgctcctgggtgctgtgagaactgtggaatcagcttctcaggggatggcacccaaaggcagcggctcaaaacgttgtgcaaagactgtcgagcacagagaattgccttcaaccgggaacagagaatgtttaagcgtgtgggctgtggggagtgtgcagcctgccaggtaacagaagactgtggggcctgctccacctgcctcctgcagctgccccatgatgtggcatcggggctgttctgcaagtgtgaacggagacgctgcctccggattgtggaaaggagccgagggtgtggagtatgccggggctgtcagacccaagaggattgtggccattgccccatctgccttcgccctccccgccctggtctcaggcgccagtggaaatgtgtccagcgacgttgcctacggggtaaacatgcccgccgcaagggaggctgtgactccaagatggctgccaggcggcgccccggagcccagccactgcctccaccacccccatcacagtccccagagcccacagagccgcaccccagagccctggccccctcgccacctgccgagttcatctattactgtgtagacgaggacgagctaaagcggctgctgcccagtgtctggtcagagtctgaggatggggcaggatcgcccccaccttaccgtcgtcgaaagaggcccagctctgcccgacggcaccatcttggccctaccttgaagcccaccttggctacacgcacagcccaaccagaccatacccaggctccaacgaagcaggaagcaggtggtggctttgtgctgcccccgcctggcactgaccttgtgtttttacgggaaggcgcaagcagtcctgtgcaggtgccgggccctgttgcagcttccacagaagccctgttgcaggaggcccagtgctctggcctgagttgggttgtggccttaccccaggtgaagcaagagaaggcggatacccaggacgagtggacaccaggcacagctgtcctgacttctcccgtattggtgcctggctgccctagcaaggcagtagacccaggcctgccttctgtgaagcaagagccacctgacccagaggaggacaaggaggagaacaaggatgattctgcctccaaattggccccagaggaagaggcaggaggggctggcacacccgtgatcacggagattttcagcctgggtggaacccgcttccgagatacagcagtctggttgccaaggtccaaagaccttaaaaaacctggagctagaaagcagtagactggaggcttctacagactgtaggattcaagtctgcagggcaggcactcgggaagggaagatggatgtaaagtgtgggagaccgaggacacagtggagcccacgagcacgagctggaacccacgaggatggcctggaacccatgtcagtctctcaccacctccagcttcgatgatgtgggtgtcctgcagaagaagctggtgcccttcctcacagagttaaatatgcatctggcccaggaattagagaagctgaaaggatgatcctggggaaggtggagcagctgcaggcctggctgcaggcctgactactgcccacaccaacgaggtgatctagcagatacatggcaacgtgtgaactgcaacaacgcctggtgccccagcaccaaccttccaagtgtaaaaacaatgtgctgctgcttcacttccgccctccggttatcaagcaaaatgtctcttgtggcccatcttactggaagagagttccgggaaacatagcctcaccaaggtgacacattacaaagccaccctaccatgaatccgctcccaagggtctcactgctcacctgaggataactcaatataactatgtggctgaaaatgcaaagctgaagaccatggatttcatggtgattccagcaagtacagagattctatgaagcccacccagaaaaaacttgctggtcctggctatttttgtgtcatttattcaagtattgagaacctggcctgtggtaggcactgtacttaatactaggatacagaaatgcaaaagatacggcccatgcaattttattaaatgcatcaatatgtattacaaatggtgaatggatttccaactttatcatggaatttaatgctgaatatatagaattcagaaaattgttgggaggacagcccttttgtgaaccttgtttggggcacagtaggaattggaaataatttagtttctatctctaagctgttctattttaaaattatttttaaatttttattgtcccactt

SEQ ID NO: 318797 - DNA, 2953 bp, Artificial Sequence
  derived and/or modified sequence
aaagcgcatgcgccagctagatgggcagcgaggagagccgcaactgccagtccctcgaaggggttagctgtcgttgaacgtcagcacgcagatgcaactggctctcggcaggggggcgcgcgcaccgctgcggagcgccggcccgtaggcgcgggagcctccctattaagggcacgcgacatcgaggcaatagtgcgcaggtgcttagccagaggcggagcccgagaggcaggcagcggacttccggttccgggagcaacgaacagccgcggaggcgacagctaccgcttcagaggaggcggccgcggaggaggaggaaggggaggagggcgaggcgggaggtgcaggagggaccctcgccatgggtccacgggcctagagtggcggaagataccggcctggtgccaaactggctactgctgcttcctgtggcctccatggctgaggactggctggactgcccggccctgggccctggctggaagcgccgcgaagtctttcgcaagtcaggggccacctgtggacgctcagacacctattaccagagccccacaggagacaggatccgaagcaaagttgagctgactcgatacctgggccctgcgtgtgatctcaccctcttcgacttcaaacaaggcatcttgtgctatccagcccccaaggcccatcccgtggcggttgccagcaagaagcgaaagaagccttcaaggccagccaagactcggaaacgtcaggttggaccccagagtggtgaggtcaggaaggaggccccgagggatgagaccaaggctgacactgacacagccccagcttcattccctgctcctgggtgctgtgagaactgtggaatcagcttctcaggggatggcacccaaaggcagcggctcaaaacgttgtgcaaagactgtcgagcacagagaattgccttcaaccgggaacagagaatgtttaagcgtgtgggctgtggggagtgtgcagcctgccaggtaacagaagactgtggggcctgctccacctgcctcctgcagctgccccatgatgtggcatcggggctgttctgcaagtgtgaacggagacgctgcctccggattgtggaaaggagccgagggtgtggagtatgccggggctgtcagacccaagaggattgtggccattgccccatctgccttcgccctccccgccctggtctcaggcgccagtggaaatgtgtccagcgacgttgcctacggggtaaacatgcccgccgcaagggaggctgtgactccaagatggctgccaggcggcgccccggagcccagccactgcctccaccacccccatcacagtccccagagcccacagagccgcaccccagagccctggccccctcgccacctgccgagttcatctattactgtgtagacgaggacgagctaaagcggctgctgcccagtgtctggtcagagtctgaggatggggcaggatcgcccccaccttaccgtcgtcgaaagaggcccagctctgcccgacggcaccatcttggccctaccttgaagcccaccttggctacacgcacagcccaaccagaccatacccaggctccaacgaagcaggaagcaggtggtggctttgtgctgcccccgcctggcactgaccttgtgtttttacgggaaggcgcaagcagtcctgtgcaggtgccgggccctgttgcagcttccacagaagccctgttgcaggcagtagacccaggcctgccttctgtgaagcaagagccacctgacccagaggaggacaaggaggagaacaaggatgattctgcctccaaattggccccagaggaagaggcaggaggggctggcacacccgtgatcacggagattttcagcctgggtggaacccgcttccgagatacagcagtctggttgccaaggtccaaagaccttaaaaaacctggagctagaaagcagtagactggaggcttctacagactgtaggattcaagtctgcagggcaggcactcgggaagggaagatggatgtaaagtgtgggagaccgaggacacagtggagcccacgagcacgagctggaacccacgaggatggcctggaacccatgtcagtctctcaccacctccagcttcgatgatgtgggtgtcctgcagaagaagctggtgcccttcctcacagagttaaatatgcatctggcccaggaattagagaagctgaaaggatgatcctggggaaggtggagcagctgcaggcctggctgcaggcctgactactgcccacaccaacgaggtgatctagcagatacatggcaacgtgtgaactgcaacaacgcctggtgccccagcaccaaccttccaagtgtaaaaacaatgtgctgctgcttcacttccgccctccggttatcaagcaaaatgtctcttgtggcccatcttactggaagagagttccgggaaacatagcctcaccaaggtgacacattacaaagccaccctaccatgaatccgctcccaagggtctcactgctcacctgaggataactcaatataactatgtggctgaaaatgcaaagctgaagaccatggatttcatggtgattccagcaagtacagagattctatgaagcccacccagaaaaaacttgctggtcctggctatttttgtgtcatttattcaagtattgagaacctggcctgtggtaggcactgtacttaatactaggatacagaaatgcaaaagatacggcccatgcaattttattaaatgcatcaatatgtattacaaatggtgaatggatttccaactttatcatggaatttaatgctgaatatatagaattcagaaaattgttgggaggacagcccttttgtgaaccttgtttggggcacagtaggaattggaaataatttagtttctatctctaagctgttctattttaaaattatttttaaatttttattgtcccactt

SEQ ID NO: 318798 - protein, 535 aa, Artificial Sequence
  derived and/or modified sequence
MAEDWLDCPALGPGWKRREVFRKSGATCGRSDTYYQSPTGDRIRSKVELTRYLGPACDLTLFDFKQGILCYPAPKAHPVAVASKKRKKPSRPAKTRKRQVGPQSGEVRKEAPRDETKADTDTAPASFPAPGCCENCGISFSGDGTQRQRLKTLCKDCRAQRIAFNREQRMFKRVGCGECAACQVTEDCGACSTCLLQLPHDVASGLFCKCERRRCLRIVERSRGCGVCRGCQTQEDCGHCPICLRPPRPGLRRQWKCVQRRCLRGKHARRKGGCDSKMAARRRPGAQPLPPPPPSQSPEPTEPHPRALAPSPPAEFIYYCVDEDELKRLLPSVWSESEDGAGSPPPYRRRKRPSSARRHHLGPTLKPTLATRTAQPDHTQAPTKQEAGGGFVLPPPGTDLVFLREGASSPVQVPGPVAASTEALLQAVDPGLPSVKQEPPDPEEDKEENKDDSASKLAPEEEAGGAGTPVITEIFSLGGTRFRDTAVWLPRAGTREGKMDVKCGRPRTQWSPRARAGTHEDGLEPMSVSHHLQLR

SEQ ID NO: 318799 - DNA, 1608 bp, Artificial Sequence
  derived and/or modified sequence
atggccgaggattggttggactgccccgctcttggccccggctggaagagaagagaagtcttccggaaatctggggccacttgtggtcggtctgacacttactatcagtcacccacaggagatagaattcgctctaaagtcgagctaaccaggtatctgggacctgcgtgcgacttgaccctattcgactttaaacagggcatcctgtgctatcctgcccccaaagcccaccccgtcgcagttgcttctaagaagagaaaaaaaccgtctaggccagctaaaactagaaaaaggcaggtgggcccccagtctggcgaggtgaggaaggaagcaccgcgggacgagactaaagccgacactgacacagcccccgcaagcttccccgcccccggctgctgcgaaaattgcggcatcagcttcagtggcgacggaactcagaggcaaaggttaaagaccttgtgtaaggactgcagagcgcagagaatcgccttcaatcgggagcagagaatgttcaagcgggtgggatgtggagagtgtgccgcctgtcaggtcactgaggattgcggcgcttgcagcacatgtctccttcagttgccccatgatgttgcctcaggcctgttctgcaagtgtgagaggcggcgttgtctgagaatagtcgaacgatcgaggggctgtggggtgtgtagaggatgccagacccaggaagactgtgggcactgccccatctgtctgaggcctccccgtccaggcttacgaaggcagtggaagtgtgtgcagcggcgctgcctaagggggaagcacgctaggagaaaggggggctgcgatagtaaaatggctgctaggcggcggccaggcgcccagccactgccgcccccaccgccctctcagagccccgagccaacagagcctcatccccgtgcccttgcacctagcccaccggccgagttcatctactattgcgtggacgaggatgagctgaaaagactgctgccgtcagtgtggtccgagagcgaggacggcgctggttcccctcccccttacaggaggcgcaagcgcccctcaagcgcccgaaggcatcatctcggtcccaccctgaaacctacactcgcaacacgtacggcacaaccagaccatactcaggcacctaccaaacaggaagccggtggtggatttgttcttcccccgcctggaacagacctggtctttctaagagaaggagcatcgagcccagtccaagtgcctggtccagtggccgcatccacagaggccctcctgcaagccgtcgaccctggcctgcccagcgttaaacaagagccgccagatcccgaggaagataaggaggagaataaagatgatagcgcaagcaagctggcgccagaggaggaggctgggggagccggcactcccgtgattaccgagatcttcagtctaggcggcacacggttccgggataccgcggtgtggctccctcgggccggtaccagagaaggaaagatggatgtgaaatgcggtcggcctcgcacccaatggagcccgcgcgctcgtgccggcacacatgaggatggtctggagcccatgtcggtcagtcatcatttacagctaaggtag

SEQ ID NO: 318800 - DNA, 1608 bp, Artificial Sequence
  derived and/or modified sequence
atggccgaggactggctggactgcccagccctgggccctggctggaagagaagagaggtgttcaggaagagcggggccacctgtggccgcagtgacacctactaccagagccccactggagaccgcatccgcagcaaggtggagctgacccgctacctgggccctgcctgtgacctgaccctgtttgacttcaagcagggcatcctgtgctacccagcccccaaggcccaccctgtggccgtggccagcaagaagaggaagaagcccagcaggcctgccaagaccaggaagaggcaggtgggcccccagagcggggaggtgaggaaggaggcccccagagatgagaccaaggctgacacagacacagccccagccagcttccctgcccctggctgctgtgagaactgtggcatctccttctctggagatggcacccagaggcagaggctgaagaccctgtgcaaggactgccgggcccagagaattgccttcaaccgggagcagaggatgttcaagagggtgggctgtggggagtgtgccgcctgccaggtgacagaggactgtggggcctgcagcacctgcctgctgcagctgccccatgatgtggccagcggcctcttctgcaagtgtgagcggcggcgctgcctgcgcatcgtggagaggagccggggctgcggcgtgtgccggggctgccagacccaggaggactgtggccactgccccatctgcctgcggccccccaggcctggcctgcggcggcagtggaagtgtgtgcagaggcgctgcctgcggggcaagcacgcccggaggaaaggaggctgtgacagcaagatggccgcccggcggcggcctggggcccagcccctgcccccacctccacccagccagagccctgagcccacagagccccacccccgggccctggcccccagccccccagctgagttcatctactactgtgtggatgaagatgagctgaagaggctgctgcccagcgtgtggagcgagagtgaagatggagctggcagccccccaccctacagaagaaggaagaggcccagcagcgcccggcggcaccacctgggccccaccctgaagcccaccctggccaccaggacagcccagcctgaccacacccaggcccccaccaagcaggaggccggcggcggctttgtgctgcccccacctggaacagacctggtgttcctgcgggagggcgccagcagccctgtgcaggtgcccggccctgtggccgccagcacagaggccctgctgcaggccgtggaccccggcctgcccagcgtgaagcaggagcccccagaccctgaggaggacaaggaggagaacaaggatgattctgccagcaagctggcccctgaggaggaggccggcggggccggcacccctgtgatcacagagatcttcagcctgggcggcacccgcttccgggacacagctgtgtggctgccccgggccggcacccgggagggcaagatggatgtgaagtgtggccggcccaggacccagtggagcccccgggcccgggccggcacccatgaagatggcctggagcccatgtctgtgagccaccacctgcagctgaggtag

SEQ ID NO: 318801 - DNA, 1945 bp, Artificial Sequence
  derived and/or modified sequence
atgcgccagctagatgggcagcgaggagagccgcaactgccagtccctcgaaggggttagctgtcgttgaacgtcagcacgcagatgcaactggctctcggcaggggggcgcgcgcaccgctgcggagcgccggcccgtaggcgcgggagcctccctattaagggcacgcgacatcgaggcaatagtgcgcaggctactgctgcttcctgtggcctccatggctgaggactggctggactgcccggccctgggccctggctggaagcgccgcgaagtctttcgcaagtcaggggccacctgtggacgctcagacacctattaccagagccccacaggagacaggatccgaagcaaagttgagctgactcgatacctgggccctgcgtgtgatctcaccctcttcgacttcaaacaaggcatcttgtgctatccagcccccaaggcccatcccgtggcggttgccagcaagaagcgaaagaagccttcaaggccagccaagactcggaaacgtcaggttggaccccagagtggtgaggtcaggaaggaggccccgagggatgagaccaaggctgacactgacacagccccagcttcattccctgctcctgggtgctgtgagaactgtggaatcagcttctcaggggatggcacccaaaggcagcggctcaaaacgttgtgcaaagactgtcgagcacagagaattgccttcaaccgggaacagagaatgtttaagcgtgtgggctgtggggagtgtgcagcctgccaggtaacagaagactgtggggcctgctccacctgcctcctgcagctgccccatgatgtggcatcggggctgttctgcaagtgtgaacggagacgctgcctccggattgtggaaaggagccgagggtgtggagtatgccggggctgtcagacccaagaggattgtggccattgccccatctgccttcgccctccccgccctggtctcaggcgccagtggaaatgtgtccagcgacgttgcctacggggtaaacatgcccgccgcaagggaggctgtgactccaagatggctgccaggcggcgccccggagcccagccactgcctccaccacccccatcacagtccccagagcccacagagccgcaccccagagccctggccccctcgccacctgccgagttcatctattactgtgtagacgaggacgagctaaagcggctgctgcccagtgtctggtcagagtctgaggatggggcaggatcgcccccaccttaccgtcgtcgaaagaggcccagctctgcccgacggcaccatcttggccctaccttgaagcccaccttggctacacgcacagcccaaccagaccatacccaggctccaacgaagcaggaagcaggtggtggctttgtgctgcccccgcctggcactgaccttgtgtttttacgggaaggcgcaagcagtcctgtgcaggtgccgggccctgttgcagcttccacagaagccctgttgcaggcagtagacccaggcctgccttctgtgaagcaagagccacctgacccagaggaggacaaggaggagaacaaggatgattctgcctccaaattggccccagaggaagaggcaggaggggctggcacacccgtgatcacggagattttcagcctgggtggaacccgcttccgagatacagcagtctggttgccaagggcaggcactcgggaagggaagatggatgtaaagtgtgggagaccgaggacacagtggagcccacgagcacgagctggaacccacgaggatggcctggaacccatgtcagtctctcaccacctccagcttcgatgatgtgggtgtcctgcagaagaagctggtgcccttcctcacagagttaaatatgcatctggcccaggaattagagaagctgaaaggatgatcctggggaaggtggagcagctgcaggcctg

SEQ ID NO: 318802 - DNA, 1608 bp, Artificial Sequence
  derived and/or modified sequence
atggccgaggactggctggactgccccgccctgggccccggctggaaacggagagaggtctttcgtaaatcaggcgcgacctgtgggcgttcagatacttactatcagtccccaacaggcgacaggatacggtctaaggtggaactgactcgatacttgggtcctgcctgcgacctcactctgtttgacttcaagcagggaatcctttgctatcccgcgcccaaagcacatcctgttgccgtggctagtaagaaacgcaagaagcctagtcgacctgcaaagacccgcaagaggcaagtagggccccagagcggtgaggttaggaaagaggcaccgagggatgagacaaaagccgataccgacactgctccagcctcgtttccggcccccggttgctgtgagaactgtggaatcagcttttctggagatggcacacagaggcagcggcttaagaccctctgtaaggactgtcgggcccagcgtattgccttcaatagagagcagagaatgttcaagcgcgtggggtgcggtgagtgcgccgcctgccaggtcacagaagattgtggagcttgcagcacatgtcttttacagttaccacacgacgtggcctcaggcttgttctgcaaatgtgagaggagacgttgtttgagaattgtcgaaaggtctcgaggctgcggcgtatgccgcggctgtcagacacaagaagactgcggccattgccctatctgcctcagaccgcctagacctgggctccgacgccaatggaagtgcgtgcaaaggaggtgcttgcgcgggaagcacgcgagaaggaagggagggtgcgacagtaaaatggccgccagacggcggcccggagcacaacccctaccacccccccccccatcccaaagcccagagcctaccgagccccaccccagagccctggctccaagccctcccgctgagtttatttattattgcgtggacgaggacgagttgaagcgactgctccctagcgtgtggtcggagtcagaggatggcgctggctcgccccctccataccggaggcgaaagcgccccagtagcgcaagacgacaccatctcggtcctactctcaaacctacgctggcgacaaggacagctcagccagatcacacgcaggccccaacaaagcaggaagctggcggcggttttgttctgccgccaccgggcacagacttggtctttctgagggaaggtgctagcagccccgtccaggtacctggccccgttgcagccagtacagaggccctcctgcaggcggtagatccaggcctgcctagcgtcaaacaggagccacccgaccccgaagaggataaagaagagaataaggacgatagcgcatcgaaattggccccggaggaggaggcaggaggcgcaggcacccccgtgatcacagagattttttcactcggggggacacggttccgggacactgcagtatggctcccgagggcagggactagggaaggtaaaatggatgtcaagtgcggcagaccccgcactcagtggagtcctcgcgcacgggccggtacccatgaagatggcctcgagccaatgagcgtcagtcatcacctgcagctgcggtag

SEQ ID NO: 318803 - DNA, 1608 bp, Artificial Sequence
  derived and/or modified sequence
atggccgaggattggttagactgtcccgctctggggcctggttggaaacgcagggaagtgtttcgcaaatccggggcaacctgcggaagatcagatacctactaccagagccccaccggagaccgcattagatcaaaggtggaacttacacgctacttgggaccagcctgcgacttgacactcttcgactttaagcaaggtatcctgtgctatccagctcctaaggcccatccagtggcagtggccagcaaaaagcggaagaagccttcccggccagccaagaccaggaaaaggcaggtagggcctcagtctggagaggtcagaaaggaagcgccacgggatgagaccaaggctgatacagataccgcgccagccagcttccctgctcccggttgctgcgagaactgtgggatcagtttcagcggggatgggactcaaagacaaagactcaaaactctgtgcaaggactgtagggcacagcggatcgcatttaatcgggaacagcgaatgttcaaacgagtgggatgcggcgagtgcgcggcatgtcaggtgactgaagactgcggcgcttgttctacctgccttctccagcttccccacgacgtcgctagcgggctgttttgtaagtgcgagaggagaagatgtctcaggatagtcgagcgaagcaggggatgcggggtgtgtcggggttgccaaacacaagaagattgcgggcattgccccatctgccttcgccctccaaggcccggattgaggaggcagtggaaatgcgtgcaacggagatgcctgcgcggaaagcacgcccgacgcaagggaggctgtgattccaagatggctgcacgtcgaaggccaggggctcaacctctacccccaccacccccttcgcagtcccctgagcccacagaaccacatcccagggccctggccccttcgccacctgcagagttcatctactactgtgttgatgaggacgaacttaaaagactgctccccagcgtctggagtgaaagcgaggatggcgctggttcacctcccccttataggcggaggaaaagaccctcttccgccaggcgccatcatctgggtcctacgctgaagccaaccctggctacgagaacagcccagcctgatcacacgcaggctcccacaaagcaggaggccggaggcggatttgtgcttccccctcccggaaccgacctggtattcctcagagaaggagcttcctcccccgtccaggtacccggaccagtcgctgcctctaccgaggcactcctgcaggcagttgatcctggtctccctagcgttaagcaggaacctcctgatcctgaggaagataaggaagagaacaaagatgatagcgcctccaagctcgccccagaagaggaggcagggggagcgggtaccccagtcataaccgagatcttttctctcgggggaacccggttcagagacaccgccgtgtggttgcctcgggctggcactcgagaaggcaaaatggacgtgaagtgtgggaggccacggactcagtggtccccaagagctagggctgggacacatgaggacggacttgagccaatgtcggtcagccaccatctacaactgcgatag

SEQ ID NO: 318804 - DNA, 1608 bp, Artificial Sequence
  derived and/or modified sequence
atggccgaggactggctggactgccccgccctgggccccggctggaagagaagagaggtgttcagaaagagcggcgccacctgcggcagaagcgacacctactaccagagccccaccggcgacagaatcagaagcaaggtggagctgaccagatacctgggccccgcctgcgacctgaccctgttcgacttcaagcagggcatcctgtgctaccccgcccccaaggcccaccccgtggccgtggccagcaagaagagaaagaagcccagcagacccgccaagaccagaaagagacaggtgggcccccagagcggcgaggtgagaaaggaggcccccagagacgagaccaaggccgacaccgacaccgcccccgccagcttccccgcccccggctgctgcgagaactgcggcatcagcttcagcggcgacggcacccagagacagagactgaagaccctgtgcaaggactgcagagcccagagaatcgccttcaacagagagcagagaatgttcaagagagtgggctgcggcgagtgcgccgcctgccaggtgaccgaggactgcggcgcctgcagcacctgcctgctgcagctgccccacgacgtggccagcggcctgttctgcaagtgcgagagaagaagatgcctgagaatcgtggagagaagcagaggctgcggcgtgtgcagaggctgccagacccaggaggactgcggccactgccccatctgcctgagaccccccagacccggcctgagaagacagtggaagtgcgtgcagagaagatgcctgagaggcaagcacgccagaagaaagggcggctgcgacagcaagatggccgccagaagaagacccggcgcccagcccctgcccccccccccccccagccagagccccgagcccaccgagccccaccccagagccctggcccccagcccccccgccgagttcatctactactgcgtggacgaggacgagctgaagagactgctgcccagcgtgtggagcgagagcgaggacggcgccggcagcccccccccctacagaagaagaaagagacccagcagcgccagaagacaccacctgggccccaccctgaagcccaccctggccaccagaaccgcccagcccgaccacacccaggcccccaccaagcaggaggccggcggcggcttcgtgctgcccccccccggcaccgacctggtgttcctgagagagggcgccagcagccccgtgcaggtgcccggccccgtggccgccagcaccgaggccctgctgcaggccgtggaccccggcctgcccagcgtgaagcaggagccccccgaccccgaggaggacaaggaggagaacaaggacgacagcgccagcaagctggcccccgaggaggaggccggcggcgccggcacccccgtgatcaccgagatcttcagcctgggcggcaccagattcagagacaccgccgtgtggctgcccagagccggcaccagagagggcaagatggacgtgaagtgcggcagacccagaacccagtggagccccagagccagagccggcacccacgaggacggcctggagcccatgagcgtgagccaccacctgcagctgagatag

SEQ ID NO: 318805 - protein, 86 aa, Artificial Sequence
  derived and/or modified sequence
MASQKRPSQRHGSKYLATASTMDHARHGFLPRHRDTGILDSIGRFFGGDRGAPKRGSGKDSHHPARTAHYGSLPQKSHGRTQDENP

SEQ ID NO: 318806 - protein, 160 aa, Artificial Sequence
  derived and/or modified sequence
MASQKRPSQRHGSKYLATASTMDHARHGFLPRHRDTGILDSIGRFFGGDRGAPKRGSGKDSHHPARTAHYGSLPQKSHGRTQDENPVVHFFKNIVTPRTPPPSQGKGAEGQRPGFGYGGRASDYKSAHKGFKGVDAQGTLSKIFKLGGRDSRSGSPMARR

SEQ ID NO: 318807 - DNA, 2127 bp, Artificial Sequence
  derived and/or modified sequence
aaagacaggccctctgagtccgacgagctccagaccatccaagaagacagtgcagccacctccgagagcctggatgtgatggcgtcacagaagagaccctcccagaggcacggatccaagtacctggccacagcaagtaccatggaccatgccaggcatggcttcctcccaaggcacagagacacgggcatccttgactccatcgggcgcttctttggcggtgacaggggtgcgcccaagcggggctctggcaaggactcacaccacccggcaagaactgctcactacggctccctgccccagaagtcacacggccggacccaagatgaaaaccccgtagtccacttcttcaagaacattgtgacgcctcgcacaccacccccgtcgcagggaaagggggccgaaggccagagaccaggatttggctacggaggcagagcgtccgactataaatcggctcacaagggattcaagggagtcgatgcccagggcacgctttccaaaatttttaagctgggaggaagagatagtcgctctggatcacccatggctagacgctgaaaacccacctggttccggaatcctgtcctcagcttcttaatataactgccttaaaactttaatcccacttgcccctgttacctaattagagcagatgacccctcccctaatgcctgcggagttgtgcacgtagtagggtcaggccacggcagcctaccggcaatttccggccaacagttaaatgagaacatgaaaacagaaaacggttaaaactgtccctttctgtgtgaagatcacgttccttcccccgcaatgtgcccccagacgcacgtgggtcttcagggggccaggtgcacagacgtccctccacgttcacccctccacccttggactttcttttcgccgtggctgcggcacccttgcgcttttgctggtcactgccatggaggcacacagctgcagagacagagaggacgtgggcggcagagaggactgttgacatccaagcttcctttgtttttttttcctgtccttctctcacctcctaaagtagacttcatttttcctaacaggattagacagtcaaggagtggcttactacatgtgggagcttttggtatgtgacatgcgggctgggcagctgttagagtccaacgtggggcagcacagagagggggccacctccccaggccgtggctgcccacacaccccaattagctgaattcgcgtgtggcagagggaggaaaaggaggcaaacgtgggctgggcaatggcctcacataggaaacagggtcttcctggagatttggtgatggagatgtcaagcaggtggcctctggacgtcaccgttgccctgcatggtggccccagagcagcctctatgaacaacctcgtttccaaaccacagcccacagccggagagtccaggaagacttgcgcactcagagcagaagggtaggagtcctctagacagcctcgcagccgcgccagtcgcccatagacactggctgtgaccgggcgtgctggcagcggcagtgcacagtggccagcactaaccctccctgagaagataaccggctcattcacttcctcccagaagacgcgtggtagcgagtaggcacaggcgtgcacctgctcccgaattactcaccgagacacacgggctgagcagacggccccgtggatggagacaaagagctcttctgaccatatccttcttaacacccgctggcatctcctttcgcgcctccctccctaacctactgacccaccttttgattttagcgcacctgtgattgataggccttccaaagagtcccacgctggcatcaccctccccgaggacggagatgaggagtagtcagcgtgatgccaaaacgcgtcttcttaatccaattctaattctgaatgtttcgtgtgggcttaataccatgtctattaatatatagcctcgatgatgagagagttacaaagaacaaaactccagacacaaacctccaaatttttcagcagaagcactctgcgtcgctgagctgaggtcggctctgcgatccatacgtggccgcacccacacagcacgtgctgtgacgatggctgaacggaaagtgtacactgttcctgaatatt

SEQ ID NO: 318808 - DNA, 875 bp, Artificial Sequence
  derived and/or modified sequence
caattctaaatgccccacttctttcatgcatgaattgcaaaaagatgtggcaagttttgtttctaccaagaaaactaaaaacaccttttgtcaaataaatgctccttgcatatttaacttatgcaccagtggccttttaaacagtcaatgtcccatcaaggtgcctgcacatctgggctctccgggagcagccatggcagcacccgggaagaaacgctgatgtggctgctctgcatgctcagatgacttcatcgggaagcctgggtgcattttacgctgggtgccaaatctcgagtaactgaggaattcccagagccttctgaaacacagagctgcaataaggctgctccatccaggagaggcagatgcgaaccagaacaatgggacctcctctcaggacacagcggtgactgactccaagcgcacagcggacccgaagaatgcctggcaggatgcccacccagctgacccagggagccgcccccacttgatccgcctcttttcccgagatgccccggggagggaggacaacaccttcaaagacaggccctctgagtccgacgagctccagaccatccaagaagacagtgcagccacctccgagagcctggatgtgatggcgtcacagaagagaccctcccagaggcacggatccaagtacctggccacagcaagtaccatggaccatgccaggcatggcttcctcccaaggcacagagacacgggcatccttgactccatcgggcgcttctttggcggtgacaggggtgcgcccaagcggggctctggcaaggactcacaccacccggcaagaactgctcactacggctccctgccccagaagtcacacggccggacccaagatgaaaaccccg

SEQ ID NO: 318809 - DNA, 1512 bp, Artificial Sequence
  derived and/or modified sequence
atgagctccatcctcgaggagagaatcctcggtgccgatacctccgttgacctcgaggaaacagggcgggtgctgtccatcggggatgggatcgccagagtccacggtttgcggaacgtgcaggccgaggagatggtggaattctcttcaggcctgaagggaatgtcgttaaacctcgagccagacaacgtcggtgtggttgttttcggcaatgacaaattgattaaggaaggcgatatagttaagcgaacaggtgctattgtcgacgtgcccgtgggggaggagctattgggaagagtggtcgatgctctgggcaatgcgatagacggcaaaggacccattggatccaagacaagacgcagagtgggtttgaaggctcctggaattattccacgcatctccgtacgtgaacccatgcagaccggcattaaggcagtggatagcctcgtccctatagggcgggggcagagggagctcatcattggagatcgacaaaccggtaagaccagcatcgcgatcgacaccattattaaccagaaaagatttaacgacggaagcgacgagaagaagaagctgtattgtatctatgtggccataggccagaaacgctccacagtggcacaactggttaagcgcctgacagatgccgacgctatgaaatacaccattgttgtcagcgcaaccgccagcgatgcagctcctctccagtacctcgccccatattcaggttgcagtatgggagaatattttagagacaacggaaaacacgccctcatcatctatgacgatctttcaaaacaggctgtggcctatcggcagatgtctctgctacttagaaggcctcctggccgcgaagcttatccaggcgatgtcttctacctgcatagccggctactcgaacgagctgcaaagatgaatgacgcgttcgggggaggctctctcaccgctctgcctgttattgagactcaagccggcgatgtgtctgcttatatccctacaaacgttatctccatcaccgacggccagatttttctggagaccgaactgttttataagggaatccgacctgcaattaacgtgggactttccgtttctcgggtcggctccgctgcccagactcgcgcaatgaaacaggtggctgggacaatgaaattagagttggcacagtaccgcgaagtagctgcgttcgctcagtttggttctgatctcgatgcagcaacgcaacaacttttgtccaggggcgtccgactcactgagctcctgaagcagggccagtatagccccatggctatcgaagagcaggtggcagtcatttatgcgggagtgcgcggctatttggataagctcgagcccagcaaaataactaagtttgaaaacgcatttttgtcacacgtggtgtctcagcatcaggctcttttgggcaccattcgggccgatggaaagatctccgaacagtcagatgctaagctcaaagaaatcgtcaccaattttttagcaggatttgaggcttag

SEQ ID NO: 318810 - DNA, 1512 bp, Artificial Sequence
  derived and/or modified sequence
atgagttctatcttggaagagcggattctgggggccgacacctcagtcgacctggaggagaccgggcgggtcttatcaatcggagacggaatcgccagagtccatggcttaaggaatgtccaggcagaggaaatggtggaatttagctcaggcctcaaagggatgagcctcaatttagagcctgataatgtgggcgtcgtggtgttcggcaacgacaagttaattaaagagggagacattgtgaaaagaacaggcgcaatagtcgatgtgcccgtaggggaggagctgttgggccgtgtcgtggatgcccttggcaatgcgatcgacggaaaagggcctattggcagcaaaacacgcagacgggtgggcctcaaggctccaggcatcattccacggatctcagtgagagagcctatgcaaaccggcatcaaagctgttgatagcctcgttcctattggcagagggcagcgggagctaatcatcggcgaccggcagaccgggaaaacctcaattgcgatcgataccattatcaatcagaagcggtttaacgacggctcagacgaaaagaagaaattgtactgcatctacgtggccattggtcaaaaacgcagcaccgtggcccagcttgtgaaacggctgactgacgccgacgctatgaagtacacgatcgtggtgagcgcgactgcatccgacgcagcacccctgcagtacttagcgccttacagcggctgttctatgggagagtacttccgagacaatggcaaacacgcactgataatttacgacgacttgtctaaacaggcggtcgcctataggcagatgtccctcttgctgcggagaccacctggaagagaggcttacccgggagacgtcttttacctccacagccggttgctggaacgagctgcaaagatgaatgatgcatttggcggagggtcactgactgcactgcctgtaatcgagacacaggcgggagacgtctccgcttatataccaactaatgtgatttccattaccgacggacagattttcctggagactgaactgttctacaagggaatcagacccgccatcaatgtggggctgtccgtgtctagggtgggatcagcggcccagaccagagcaatgaaacaggtggcaggcactatgaaacttgagctggctcaatatagagaagtggccgcctttgcccagtttggtagcgacctggatgctgcgacacagcaactgttgtctagaggtgtgcgcttgaccgaactgctaaagcagggccagtattccccaatggcaattgaagaacaagtggctgtgatttacgccggtgtccgcggttatcttgataaacttgagccatcgaagataactaagttcgaaaatgccttcctttcccatgtcgtgtcacagcatcaggcactcttgggcaccatcagagccgacggcaagattagcgagcagtcagacgccaagcttaaagagattgttactaacttcttggctggattcgaggcctag

SEQ ID NO: 318811 - DNA, 1512 bp, Artificial Sequence
  derived and/or modified sequence
atgagcagcatcctggaggagcgcatcctgggcgctgacacctctgtggacctggaggagaccggccgggtgctgagcattggagatggcatcgcccgggtgcacggcctgagaaatgtgcaggccgaggagatggtggagttcagcagcggcctgaagggcatgagcctgaacctggagccagacaacgtgggcgtggtggtgtttggaaatgacaagctgatcaaggagggggacatcgtgaagaggactggagccatcgtggatgtgcctgtgggggaggagctgctgggccgggtggtggatgccctgggcaatgccattgatggcaagggccccatcggcagcaagacccggcggcgggtgggcctgaaggcccctggcatcatcccccgcatctctgtgcgggagcccatgcagacaggcatcaaggctgtggacagcctggtgcccatcggccggggccagcgggagctgatcattggagaccggcagacaggcaagaccagcatcgccatcgacaccatcatcaaccagaagcgcttcaatgatggcagtgatgagaagaagaagctgtactgcatctacgtggccatcggccagaagaggagcacagtggcccagctggtgaagaggctgacagatgctgatgccatgaagtacaccatcgtggtgtctgccacagccagtgatgctgcccccctgcagtacctggccccctacagcggctgcagcatgggagagtacttccgggacaatggcaagcacgccctgatcatctatgatgacctgagcaagcaggccgtggcctaccggcagatgagcctgctgctgcggcggcccccaggccgggaggcctacccaggagatgtgttctacctgcacagccggctgctggagcgggccgccaagatgaatgatgcctttggaggcggcagcctgacagccctgcccgtcatcgagacccaggccggagatgtgtctgcctacatccccaccaacgtcatcagcatcacagatggccagatcttcctggagacagagctgttctacaagggcatccggcctgccatcaacgtgggcctgtctgtgtcccgggtgggcagcgctgcccagacccgggccatgaagcaggtggccggcaccatgaagctggagctggcccagtaccgggaggtggccgcctttgcccagtttggaagtgacctggatgctgccacccagcagctgctgagccggggcgtgcggctgacagagctgctgaagcagggccagtacagccccatggccatcgaggagcaggtggccgtcatctatgctggggtgcggggctacctggacaagctggagcccagcaagatcaccaagtttgaaaatgccttcctgagccacgtggtgtcccagcaccaggccctgctgggcaccatccgggcagatggcaagatcagcgagcagagtgatgccaagctgaaggagatcgtgaccaacttcctggccggctttgaggcctag

SEQ ID NO: 318812 - DNA, 1512 bp, Artificial Sequence
  derived and/or modified sequence
atgagcagcatcctggaggagcggatcctgggcgccgacaccagcgtcgacctggaagagactggccgcgtgctgagcataggagacggcattgcgcgggtacacggcctcaggaacgtgcaagctgaggaaatggttgagttctccagtggtctaaaagggatgtcactgaacttagagcccgataatgtaggagtcgttgtcttcggaaatgacaagctcattaaggaaggggacatcgtgaagcggaccggggctattgtggacgtgccagtcggcgaggagctgctaggccgtgtagtggacgctctaggtaatgccattgacggcaaagggcccatcggaagtaagacgaggcgccgggttgggctcaaagcccccggcattattccgaggatctctgttcgagaaccaatgcagacggggatcaaagccgtggacagtctggtgcctattgggcgaggccagcgcgagttgatcatcggggacaggcagaccggcaaaacgtcaatcgctatcgacacaataattaatcagaagagatttaatgacggatctgacgagaagaagaaactgtactgtatctatgtggccatcggccagaaacgctctaccgttgctcagttggtcaagcgtcttaccgatgccgacgccatgaaatacactatcgtggtgtccgcaactgctagcgatgctgctcccttgcagtacctggccccctatagcgggtgttccatgggagagtactttcgcgataatggcaagcacgcactcattatttacgatgacctgagcaaacaggccgtcgcttatcggcagatgtccctcttactgcggcggccccctgggagagaggcataccctggtgacgtgttctaccttcatagcagactgctcgagagagccgcaaagatgaatgacgcctttggaggcgggtccttaactgccctccccgtgatcgagacccaagctggggacgtttccgcctatataccgacaaatgtaatcagcattaccgacggacaaattttcctggaaacagagctcttttataagggcatcaggccagccattaacgtgggcttgtcagtgtccagagtgggcagcgccgcccagacgcgagcgatgaaacaagttgccggcaccatgaagcttgagttggcacagtaccgcgaggtagcggccttcgctcaattcggtagtgatctggacgctgcgacccagcaattactttcccgcggcgtgcgcctcacagagctcctgaagcaagggcagtactctcctatggccatagaggagcaagtggcagtcatttacgcaggcgtgcggggctatctggacaagctggaacctagtaaaatcacaaagttcgaaaatgcttttttatcccatgtggtctctcagcatcaggctttactaggcacaatccgcgcagacggcaagatttctgaacagtctgacgctaagctcaaggagatcgtcacgaatttcctggccggattcgaagcctag

SEQ ID NO: 318813 - DNA, 1512 bp, Artificial Sequence
  derived and/or modified sequence
atgagcagcatcctggaggagcggatcctgggcgccgacaccagcgtcgatctggaggagacgggcagagtgctgtccatcggcgatggcatcgctcgcgtgcacggattgaggaacgttcaagctgaagagatggtcgaattttctagtggcttaaaggggatgagtctgaacctcgaacccgacaacgtgggagtggtagtgtttggcaacgataaacttattaaagagggggatatagttaagaggaccggcgccatcgtggatgtccctgtgggcgaagagcttctgggccgagtagtcgacgccttgggtaacgcgatcgacgggaaaggccctattggaagtaaaacccgcaggagagtcggcctaaaggcccccggaatcataccaagaatctccgtgagggaacccatgcaaaccggcataaaggccgtggactcattagtgcctattggcagaggtcagagggagctaatcatcggtgacagacagactggaaagacgagtatcgcaatcgataccatcattaaccagaagcgcttcaatgacgggtcagatgagaagaaaaagctatactgcatctatgtcgcaataggtcagaagaggtcgacagtggcgcagctagtcaaaagactgaccgacgcggacgctatgaaatataccatagtcgtgtcagctacagcatcagacgcggctcctctccaatacctcgccccttattcaggatgcagtatgggcgagtacttcagggataatggaaagcatgctctgattatatacgatgacttatcaaagcaagctgttgcctacaggcaaatgagcctcctgttgcgcaggccgccaggtcgagaagcttacccgggggatgtcttttatctgcattctcggctgctggaaagagcagccaaaatgaatgacgcattcggcgggggctctctcaccgcactgcctgtcatagagacccaagctggcgatgtgtctgcttacattcccaccaatgtaatctccatcaccgatggccagatcttcctcgagacagagctcttctataaggggatcaggccagcaatcaatgtgggcctgagcgtctcccgcgtgggatcagcagcgcagacccgagctatgaaacaagttgcgggaactatgaaattggaactcgctcagtatagggaagttgctgcttttgcacagttcgggagtgatttggacgccgccacacaacaactactgtccagaggggtgcggctgaccgagctgctcaaacagggccagtactcccctatggctattgaagaacaggtcgccgtgatttacgcgggagtcagggggtacctagacaagctggaacctagtaagataaccaaatttgagaacgcctttttgagtcatgtcgtgagtcaacaccaagccctgctaggcacgatcagagccgatggaaagatttctgagcagtcagacgcgaagctgaaagagattgtgaccaacttcctggccggctttgaggcttag

SEQ ID NO: 318814 - DNA, 1512 bp, Artificial Sequence
  derived and/or modified sequence
atgtcgtccatcctggaagaaagaattctgggagccgacacgagcgtggatctcgaggaaactgggagggttctgtccattggggacgggattgcacgagtgcacggcctgcgcaacgtgcaggctgaggaaatggtcgagttttcctccggactgaagggaatgtcacttaatctggagcctgacaatgttggggtggtggtgttcgggaatgataagctcatcaaggagggcgatatcgtgaagcgaaccggagcgattgtagatgtgccagtgggcgaggagctactcggcagggtcgtcgatgcactgggcaatgctatcgatggaaaaggaccaatcgggtctaaaacccgaagacgcgtgggcttgaaagctccgggtattataccccgtatctcagttcgggaacccatgcagacaggcattaaagccgtggattctctggtgcccattggcagaggacaaagggagctgattatcggcgacagacaaactggtaaaacgagcattgcaatcgacacaatcatcaaccagaaaaggtttaacgacgggagtgatgagaaaaagaaactgtattgtatctatgtggccatcggacagaagcgatccacagtggcacagctggttaaaagactgaccgacgccgatgctatgaagtacactatcgtggtctctgccactgcatcagatgcggcacccctgcaatatttagctccctatagtggatgcagtatgggtgaatatttccgagacaatggcaagcacgcactgattatctatgacgacctgagcaagcaggctgtggcctataggcagatgagcctcctcctgcgcaggccacccggaagggaggcctatcctggtgacgtcttttacctgcactctcgcctcctggaacgggctgcaaaaatgaatgatgcatttgggggaggaagcttgaccgcccttcctgtgattgagacacaggccggagacgtttctgcttatatacctacgaatgtgattagcatcacagatggccaaattttcctcgagaccgaactcttctataaaggaatccgaccggcaatcaatgtaggcttaagcgtcagcagagtcggctcggcagcacagactagagccatgaagcaggtggctggcacaatgaaactggagctggcccagtatcgcgaggtggcggcttttgcacagttcgggtccgatcttgacgccgctacccagcaactgctgagcaggggagttcggctgactgagttgcttaaacagggacaatattctcctatggctattgaagagcaggttgctgttatttacgccggagtgagaggttatttagataagctcgaaccctcaaaaatcaccaagttcgaaaatgcgttcctgagccacgtggtttctcagcaccaggctctcctcggtactattcgtgccgacgggaagatcagtgagcagtcagatgccaaactcaaagagattgttaccaattttttggcgggatttgaggcctag

SEQ ID NO: 318815 - DNA, 1512 bp, Artificial Sequence
  derived and/or modified sequence
atgagctctatcttagaggagcggatattgggcgcagatacttctgtggatctggaggaaacaggccgagtcctttccatcggggatggtatcgcaagggtacacggcctgcgcaacgtccaagctgaagagatggtggagttctcaagcggtcttaaaggtatgagcttgaatctggagcccgataacgtgggagtggtcgtgttcggaaacgacaaacttattaaggaaggagacatcgtcaaaagaaccggggctatcgtggatgtgccagtgggtgaggagctcctaggcagggttgtggatgccttaggaaacgctatcgatgggaaaggccctatcgggagtaagacccggagaagggttggacttaaagcgcctgggatcattccgaggatttctgttcgtgaacctatgcagacgggcatcaaggctgtggattcacttgtgcctatcggaaggggacaaagggaactgattatcggggatagacaaaccgggaagacctctatcgctattgataccattatcaaccaaaaacggtttaacgatggaagcgacgaaaaaaaaaagctctattgcatatacgtggctattggacaaaaacgctcgacggtggcccagttggtcaaacgactgactgatgccgatgcaatgaagtacaccatcgtggtgagcgccaccgcctctgacgcagctcccttgcaatatttggcgccatatagcgggtgctcaatgggtgaatacttcagagataacgggaaacacgccctcataatctacgacgatctgagcaaacaggcagttgcttatcggcaaatgtcactcctgctgcggagaccccctggcagagaggcttacccaggcgacgtcttttatctccattcacgccttctggaaagggctgccaaaatgaacgatgcctttggagggggttccttgacagcgttgcctgtgatcgagacccaggcaggagatgtgtctgcgtatatcccaacaaacgtcatctctattactgacggtcagatatttcttgagaccgagctattctacaaaggcatcaggccagctattaatgtaggcctctccgtatcacgcgtaggttctgctgcccagacacgcgctatgaagcaggtcgccggaactatgaaactggaactggctcaataccgtgaggtagccgcattcgcacaattcgggagcgatttggacgcagcaacgcagcagctgctcagtcggggtgtgcgtctcactgagctgctgaaacaaggtcagtatagtccaatggctatagaggaacaagtggcggtgatctacgccggtgtgcgaggctatctggacaaattggagcccagtaaaatcacaaagttcgagaatgcttttctgtcgcatgttgtgtcccagcaccaggctctattgggcacaatccgagcggacgggaagatctccgagcagagcgatgcaaagctcaaagaaattgttactaacttccttgcaggtttcgaagcatag

SEQ ID NO: 318816 - DNA, 1512 bp, Artificial Sequence
  derived and/or modified sequence
atgagcagcatcctggaggagagaatcctgggcgccgacaccagcgtggacctggaggagaccggcagagtgctgagcatcggcgacggcatcgccagagtgcacggcctgagaaacgtgcaggccgaggagatggtggagttcagcagcggcctgaagggcatgagcctgaacctggagcccgacaacgtgggcgtggtggtgttcggcaacgacaagctgatcaaggagggcgacatcgtgaagagaaccggcgccatcgtggacgtgcccgtgggcgaggagctgctgggcagagtggtggacgccctgggcaacgccatcgacggcaagggccccatcggcagcaagaccagaagaagagtgggcctgaaggcccccggcatcatccccagaatcagcgtgagagagcccatgcagaccggcatcaaggccgtggacagcctggtgcccatcggcagaggccagagagagctgatcatcggcgacagacagaccggcaagaccagcatcgccatcgacaccatcatcaaccagaagagattcaacgacggcagcgacgagaagaagaagctgtactgcatctacgtggccatcggccagaagagaagcaccgtggcccagctggtgaagagactgaccgacgccgacgccatgaagtacaccatcgtggtgagcgccaccgccagcgacgccgcccccctgcagtacctggccccctacagcggctgcagcatgggcgagtacttcagagacaacggcaagcacgccctgatcatctacgacgacctgagcaagcaggccgtggcctacagacagatgagcctgctgctgagaagaccccccggcagagaggcctaccccggcgacgtgttctacctgcacagcagactgctggagagagccgccaagatgaacgacgccttcggcggcggcagcctgaccgccctgcccgtgatcgagacccaggccggcgacgtgagcgcctacatccccaccaacgtgatcagcatcaccgacggccagatcttcctggagaccgagctgttctacaagggcatcagacccgccatcaacgtgggcctgagcgtgagcagagtgggcagcgccgcccagaccagagccatgaagcaggtggccggcaccatgaagctggagctggcccagtacagagaggtggccgccttcgcccagttcggcagcgacctggacgccgccacccagcagctgctgagcagaggcgtgagactgaccgagctgctgaagcagggccagtacagccccatggccatcgaggagcaggtggccgtgatctacgccggcgtgagaggctacctggacaagctggagcccagcaagatcaccaagttcgagaacgccttcctgagccacgtggtgagccagcaccaggccctgctgggcaccatcagagccgacggcaagatcagcgagcagagcgacgccaagctgaaggagatcgtgaccaacttcctggccggcttcgaggcctag

SEQ ID NO: 318817 - protein, 1251 aa, Artificial Sequence
  derived and/or modified sequence
MSTERDSETTFDEDSQPNDEVVPYSDDETEDELDDQGSAVEPEQNRVNREAEENREPFRKECTWQVKANDRKYHEQPHFMNTKFLCIKESKYANNAIKTYKYNAFTFIPMNLFEQFKRAANLYFLALLILQAVPQISTLAWYTTLVPLLVVLGVTAIKDLVDDVARHKMDKEINNRTCEVIKDGRFKVAKWKEIQVGDVIRLKKNDFVPADILLLSSSEPNSLCYVETAELDGETNLKFKMSLEITDQYLQREDTLATFDGFIECEEPNNRLDKFTGTLFWRNTSFPLDADKILLRGCVIRNTDFCHGLVIFAGADTKIMKNSGKTRFKRTKIDYLMNYMVYTIFVVLILLSAGLAIGHAYWEAQVGNSSWYLYDGEDDTPSYRGFLIFWGYIIVLNTMVPISLYVSVEVIRLGQSHFINWDLQMYYAEKDTPAKARTTTLNEQLGQIHYIFSDKTGTLTQNIMTFKKCCINGQIYGDHRDASQHNHNKIEQVDFSWNTYADGKLAFYDHYLIEQIQSGKEPEVRQFFFLLAVCHTVMVDRTDGQLNYQAASPDEGALVNAARNFGFAFLARTQNTITISELGTERTYNVLAILDFNSDRKRMSIIVRTPEGNIKLYCKGADTVIYERLHRMNPTKQETQDALDIFANETLRTLCLCYKEIEEKEFTEWNKKFMAASVASTNRDEALDKVYEEIEKDLILLGATAIEDKLQDGVPETISKLAKADIKIWVLTGDKKETAENIGFACELLTEDTTICYGEDINSLLHARMENQRNRGGVYAKFAPPVQESFFPPGGNRALIITGSWLNEILLEKKTKRNKILKLKFPRTEEERRMRTQSKRRLEAKKEQRQKNFVDLACECSAVICCRVTPKQKAMVVDLVKRYKKAITLAIGDGANDVNMIKTAHIGVGISGQEGMQAVMSSDYSFAQFRYLQRLLLVHGRWSYIRMCKFLRYFFYKNFAFTLVHFWYSFFNGYSAQTAYEDWFITLYNVLYTSLPVLLMGLLDQDVSDKLSLRFPGLYIVGQRDLLFNYKRFFVSLLHGVLTSMILFFIPLGAYLQTVGQDGEAPSDYQSFAVTIASALVITVNFQIGLDTSYWTFVNAFSIFGSIALYFGIMFDFHSAGIHVLFPSAFQFTGTASNALRQPYIWLTIILAVAVCLLPVVAIRFLSMTIWPSESDKIQKHRKRLKAEEQWQRRQQVFRRGVSTRRSAYAFSHQRGYADLISSGRSIRKKRSPLDAIVADGTAEYRRTGDS

SEQ ID NO: 318818 - DNA, 3753 bp, Artificial Sequence
  derived and/or modified sequence
atgagcaccgagcgcgacagcgagaccaccttcgacgaggacagccagcccaacgacgaggtggtgccctacagcgacgacgagaccgaggacgagctggacgaccagggcagcgccgtggagcccgagcagaaccgcgtgaaccgcgaggccgaggagaaccgcgagcccttccgcaaggagtgcacctggcaggtgaaggccaacgaccgcaagtaccacgagcagccccacttcatgaacaccaagttcctgtgcatcaaggagagcaagtacgccaacaacgccatcaagacctacaagtacaacgccttcaccttcatccccatgaacctgttcgagcagttcaagcgcgccgccaacctgtacttcctggccctgctgatcctgcaggccgtgccccagatcagcaccctggcctggtacaccaccctggtgcccctgctggtggtgctgggcgtgaccgccatcaaggacctggtggacgacgtggcccgccacaagatggacaaggagatcaacaaccgcacctgcgaggtgatcaaggacggccgcttcaaggtggccaagtggaaggagatccaggtgggcgacgtgatccgcctgaagaagaacgacttcgtgcccgccgacatcctgctgctgagcagcagcgagcccaacagcctgtgctacgtggagaccgccgagctggacggcgagaccaacctgaagttcaagatgagcctggagatcaccgaccagtacctgcagcgcgaggacaccctggccaccttcgacggcttcatcgagtgcgaggagcccaacaaccgcctggacaagttcaccggcaccctgttctggcgcaacaccagcttccccctggacgccgacaagatcctgctgcgcggctgcgtgatccgcaacaccgacttctgccacggcctggtgatcttcgccggcgccgacaccaagatcatgaagaacagcggcaagacccgcttcaagcgcaccaagatcgactacctgatgaactacatggtgtacaccatcttcgtggtgctgatcctgctgagcgccggcctggccatcggccacgcctactgggaggcccaggtgggcaacagcagctggtacctgtacgacggcgaggacgacacccccagctaccgcggcttcctgatcttctggggctacatcatcgtgctgaacaccatggtgcccatcagcctgtacgtgagcgtggaggtgatccgcctgggccagagccacttcatcaactgggacctgcagatgtactacgccgagaaggacacccccgccaaggcccgcaccaccaccctgaacgagcagctgggccagatccactacatcttcagcgacaagaccggcaccctgacccagaacatcatgaccttcaagaagtgctgcatcaacggccagatctacggcgaccaccgcgacgccagccagcacaaccacaacaagatcgagcaggtggacttcagctggaacacctacgccgacggcaagctggccttctacgaccactacctgatcgagcagatccagagcggcaaggagcccgaggtgcgccagttcttcttcctgctggccgtgtgccacaccgtgatggtggaccgcaccgacggccagctgaactaccaggccgccagccccgacgagggcgccctggtgaacgccgcccgcaacttcggcttcgccttcctggcccgcacccagaacaccatcaccatcagcgagctgggcaccgagcgcacctacaacgtgctggccatcctggacttcaacagcgaccgcaagcgcatgagcatcatcgtgcgcacccccgagggcaacatcaagctgtactgcaagggcgccgacaccgtgatctacgagcgcctgcaccgcatgaaccccaccaagcaggagacccaggacgccctggacatcttcgccaacgagaccctgcgcaccctgtgcctgtgctacaaggagatcgaggagaaggagttcaccgagtggaacaagaagttcatggccgccagcgtggccagcaccaaccgcgacgaggccctggacaaggtgtacgaggagatcgagaaggacctgatcctgctgggcgccaccgccatcgaggacaagctgcaggacggcgtgcccgagaccatcagcaagctggccaaggccgacatcaagatctgggtgctgaccggcgacaagaaggagaccgccgagaacatcggcttcgcctgcgagctgctgaccgaggacaccaccatctgctacggcgaggacatcaacagcctgctgcacgcccgcatggagaaccagcgcaaccgcggcggcgtgtacgccaagttcgccccccccgtgcaggagagcttcttcccccccggcggcaaccgcgccctgatcatcaccggcagctggctgaacgagatcctgctggagaagaagaccaagcgcaacaagatcctgaagctgaagttcccccgcaccgaggaggagcgccgcatgcgcacccagagcaagcgccgcctggaggccaagaaggagcagcgccagaagaacttcgtggacctggcctgcgagtgcagcgccgtgatctgctgccgcgtgacccccaagcagaaggccatggtggtggacctggtgaagcgctacaagaaggccatcaccctggccatcggcgacggcgccaacgacgtgaacatgatcaagaccgcccacatcggcgtgggcatcagcggccaggagggcatgcaggccgtgatgagcagcgactacagcttcgcccagttccgctacctgcagcgcctgctgctggtgcacggccgctggagctacatccgcatgtgcaagttcctgcgctacttcttctacaagaacttcgccttcaccctggtgcacttctggtacagcttcttcaacggctacagcgcccagaccgcctacgaggactggttcatcaccctgtacaacgtgctgtacaccagcctgcccgtgctgctgatgggcctgctggaccaggacgtgagcgacaagctgagcctgcgcttccccggcctgtacatcgtgggccagcgcgacctgctgttcaactacaagcgcttcttcgtgagcctgctgcacggcgtgctgaccagcatgatcctgttcttcatccccctgggcgcctacctgcagaccgtgggccaggacggcgaggcccccagcgactaccagagcttcgccgtgaccatcgccagcgccctggtgatcaccgtgaacttccagatcggcctggacaccagctactggaccttcgtgaacgccttcagcatcttcggcagcatcgccctgtacttcggcatcatgttcgacttccacagcgccggcatccacgtgctgttccccagcgccttccagttcaccggcaccgccagcaacgccctgcgccagccctacatctggctgaccatcatcctggccgtggccgtgtgcctgctgcccgtggtggccatccgcttcctgagcatgaccatctggcccagcgagagcgacaagatccagaagcaccgcaagcgcctgaaggccgaggagcagtggcagcgccgccagcaggtgttccgccgcggcgtgagcacccgccgcagcgcctacgccttcagccaccagcgcggctacgccgacctgatcagcagcggccgcagcatccgcaagaagcgcagccccctggacgccatcgtggccgacggcaccgccgagtaccgccgcaccggcgacagc

SEQ ID NO: 318819 - DNA, 3756 bp, Artificial Sequence
  derived and/or modified sequence
atgagcaccgagagagacagcgagaccaccttcgacgaggacagccagcccaacgacgaggtggtgccctacagcgacgacgagaccgaggacgagctggacgaccagggcagcgccgtggagcccgagcagaacagagtgaacagagaggccgaggagaacagagagcccttcagaaaggagtgcacctggcaggtgaaggccaacgacagaaagtaccacgagcagccccacttcatgaacaccaagttcctgtgcatcaaggagagcaagtacgccaacaacgccatcaagacctacaagtacaacgccttcaccttcatccccatgaacctgttcgagcagttcaagagagccgccaacctgtacttcctggccctgctgatcctgcaggccgtgccccagatcagcaccctggcctggtacaccaccctggtgcccctgctggtggtgctgggcgtgaccgccatcaaggacctggtggacgacgtggccagacacaagatggacaaggagatcaacaacagaacctgcgaggtgatcaaggacggcagattcaaggtggccaagtggaaggagatccaggtgggcgacgtgatcagactgaagaagaacgacttcgtgcccgccgacatcctgctgctgagcagcagcgagcccaacagcctgtgctacgtggagaccgccgagctggacggcgagaccaacctgaagttcaagatgagcctggagatcaccgaccagtacctgcagagagaggacaccctggccaccttcgacggcttcatcgagtgcgaggagcccaacaacagactggacaagttcaccggcaccctgttctggagaaacaccagcttccccctggacgccgacaagatcctgctgagaggctgcgtgatcagaaacaccgacttctgccacggcctggtgatcttcgccggcgccgacaccaagatcatgaagaacagcggcaagaccagattcaagagaaccaagatcgactacctgatgaactacatggtgtacaccatcttcgtggtgctgatcctgctgagcgccggcctggccatcggccacgcctactgggaggcccaggtgggcaacagcagctggtacctgtacgacggcgaggacgacacccccagctacagaggcttcctgatcttctggggctacatcatcgtgctgaacaccatggtgcccatcagcctgtacgtgagcgtggaggtgatcagactgggccagagccacttcatcaactgggacctgcagatgtactacgccgagaaggacacccccgccaaggccagaaccaccaccctgaacgagcagctgggccagatccactacatcttcagcgacaagaccggcaccctgacccagaacatcatgaccttcaagaagtgctgcatcaacggccagatctacggcgaccacagagacgccagccagcacaaccacaacaagatcgagcaggtggacttcagctggaacacctacgccgacggcaagctggccttctacgaccactacctgatcgagcagatccagagcggcaaggagcccgaggtgagacagttcttcttcctgctggccgtgtgccacaccgtgatggtggacagaaccgacggccagctgaactaccaggccgccagccccgacgagggcgccctggtgaacgccgccagaaacttcggcttcgccttcctggccagaacccagaacaccatcaccatcagcgagctgggcaccgagagaacctacaacgtgctggccatcctggacttcaacagcgacagaaagagaatgagcatcatcgtgagaacccccgagggcaacatcaagctgtactgcaagggcgccgacaccgtgatctacgagagactgcacagaatgaaccccaccaagcaggagacccaggacgccctggacatcttcgccaacgagaccctgagaaccctgtgcctgtgctacaaggagatcgaggagaaggagttcaccgagtggaacaagaagttcatggccgccagcgtggccagcaccaacagagacgaggccctggacaaggtgtacgaggagatcgagaaggacctgatcctgctgggcgccaccgccatcgaggacaagctgcaggacggcgtgcccgagaccatcagcaagctggccaaggccgacatcaagatctgggtgctgaccggcgacaagaaggagaccgccgagaacatcggcttcgcctgcgagctgctgaccgaggacaccaccatctgctacggcgaggacatcaacagcctgctgcacgccagaatggagaaccagagaaacagaggcggcgtgtacgccaagttcgccccccccgtgcaggagagcttcttcccccccggcggcaacagagccctgatcatcaccggcagctggctgaacgagatcctgctggagaagaagaccaagagaaacaagatcctgaagctgaagttccccagaaccgaggaggagagaagaatgagaacccagagcaagagaagactggaggccaagaaggagcagagacagaagaacttcgtggacctggcctgcgagtgcagcgccgtgatctgctgcagagtgacccccaagcagaaggccatggtggtggacctggtgaagagatacaagaaggccatcaccctggccatcggcgacggcgccaacgacgtgaacatgatcaagaccgcccacatcggcgtgggcatcagcggccaggagggcatgcaggccgtgatgagcagcgactacagcttcgcccagttcagatacctgcagagactgctgctggtgcacggcagatggagctacatcagaatgtgcaagttcctgagatacttcttctacaagaacttcgccttcaccctggtgcacttctggtacagcttcttcaacggctacagcgcccagaccgcctacgaggactggttcatcaccctgtacaacgtgctgtacaccagcctgcccgtgctgctgatgggcctgctggaccaggacgtgagcgacaagctgagcctgagattccccggcctgtacatcgtgggccagagagacctgctgttcaactacaagagattcttcgtgagcctgctgcacggcgtgctgaccagcatgatcctgttcttcatccccctgggcgcctacctgcagaccgtgggccaggacggcgaggcccccagcgactaccagagcttcgccgtgaccatcgccagcgccctggtgatcaccgtgaacttccagatcggcctggacaccagctactggaccttcgtgaacgccttcagcatcttcggcagcatcgccctgtacttcggcatcatgttcgacttccacagcgccggcatccacgtgctgttccccagcgccttccagttcaccggcaccgccagcaacgccctgagacagccctacatctggctgaccatcatcctggccgtggccgtgtgcctgctgcccgtggtggccatcagattcctgagcatgaccatctggcccagcgagagcgacaagatccagaagcacagaaagagactgaaggccgaggagcagtggcagagaagacagcaggtgttcagaagaggcgtgagcaccagaagaagcgcctacgccttcagccaccagagaggctacgccgacctgatcagcagcggcagaagcatcagaaagaagagaagccccctggacgccatcgtggccgacggcaccgccgagtacagaagaaccggcgacagctag

SEQ ID NO: 318820 - DNA, 3756 bp, Artificial Sequence
  derived and/or modified sequence
atgtcaaccgaacgcgactctgagacaacgttcgacgaggactctcagcccaatgatgaagtggtcccctattctgacgacgagaccgaagatgagctcgatgatcagggatcagccgtagagcccgaacaaaaccgcgtcaacagggaggccgaagagaatagggaaccctttcgcaaagaatgtacatggcaggttaaggccaacgatcggaaatatcacgagcagccacatttcatgaacactaaattcctatgcatcaaggaaagtaagtacgcaaataacgccataaagacatacaagtacaatgcgttcactttcatacccatgaacctgtttgagcagtttaagagggcagccaatctgtacttcttggccctgttaatcctgcaagccgttcctcagatttcaacactcgcctggtatacgacactggtgcccctgctggtcgtcctgggagtgaccgccattaaagatctcgtggatgatgtggcccgacacaagatggacaaggaaatcaataatcgcacatgcgaggttataaaggatggtagatttaaagtggcaaagtggaaggagattcaagtgggtgatgtcatccggctgaaaaagaatgatttcgtgccagcggatattctgctcctgtctagcagcgagccaaattcgctttgctacgtagagactgcagaattggacggcgagaccaacttgaagtttaaaatgagcttggagattacagaccagtatctgcagagggaggatactcttgctacttttgatggctttatcgaatgcgaggaacctaataaccgcctggataaattcactggaacattgttctggagaaacaccagctttccattagatgctgataagatcttactgcggggttgcgttatccgcaacaccgacttctgtcacggtctcgtgatcttcgccggggccgataccaagatcatgaaaaacagtggtaaaaccagattcaaaagaactaagattgattacttaatgaactacatggtttacactatcttcgtggtactgatccttctctcagccggactcgccatcggccatgcctattgggaggctcaagtgggcaactcctcctggtatctatatgacggcgaggatgacacgcctagctaccgcggatttctgatcttctggggatatataatcgttctcaacacgatggtgcctatatccttgtatgttagtgttgaagtgatacggctgggacagtcacatttcattaactgggacctacagatgtactatgcagaaaaagacaccccggctaaggcccgcacgactaccctgaatgaacagctcgggcagattcactacatctttagcgacaagactggcactttgacacagaacattatgaccttcaaaaaatgttgcatcaatggccaaatttatggggatcaccgagatgcgagccaacacaaccacaacaagatcgagcaggtggacttttcatggaacacctacgcagacggaaaactggctttctacgaccactacctgatcgaacagatccagtcgggtaaagagccggaggtgagacagttcttctttcttctggctgtgtgtcatactgttatggtggacaggaccgatgggcaattgaattaccaggccgcgagtcccgacgaaggggcgctcgtgaatgcagcccgaaatttcggctttgcctttctggccaggacacagaatacaatcacaattagtgagctggggacagaacggacctataatgtccttgcaattcttgattttaattctgaccggaaacggatgagcattattgttcggacacctgagggtaatatcaagctctactgtaagggcgccgacacagtgatctacgagaggcttcaccgtatgaacccaaccaaacaagaaactcaagatgctttagacatttttgccaatgagactctgagaactctttgtctgtgctacaaagaaatcgaagagaaggagtttaccgagtggaacaagaagtttatggcggcgtcagtggcttcaaccaaccgagacgaggcgctggataaagtgtatgaggagattgaaaaggacctcattttactgggcgcgacagcaattgaggataagttgcaggatggggtacccgagaccatctcaaagctggctaaggccgacattaaaatttgggtcttgaccggagacaaaaaagagaccgctgaaaatatcggatttgcgtgtgaactcctcactgaggacacaactatctgttacggggaggacattaactcccttttacatgctcgaatggagaaccagcggaatagaggcggcgtttacgccaagttcgcacctccggttcaggagagcttcttcccaccaggaggaaatagagcactgatcatcactggttcttggctgaatgaaatcctcctggaaaagaagacaaaacggaataagattctcaagctgaaattccctagaaccgaggaggagagacgcatgaggacacagtcaaaacgacggttagaggccaagaaggagcagagacagaaaaattttgtggatctggcatgcgaatgctcggctgtgatttgttgccgggtgactcctaagcagaaagccatggttgtggaccttgtgaagcgctacaaaaaggcgataacactcgccataggcgacggtgccaatgacgtgaatatgatcaaaacagcccacatcggcgtggggatctcagggcaggaggggatgcaggctgtcatgtcatcagactactctttcgcccaatttaggtatttgcagcgcctgcttctggtgcatggtaggtggagttatatcagaatgtgcaaattcctgcggtatttcttctacaagaattttgcattcaccctggttcacttttggtactccttcttcaacggttacagtgcccagaccgcttatgaagactggtttattaccctttacaacgtgttgtacacaagtctgccagttctgctaatgggacttctggaccaggatgtgtccgataagctgtccctccgctttcctggactttacatcgtcgggcagcgcgatcttctgttcaactataagcgatttttcgtgtctctgttgcatggagtacttacgtccatgattctgttctttattcctttgggagcttatctacaaaccgtaggacaggacggcgaggccccatccgattatcagagcttcgccgtgactatcgcgagcgcccttgtcattaccgtgaatttccagatcggattggatacctcctactggacatttgtgaatgcgttctcaatattcggatctatcgccctgtattttggcatcatgttcgacttccacagcgcggggattcatgtgttgtttccatctgcattccaattcaccggaacggcttctaacgctctccgacagccctacatttggcttaccataatactggccgtcgcagtatgcctgctacctgttgtagctattagattcttgtccatgacgatctggccctccgagagtgacaaaattcagaagcaccggaaacgcctgaaagccgaggagcagtggcaaagaaggcagcaagtgtttcgtcggggtgtgagtacccggaggtctgcatatgccttctctcatcagagagggtatgccgatctaatttctagtggcagatctattcggaagaaacgctcacccttagacgccattgtggcagacggcaccgccgagtatcggcgaaccggcgatagctag

SEQ ID NO: 318821 - DNA, 3756 bp, Artificial Sequence
  derived and/or modified sequence
atgtccaccgaaagggacagtgaaacgacttttgacgaagacagccagcccaatgatgaagtggtgccgtactcggacgacgaaacggaggacgagctcgacgaccaagggtctgctgtcgagcctgagcaaaatagagttaaccgggaggccgaggaaaaccgcgagccgttccgaaaggaatgtacatggcaagtgaaagcgaacgatagaaagtaccacgagcaaccccactttatgaataccaagttcctctgtattaaggagagcaagtatgccaacaacgccattaagacctataaatacaacgcattcacatttatccccatgaacctgtttgaacagtttaagcgtgcagccaacttgtacttcctggctctgctgatactgcaggccgtccctcagatatctaccctcgcatggtacacgacattggtcccactgctggtcgtgctcggagtgaccgctataaaggacctggttgacgacgtggcgcggcataaaatggataaagaaatcaataaccgaacatgtgaggtcatcaaggacggtaggttcaaggttgctaaatggaaggagatccaggtgggagacgttatccgattaaagaagaacgatttcgttcctgctgacatcctcctactctcaagcagcgaaccaaatagcctgtgttacgtggaaacagccgaattggacggcgaaactaacctcaagtttaaaatgagcctggaaatcacagaccaatacctccagcgggaggacacattggcaacattcgacggtttcattgagtgtgaggagccaaataaccgcctggataagttcactggcacactgttttggcggaatacaagctttccgctggacgccgacaagattctcctgcgcggctgcgtgatccgaaacactgacttttgtcacggattagtgattttcgctggagccgacacaaaaatcatgaaaaactcaggcaagacaagatttaaaagaactaaaattgattaccttatgaattatatggtatacacaatcttcgtggtgctgatcctgttgagcgcgggcttggctattgggcacgcctattgggaggcacaagttggaaactcctcatggtacctgtacgatggtgaggacgacactccaagctacagaggtttccttattttctggggttatattatagtgctgaatacaatggtacctatttctctctatgtgtctgtggaggtcattcggcttggtcagagccacttcattaattgggacttacaaatgtactatgccgaaaaggacacacccgcgaaggctcggaccacaacccttaatgagcagctcgggcaaatacattacatctttagcgacaagacaggcactctcactcaaaacataatgactttcaagaagtgttgtatcaacggccagatttacggtgatcaccgggatgcttcgcagcataaccataataaaattgagcaggtggacttcagctggaacacttatgccgacggaaaactcgctttctatgatcactatctaatcgagcaaatccagagcggaaaagaacccgaggtcagacaattttttttcctactcgccgtgtgccacaccgtgatggttgaccgcactgacggtcaactcaactaccaggccgcctcacctgatgagggcgctcttgtcaatgccgcaaggaacttcggatttgctttcctcgctcgaactcagaatacgattaccatcagcgaattgggaacggaacgcacttacaatgttctggccatcttggatttcaacagcgaccgcaagcgtatgtcaataatcgtcaggacacctgaaggaaacattaaattatattgtaaaggggccgatacagtcatctacgaacgcttgcaccggatgaatcctaccaagcaggagacacaggatgctctggacatcttcgccaatgagaccttgcgtactttgtgcctgtgctacaaggagatcgaggagaaggagtttacagagtggaacaaaaagtttatggcggccagtgttgctagcactaacagagatgaggccctagacaaggtctacgaagaaattgagaaggacttgattcttctgggggccacagctatcgaagacaagctccaagacggcgtccccgaaactatttctaagctcgccaaagccgatatcaagatctgggtgctcacaggagataaaaaagagacagctgaaaatatcgggtttgcgtgtgagctgctcacagaagacaccactatctgttacggagaggatatcaactctctacttcatgcaagaatggaaaatcaacgcaatagaggtggcgtttacgctaaattcgccccccctgttcaggagtccttttttccgcctggaggcaacagagctcttattattacagggtcctggttgaatgagatcctgttagaaaagaaaaccaagcggaataagatcctgaaacttaaatttcctcggacggaagaagagcgtcggatgaggacccagtctaagcgtagactcgaagccaagaaagaacagagacagaaaaattttgttgacctcgcttgcgagtgctccgccgttatctgctgccgggtgacccccaaacaaaaggccatggtcgtggacctggtcaaacgctataaaaaggctataaccctggctatcggggatggtgctaacgatgtcaatatgattaagactgcccacatcggggttggtatcagcggccaggagggtatgcaggccgtaatgtcttcggactactcattcgcccagttcaggtacctgcagcgcctgctgctagtgcacggaaggtggagctacatcaggatgtgtaagtttctccgatattttttttacaaaaattttgcctttacactggtccatttttggtatagtttctttaacggatatagcgcacaaacagcctatgaagactggtttattactctatacaacgttttgtacacttctctgcccgtcctcctgatgggcctgctggatcaggacgtcagcgataagctgagcctgcgattcccaggtctgtacattgtcggacaaagggacttgctgtttaattacaagcgcttctttgtcagcttgctgcacggggtcctgacatcaatgatacttttttttatacccctcggagcttatctccagacagtcggccaggatggagaagcgcccagcgactaccaatcttttgcggttacaatcgcctcggccctcgtgattacagtaaacttccagatcggcctggacacttcttactggacgttcgttaatgcattctcaatctttggttcgattgccttgtacttcggcatcatgttcgacttccactccgctgggatccacgtgttgttcccttcagcctttcaattcacaggcacagccagtaacgcccttagacagccctatatctggttgactattatcctcgcagtggcagtatgcctgttgccggttgtcgcaattaggtttctgagcatgaccatctggccatccgaaagcgataagatccagaagcacaggaagagactgaaggctgaggaacagtggcagagaaggcagcaggtgttcaggcgtggggtgagcactagaaggtctgcctatgctttttcccaccagcgcggctatgctgatctaatctcctccggacggtctattagaaagaaacggtctccactggacgccattgtggctgacggcaccgccgagtacaggcggacaggcgattcatag

SEQ ID NO: 318822 - DNA, 5818 bp, Artificial Sequence
  derived and/or modified sequence
atgagtacagaaagagactcagaaacgacatttgacgaggattctcagcctaatgacgaagtggttccctacagtgatgatgaaacagaagatgaacttgatgaccaggggtctgctgttgaaccagaacaaaaccgagtcaacagggaagcagaggagaaccgggagccattcagaaaagaatgtacatggcaagtcaaagcaaacgatcgcaagtaccacgaacaacctcactttatgaacacaaaattcttgtgtattaaggagagtaaatatgcgaataatgcaattaaaacatacaagtacaacgcatttacctttataccaatgaatctgtttgagcagtttaagagagcagccaatttatatttcctggctcttcttatcttacaggcagttcctcaaatctctaccctggcttggtacaccacactagtgcccctgcttgtggtgctgggcgtcactgcaatcaaagacctggtggacgatgtggctcgccataaaatggataaggaaatcaacaataggacgtgtgaagtcattaaggatggcaggttcaaagttgctaagtggaaagaaattcaagttggagacgtcattcgtctgaaaaaaaatgattttgttccagctgacattctcctgctgtctagctctgagcctaacagcctctgctatgtggaaacagcagaactggatggagaaaccaatttaaaatttaagatgtcacttgaaatcacagaccagtacctccaaagagaagatacattggctacatttgatggttttattgaatgtgaagaacccaataacagactagataagtttacaggaacactattttggagaaacacaagttttcctttggatgctgataaaattttgttacgtggctgtgtaattaggaacaccgatttctgccacggcttagtcatttttgcaggtgctgacactaaaataatgaagaatagtgggaaaaccagatttaaaagaactaaaattgattacttgatgaactacatggtttacacgatctttgttgttcttattctgctttctgctggtcttgccatcggccatgcttattgggaagcacaggtgggcaattcctcttggtacctctatgatggagaagacgatacaccctcctaccgtggattcctcattttctggggctatatcattgttctcaacaccatggtacccatctctctctatgtcagcgtggaagtgattcgtcttggacagagtcacttcatcaactgggacctgcaaatgtactatgctgagaaggacacacccgcaaaagctagaaccaccacactcaatgaacagctcgggcagatccattatatcttctctgataagacggggacactcacacaaaatatcatgacctttaaaaagtgctgtatcaacgggcagatatatggggaccatcgggatgcctctcaacacaaccacaacaaaatagagcaagttgattttagctggaatacatatgctgatgggaagcttgcattttatgaccactatcttattgagcaaatccagtcagggaaagagccagaagtacgacagttcttcttcttgctcgcagtttgccacacagtcatggtggataggactgatggtcagctcaactaccaggcagcctctcccgatgaaggtgccctggtaaacgctgccaggaactttggctttgccttcctcgccaggacccagaacaccatcaccatcagtgaactgggcactgaaaggacttacaatgttcttgccattttggacttcaacagtgaccggaagcgaatgtctatcattgtaagaaccccagaaggcaatatcaagctttactgtaaaggtgctgacactgttatttatgaacggttacatcgaatgaatcctactaagcaagaaacacaggatgccctggatatctttgcaaatgaaactcttagaaccctatgcctttgctacaaggaaattgaagaaaaagaatttacagaatggaataaaaagtttatggctgccagtgtggcctccaccaaccgggacgaagctctggataaagtatatgaggagattgaaaaagacttaattctcctgggagctacagctattgaagacaagctacaggatggagttccagaaaccatttcaaaacttgcaaaagctgacattaagatctgggtgcttactggagacaaaaaggaaactgctgaaaatataggatttgcttgtgaacttctgactgaagacaccaccatctgctatggggaggatattaattctcttcttcatgcaaggatggaaaaccagaggaatagaggtggcgtctacgcaaagtttgcacctcctgtgcaggaatctttttttccacccggtggaaaccgtgccttaatcatcactggttcttggttgaatgaaattcttctcgagaaaaagaccaagagaaataagattctgaagctgaagttcccaagaacagaagaagaaagacggatgcggacccaaagtaaaaggaggctagaagctaagaaagagcagcggcagaaaaactttgtggacctggcctgcgagtgcagcgcagtcatctgctgccgcgtcacccccaagcagaaggccatggtggtggacctggtgaagaggtacaagaaagccatcacgctggccatcggagatggggccaatgacgtgaacatgatcaaaactgcccacattggcgttggaataagtggacaagaaggaatgcaagctgtcatgtcgagtgactattcctttgctcagttccgatatctgcagaggctactgctggtgcatggccgatggtcttacataaggatgtgcaagttcctacgatacttcttttacaaaaactttgcctttactttggttcatttctggtactccttcttcaatggctactctgcgcagactgcatacgaggattggttcatcaccctctacaacgtgctgtacaccagcctgcccgtgctcctcatggggctgctcgaccaggatgtgagtgacaaactgagcctccgattccctgggttatacatagtgggacaaagagacttactattcaactataagagattctttgtaagcttgttgcatggggtcctaacatcgatgatcctcttcttcatacctcttggagcttatctgcaaaccgtagggcaggatggagaggcaccttccgactaccagtcttttgccgtcaccattgcctctgctcttgtaataacagtcaatttccagattggcttggatacttcttattggacttttgtgaatgctttttcaatttttggaagcattgcactttattttggcatcatgtttgactttcatagtgctggaatacatgttctctttccatctgcatttcaatttacaggcacagcttcaaacgctctgagacagccatacatttggttaactatcatcctggctgttgctgtgtgcttactacccgtcgttgccattcgattcctgtcaatgaccatctggccatcagaaagtgataagatccagaagcatcgcaagcggttgaaggcggaggagcagtggcagcgacggcagcaggtgttccgccggggcgtgtcaacgcggcgctcggcctacgccttctcgcaccagcggggctacgcggacctcatctcctccgggcgcagcatccgcaagaagcgctcgccgcttgatgccatcgtggcggatggcaccgcggagtacaggcgcaccggggacagctgatcccttacccccaggctgggatgcggccacaaagcacgtctatttttttatgaaagactctcaggactttgtgtgtgtgtgtgaattgcattcatcacaaagatattgaagacaataaataatctttataacaaactccttgggttggactattaaacaatagcagagccaagaaataggacttttaaaagtcctattattcggccgggcgtggtggctcaggtctgtaatcccagcactttaggaggctgaggaggggagatcacctgaggccaggagttcgagaccagcccagccaacatggtgaaaccctgtctctaccataaattaaaaattagccgggcttggtggtgggcacccgtaatcccacctatttgagaagctgaagcagaagaatcgcttgaacctgggagatggaggttacagtgagccgagattgcgccactgcactccagcctgggtgacagagcaagactctgtcttaagaaaaatttaaaaataggccgggcatggtggctcatgcctgtcatcctagcactttgggaggccaaggcaggtggatcacttgaggtcaggagaccagcccggccaacatggtgaaaccccatctctactaaaaatacaaaaattagctggaaatcgcttgaacctgggaggtggaggttccagtgagccgagatcgtggcactgcactccaacctgagcaacagagtgagacaccagctcaaaaaaaattttttaataataataaaagtcctattattcaactggttatgtacattatggttgaaagggaacgttttaatccagtctcaatccagggcaatagaattacaaagcatgttgtatttcagttcaaatggtattgtattataaaattacagttacattttcctttcggtgatcttcagcataatttcccagaggcccctttttcctccctataggccatcttattaacagattttaaaatttatagtaatgacaaatgacttatcagtgttcatcatctgaaagctaagtggttcgttcaatcactttttcaaagttgatagtagattgcatggtttcatgtttcctcatattggtttattaattctatttaatcaaggaaaataacttcagattccataaagtttcagtttatttttagtttactactaggtgagatagcacattacatacttttactatcaaatattattttagcagcttcccatagtaccaaatgatttgattccctactctcattttttaaagcatataaatatttatgggcttaaaaagggggtttttaaaaactgaggatatcagtaataaattgcagaatattttgcaaagctttcttttggaaagcaaacttttgtgcctgcctatatgcaaagtattttatcagggacttgaacaaagacctcactctttttcacttgtcttatgtcgagagaaaaggttattggcagccacattcctaagactggggaatggtgtgtccttttaaatttgaagataactttaggtaattatggaaactcctcaaagaggagaaagtaatttttttccagacatttttctcattctgtgtctttcacacactagtttccatagttcgagaattctgttttttaccattgggctgtgaatgttcacaatatcagtcctgttgaattcctatgaggtaatcacaatgtgtatatgttcattttctaggtatgataaaagaatgtatggctttttattctgtggaagtaaaatcctgaacgtttacaacttttccttaacttgtaaataaaaaattgtaagttttttctttttttacagaaaacttagcttgtgtaattctgttagtttcagatttctctcctgtttttgcaaattgtgggaaagattgacaatgcaaatgtgtcaaagacatactgttgggtgcaatattaacaattttaaatgcaaatttctttggataaattatttctatattctgtaaatctgagatttaatgtatattttgtttaaaaaaatgatttagtaaaatctttgaaaagtatgatcttctaaagtatttaaa

SEQ ID NO: 318823 - DNA, 5935 bp, Artificial Sequence
  derived and/or modified sequence
tggggccgggcgggcggcggcagcggccaggtgcgcagcgagcgctccgagcggcgcgcaccaggcggatgccccagccggggcccagcgaacgccaggtagttccaatttgccagcagaatgagtacagaaagagactcagaaacgacatttgacgaggattctcagcctaatgacgaagtggttccctacagtgatgatgaaacagaagatgaacttgatgaccaggggtctgctgttgaaccagaacaaaaccgagtcaacagggaagcagaggagaaccgggagccattcagaaaagaatgtacatggcaagtcaaagcaaacgatcgcaagtaccacgaacaacctcactttatgaacacaaaattcttgtgtattaaggagagtaaatatgcgaataatgcaattaaaacatacaagtacaacgcatttacctttataccaatgaatctgtttgagcagtttaagagagcagccaatttatatttcctggctcttcttatcttacaggcagttcctcaaatctctaccctggcttggtacaccacactagtgcccctgcttgtggtgctgggcgtcactgcaatcaaagacctggtggacgatgtggctcgccataaaatggataaggaaatcaacaataggacgtgtgaagtcattaaggatggcaggttcaaagttgctaagtggaaagaaattcaagttggagacgtcattcgtctgaaaaaaaatgattttgttccagctgacattctcctgctgtctagctctgagcctaacagcctctgctatgtggaaacagcagaactggatggagaaaccaatttaaaatttaagatgtcacttgaaatcacagaccagtacctccaaagagaagatacattggctacatttgatggttttattgaatgtgaagaacccaataacagactagataagtttacaggaacactattttggagaaacacaagttttcctttggatgctgataaaattttgttacgtggctgtgtaattaggaacaccgatttctgccacggcttagtcatttttgcaggtgctgacactaaaataatgaagaatagtgggaaaaccagatttaaaagaactaaaattgattacttgatgaactacatggtttacacgatctttgttgttcttattctgctttctgctggtcttgccatcggccatgcttattgggaagcacaggtgggcaattcctcttggtacctctatgatggagaagacgatacaccctcctaccgtggattcctcattttctggggctatatcattgttctcaacaccatggtacccatctctctctatgtcagcgtggaagtgattcgtcttggacagagtcacttcatcaactgggacctgcaaatgtactatgctgagaaggacacacccgcaaaagctagaaccaccacactcaatgaacagctcgggcagatccattatatcttctctgataagacggggacactcacacaaaatatcatgacctttaaaaagtgctgtatcaacgggcagatatatggggaccatcgggatgcctctcaacacaaccacaacaaaatagagcaagttgattttagctggaatacatatgctgatgggaagcttgcattttatgaccactatcttattgagcaaatccagtcagggaaagagccagaagtacgacagttcttcttcttgctcgcagtttgccacacagtcatggtggataggactgatggtcagctcaactaccaggcagcctctcccgatgaaggtgccctggtaaacgctgccaggaactttggctttgccttcctcgccaggacccagaacaccatcaccatcagtgaactgggcactgaaaggacttacaatgttcttgccattttggacttcaacagtgaccggaagcgaatgtctatcattgtaagaaccccagaaggcaatatcaagctttactgtaaaggtgctgacactgttatttatgaacggttacatcgaatgaatcctactaagcaagaaacacaggatgccctggatatctttgcaaatgaaactcttagaaccctatgcctttgctacaaggaaattgaagaaaaagaatttacagaatggaataaaaagtttatggctgccagtgtggcctccaccaaccgggacgaagctctggataaagtatatgaggagattgaaaaagacttaattctcctgggagctacagctattgaagacaagctacaggatggagttccagaaaccatttcaaaacttgcaaaagctgacattaagatctgggtgcttactggagacaaaaaggaaactgctgaaaatataggatttgcttgtgaacttctgactgaagacaccaccatctgctatggggaggatattaattctcttcttcatgcaaggatggaaaaccagaggaatagaggtggcgtctacgcaaagtttgcacctcctgtgcaggaatctttttttccacccggtggaaaccgtgccttaatcatcactggttcttggttgaatgaaattcttctcgagaaaaagaccaagagaaataagattctgaagctgaagttcccaagaacagaagaagaaagacggatgcggacccaaagtaaaaggaggctagaagctaagaaagagcagcggcagaaaaactttgtggacctggcctgcgagtgcagcgcagtcatctgctgccgcgtcacccccaagcagaaggccatggtggtggacctggtgaagaggtacaagaaagccatcacgctggccatcggagatggggccaatgacgtgaacatgatcaaaactgcccacattggcgttggaataagtggacaagaaggaatgcaagctgtcatgtcgagtgactattcctttgctcagttccgatatctgcagaggctactgctggtgcatggccgatggtcttacataaggatgtgcaagttcctacgatacttcttttacaaaaactttgcctttactttggttcatttctggtactccttcttcaatggctactctgcgcagactgcatacgaggattggttcatcaccctctacaacgtgctgtacaccagcctgcccgtgctcctcatggggctgctcgaccaggatgtgagtgacaaactgagcctccgattccctgggttatacatagtgggacaaagagacttactattcaactataagagattctttgtaagcttgttgcatggggtcctaacatcgatgatcctcttcttcatacctcttggagcttatctgcaaaccgtagggcaggatggagaggcaccttccgactaccagtcttttgccgtcaccattgcctctgctcttgtaataacagtcaatttccagattggcttggatacttcttattggacttttgtgaatgctttttcaatttttggaagcattgcactttattttggcatcatgtttgactttcatagtgctggaatacatgttctctttccatctgcatttcaatttacaggcacagcttcaaacgctctgagacagccatacatttggttaactatcatcctggctgttgctgtgtgcttactacccgtcgttgccattcgattcctgtcaatgaccatctggccatcagaaagtgataagatccagaagcatcgcaagcggttgaaggcggaggagcagtggcagcgacggcagcaggtgttccgccggggcgtgtcaacgcggcgctcggcctacgccttctcgcaccagcggggctacgcggacctcatctcctccgggcgcagcatccgcaagaagcgctcgccgcttgatgccatcgtggcggatggcaccgcggagtacaggcgcaccggggacagctgatcccttacccccaggctgggatgcggccacaaagcacgtctatttttttatgaaagactctcaggactttgtgtgtgtgtgtgaattgcattcatcacaaagatattgaagacaataaataatctttataacaaactccttgggttggactattaaacaatagcagagccaagaaataggacttttaaaagtcctattattcggccgggcgtggtggctcaggtctgtaatcccagcactttaggaggctgaggaggggagatcacctgaggccaggagttcgagaccagcccagccaacatggtgaaaccctgtctctaccataaattaaaaattagccgggcttggtggtgggcacccgtaatcccacctatttgagaagctgaagcagaagaatcgcttgaacctgggagatggaggttacagtgagccgagattgcgccactgcactccagcctgggtgacagagcaagactctgtcttaagaaaaatttaaaaataggccgggcatggtggctcatgcctgtcatcctagcactttgggaggccaaggcaggtggatcacttgaggtcaggagaccagcccggccaacatggtgaaaccccatctctactaaaaatacaaaaattagctggaaatcgcttgaacctgggaggtggaggttccagtgagccgagatcgtggcactgcactccaacctgagcaacagagtgagacaccagctcaaaaaaaattttttaataataataaaagtcctattattcaactggttatgtacattatggttgaaagggaacgttttaatccagtctcaatccagggcaatagaattacaaagcatgttgtatttcagttcaaatggtattgtattataaaattacagttacattttcctttcggtgatcttcagcataatttcccagaggcccctttttcctccctataggccatcttattaacagattttaaaatttatagtaatgacaaatgacttatcagtgttcatcatctgaaagctaagtggttcgttcaatcactttttcaaagttgatagtagattgcatggtttcatgtttcctcatattggtttattaattctatttaatcaaggaaaataacttcagattccataaagtttcagtttatttttagtttactactaggtgagatagcacattacatacttttactatcaaatattattttagcagcttcccatagtaccaaatgatttgattccctactctcattttttaaagcatataaatatttatgggcttaaaaagggggtttttaaaaactgaggatatcagtaataaattgcagaatattttgcaaagctttcttttggaaagcaaacttttgtgcctgcctatatgcaaagtattttatcagggacttgaacaaagacctcactctttttcacttgtcttatgtcgagagaaaaggttattggcagccacattcctaagactggggaatggtgtgtccttttaaatttgaagataactttaggtaattatggaaactcctcaaagaggagaaagtaatttttttccagacatttttctcattctgtgtctttcacacactagtttccatagttcgagaattctgttttttaccattgggctgtgaatgttcacaatatcagtcctgttgaattcctatgaggtaatcacaatgtgtatatgttcattttctaggtatgataaaagaatgtatggctttttattctgtggaagtaaaatcctgaacgtttacaacttttccttaacttgtaaataaaaaattgtaagttttttctttttttacagaaaacttagcttgtgtaattctgttagtttcagatttctctcctgtttttgcaaattgtgggaaagattgacaatgcaaatgtgtcaaagacatactgttgggtgcaatattaacaattttaaatgcaaatttctttggataaattatttctatattctgtaaatctgagatttaatgtatattttgtttaaaaaaatgatttagtaaaatctttgaaaagtatgatcttctaaagtattt

SEQ ID NO: 318824 - DNA, 3756 bp, Artificial Sequence
  derived and/or modified sequence
atgagcacagagcgggacagcgagaccacctttgatgaggacagccagcccaatgatgaggtggtgccctacagtgatgatgaaacagaagatgagctggatgaccagggcagcgctgtggagcctgagcagaacagagtgaaccgggaggccgaggagaaccgggagcccttcagaaaagaatgtacctggcaggtgaaggccaatgacaggaagtaccacgagcagccccacttcatgaacaccaagttcctgtgcatcaaggagagcaaatatgccaacaatgccatcaagacctacaagtacaatgccttcaccttcatccccatgaacctgtttgagcagttcaagagagctgccaacctgtacttcctggccctgctgatcctgcaggccgtgccccagatcagcaccctggcctggtacaccaccctggtgcccctgctggtggtgctgggcgtgacagccatcaaggacctggtggatgatgtggcccggcacaagatggacaaggagatcaacaacagaacctgtgaggtgatcaaggatggccgcttcaaggtggccaagtggaaggagatccaggtgggagatgtgatccggctgaagaagaatgactttgtgcctgctgacatcctgctgctgagcagcagcgagcccaacagcctgtgctacgtggagacagctgagctggatggagagaccaacctgaagttcaagatgagcctggagatcacagaccagtacctgcagcgggaggacaccctggccacctttgatggcttcattgaatgtgaggagcccaacaaccggctggacaagttcaccggcaccctcttctggaggaacaccagcttccccctggatgctgacaagatcctgctgcggggctgcgtcatccggaacacagacttctgccacggcctggtgatctttgctggagctgacaccaagatcatgaagaacagcggcaagacccgcttcaagaggaccaagattgactacctgatgaactacatggtgtacaccatctttgtggtgctgatcctgctgtctgctggcctggccatcggccacgcctactgggaggcccaggtgggcaacagctcctggtacctgtatgatggagaagatgacacccccagctaccggggcttcctgatcttctggggctacatcatcgtgctgaacaccatggtgcccatcagcctgtatgtgtctgtggaggtgatccggctgggccagagccacttcatcaactgggacctgcagatgtactatgcagagaaggacaccccagccaaggcccggaccaccaccctgaatgagcagctgggccagatccactacatcttcagtgacaagacaggcaccctgacccagaacatcatgaccttcaagaagtgctgcatcaatggccagatctacggggaccacagagatgccagccagcacaaccacaacaagattgagcaggtggacttctcctggaacacctatgcagatggcaagctggccttctatgaccactacctgattgagcagatccagagcggcaaggagcctgaggtgcggcagttcttcttcctgctggccgtgtgccacacagtgatggtggacagaacagatggccagctgaactaccaggccgccagcccagatgagggcgccctggtgaatgctgccaggaactttggatttgccttcctggcccggacccagaacaccatcaccatcagcgagctgggcacagagaggacctacaacgtgctggccatcctggacttcaacagcgacaggaagaggatgagcatcatcgtgaggaccccagagggcaacatcaagctgtactgcaagggagctgacaccgtcatctatgaaaggctgcacaggatgaaccccaccaagcaggagacccaggatgccctggacatctttgccaatgagaccctgcggaccctgtgcctgtgctacaaggagattgaggagaaggagttcacagagtggaacaagaagttcatggccgcctctgtggccagcaccaacagagatgaggccctggacaaggtgtatgaggagattgagaaggacctgatcctgctgggcgccacagccatcgaggacaagctgcaggatggagtgcctgagaccatcagcaagctggccaaggctgacatcaagatctgggtgctgaccggggacaagaaggagacagctgagaacatcggctttgcctgtgagctgctgacagaggacaccaccatctgctatggagaggacatcaacagcctgctgcacgccaggatggagaaccagaggaacagaggaggagtgtatgccaagtttgcccctcctgtgcaggagagcttcttccccccaggcggcaacagagccctgatcatcaccggctcctggctgaatgagatcctgctggagaagaagaccaagaggaacaagatcctgaagctgaagttccccaggacagaggaggagaggaggatgaggacccagagcaagaggcggctggaggccaagaaggagcagaggcagaagaactttgtggacctggcctgtgaatgttctgctgtgatctgctgccgggtgacccccaagcagaaggccatggtggtggacctggtgaagcgctacaagaaggccatcaccctggccatcggagatggagccaatgatgtgaacatgatcaagacagcccacatcggcgtgggcatcagcggccaggagggcatgcaggccgtgatgagcagtgactacagctttgcccagttccgctacctgcagaggctgctgctggtgcacggccgctggagctacatccgcatgtgcaagttcctgcgctacttcttctacaagaactttgccttcaccctggtgcacttctggtacagcttcttcaacggctacagcgcccagacagcctatgaggactggttcatcaccctgtacaacgtgctgtacaccagcctgcctgtgctgctgatgggcctgctggaccaggatgtgtctgacaagctgagcctgcgcttccctggcctgtacatcgtgggccagagggacctgctcttcaactacaagcgcttctttgtgtccctgctgcatggagtgctgacctccatgatcctcttcttcatccccctgggcgcctacctgcagacagtgggccaggatggagaggcccccagcgactaccagagctttgctgtgaccatcgccagcgccctggtgatcaccgtgaacttccagatcggcctggacaccagctactggacctttgtgaatgccttcagcatcttcggcagcatcgccctgtacttcggcatcatgtttgacttccacagcgctggcatccacgtgctcttccccagcgccttccagttcaccggcacagccagcaatgccctgcggcagccctacatctggctgaccatcatcctggccgtggccgtgtgcctgctgcctgtggtggccatccgcttcctgtccatgaccatctggcccagcgagagtgacaagatccagaagcacaggaagaggctgaaggccgaggagcagtggcagaggcggcagcaggtgttcagaagaggagtgtccaccaggagaagtgcctatgccttcagccaccagaggggctacgccgacctgatcagcagcggccgcagcatcaggaagaagaggagccccctggatgccatcgtggctgatggaacagctgagtacagaagaactggagacagctag

SEQ ID NO: 318825 - DNA, 3756 bp, Artificial Sequence
  derived and/or modified sequence
atgagcaccgagcgggacagcgagaccaccttcgacgaggacagccagcccaacgatgaggtcgtaccatattccgatgatgagacggaggacgagctggacgaccaaggctcggccgtcgagcctgagcagaacagggtcaaccgcgaggccgaggagaatcgagagccgttccggaaggaatgcacttggcaggtcaaagccaatgaccgcaagtaccacgagcagccacattttatgaacactaagttcctctgtatcaaggaatctaagtatgccaataatgcaattaagacctataagtataatgcctttacgttcatacccatgaacttatttgaacagttcaagcgggcagccaacctttattttttggcgttattaatactccaggcagtgcctcagatcagcactttggcctggtacaccaccctggtgccactactggttgtactgggggtcaccgcaataaaagacttggtggatgacgtggccagacacaagatggacaaggaaataaacaaccgaacctgcgaagtgattaaggacggcaggtttaaggtcgccaaatggaaagagatccaggtgggagacgtgatccgcctgaaaaaaaatgatttcgtacccgctgacatacttctgttaagctccagcgagcctaattccctgtgctacgttgagaccgccgagctcgatggggaaaccaatttgaagtttaaaatgagcttggagattaccgaccaatacctgcagcgggaggataccttggctacgtttgatgggttcatagagtgtgaagagccaaacaaccggttggacaagtttacgggtacccttttctggaggaataccagtttccccctcgatgccgacaagatcctcttacgaggctgtgtaatcaggaatacagatttctgtcacggcctcgtcatattcgctggtgccgataccaagatcatgaagaactctgggaaaacacgcttcaaaagaacaaagatagactacctgatgaactacatggtgtacacaatttttgtagtgctgatcttgttaagtgcagggctggcgatcggccatgcctactgggaggcacaggtaggcaactcttcatggtacctctatgacggcgaggatgacacaccgagctacagaggctttctcattttctggggctacatcatagtgcttaacacgatggtgcccataagcctgtacgtgtctgtggaagtcatccggttaggacagagtcacttcatcaattgggacctacagatgtactacgcggaaaaagatacccctgcaaaagcaaggactaccaccttaaacgaacagcttggtcaaatccattacatatttagcgataagactggaactttgacccagaacatcatgacattcaaaaaatgctgcatcaacggccagatctacggtgatcatcgcgatgcatcccagcacaaccataacaagatcgaacaggtcgacttctcttggaatacgtacgccgacgggaagctggctttttatgaccactatctcatagagcagatacagtcagggaaagagccagaggtgcggcaattttttttcttattagcagtatgccatacagtcatggtagaccgtactgacggacaactgaactatcaggccgcttctccggatgaaggagcgcttgtcaatgctgctagaaacttcggcttcgccttcctggcacgcacccagaacaccatcactattagcgagctgggaacagaacgaacatataatgtactggccatactcgactttaacagcgaccggaaacggatgagcatcattgtgcgtacgcccgaagggaacattaagctgtattgcaaaggcgccgacacagtgatctatgagagattgcatagaatgaacccaactaaacaggaaacacaggacgctctggatatttttgctaatgaaacccttaggaccctatgtctctgttataaggagattgaggagaaagagttcactgagtggaacaaaaagttcatggctgcatcagtcgcttcaacaaacagggatgaagctctggacaaagtttatgaagaaatcgagaaggacctcatcttattgggagctacagctatcgaggataagctccaggacggtgtgccagagactatttccaagctcgctaaagcggatatcaagatttgggtgctcacgggcgataagaaagaaacagccgaaaatattggtttcgcttgtgaattgctgacagaagacaccaccatctgctatggagaggatattaattccctgcttcatgcccgcatggagaatcagcggaaccgaggcggcgtgtacgccaagtttgctccaccagtgcaagaatcattcttccccccaggcggcaatcgtgctcttatcatcacggggtcctggctcaatgagatcttgctcgagaaaaagaccaagaggaacaaaatactcaagctcaaatttccccggactgaggaggagcgaagaatgaggacacagtcgaagaggcggcttgaggctaaaaaagaacaaagacagaagaacttcgttgacctcgcctgcgagtgctcagctgtgatttgctgtcgcgtgactccgaagcagaaggctatggttgtcgatctggttaaaaggtacaaaaaggccattaccctcgcgattggcgatggcgccaatgatgtcaacatgatcaagaccgcccatatcggtgtggggatctctgggcaggaagggatgcaggccgtaatgagcagcgactattcatttgcccaattcagatacctgcaacggttgctcctcgtgcatggaagatggtcttatatcaggatgtgtaaattcctgcggtacttcttctacaaaaattttgccttcactctggtgcacttttggtacagtttcttcaacgggtactcggcccagactgcatatgaggattggtttatcacgctgtacaatgtattatatacctctctgcccgttttgctaatgggccttctggatcaggacgtctctgataagctgtccctgcgcttcccaggtctgtatattgtgggacagagagatctcctgttcaactataagcggttttttgtgtcactgttacatggcgtgctgacgtcaatgatcttattcttcatccctctgggcgcatacctccagaccgtgggccaggatggagaagctcctagcgactatcagagcttcgctgtgacaattgcctctgctctggtaatcacagtaaattttcagatcggactggacacaagctattggacattcgtgaacgcattcagtatttttggcagtatcgccctctattttggcataatgttcgactttcattctgccggaatacatgtactgttcccatccgccttccagttcacaggcactgcctctaacgccttgcgtcagccgtacatttggctcacgatcatcctagccgtcgcagtctgtttgctgcccgtagtggctataagatttttatcaatgaccatctggcctagcgaatccgacaagattcagaaacatcggaagcgactgaaagccgaagagcagtggcagaggcggcaacaggtgtttcggagaggagtgtcaacccggcgtagcgcttatgctttttcccatcaaagaggttacgctgacctgatctcttctggacggagtatacgcaagaagaggtcacccttagacgcaatcgtcgccgacggtaccgcagaataccgcaggacaggagatagctag

SEQ ID NO: 318826 - DNA, 3756 bp, Artificial Sequence
  derived and/or modified sequence
atgagcaccgagcgggacagcgagaccaccttcgacgaggacagccagcccaatgatgaagtggtcccgtacagcgacgacgagacagaggacgaactcgacgaccagggcagcgcagtggaacccgagcagaaccgggttaaccgggaggctgaagaaaaccgcgaaccctttaggaaggaatgtacctggcaagtgaaggcaaacgatcgcaagtatcacgagcagccacatttcatgaacactaagttcctgtgtatcaaggaaagcaagtacgcaaataacgctatcaagacatataagtacaacgccttcactttcataccgatgaacctatttgagcagttcaaaagggccgccaatctgtattttctggccctgttaatcctccaggctgtgcctcaaattagcactctggcgtggtacactacgctggttcctcttcttgtggtccttggggtcaccgctatcaaagaccttgtggatgacgtcgccagacacaaaatggacaaggaaattaataatcggacttgtgaagtcattaaagacggacgtttcaaggtagccaagtggaaagaaattcaggtcggcgacgtgattaggctcaaaaaaaatgacttcgtacctgctgatatccttttactgtccagctccgagccgaatagtttatgctacgtggagactgccgagttagacggcgaaaccaatttgaagtttaagatgtcacttgaaattaccgatcagtatctgcaacgggaagacacactcgccacgtttgatggctttattgagtgtgaggagcctaacaacaggctggacaagttcacgggcacacttttttggcgaaatacttcgttcccactggacgcggacaagatccttctccggggttgtgtgatcagaaacactgacttttgccacgggttggtaattttcgcgggagctgacacaaagatcatgaagaatagcggcaaaactcgatttaagaggactaagattgattacctcatgaattatatggtatacaccatctttgttgtgctcatcctgctgagcgcaggtctggcaatcgggcacgcctattgggaggcacaggtcggcaactcctcttggtatctatatgacggagaggacgacactccttcgtacagaggttttttaatattttggggctacattatcgtacttaacacaatggtccctatcagcctctatgtcagtgtagaggttattcggctgggacagagtcatttcataaattgggacttacagatgtactacgcagagaaggacacacccgcaaaagctcggactaccaccctcaacgaacaactggggcagatacattatatttttagtgacaagaccgggacattaacccagaacattatgacttttaagaagtgttgcattaatggccagatatatggtgaccaccgcgatgcttctcagcacaaccataacaagattgagcaggttgactttagctggaacacatatgccgacggcaagctcgccttttacgatcactatctgattgagcagatacagtccggcaaagagcctgaagttcggcagttcttcttcctcttggccgtgtgtcatacggtgatggtcgaccggacagacggccagttgaactatcaggctgcctctccggatgaaggcgccctggtcaacgctgccagaaatttcggattcgcgttcctcgcaagaactcagaatacaattaccatttctgaactcggtaccgaaaggacttataacgtgttggccatcctggacttcaatagcgatcgcaagcgaatgtcaatcatcgtacggacacctgagggaaatataaagctttactgcaagggcgcggataccgttatctatgagagactccatcgcatgaacccaaccaaacaggaaacacaggatgccctcgatatttttgccaacgaaaccttgcgtactttgtgcctttgctacaaagagattgaggaaaaagagtttactgagtggaacaagaaatttatggccgcctctgtggcttctactaaccgtgacgaggctcttgacaaggtgtatgaggagatcgaaaaagatctaatactgctgggagcaaccgctattgaagacaagttacaggatggggtgcctgagaccatcagtaagttggcaaaggccgacatcaagatctgggtgctgacgggcgacaagaaggaaactgccgaaaatataggtttcgcgtgcgagcttctgactgaggatacaaccatctgctacggcgaagacattaactcacttcttcacgcccgaatggagaaccagcgtaatagaggtggggtttacgctaaattcgcccctcccgtgcaggaatcattctttccaccggggggcaacagggccctcatcatcactggatcctggctgaatgaaatcctgctggagaagaagacaaagagaaacaaaattctgaagctcaaattcccaaggactgaggaggagcggcgcatgagaactcaatcgaaaagacggctcgaggctaagaaagagcaacgtcagaagaattttgtggacctggcctgtgagtgttctgctgtaatctgctgccgcgtcactcctaagcagaaggctatggttgttgatttggtcaagaggtacaaaaaggccattaccctcgcaataggcgatggcgccaacgacgtaaatatgatcaagaccgcccatattggcgtcggaattagcgggcaggagggcatgcaggcggtgatgtctagcgattattcctttgcacagttcaggtacctacagcgactgctgctggtgcatgggaggtggtcctatattcgtatgtgtaaattcttgcgctactttttttacaagaatttcgcgtttactctggtacacttctggtatagctttttcaatggctactccgctcagacagcatacgaggattggttcatcacgctgtacaatgtcctgtacacctcgctgcccgttttactcatggggttgctggatcaggacgtgtctgacaaactgtcgctgcgtttccctggcctgtacattgtggggcagagagatttattgtttaattacaagcggttctttgtatctctcctgcacggagtgctgacatcgatgatcctgttttttatccccctgggcgcttacttgcagactgtgggccaagacggagaagcaccaagcgactaccagagctttgctgtaaccattgcttccgcactcgtaatcaccgtgaacttccagatcgggcttgacacttcttactggacttttgttaacgctttcagcatatttggttccatcgccctttatttcgggatcatgttcgatttccatagcgccggaattcacgttctctttccatccgccttccagttcacaggcacagcatctaacgccctacggcaaccttacatatggctcacaataatcctggctgtggccgtgtgcctcctcccggtagttgcaattcggttcctgtccatgaccatatggccaagtgagtctgataagatacagaagcatcgcaaacggcttaaggctgaggagcagtggcagcgccgtcagcaagttttccgaagaggcgtttcaactagaaggagcgcatacgcctttagccatcagaggggctatgctgatctcatttccagcggccgaagcatcaggaaaaaaaggagccccctcgatgcaatcgtggcagacggcaccgccgagtatcggagaacaggcgactcctag

SEQ ID NO: 318827 - DNA, 3756 bp, Artificial Sequence
  derived and/or modified sequence
atgtccactgaaagggactcggagaccacctttgacgaagattcacagccgaatgacgaagtggttccttacagcgatgacgagactgaggatgagctcgacgaccaaggttctgccgtggagccggaacaaaacagggtcaacagagaggctgaagaaaaccgggagccgtttcgaaaggaatgtacgtggcaggtgaaggctaacgacagaaagtaccacgagcagccacactttatgaacactaaattcttatgcattaaggaatccaagtacgcaaacaacgccatcaagacatataagtacaacgcgtttacctttattccgatgaaccttttcgagcagttcaaacgcgctgccaacctgtacttcctcgctcttctgattcttcaagctgttccacagatatccactttggcttggtatactactctggtgcccctactggtggttcttggcgtaactgccattaaggatctggtggatgatgtagcacgacacaagatggacaaggagatcaacaaccggacttgtgaagtaatcaaggatggcaggtttaaagtagcgaagtggaaagagatacaagtgggtgacgtcatcagactgaaaaaaaacgacttcgtgccagctgatatactgctgctctctagtagcgaacccaatagtctgtgttatgtggagacagcagagttggatggcgaaactaatcttaagttcaaaatgagtctcgaaattacagaccagtatttacagcgggaggatacactggctacattcgacggttttatagaatgcgaggaaccaaataacaggctagacaagttcacaggaaccttattctggaggaatacatcattcccactggacgctgataagattctgctgagaggatgtgtgatcaggaatactgacttttgccacggtctggtgatcttcgccggagcagatacaaaaattatgaagaacagcggtaaaacaagatttaagcgcactaaaattgattacctgatgaattacatggtgtacactatttttgtcgtcctgattctgctttcagcgggacttgctattgggcatgcttattgggaggcacaagtgggaaactcaagttggtacctatatgacggcgaagatgatacacccagttatagaggctttctgatcttctgggggtacatcatcgtcttaaataccatggtccccatcagcctgtacgtgagcgtcgaggtgatccgtttgggccagtcccacttcattaactgggacttgcagatgtactacgcagagaaggatacacctgccaaagcgaggacgacaacgctcaatgaacagttaggccaaatccactatatctttagcgataagacaggaacacttacacagaatattatgacctttaagaagtgttgcataaacgggcaaatttacggagatcaccgggacgctagtcagcataaccacaacaaaattgaacaggtggacttttcatggaatacatacgctgacgggaagctcgctttttacgatcactatttgatcgaacagatacagtcaggtaaggagcctgaggtgaggcaattttttttcctgctggcagtatgtcataccgtgatggtcgatcgaactgacgggcagctcaactaccaggcagcttcccccgatgagggagctctcgtgaatgctgcacgcaacttcggcttcgcattcctcgctaggactcaaaatacaatcacaatcagcgagttaggcacggagcggacttacaacgtcctggcaatcctggactttaactccgacagaaagcggatgtccattatcgttaggacccccgagggcaacatcaagctgtattgtaagggcgcagacaccgttatctatgaaaggcttcatcgcatgaatcccacaaagcaggagacccaggatgcactggacatcttcgctaacgagacactaagaacactgtgtttatgctataaggaaatcgaagagaaagagtttacagaatggaataagaaatttatggctgcctctgtcgctagtactaatcgcgacgaggccctggacaaggtttatgaagagatcgagaaagatttgatcttattaggggcaactgcgatcgaggataaactgcaagatggggtacccgaaacaatcagcaagctggccaaagcagatattaagatttgggtactgacaggagataaaaaggaaactgccgagaatattggatttgcctgcgagctacttactgaagacactacgatttgctacggcgaggacataaactctttgctgcacgcacggatggagaaccagaggaatagaggaggcgtgtatgctaagttcgcgccacctgtgcaggaaagtttcttcccacccggaggcaatcgtgctttgatcatcacgggcagttggcttaacgagatcttacttgaaaagaaaacaaaacggaacaaaattctgaagctcaagttccctaggaccgaagaagaacgcaggatgagaacgcagtcgaaacgaagacttgaagccaagaaagagcagcggcagaaaaattttgtagacctcgcctgcgagtgctctgccgtgatttgttgcagggtaacacctaagcagaaagccatggtagtggatctcgtcaaacggtacaagaaagctatcaccttggcaattggtgacggtgcaaatgatgtgaatatgattaaaactgctcatattggcgtggggatttccggccaggaagggatgcaggctgtaatgagttcggactactccttcgcacagtttaggtaccttcagaggttgctgctggtccatggcagatggtcctacatccggatgtgcaaatttctgcgttacttcttttacaaaaactttgcattcactctggttcatttttggtactcattcttcaatggttattctgcacaaaccgcttacgaagactggtttattaccctgtataacgtgttgtacacgagtctgcccgtgctgttgatggggttgcttgatcaagacgtcagcgacaagctgtcgctgcggttcccagggctatacatagtgggccaacgcgatctgctgtttaattacaagcgttttttcgtatctctgctgcatggagtccttaccagtatgatcctcttcttcatccctttgggtgcatacctgcagaccgtgggccaggatggggaagcaccatctgattaccagtcttttgctgttacaattgcttcggccctggttataacagtgaactttcagattgggctggatacctcctactggacttttgtcaacgctttttctatctttggctcaattgccctgtattttgggatcatgttcgacttccattctgccggaattcatgttcttttccccagcgctttccagtttaccggcaccgcatcaaacgccctgaggcagccgtacatctggctgaccattattctcgctgtggccgtttgtctgttacctgtcgtcgcgatccgtttcctgagtatgactatttggccaagtgagagtgacaagatccaaaaacaccgaaagagactgaaggccgaggagcaatggcagaggcggcagcaggtatttcgccgaggggtcagtacacggcgttccgcttacgccttttctcaccagagagggtacgcggacctcatcagttctggaaggagtatccgtaagaagcgcagtcctcttgatgccatcgtggccgacggtacagctgagtacaggagaactggagatagctag

SEQ ID NO: 318828 - DNA, 3756 bp, Artificial Sequence
  derived and/or modified sequence
atgagtaccgagcgcgattcagaaaccacttttgatgaagacagccagcctaatgacgaagtcgtcccgtactccgatgatgagacggaagatgagctggatgaccagggcagtgctgtggagccggaacaaaacagagtaaatcgcgaagccgaggagaatcgcgagccttttcggaaagagtgcacgtggcaggtaaaggccaatgaccgcaagtaccatgaacagcctcactttatgaacactaaattcctgtgtatcaaggagagcaagtacgccaataatgcgataaaaacttataaatacaacgcattcacttttatccctatgaatctttttgagcagttcaaacgcgcagccaatctctattttctggccctgttaattctacaggccgtgcctcagatatctactcttgcctggtatacgacattggtccccctgctggttgtgctaggtgtgaccgccattaaggatcttgtagatgacgtggcgcgacacaaaatggacaaagagattaacaaccgtacctgcgaagtcatcaaggatggcaggtttaaggtggctaaatggaaagaaatacaagttggtgatgtgatcagactcaagaagaacgactttgtaccggcagatattttactgctgagttcatctgagcccaatagcttgtgttatgtggagacagctgagctggacggggagacaaatcttaaatttaagatgagcctcgaaattacggatcagtatctgcagcgcgaagacacccttgctacatttgacggcttcatcgagtgcgaggaacctaataaccggctcgacaagtttacaggcaccctcttttggcggaataccagttttcctcttgacgctgacaaaattctgctgcgtggctgtgtcatccggaacaccgacttttgccacggtttggtgatattcgcaggcgctgatacaaagattatgaagaatagcgggaagacaaggtttaagagaacaaagatcgattacctgatgaactatatggtctacactatctttgtcgtgctgatcctgctgagtgccggactcgccataggtcatgcctactgggaggctcaggtgggtaattctagctggtatttgtacgacggggaggacgatacaccctcctatcgtggttttctcattttctggggatatataatcgtgctcaacacaatggttccaattagcctctacgtctccgtcgaagtcatcagactggggcagtcacatttcatcaattgggatttgcaaatgtattacgccgaaaaggatacccctgccaaagcccgaactacgactttgaacgagcagctcggccagattcattatatcttttccgacaagaccggaactttgactcagaacatcatgacgtttaaaaaatgttgtattaatggccaaatttatggcgaccaccgggatgcatcacagcataatcataataagatagagcaggttgacttctcatggaatacttacgccgacggaaagctggccttctatgatcactacctgatcgagcagattcagtctggaaaggaacctgaggttcggcagttcttctttctgcttgccgtgtgccataccgtcatggtggataggacagacgggcagttgaactaccaagctgcttcccccgacgagggagcccttgtgaacgctgcaagaaactttggcttcgccttcctcgcaaggactcagaacacaatcacaattagcgaactggggactgagaggacatacaatgtgcttgcaatcttagactttaattcagaccggaagcgaatgagcataattgttagaactcctgagggcaatatcaaattatactgtaaaggggcagatactgtgatttatgaaagactccacaggatgaaccctacaaagcaagagacgcaggacgccctcgatatctttgctaacgagacccttcggacactctgcttatgctacaaggagattgaagaaaaggagtttacggaatggaacaagaagttcatggccgctagcgtggcctccactaatcgcgacgaggctctagataaggtctacgaggagattgagaaagacctgattctcctcggcgctaccgccattgaggacaaactccaggacggcgtgccagagacgatctccaagctggctaaggcagacataaagatatgggtcctcaccggcgacaaaaaggagacagctgaaaacattggcttcgcttgtgaactgctcacggaagacactactatctgctacggggaggacattaattccctactgcatgccagaatggagaaccaacggaaccgcggaggcgtctatgcaaaatttgccccaccagtgcaagagtccttctttcctcctggcggaaacagggcgcttatcatcacaggaagttggctgaacgagattctcctagagaagaagaccaagaggaacaaaattctgaaacttaagtttccacgtaccgaagaagagaggcgcatgcgcacccagtctaagaggcgactggaagcgaagaaagaacagagacaaaaaaatttcgtggatctcgcctgtgagtgttctgcagttatttgttgccgcgtgacccccaaacagaaagctatggtggtggacctcgttaagaggtataaaaaggcgattacattggcaattggagacggggcaaatgacgtgaatatgattaagactgctcacattggggtgggcatatctggacaggagggtatgcaggctgtgatgagctcggactacagcttcgctcagtttagatatctgcaacgcctattgctggttcacggccgatggagttacataagaatgtgtaaatttctgcgatattttttctacaagaacttcgcatttaccttggtccatttttggtattccttcttcaatggctattctgcccaaaccgcatatgaggattggttcatcaccctgtacaacgtgttgtatacttcattaccagttctcttaatgggactcttagaccaggacgtgagcgacaaactctcattgaggtttcctggcctgtatattgtcgggcagcgcgatctgctgtttaattacaagagattctttgtctctctgctgcacggggttttgaccagcatgattctgttcttcatcccccttggcgcttacctccaaacagtcgggcaagacggagaagccccttctgattaccaaagcttcgccgttactatcgcttccgctctggtgatcactgttaatttccaaataggactggacactagctactggacttttgtgaatgcctttagtatttttggctctatcgccttatatttcgggattatgtttgactttcacagcgccggtattcatgtgctctttccctcagcctttcagttcactggaaccgctagcaacgcattgaggcaaccttatatttggctcacaatcatcctcgcggtggctgtttgcctcttacccgtcgtggccatccggttcctgtccatgacaatatggccatctgagtccgacaagattcagaagcacagaaagaggctcaaggcagaggaacaatggcagagacgacagcaagtgttcagaagaggagtgagcaccagaagatcagcatacgctttttcacatcagcggggatatgcagacctgatctcttcagggcgatccattagaaagaaacggtccccgctggatgctatagtggctgatgggacagctgaataccggaggaccggtgattcatag

SEQ ID NO: 318829 - DNA, 3753 bp, Artificial Sequence
  derived and/or modified sequence
atgtccacggaacgggattctgaaaccaccttcgatgaagattcccagcccaatgatgaagtcgtgccctacagcgatgatgaaaccgaggatgaactggatgaccagggttccgcggtggaaccagaacaaaatcgtgttaaccgcgaggcagaagaaaaccgggagccgtttagaaaggagtgtacttggcaagtcaaagcgaacgatcgcaaatatcatgaacaacctcatttcatgaacactaagtttctgtgcatcaaggaatcgaagtatgctaataacgccattaagacttataagtacaacgcctttacctttatcccgatgaacttgtttgaacagtttaaacgcgcggcaaatctttactttcttgcacttctcattctgcaagcggtgccacaaatttcaaccctcgcgtggtacactactctcgtgcccctgcttgtagtgcttggagtcactgcaatcaaagacctggtggacgatgttgcaagacataagatggacaaggagattaacaataggacttgtgaagtcattaaagatggaagatttaaggtggccaagtggaaggaaatccaagtaggcgatgtgataaggttgaagaagaatgactttgtgcccgcggacattctgctccttagctcgagcgaaccgaattctctttgctacgtggaaactgctgagctggatggtgaaaccaaccttaagtttaagatgtcgttggaaatcaccgatcaatacctgcagagagaggatacccttgcaacctttgatggctttatagagtgtgaagaacctaataaccgtctggataagttcactggaacccttttttggcgaaacacttctttcccccttgatgccgacaaaattctgctccgcggttgtgtcatacggaatactgatttctgccatggcctggtgatctttgcaggagcagataccaagattatgaaaaactcgggaaaaacccgctttaaacgtacgaagattgattatctgatgaattacatggtgtacactattttcgtggtcctgatactcctgtcggcaggtctggcaatcggccacgcctactgggaggcccaagtcggaaattcctcgtggtatctgtacgatggagaagatgacaccccctcgtatagaggcttccttatcttttgggggtacatcatcgtgttgaatactatggtgcctatcagcctgtacgtgagcgtggaagtgattcgcctgggccagtcgcacttcattaactgggaccttcaaatgtactatgccgaaaaggacactccagccaaggcccgaacgaccaccctgaacgagcagttgggtcagatccactacattttcagcgacaagactggaactctgactcaaaacatcatgacgttcaagaagtgttgtattaacggtcagatctatggagatcatcgtgatgcctcccaacataaccataacaagattgaacaagtggatttttcctggaacacttacgcagacggcaagttggcattttacgaccactaccttattgaacagatccagagtggaaaagagccagaagtcaggcaattcttcttcctgcttgccgtctgtcacaccgtcatggtggacaggaccgatggacagctgaattaccaagccgcttccccggacgagggcgcgttggtcaacgccgcaagaaatttcggttttgcttttcttgccagaactcagaacactatcaccatttcggaattgggaactgaacggacctacaacgtgctcgccatactcgactttaacagcgatagaaagcggatgtcaattatcgtgagaacccctgaaggtaacattaagttgtactgtaagggggcggacaccgtgatttacgaaagacttcaccgcatgaacccaaccaagcaagagacgcaggatgcattggacatctttgcaaatgagactctgcgaaccctctgcttgtgctacaaagagatagaggagaaggaatttacggagtggaacaagaaattcatggcagcctcagtcgcgagcactaaccgggatgaagcgcttgataaggtgtacgaggaaatcgaaaaggacctcatcctccttggggccactgctatcgaagataagctgcaagatggagtgccagagactatatcgaaacttgcaaaagcagacattaagatttgggtgctcacgggcgacaaaaaggaaactgcagagaacattgggtttgcctgtgaactgcttaccgaagatacgaccatttgctacggagaagatatcaactcacttcttcacgcacggatggagaaccagagaaatagaggaggggtgtacgctaagttcgcgcctccagtgcaagagagcttttttccaccgggaggtaaccgagcgctgattatcactggttcctggctcaatgagattctgttggaaaagaaaaccaaaagaaataagattcttaagctgaaattcccaagaactgaagaggagaggagaatgcggactcagtccaaacgtaggcttgaagcaaaaaaggaacagcgccagaagaacttcgtggatctcgcatgcgaatgttcggcagtgatctgttgtagggtcacccctaagcagaaagcaatggtggtagatctcgtcaagcgctacaaaaaggctattaccttggcaattggggatggcgcaaatgatgtcaatatgattaagaccgcacatatcggtgtcgggatttcgggtcaagaaggaatgcaagcagtgatgtcatccgactactcgtttgcacaatttcgatacctgcaacggcttctcttggtgcatggacgttggtcgtacatcaggatgtgtaagtttctgcgatactttttctacaaaaactttgcatttacccttgtccatttctggtattcatttttcaacggatactcagcccagaccgcgtacgaggactggtttatcaccctgtacaacgtgctgtacacctcccttcctgttcttctcatgggactgctcgatcaagacgtgtccgataagttgtccttgagattccctgggctttacattgtgggccagcgagatctgctgttcaactacaagcggttttttgtttcgttgttgcatggtgtactgacctccatgatcctgtttttcatccctctgggtgcataccttcagaccgtgggacaagacggtgaagcaccgagcgactaccagtccttcgcagtcaccattgcatcagcgttggtcattactgtcaatttccagataggtctggatacttcgtactggacctttgtgaacgccttctcgatttttggaagcatcgcactctactttggcataatgtttgactttcattcggcaggaatacacgtgctttttccctctgcttttcaattcaccggaactgcctcaaacgcactccgacaaccttacatctggctgacgatcattctggccgtggccgtgtgccttctccctgtcgtggcaattagatttctgagtatgaccatctggccaagcgagtcggataagattcaaaagcatagaaaacggctcaaggcggaagaacagtggcaacggagacagcaagtgttccggcggggtgtgtcaacccgcaggtcagcatacgcattctcccaccagcgagggtacgctgatttgattagcagcggcaggagcatccgcaaaaagcggtccccgctcgacgccattgttgcagacgggactgcagagtaccgccgcaccggagattcg

SEQ ID NO: 318830 - DNA, 3753 bp, Artificial Sequence
  derived and/or modified sequence
atgtctactgaacgagactctgaaactacgttcgatgaggattcccagcctaacgatgaagttgtaccctactctgatgatgaaactgaagatgaacttgatgaccagggatcagctgtcgagcccgagcaaaatagggtgaacagagaggccgaagaaaaccgcgaacccttccggaaggagtgcacctggcaagtaaaggccaatgaccgtaaatatcacgagcagccccacttcatgaatactaagttcctgtgcatcaaagagagtaaatacgccaataacgccatcaaaacatacaaatacaacgcattcaccttcattccaatgaatctgtttgagcaatttaagcgagcagccaatctgtatttcttagccctgcttatactgcaggcagttccccagattagcacactagcttggtataccactctggtccctctgctggtggtgttgggggtaaccgcaattaaggacctggtagacgatgtagccagacataagatggataaggaaatcaataatcggacgtgtgaagtcattaaagatggtcgctttaaggtggctaagtggaaggaaatccaggtaggcgacgttattcgcctcaagaagaacgatttcgtgccagccgacatcctgcttctgagttcgagcgagcccaactctctctgttatgtagaaacggcagagttagacggcgaaactaatctgaaattcaaaatgtctctggagatcaccgatcagtacctccagcgggaagatactctggccactttcgacgggttcattgaatgcgaagaacctaacaatcggctcgacaagttcactgggaccctattctggagaaataccagctttccccttgatgctgataagatactgctgcgcgggtgcgtgatcagaaacaccgacttctgccacggtttggtgattttcgcgggggctgacaccaagatcatgaagaattcagggaagaccagatttaaacgcacgaaaatcgattatttgatgaactacatggtgtatactatctttgtggtactgattctgctctcagctgggctggccattggtcacgcttattgggaagctcaagtaggcaattctagctggtatctgtatgacggcgaagacgacacaccatcatataggggtttcctgatcttttggggctatattattgtcctgaataccatggtgcctatttcgctgtatgtgtctgttgaagttatcaggctggggcagagccacttcattaactgggacctgcagatgtactacgctgagaaagacacaccagcgaaggctcgaactactaccctaaatgagcagcttggtcagatccattatattttttctgataaaacgggaactttaacacaaaatattatgaccttcaagaagtgctgcattaacggtcagatttacggagaccatagagacgcttcccaacacaaccataataaaatcgagcaggtggacttcagctggaacacctatgccgatggcaagctggctttttatgaccattacctgattgagcagatccagagtgggaaggaacctgaggttcggcagtttttctttcttctggccgtatgtcacacagttatggttgatcgaacagacggccagctcaattatcaagccgcttccccagatgaaggcgcattggtcaacgctgcgaggaacttcggctttgcattcctcgctcgcacgcagaacacaatcaccataagcgagctcggtacggagcgaacctataacgtgctcgccatactcgattttaacagtgatagaaagcgcatgtccataatcgtgcgcacccctgagggtaacattaaactatactgcaagggtgctgatacagtgatttacgaacgattacacaggatgaaccccaccaaacaggaaactcaggatgccttagatatcttcgcaaatgaaacgctgaggacgctgtgtctttgttataaggagatcgaagaaaaggaattcactgaatggaataagaaattcatggctgcatctgtcgcttcaaccaatagggatgaggctttagacaaggtgtatgaagaaatcgagaaggacctcatcctgcttggcgcaacagcgatcgaagataaactgcaggatggcgtgcctgaaaccatctcaaagctggcgaaggccgacatcaaaatttgggtgctcacaggagacaaaaaagaaaccgcagagaacattggcttcgcgtgcgaactgctgactgaggataccacaatctgctatggcgaggacatcaacagcctattgcatgcgcggatggagaatcaacggaatcgtgggggagtgtacgccaagttcgctcccccagtgcaggagtcgttctttcccccaggcggcaacagggccctgattatcacggggtcctggctcaacgagatcttgttagagaagaaaactaagaggaacaaaatcctcaagttgaaatttcccaggactgaagaagaaaggagaatgcgcacgcagagtaaacgccggctggaagcgaagaaggaacagcggcagaaaaatttcgtagatctggcatgcgaatgctctgcggtgatatgttgccgagtgacccctaagcagaaagcaatggtcgttgaccttgttaagcgatacaagaaggccattactctggccattggagatggggctaacgacgtgaacatgatcaaaactgctcacattggggtgggaataagtgggcaagagggcatgcaggcagtgatgtccagtgattacagcttcgcccagttcaggtatctgcagagactcttgctggttcatgggcggtggtcttacatcaggatgtgtaagttccttaggtacttcttttacaagaacttcgcattcaccctggtgcatttctggtactcattcttcaacggctactctgcgcagaccgcctatgaagactggttcatcacactgtacaacgtgttgtacacttcgttaccagtcctgctcatggggttgctcgaccaggacgtgagtgacaaacttagcctaaggtttcccggtctgtatatcgtgggacagagggacctgctgttcaattacaagaggttttttgtttctcttctacatggggtgctgacctctatgatcttattttttattcccctgggtgcatatctgcagactgtcggtcaggatggggaagcccccagtgactaccagagtttcgccgtgacaatcgcgtcagctttagtaatcaccgtgaactttcagatcgggcttgataccagctattggacctttgtgaacgctttttcaatttttggaagcatagctctttattttggcattatgtttgacttccacagtgctgggatccatgtattgtttccctctgcctttcaatttacaggtacagccagcaatgctttgcgccaaccttacatctggctgaccatcattctcgctgtggccgtgtgtctgctgccagttgtcgctattcggtttctttcgatgaccatttggcctagcgaatctgataaaatacagaaacaccggaagcgcctgaaggctgaggaacagtggcagcgccgtcagcaagtgttcagacggggcgtgtctacgcggagatctgcctacgcatttagtcaccagcgaggctacgccgatcttattagttctgggaggagcattagaaagaagagatccccgctggatgccatcgtcgcagacggcacagccgaataccggagaaccggagacagt

SEQ ID NO: 318831 - DNA, 3753 bp, Artificial Sequence
  derived and/or modified sequence
atgagcactgagcgcgatagcgaaaccacgtttgatgaagatagccagcctaatgatgaagtggtcccgtactcggacgacgaaaccgaagatgaactggacgaccaaggatcagcagtggagcccgaacaaaaccgggtgaaccgggaagcggaggaaaatcgcgagcctttcagaaaggagtgtacctggcaggtgaaagcgaacgatagaaaataccatgaacagcctcatttcatgaataccaaatttctgtgtatcaaagaatcgaagtacgcgaataatgcaattaagacgtacaagtacaacgcgttcaccttcattccgatgaacctcttcgagcagtttaagcgggccgcgaacctgtacttcctcgccctcctgatcctgcaagcggtgccccaaatctcgaccctcgcgtggtacactaccctcgtcccgctgctggtggtcctgggagtgacggccataaaagatctcgtggacgatgtcgctcggcacaagatggacaaagagatcaataacagaacctgcgaggtcatcaaagatggaagatttaaggtggccaagtggaaggagattcaagtcggagacgtgatccgcctgaaaaagaacgactttgtgccggcggatatcctgctgctctccagctcagaaccaaactcgctgtgctacgtggaaacggccgagctggacggagaaactaacctgaagttcaaaatgtcgcttgaaatcactgatcagtacctccaacgggaggacactctcgccactttcgacggattcatcgagtgcgaggaaccaaacaatagactggacaagttcacggggacccttttctggcgcaacacttcttttccactggatgcagacaaaattctcctgcgagggtgtgtgattaggaacactgatttctgccacggactggtcatctttgcaggagcagacactaaaatcatgaagaactcggggaaaactcgctttaagcggaccaagatcgactacctgatgaactacatggtctacaccatcttcgtggtcctgatcttgctgtccgcgggactggctatcgggcacgcctactgggaggcacaagtggggaacagctcgtggtacctgtatgacggagaggacgatacgccgagctaccggggcttcctgatcttctggggatacatcatcgtcctcaacaccatggttccaatctccctttatgtgagcgtcgaagtgattcggctgggacagagccacttcatcaactgggacctgcagatgtactacgcggaaaaagacactccagccaaggcgcggaccaccaccctgaatgaacagcttgggcaaattcattacattttctccgataagaccggcaccctgactcagaacatcatgaccttcaaaaagtgctgcatcaacggacagatctacggggaccaccgggacgcctcccaacataatcacaataagattgagcaagtggacttttcttggaacacctacgcggacggaaagctggcattttacgaccattacctgatcgagcagatccagtcaggaaaagaaccagaggtgcggcagtttttctttctgttggccgtgtgccacactgtcatggtggatagaaccgacggccagctgaactatcaggctgcttcgcctgatgagggagccctcgtgaatgcggcacgcaacttcggtttcgcgttcctcgccagaacccagaataccatcacgatctccgagctcggcacggagcgcacctacaacgtgttggccattctggatttcaattcggatcggaaacgtatgtccatcatcgtgcggaccccggaaggtaacatcaagctctactgtaagggagcagacaccgttatctacgaacggctgcaccggatgaaccctaccaagcaagaaactcaggatgctctcgatatcttcgcaaatgagactctgcgcaccctctgtctgtgttataaggaaattgaagaaaaggaattcaccgaatggaataagaaattcatggcagcctccgtggcgtctaccaacagagacgaagcgttggacaaagtgtacgaagaaatcgagaaggatctgatcctcctgggagccactgccatcgaagataagctgcaggatggagtcccggaaactatctcgaagctcgccaaagcagacatcaaaatctgggtgttgactggagataagaaggaaacggcggaaaacattggattcgcctgtgaactgctgactgaggacacgactatctgctacggtgaggacattaacagcctgctgcacgcacggatggagaaccagcgtaatagaggaggcgtgtacgcaaagtttgctccccctgtgcaggaatcattcttcccgcccggcggcaaccgggccctcatcattactggctcatggctgaacgagatcctgctggagaagaaaactaagcgcaataagatcttgaagctgaagttcccccgcaccgaagaggaacggcgtatgcgaacgcagtcgaaaagaaggctggaagccaagaaggaacagcgccagaagaacttcgttgatctcgcctgcgaatgttccgccgtcatctgttgcagggtgactccgaagcagaaggcgatggttgtggacctggtcaagaggtacaagaaggcaatcaccctcgccataggcgacggagcgaatgacgtgaatatgatcaagaccgcacatatcggcgtgggcattagcgggcaggagggcatgcaagccgtcatgagctcagattactcattcgctcaatttcggtacctccagcggctgctgcttgtccacggacggtggagctacatccgcatgtgtaagttccttaggtacttcttttacaagaattttgccttcacgttggtgcacttttggtactcctttttcaacggatacagcgcccagacggcgtacgaggactggttcatcactttgtataacgtgttgtacaccagcttgcccgttctcctgatggggctcctcgaccaggacgtgtccgacaaattgtcccttcgattccccggcctgtatatcgtgggtcagagagatcttctgttcaactacaaacggttcttcgtatcgctcctccacggagtcctgacctcaatgatcctgttcttcatcccactgggagcctaccttcaaactgtgggccaagacggtgaggcaccgtcggactaccagtcgtttgccgtgacgatcgcaagcgcgctggtcatcaccgtgaacttccagatcggcctggacacgtcttattggactttcgtcaacgccttttcaatcttcggtagcatcgccttgtactttggaatcatgtttgatttccattcggccgggattcatgtgctcttcccctcggcattccaatttaccggtaccgcttccaatgccctccggcaaccgtacatctggctcactattatcctcgcggtggcggtgtgcttgctcccggtcgtggctatccggtttctctcgatgacgatttggccgtccgagtcggacaaaatacagaagcaccggaagagactgaaggctgaagaacagtggcagcggcggcagcaggtctttcgccggggcgtctccactagacggtccgcctacgctttttcacaccaaaggggatacgcagacctcatcagctcaggaaggtcgatccggaagaagcgttcaccgctcgatgctatagtggctgacggtactgccgagtaccggcggactggagactca

SEQ ID NO: 318832 - DNA, 3753 bp, Artificial Sequence
  derived and/or modified sequence
atgagtacagagcgagattcagagaccacctttgatgaagactcacagccaaatgacgaggtcgtgccttactccgacgacgaaacagaggatgaacttgatgaccaggggagcgccgtggagcctgagcagaatcgggttaatagagaggcagaggagaaccgagagccgtttcggaaagaatgcacttggcaggtgaaagctaatgaccgcaaatatcacgaacagcctcattttatgaacaccaaattcttatgtatcaaagaatcaaaatatgccaataacgcgattaaaacctataaatacaatgctttcaccttcataccaatgaacctgttcgagcagttcaagcgcgctgctaacttatacttccttgccctactgatattgcaggctgtacctcagatctctactctagcatggtacactacccttgtccctctccttgtggtgctcggcgtcactgcaattaaagacttggtggacgatgtggctagacataagatggacaaggagattaataaccgcacctgcgaggtgattaaagatggtcggtttaaagtggccaagtggaaggagatccaggtcggggatgtgatcaggttaaagaagaacgactttgtacccgcggatattttgctgctgtcgtccagtgagcccaattccctgtgttacgttgagacggctgagttggatggggagaccaacctgaagttcaagatgagtctggaaataacagaccagtacctgcagcgggaagacaccttggcaacttttgacggttttattgagtgtgaggagccaaacaatcgtctggataaattcacaggaaccctcttctggcgtaacacatcctttccgctggacgccgataagatcctgctacgcggatgtgtgataagaaatacagacttttgccatggattagtcatcttcgctggggctgacactaagattatgaagaactcaggtaagacgaggttcaagaggacgaaaattgattacctgatgaattatatggtgtacacaattttcgtggtcctgatccttctgagcgcaggattagccatcggacatgcttattgggaagcccaggtgggcaactcatcttggtatttgtacgacggcgaagatgacacaccttcctaccggggattccttattttttgggggtacatcatcgtgctgaacactatggtgccaatcagcctttacgtaagcgtcgaagttatcaggctgggacagagccatttcatcaattgggacctgcagatgtattacgcggaaaaagacaccccggccaaagctcgcacaaccaccctgaacgaacaactgggccaaatccattacatcttctcagataaaaccggtaccctcactcagaatattatgaccttcaaaaagtgttgcataaatggccagatctacggcgaccatcgcgatgcaagtcaacataatcataacaagattgaacaggtcgactttagctggaatacctacgctgatgggaagctggctttctacgaccactacttgattgagcagatccagtccggcaaggagccagaggttcggcagtttttcttccttctggccgtgtgtcataccgtgatggttgacagaaccgacggccaactgaactatcaggccgctagtcccgacgaaggggccctggttaatgctgcccggaattttggcttcgcattcctcgctaggacccagaatacaatcaccatttccgagctcggtaccgaacgaacatataacgtgctggcaattctggacttcaattccgatcgtaaacggatgtctatcattgtaaggacaccagaagggaatatcaaattgtattgtaaaggtgctgacactgtgatttacgaaaggttgcatcggatgaatccaacaaagcaggaaactcaggatgccctggatatctttgcaaatgaaaccctgcgaaccctctgcttgtgctacaaggagatcgaggagaaagagtttactgagtggaacaaaaagttcatggccgcatctgtggccagcacaaaccgggacgaagctcttgataaggtctacgaggagatagagaaagacctgattctgttaggcgccactgccatcgaggacaaactgcaagatggcgtacccgagactatctcaaaactggccaaggctgatataaagatttgggtcctaacaggagataagaaggagactgcggagaacattgggttcgcatgtgagcttctgaccgaggacaccacaatctgctatggcgaagacatcaattcattactgcatgcaaggatggagaatcagcggaacaggggaggagtgtatgccaaattcgctcctcctgtacaggaatctttctttccacctggcggaaacagagccttgattatcactggtagctggctaaacgagatcttgctggagaaaaaaaccaagcggaacaagattttgaagctaaagttcccccgcacagaggaggaacggcgcatgcgcacccagtcgaagagaaggctcgaggctaagaaggaacaacgtcaaaaaaatttcgtcgatttggcttgtgagtgttccgccgtcatctgctgcagggtaacccccaaacagaaggccatggtagttgatttggttaaaagatacaaaaaggctattacactggcaataggggacggggcgaacgacgtgaatatgatcaagacagcccatataggggtgggaattagtgggcaggagggaatgcaggccgttatgtccagcgattacagtttcgcccagtttagatacctgcaaaggctgctattggtccatgggcggtggagctacatccggatgtgtaaattcctacgatactttttctataagaatttcgcgttcacccttgtgcatttttggtacagtttcttcaacggatactctgctcaaacggcgtatgaagattggttcatcactctgtacaatgtgctctatactagcctgccagtcttattgatgggcctcttggatcaggacgtgagcgataaactgtcacttaggtttccgggtctgtatattgtcgggcagcgggacctcctgttcaattataaaagatttttcgtttcactcctccacggtgttctcacctctatgatcctatttttcataccactcggtgcgtacctgcagaccgtgggccaggatggtgaagccccctctgattaccagtctttcgctgtaacaatcgctagcgcactggttatcaccgtcaactttcagatcggactggacacatcatactggaccttcgtcaacgctttctctatattcgggtccatcgctttatatttcggaatcatgttcgactttcactccgctgggattcatgtcctgttcccatcagcctttcagtttacaggtacagcgtccaacgcgctgcggcagccatacatctggttgaccattattctggcagtggctgtttgcctgctaccagtcgttgcaattcggtttttgtccatgactatatggccaagtgagagcgacaagattcagaagcatagaaagagactcaaggcggaggagcagtggcagaggaggcagcaagtctttcgccgcggtgtcagtacacgccgcagtgcgtacgccttctctcatcagcgcggctacgccgatttgatttctagtggacgtagtatccgaaaaaagagatcacccctggacgcgatagtggctgacgggaccgccgaatacagaagaaccggtgactct

SEQ ID NO: 318833 - DNA, 3753 bp, Artificial Sequence
  derived and/or modified sequence
atgtcaaccgagagagatagcgagacaaccttcgacgaggacagccaacccaatgatgaagtggtgccatatagcgatgacgaaaccgaggacgagctcgacgaccagggctctgccgtggaacccgagcagaatcgggtgaaccgcgaagccgaggagaacagagaacccttccgaaaagagtgtacttggcaggtgaaagctaatgacaggaagtatcacgagcagcctcacttcatgaataccaaattcctgtgcataaaagagtctaaatacgcgaacaatgctattaagacatacaagtacaatgccttcacattcatccctatgaatctgtttgagcagttcaaacgggccgccaacctgtacttcctggccctcctcatcctgcaggcagtgccccagatttccacactcgcttggtataccaccctcgtccccctgcttgtcgtcctgggcgtgaccgccattaaggatttggtggatgacgtggctaggcacaagatggataaggagataaataatcgaacatgcgaagtcattaaggacggccgatttaaagtggcaaaatggaaggaaatccaggtcggcgatgttattcggttgaagaaaaacgattttgttccagccgatatcctgctgctgtcttcctccgaacccaatagcctctgctatgtcgagacggctgagctcgacggggaaactaaccttaaattcaagatgagcttggagatcaccgaccagtatctgcaaagagaggataccctcgcaacctttgacggcttcatcgagtgcgaggagcccaataatcgcctggataagttcaccggcacactcttctggcgaaatactagcttccccctggacgccgataagatactgcttcggggctgtgttatccgaaacacggacttttgccatggtcttgtgatcttcgcgggcgccgataccaagattatgaagaacagcgggaagactcgctttaaaagaacaaagatcgattacctcatgaattatatggtttatactatcttcgtggtactgatcctgctgtccgcagggttggccatcggtcacgcttactgggaggcacaagtggggaattcctcatggtatctgtatgacggggaggacgacacaccaagctaccgcggattcctcatattttggggctacataatcgttctgaataccatggtgcccatttctttgtacgtcagcgtcgaagttattcgccttggtcagtcacatttcattaactgggatcttcaaatgtactacgccgagaaggacacaccggccaaagcgaggactaccacgctcaatgaacagttgggccagattcactacatattctcagacaaaaccggaaccctgacccagaatatcatgacattcaagaagtgttgcatcaatggccagatttacggggaccaccgggacgcttcacaacataaccataataagattgaacaggtagatttttcctggaatacatacgccgatgggaagcttgccttctacgaccactacctgattgagcagatacagtcaggtaaagagccagaggtgcggcagttcttcttcctgctcgccgtttgtcacacggtgatggtggaccggactgacggtcagttgaattaccaagccgcctcccctgatgaaggggcccttgttaacgctgccaggaatttcggattcgctttcctcgctcgaacacaaaataccataactatcagtgaactggggacggaaaggacctacaatgtgttggcgattttggatttcaacagtgatcgcaagaggatgtctatcatagtgaggacaccagagggcaacatcaagctgtattgcaaaggtgcagatacagtcatctatgaacgcctccatcgcatgaaccccacaaaacaggaaacccaggacgcgctcgacatattcgccaatgagactcttcgcactctctgcctttgctataaagagatcgaggaaaaggagtttacagagtggaacaagaaatttatggccgcatccgtggcaagcaccaatcgggacgaggcgctggacaaggtgtatgaggaaatcgagaaagacctgatccttctgggggccaccgccattgaggataagttgcaggacggggtcccagaaactataagtaaactcgcaaaagcagacattaagatttgggtattgactggggacaagaaagaaaccgcagagaatattggctttgcatgcgaacttctgacggaggatacgacaatttgctatggagaggatatcaacagtctgctccacgcccggatggaaaatcagcgcaatcggggtggggtctacgcaaagttcgccccccccgtacaagaaagcttcttcccacccggtgggaaccgggctctgattatcacaggttcctggctgaacgagatcctcttggagaagaaaacaaaacgcaacaaaatcctgaaactcaagttcccacgcacagaagaggagagaagaatgagaacacagagcaagcgcagactcgaggccaaaaaggaacagcggcagaagaatttcgtcgacctggcctgcgagtgctcagccgtgatatgttgccgggtgacgcctaagcagaaggctatggtagtggacctggtgaagagatacaaaaaagctattactcttgccatcggcgatggcgcaaacgacgtcaatatgattaaaacggctcatattggtgttgggatcagcggtcaggagggcatgcaagctgtgatgagtagcgattattcattcgctcagttcagatatctgcaacgactgctgttggtgcatggccggtggagctacatccgcatgtgcaagttcctgagatacttcttttacaaaaactttgcatttacccttgtgcacttctggtacagcttttttaatgggtattccgctcagaccgcgtatgaggactggtttatcaccctttataacgttctttatacttccctccctgttctgctgatgggtcttctggaccaggacgtatccgacaagctgagtctccgattccccggcctgtacatcgttggacagcgggatctgctgtttaattataagagattcttcgtgagcctgttgcacggcgtgcttactagcatgattctgttcttcattccgctcggcgcctatcttcagaccgtggggcaagatggagaagcgcctagtgattatcagtcctttgctgtgacaatcgcatcagctctggtgatcacagtgaactttcagattgggctggacactagctattggactttcgtcaatgcattctccattttcggttctatcgcgttgtactttggcattatgtttgacttccattccgcaggcatccacgtgctgtttccatcagccttccaatttaccggaacggcatccaatgcgcttcgccagccgtatatttggctcacgataattcttgccgtggcggtttgcctgctgcccgtcgtggctatccgcttcttgtctatgactatctggccaagtgaaagtgataagatacagaagcatcggaagagactgaaagcggaggaacagtggcagcgaagacagcaagtgtttcgcagaggtgtgtctacgcgacggtctgcatatgcgttctctcatcaaagagggtacgccgaccttatctcttcaggtagatcaattcggaagaaaaggtctccactggatgcgatcgtggccgatggtactgcagagtacagacgaactggagacagt

SEQ ID NO: 318834 - DNA, 3753 bp, Artificial Sequence
  derived and/or modified sequence
atgtctactgagcgggatagcgagactaccttcgacgaagacagccagccaaacgatgaggtggtgccctattccgatgacgaaactgaggacgaacttgatgatcagggctcagcagtagagccagagcagaaccgggtaaatcgggaggctgaggaaaatcgagaaccttttagaaaagagtgtacctggcaggtgaaagctaacgatagaaaatatcacgaacagcctcatttcatgaacaccaaatttctctgcatcaaagagtctaaatacgccaataatgcaatcaagacatataagtacaatgcatttacattcattccgatgaacctattcgagcaattcaaacgggccgcgaacctgtattttcttgccttgctgattttacaggcagttccgcagatttctactctggcgtggtataccacgctcgtgccgctgctggtggttctgggggtcacggccatcaaagatcttgtggacgatgtcgcgcgccacaagatggataaggagatcaacaatagaacctgtgaagtgatcaaagacggccgattcaaggtggccaagtggaaggagatccaggtcggcgacgtgatcaggttgaagaaaaacgattttgtccccgccgatatcttgctgttgtcatctagcgaaccgaactcgctctgttacgtggagacagccgagttagatggggagactaacctgaaatttaagatgtccctcgaaatcactgatcagtaccttcagagagaggataccctcgccacctttgatggcttcatcgaatgcgaggagcccaataaccggctggacaaattcactggcacactgttctggcgcaacacaagctttccgctcgatgcagataagattctgttgcggggttgcgtgattcgtaacacggatttttgccacggtctagtgatattcgcgggtgcagacacaaagatcatgaagaactcagggaaaactcgcttcaaacgtaccaagatcgattacctcatgaactacatggtctacacaatcttcgtcgtgctgattttgctgagcgctggtctggcgatcggccatgcatattgggaggcgcaggtcgggaattcctcatggtatctttatgacggagaagacgacacccctagctatcgcggctttctgatattctggggctatataatagtccttaatacaatggtgcccatctctttgtacgtgtcagtggaagttatccgcctgggacagagccacttcatcaattgggacttgcagatgtattacgccgaaaaagacacacccgccaaggccaggaccacaacactcaacgaacagctaggacaaatccactatatatttagcgataagaccggtactctcacacagaatatcatgactttcaagaagtgttgcataaacggacagatctacggggaccatcgcgatgccagccagcacaaccataacaagatcgaacaagttgacttttcctggaacacatatgctgatggaaagctcgctttctacgaccattacctaattgaacagattcagagcggaaaggagccagaggttcgccagtttttcttcctgctggctgtatgccacacagtgatggttgacagaaccgacggccaactgaactaccaggcagctagtccggatgagggggcccttgtaaatgccgcccgcaatttcggctttgccttcttggcccgcacacaaaacactattacgatcagtgaattgggaactgagcgtacctacaatgtattagcgatactggactttaattctgaccggaagaggatgtcaatcatagtgagaacaccagaggggaatataaaactgtactgtaagggggccgacaccgttatttatgaaagacttcatcggatgaaccccactaagcaggagacccaggatgctctggacatcttcgccaacgagacgctgcggaccttgtgcctgtgttacaaggagatagaagaaaaggaatttactgagtggaataagaaatttatggccgccagcgtcgccagtactaaccgggacgaagccttagataaggtgtacgaggagatagagaaagacctaattctccttggggcgaccgctattgaagacaagctccaggatggcgtaccagaaaccatcagcaagctggcaaaggcggatatcaaaatctgggttctgaccggcgataaaaaagaaacagccgaaaacatcggtttcgcctgcgagctgttaacagaggacacaaccatctgctatggcgaagacattaacagcctgctccacgcccgaatggagaatcagcgtaatcgcgggggggtgtatgctaagttcgcccctcccgtccaggagagcttttttccacccggtggcaatcgcgccttgatcatcacgggtagttggttgaacgaaattttactggagaagaagacaaagcgaaacaagatccttaaattaaagttcccacgaacagaagaggaacggcggatgcgaacccagagtaaaagaaggttggaggcgaaaaaagaacagcgtcaaaagaattttgtggacttagcatgtgaatgttctgcagtgatctgttgcagagtgactcctaagcagaaggcaatggttgttgatttggtcaagcggtacaagaaagccatcactctggcaattggagacggagcaaatgacgtcaacatgatcaagacagcccatatcggagtgggcattagcgggcaggaaggcatgcaggccgtaatgtccagcgattatagcttcgctcaatttcgctaccttcagagactgcttctcgtgcacggaagatggtcatatatcagaatgtgcaaattcctgcgctatttcttttacaagaacttcgccttcaccttggtgcatttctggtacagcttcttcaatgggtattccgcgcagacagcttacgaagattggttcattaccctctataacgtgctgtacacctccctaccagtgctacttatgggactcctcgatcaggacgtaagtgataaactcagtttaagattccccggcctgtacatagtggggcaacgcgacctgttatttaattataagcgcttctttgtttcactcttgcacggggtgttaacctcgatgattctcttcttcatccccctgggggcttacctgcaaaccgtaggacaggatggcgaggccccctctgactaccagtcatttgccgtaaccatcgcctctgccctggtgattacggtgaactttcagatagggctggatacctcatactggacgtttgtcaatgcctttagtatttttggctctattgccctgtatttcggcatcatgttcgacttccattctgctggtattcatgtgctctttccatccgcctttcagttcaccggcactgcatcaaacgccctgcggcagccatacatatggctcaccatcatcctcgccgtagccgtttgtctgctccctgtggtggcaatacgctttctgtcgatgactatctggccctctgaatcagacaagatccagaagcatcgcaagcgcctgaaggcagaagagcagtggcagcgacggcagcaagtgttccggaggggagtcagtacacgcaggtcagcctacgcattctcccatcagcgtggatacgccgatttgataagcagcggacggagtatcaggaagaaacggtcaccactagacgctattgtggcagatgggacagcggagtacaggcggaccggtgactcc

SEQ ID NO: 318835 - DNA, 3753 bp, Artificial Sequence
  derived and/or modified sequence
atgagtacggaaagagactcagagactacttttgacgaagacagccaacctaacgatgaggtggtaccctactctgacgacgaaactgaggacgagctggacgaccaaggcagcgccgtcgaacccgagcagaaccgggttaatcgggaggcagaagagaaccgggaaccgtttaggaaggagtgcacgtggcaggtgaaagccaatgaccgcaaataccacgaacagccacattttatgaataccaagttcttgtgtatcaaagagtcaaagtatgctaacaatgcaatcaagacctacaagtacaacgccttcacctttatcccaatgaatttattcgagcagttcaagcgcgccgctaacctttacttcctagccctgttgatcttgcaagcagtgcctcagatctccacactggcatggtataccactctggtccccctcctggtggtactcggcgtgaccgctattaaagacctcgtggacgacgtggcgcgccacaagatggataaagagatcaacaaccgaacctgtgaggtgatcaaggacggacgattcaaggtcgctaagtggaaagagatccaagtgggcgatgtgatccgcctcaagaaaaatgatttcgtgccggccgacatcctgttgctgtcgagttctgagcccaattctctgtgctacgtcgaaacagccgaacttgatggtgaaaccaacttgaaatttaagatgagtttggagatcactgatcagtatttgcagcgcgaagatacactcgccacctttgacgggttcatcgagtgcgaagagccaaataatcgcttggacaagttcaccgggaccctgttttggcggaacacaagttttcctctagatgccgataaaatacttctgcgtggctgcgtcatccgcaacacggatttttgccacgggctggtgatattcgcaggtgcggacaccaaaatcatgaaaaattctgggaagacccgtttcaagagaaccaagatagattaccttatgaattacatggtctataccatcttcgttgtacttattctgttgtcggcgggccttgcaatcggacatgcttattgggaggctcaagtgggcaactcatcctggtacctctacgacggcgaggatgatactccatcttaccggggttttttaatattctggggatacatcattgttcttaacactatggtcccaattagcctgtacgtgagcgtggaggtcatcagactaggccagtctcactttattaactgggaccttcagatgtactatgcagagaaagatacaccagccaaagccagaactactactcttaacgagcaactaggtcagatccactatattttctccgataagactggtaccctgacacagaatatcatgactttcaagaagtgttgtatcaacggacaaatatacggggaccaccgtgatgccagtcagcacaaccataataagatcgaacaggtggatttcagctggaatacttatgcagatggtaaattggctttttatgatcattatctaatcgagcaaatccaatcaggaaaggaaccagaagtccgccagttttttttcctgcttgctgtgtgtcacactgtgatggtagatagaactgacgggcaactcaattaccaggcagctagcccagacgaaggagccttagtgaacgcggcacgcaactttgggttcgccttcctggctcgaacacagaatacgatcaccatctccgaattaggcacagaacggacttacaacgtcctggccattttggacttcaattctgatcgaaagcggatgtctattattgtgagaacccctgaagggaatataaagctttattgtaagggtgcagatacagtgatttacgaacggctacatcgcatgaatcctacaaagcaggaaacccaggacgctctcgacatcttcgctaacgagacattgagaacactgtgcctttgctataaggagatcgaggagaaagagtttactgagtggaacaagaaattcatggccgcgagcgtggcttccactaaccgcgacgaagccctcgataaggtatacgaggaaatcgagaaagacctgattctcttgggggctaccgcgattgaagacaaactgcaggacggcgtcccagagaccatctccaaactggcaaaggctgatatcaagatctgggttctaacgggggataaaaaggagaccgctgaaaacattgggtttgcatgtgagctacttaccgaggacacaaccatttgctatggcgaagatattaacagtctgctgcacgcacgcatggagaatcaacggaacagaggtggggtgtatgccaagtttgcgccccccgtacaggagtccttttttcctcccggcggcaacagggctctgattattaccgggagctggctcaatgagatattgcttgaaaagaaaacgaagcgtaacaaaattctgaagctgaaattcccacggacagaggaagaaaggagaatgaggacgcagagcaaacggcgactggaggccaaaaaggaacaacgccaaaagaattttgtagacttggcttgtgagtgctccgccgtaatctgctgtcgcgtcacgcctaagcagaaagcaatggtggtcgacttggttaagagatataaaaaggcgattacactagccatcggggatggagccaatgacgtcaacatgattaagacagcccatatcggcgtgggcatcagcgggcaggaaggcatgcaggcagtgatgtcatccgattacagcttcgctcagttcagatatcttcaacggctgctgctggttcatgggaggtggagttacatccggatgtgcaaattcttaaggtatttcttctataagaatttcgccttcacactagtgcatttttggtattccttcttcaatggatattctgcccagactgcctacgaagattggtttattactctgtataatgtcctatatacctcacttcccgtgctcctgatgggcctcctcgaccaggatgtaagtgataagctctctctccggttcccaggcctgtacattgtgggccagcgagatctgcttttcaactataaacgcttctttgtttcactccttcacggagttctgacgtccatgatcctcttctttataccgttgggagcatatctgcagacggtgggacaggacggtgaagctccgagtgactaccaatcattcgccgtgaccatcgccagtgctctggttattaccgtaaatttccagatcgggctcgatacatcttattggacatttgtgaatgctttttccatattcgggagcatagccctttactttggcataatgtttgattttcatagcgctgggattcacgtactgttcccgagcgccttccaatttacgggaaccgcaagcaacgcgctaagacagccctatatctggctcaccatcatcctcgcagtcgcagtctgtcttctgcccgtggtggccatccggtttctgagtatgaccatttggccatctgagtcggataagattcaaaagcaccgtaagagactgaaagcggaggaacagtggcaacgacggcagcaggtgttcagacgcggcgttagtacccggcggagcgcatacgcattctctcatcaaagaggctacgccgacttgatctcttctggccgtagcattaggaagaaacgcagccctcttgatgctatcgtggctgacgggactgcagagtataggcggacaggcgatagc

SEQ ID NO: 318836 - DNA, 3753 bp, Artificial Sequence
  derived and/or modified sequence
atgtctacagaacgggattcagaaactacatttgacgaggattctcagcccaatgatgaagtcgtcccatattcagatgatgaaacagaagatgagctcgatgatcagggatccgccgtcgagccagaacagaatcgggtgaatcgggaagcagaagagaacagggaacccttcaggaaggaatgtacttggcaggtgaaggctaacgaccggaaatatcatgaacagccccattttatgaatactaaatttttgtgcattaaagagtccaagtacgcaaataacgctattaagacttataagtataatgcattcacattcatccccatgaacctatttgaacagttcaaacgggccgccaacctctatttcctagccctacttatacttcaggctgtgccgcagatatcaactctcgcctggtatacaactctcgtgcccctcctggtggtactcggagtgacggctattaaagatttggtggatgacgtggctagacacaagatggataaagaaattaacaaccggacttgtgaagtcataaaagatggacgcttcaaagttgcaaagtggaaagaaatacaggttggggacgtaatcaggctcaaaaaaaatgatttcgtacctgcagatatcttacttctttcaagttccgaaccaaactccctctgctatgtggaaactgcagaactcgatggggaaacaaatctaaaattcaaaatgagtttagagataactgatcagtatcttcagagggaagatactcttgcaacattcgatgggttcatagaatgtgaagaaccaaataacaggctggataaatttactggaactctcttctggaggaacacatctttcccactggatgcagataaaatcctgctccggggatgcgtaatacgaaatactgatttctgtcatggattagtgatattcgctggagctgatacaaaaattatgaaaaactctgggaaaactcggttcaaacggactaaaatagactatttaatgaactacatggtttatactatcttcgtagtgctcatactgctgtccgccgggcttgcaatcggacatgcttattgggaagcccaggtgggaaattcatcatggtatctgtatgatggagaagatgatactccatcataccgaggatttctgatcttctgggggtatataatagtgctcaacacgatggtgcctatatctctttatgtatctgttgaagtaatccgccttggacaatcccactttataaattgggacctgcaaatgtactacgcagaaaaagatacacctgccaaagcaaggactactactctcaacgagcagctcgggcagatacactatatctttagtgataaaacaggaacactcactcagaatattatgacattcaagaaatgttgtatcaatggacagatctatggggatcaccgagatgcttcccagcataatcacaataaaatcgaacaagtggacttctcatggaatacatatgcagatgggaaactagctttttatgatcactatctcatcgaacagatacagtccgggaaagaacccgaagttcggcagttctttttcctgctcgcagtttgccacacagtgatggtggaccgcacagatgggcagctaaattaccaggccgcttcacctgatgaaggagctctagtcaacgctgcgaggaatttcggatttgcctttttggccaggactcagaatactatcacaatctccgaactcggaactgaaaggacgtacaacgttctagccatccttgattttaattctgataggaaaagaatgagtatcatcgttaggactcctgaaggaaacataaaactctattgtaaaggggctgatacagtgatatatgagcggctacacaggatgaatccaacaaaacaggaaactcaggacgcattagatatctttgcaaacgaaacacttcggactctttgtctttgctacaaagagatagaggaaaaagagttcacagaatggaataaaaaatttatggccgcttccgtcgcttcaactaaccgcgatgaagccctcgataaagtgtatgaagaaattgaaaaagacctaatcttgctcggggccactgccatcgaagataaactgcaggatggagtgcccgagacaatctctaaacttgccaaagccgatattaagatctgggtcctaacaggggataaaaaggaaacagcagagaatatcggattcgcttgtgagcttctcactgaagatacgacaatatgctatggagaagatatcaacagtttgctacacgcgcgaatggaaaatcagcggaatcgaggaggggtctatgcaaagttcgcacctcctgtgcaggaatccttctttccccccggagggaatcgagctttaataatcactggatcctggctgaatgaaatcctactagaaaagaaaactaaaagaaacaaaatcctcaaattgaagtttcctcggacagaagaagaaagaaggatgaggactcagtcaaaacggcgtctggaagccaagaaagagcagcgccagaaaaattttgtggatctggcctgcgagtgttccgctgtgatatgctgtagggttacaccaaaacagaaagcaatggttgtggatctggtaaaaagatataaaaaagcaattactctggcaatcggagatggagcaaatgatgttaacatgatcaaaactgcccacatcggagtaggaatttccgggcaggaagggatgcaggccgtaatgtcttctgattattccttcgctcagtttagatacctgcagaggctgttgcttgtgcacgggcgttggtcctatatccggatgtgtaagttcctcagatactttttttataaaaattttgccttcactttggttcatttctggtattcatttttcaacggatattcagcccagacagcttatgaagactggtttatcacattgtataatgtgctgtatacaagtttgcccgtattactcatggggctgctagatcaggatgtcagtgataaacttagtctcaggtttccagggctatatatagtgggacagagggatcttctgtttaattataaacgcttctttgtgtccctgctccatggagtccttacaagtatgattctcttctttatcccactgggagcctacctacagacggtggggcaggatggggaagctccttcagactatcagtcattcgccgtcacaatagcctccgcactcgtaataacagttaatttccagatcggactggatacgagttattggacgttcgtgaacgccttctccatatttgggagtatcgccttgtactttgggatcatgtttgattttcattccgctgggatacatgtgctgtttccctctgcctttcagtttactgggactgcaagtaacgctctcagacagccctatatctggctaacgattattctggcagtggctgtctgtctgctcccagtcgtggccataaggtttctatcaatgactatctggccatccgaatctgataagatccagaaacacagaaagaggctgaaagccgaagaacagtggcagcggagacagcaggtatttaggcgtggggtttcaactcggaggtctgcttatgccttctctcaccagcgagggtatgccgatctaatctcctccggacgctcaatccggaaaaaaagatctcccttagatgccatcgttgccgatgggacagctgaatacagacggacaggggattcg

SEQ ID NO: 318837 - DNA, 3753 bp, Artificial Sequence
  derived and/or modified sequence
atgtccaccgaacgggattcagaaaccacttttgacgaggatagccagcctaatgatgaggtggtgccttactccgacgatgaaaccgaggacgaactcgatgaccaaggatcagccgtggagcctgaacagaatcgcgtgaaccgggaggccgaagaaaacagagagccttttcgcaaagagtgtacttggcaagtcaaggcaaacgatagaaagtaccatgagcagcctcacttcatgaacactaagtttctttgtattaaggagtcgaaatacgcaaacaacgccatcaaaacctacaagtacaacgcttttaccttcataccaatgaacctctttgaacagttcaagagggcagcgaacctgtactttttggcactgcttatcctgcaagcagtcccccagatcagcaccctcgcatggtacaccactctcgtccctctgctcgtcgtgctgggagtcactgccattaaggatctggtcgatgatgttgcaagacataagatggataaggagatcaataacagaacctgtgaagtcattaaagatggaaggtttaaggtggccaaatggaaggaaattcaagtgggcgatgttatccggcttaagaagaacgacttcgtgcctgcagacatacttctgctttcgtcaagcgagccaaactcactttgttacgtcgaaactgccgaacttgacggagaaaccaacctgaagtttaagatgtcccttgaaatcactgatcaatacctgcagcgggaggatacgctggcaaccttcgatgggtttatcgaatgcgaagaaccgaacaatagactggacaagttcacgggtacgcttttttggcgcaacaccagcttccctttggatgcagataagattctgctgcggggttgtgtgatccgtaacaccgatttttgtcacggtcttgtgatttttgcaggagcggataccaagattatgaagaattcaggtaaaacccgctttaagcggactaaaatcgattacctgatgaactacatggtgtatacgatttttgtggtgctgatccttctgagcgccggcctggcgatcgggcacgcctactgggaagcacaggtgggtaacagctcctggtacctttacgatggagaggatgatacgccgtcctacagaggttttctgattttctggggatatatcatcgtgctcaatactatggttcccatttccctttacgtgtcagttgaagtgatccgcttgggacaatcacactttatcaactgggatctgcagatgtattatgcagaaaaggataccccagcaaaggcacgtactactacccttaacgagcaactgggccagattcattacatcttttccgacaaaactggaaccctgacccagaacattatgacctttaagaagtgttgcatcaacggacagatttacggcgaccatagagacgcatcgcagcataaccacaataagatagaacaggtggacttttcgtggaacacctacgccgacggcaaactcgcattctacgaccactaccttatcgagcaaattcagtcgggtaaggaacctgaagtgaggcagtttttcttccttctcgcagtctgtcatactgtcatggtcgatagaacggacggtcaactgaactaccaagccgcgtcaccggatgaaggggccttggtcaacgcagcacggaattttggatttgcatttttggcaagaacccagaacactatcactatctcagaactcgggaccgaacgcacctacaacgtgctggccatcctcgatttcaatagcgaccgaaaaagaatgtccataatcgtgcgtacgcctgaggggaacataaaactttactgcaagggagccgacaccgtcatttacgagaggcttcacaggatgaacccgacgaaacaagaaacccaagatgcacttgatatcttcgccaacgaaacgcttcgaactctttgcctgtgctacaaggaaatcgaagagaaggaatttaccgaatggaataagaaattcatggcagcatcagtggcttctacgaacagggacgaagcactggacaaggtgtacgaggaaatcgaaaaggatctgatcttgcttggagctacggcaatagaggacaagctgcaggacggagtccctgaaactatttccaagttggcaaaggcggacattaagatttgggtgctcactggagataagaaagagactgcagagaacattggcttcgcgtgcgaacttctgaccgaggacaccaccatttgctacggagaggacatcaactcattgctgcacgcaagaatggaaaaccaacgcaaccggggcggagtgtacgccaaatttgcgccaccagtgcaggaatccttttttcctccgggtgggaacagagcactgatcattaccgggtcctggctgaatgaaattctgctggagaaaaagactaagcgcaacaagattctgaagctcaagtttcctcggactgaagaggaacggcgaatgcgcactcaatcaaagagacgtctcgaagcgaagaaagagcagcgtcagaagaactttgtcgacctggcatgtgaatgcagcgctgtcatttgttgtagagtgacccctaaacaaaaggccatggtcgtggatctggtgaaacggtacaagaaagcaatcactctggccattggcgatggagccaatgacgtgaacatgataaagaccgcacatattggagtgggcatctcaggtcaggaaggaatgcaggctgtcatgtctagcgattactcattcgcgcaattccggtacctccagagacttctcttggtgcatggacggtggtcgtacattcggatgtgcaaatttctgagatactttttctacaagaactttgcatttactctcgtccacttctggtactccttctttaacggctacagcgcgcaaacggcatatgaggactggtttatcactctgtacaacgtgctttacactagccttccggtgctcctgatgggactgcttgaccaggacgtgtcggataagctgtcgctgcgctttccaggactctacattgtcggacaacgggaccttctgttcaattacaaacgcttttttgtttcgctgctgcacggagttctgacttcaatgattttgtttttcattcccctgggagcatatcttcaaacggtgggccaagatggtgaagcccccagcgattaccagtcctttgcagtgaccattgcaagcgccctggtcatcactgtgaactttcagatcggtcttgatacctcgtactggactttcgttaatgcattctccatttttggttcaatcgcattgtatttcggcattatgtttgattttcactcagcagggattcatgtgcttttcccttcggccttccaatttactggtaccgcgtccaatgcactgaggcaaccttacatctggttgaccatcattctcgcagtcgctgtgtgtctgcttccagtggtggcaatccgttttctctcgatgaccatttggccgagcgaatcggataagattcaaaagcaccgtaagaggcttaaggcagaagaacagtggcagcgcagacagcaggtctttcgtaggggcgtctcaactagacgctccgcatacgcgttttcgcatcagcgagggtacgctgatcttatctcgtcgggacgctccatacgaaagaaaaggagccctctcgatgccatcgtggcggatgggactgccgaataccggcggactggtgattcc

SEQ ID NO: 318838 - DNA, 3753 bp, Artificial Sequence
  derived and/or modified sequence
atgtcaaccgagcgcgatagtgagactacctttgacgaggactcccaaccaaatgatgaagtggtgccatactctgatgatgagactgaggacgaattggatgatcagggttcagcagtcgagccagaacaaaaccgcgtgaaccgcgaggcagaagaaaaccgggaaccttttcggaaggagtgtacctggcaggtgaaagccaacgacagaaagtaccacgagcaaccacatttcatgaacactaagtttctttgtatcaaggaatccaagtacgcaaacaatgccattaagacttacaagtacaatgcctttacttttatccccatgaacctttttgaacaattcaagagagcggccaacctctacttccttgcactcctgatactgcaagccgtgccgcagattagcacgcttgcatggtacactactctggtccctctcctcgtggtgctgggtgtgaccgccatcaaagatctggtcgatgacgtcgccagacacaaaatggataaggaaatcaacaacaggacctgcgaggtcattaaggatgggcgtttcaaggtcgcaaagtggaaagaaattcaggtgggtgacgtgatccgtttgaaaaagaacgatttcgttcccgcagacatccttctcctttcgtcatccgagcctaactcgctgtgttacgtggagactgcagaacttgacggtgaaactaacctgaagttcaagatgtcgcttgaaattaccgatcaataccttcaaagggaagatactctggcaacctttgacggattcatcgaatgtgaagaaccaaacaaccggctggataagtttactggcacgcttttttggagaaatacttcgtttcctctggacgcagacaagattctgctgcgaggctgtgttattcgtaacaccgacttttgtcacgggcttgtcatttttgccggagcagataccaagatcatgaagaattcgggtaagactcggttcaagcgcaccaaaatagattacctcatgaactatatggtttacacgatttttgtcgtactgatacttctctcagctggtttggccattggacatgcgtactgggaagcacaggttggaaactcctcctggtatctgtacgatggagaagatgacactcccagctaccgtggtttcctcattttctggggatacataattgtacttaatactatggtgccaatttcgttgtacgttagcgtagaagttatcagacttggacaatcccactttatcaattgggatcttcagatgtactacgcagagaaagatacccctgcaaaggcaaggaccaccacccttaacgagcagctcggacaaattcattacatcttctcagataagacgggaactctgacccaaaacattatgacctttaagaagtgctgtattaacggccagatttacggcgaccatagagatgcctcccaacataatcataacaagatcgaacaggtcgatttttcatggaacacttacgcagacggcaagctggcattttacgatcattacctcattgaacaaatccagtcgggtaaagagcctgaagtgcgccagttcttttttcttctggcagtgtgtcacaccgtcatggtcgaccgcaccgatggtcagcttaactaccaagccgcaagccctgatgaaggcgcactggtgaatgccgcacggaattttgggttcgccttcctggcacggactcagaacactattactatttccgaactgggtaccgaacggacctacaacgttctggcaattctggactttaactcagatcgcaagaggatgagcattattgtaagaaccccggaaggcaacattaaactttactgtaagggggcagataccgtgatttatgagcgtctgcatcgcatgaaccctactaagcaggaaactcaagatgctctggacatttttgcaaacgaaaccctcaggacgctgtgcctgtgctataaggagatcgaagaaaaggagtttaccgaatggaataagaagtttatggctgctagcgtggcgtccactaatcgcgatgaagcactcgataaagtttacgaggaaatcgaaaaagacttgattcttctcggagccaccgctattgaagataaacttcaagacggggtgccagaaactatttctaaacttgcaaaagcagatatcaagatatgggtccttaccggtgacaaaaaagagacggctgagaatatcggatttgcttgcgagctgctgacggaagataccactatctgctacggagaggacataaacagtctcctgcatgccagaatggaaaaccaacgcaatagaggaggagtctatgctaagttcgcacctccggtgcaggagagcttttttccgcctggtggaaaccgagcactgattatcaccggatcatggctgaatgagattttgcttgagaagaaaaccaagagaaacaagatcctcaagctgaagttccccaggactgaggaagagcgccgaatgaggactcaatcgaaaaggagacttgaagcaaaaaaggaacagcggcagaaaaactttgtggatcttgcctgtgagtgttccgcagtgatatgttgtagagtgacccctaaacaaaaggcgatggtggtggatctcgtgaagcgctacaaaaaggccattacccttgcgatcggcgacggagccaacgatgtcaatatgataaagaccgcacacatcggagtgggaatttcgggtcaagaaggcatgcaggccgtgatgtcgtcagattactcgttcgcccagtttcgctatcttcaacggctgttgcttgtacacgggagatggagctacattaggatgtgcaagttcctccgttacttcttctacaagaattttgcgttcactctggtgcatttttggtattcattctttaacgggtacagcgcacaaacggcatacgaagattggttcataaccttgtacaatgtcctttacacttcgcttccagtgcttctgatgggactcctcgatcaggatgtgtcagataagctctcccttagattccctggtttgtacatcgtaggtcagcgtgacctgctctttaactataagcgattctttgtgtcgcttcttcatggagtgctgacgtcgatgatcctcttctttatcccactcggtgcatacctgcaaactgtcgggcaagatggagaggcaccttccgactaccaatcctttgcagtgaccatcgcgtccgcactggtgataaccgtgaattttcagattggactcgacacctcctactggacctttgtgaatgcgttttccatctttggtagcatcgcactgtactttggaattatgttcgactttcattcagcgggcattcatgtgttgtttcccagcgcattccaattcaccggtaccgcatcgaatgccctcaggcagccatacatttggctcactattatcctggcggtcgccgtgtgcctcttgcccgttgtcgctattaggttcctgtctatgactatatggccaagcgaaagcgataagatacaaaagcatcgtaaaaggctcaaagcagaagagcaatggcagagacgtcagcaagtctttagacggggcgtctcgaccagacgatccgcgtacgcgtttagccaccaacggggctacgccgatcttatttcgtctgggcgatcaatccggaagaaacgctccccccttgacgcaattgtggctgatggcactgcagagtacagacggaccggggattcg

SEQ ID NO: 318839 - DNA, 3753 bp, Artificial Sequence
  derived and/or modified sequence
atgtctaccgaacgagactcagagactacgtttgacgaggattcccagccgaacgacgaggtggtcccctactccgacgatgaaactgaggatgagctcgacgaccagggttctgccgtggagccagaacagaatagagttaaccgcgaagcagaggagaatcgcgagccgttccggaaagagtgcacttggcaggtgaaggccaacgatagaaagtaccatgagcagcctcactttatgaataccaaatttctctgtatcaaggaaagcaagtacgcgaataatgccatcaaaacctacaagtacaacgcctttacctttatcccaatgaacctgtttgaacagttcaaaagagcagcgaacctgtactttctcgccctgctgatcctgcaggccgtcccacaaatttccactctcgcgtggtacacgactctggtgcctctgctcgtggtcctgggcgtgactgcgattaaagacctggtggatgacgtggcgcggcataagatggacaaggagatcaataaccgcacctgcgaggttatcaaagacggacgcttcaaagtggctaagtggaaggaaattcaggtgggcgatgtgatcaggctgaagaagaacgacttcgtgccggccgacatcctgctgctgtcctcatcggagcctaactcgctgtgctacgtggagactgcggaactggacggagagactaacctcaaattcaagatgtcacttgagatcactgaccaatacctgcagagggaggacacgctcgcaacttttgacggattcatcgaatgcgaggaaccaaataaccgcctcgataagtttaccggaactctgttctggaggaatacttcgttcccccttgacgcggacaaaatactgctccgggggtgcgtgatcagaaacactgacttttgtcacggactcgtgatcttcgcgggagcggacactaagatcatgaagaactcaggaaagacccggtttaagcggaccaaaatcgattacctgatgaattacatggtctacaccatattcgtggtgctcatcctgctgtcagctgggctggccattggacacgcgtactgggaggcgcaggttgggaacagctcttggtacctgtacgatggcgaggatgacaccccgtcataccgcggattcctcatcttttggggttacatcatcgtcttgaatactatggttccgatttcactgtacgtgtccgtggaggttatccgcctcgggcagtcacacttcatcaactgggacctgcaaatgtactacgccgaaaaggacaccccagcaaaagccagaaccaccactctgaatgaacagctggggcaaatccattacatcttctcagacaaaaccggaaccctgactcagaacatcatgactttcaagaaatgttgcattaacggccagatctacggagatcaccgagatgcgtcgcaacacaaccacaacaaaatcgagcaagtggacttctcgtggaatacttacgcggacggaaagctggccttttacgaccattacctgattgaacagatacaatccggaaaagaacccgaagtccgtcaattctttttcctgttggcagtgtgccatactgtcatggtcgatcggacggatgggcaactgaactaccaggcggcttcgcctgatgaaggagctctggttaacgcagcaagaaatttcggcttcgcatttctcgcccggacccagaacaccatcactatctcggaactgggcaccgagaggacttacaatgtgctggcgatccttgatttcaattccgatcgcaagcggatgtccattatcgttcgcactcccgaaggaaacatcaagctgtattgcaagggagcagacaccgtgatctacgagcggctgcaccggatgaacccaaccaaacaggaaacgcaggatgctctcgacatctttgcgaacgaaaccctccggaccctgtgcctgtgctacaaggagatcgaagagaaggagttcactgagtggaataagaagttcatggccgcgtcggtggcgtctacgaaccgggacgaagcactggacaaggtgtatgaggaaatcgaaaaggacctcatcctgctcggagctactgccatcgaagataagctccaggatggagtcccggaaaccatctccaaactggctaaagctgacatcaagatttgggttctgaccggagacaagaaggaaaccgctgagaacatcggattcgcctgtgaactgttgaccgaggataccactatctgttacggggaggacatcaacagcctgctccatgcgcgtatggaaaaccaaagaaacagaggaggcgtgtacgccaaatttgcaccaccggtccaagagtcattcttcccgcccggcggaaaccgggcgctgatcatcactgggtcctggttgaacgaaatcctgctcgagaagaaaaccaagcgcaataagatcctgaaactgaagttcccgcggaccgaggaggaaagacgcatgcgcacccagtcaaagagaagattggaagcgaagaaagaacagcggcaaaagaatttcgtcgaccttgcatgcgagtgcagcgccgtcatctgttgtcgcgtcaccccgaagcagaaggccatggtggtcgatctcgtgaagcgctacaagaaggcgatcactctcgctattggcgacggcgctaacgatgtgaatatgatcaaaaccgcccacatcggagtgggcattagcggccaggagggcatgcaggcagtgatgagcagcgattattcgtttgctcagttccgctacctgcagcgcctgcttctggtgcacggacggtggtcatacattaggatgtgcaaatttctgagatacttcttctacaagaatttcgccttcactctggtccacttttggtactcattcttcaatggttactccgcacagaccgcgtacgaggactggttcatcaccctgtacaacgtgctgtacacctcgctgccggtgctcctgatgggacttctcgatcaggacgtgtcagataaactttcacttcgattcccaggactctacatcgtgggacaacgcgatctcctgttcaattacaagcgcttcttcgtgtcgctgctgcatggagtgttgaccagcatgatcctgtttttcattccacttggagcatatctgcagaccgtggggcaggacggagaggcccctagcgactaccaatccttcgcggtgaccatcgcctcggccctcgtcatcaccgtcaattttcaaattggactggacaccagctattggacctttgtcaatgctttctcgatcttcggaagcatcgctttgtacttcggcatcatgtttgatttccacagcgctggcatccacgtcctcttccctagcgcctttcaattcactgggaccgcctcaaacgccctgagacagccgtacatttggctcactatcatcctcgccgtcgcggtgtgcttgctccctgtggtggcaatacgtttcctctcaatgaccatctggccttcggagtcggacaaaatccagaagcacaggaaacgcctcaaggcagaagagcagtggcaaagacggcagcaggtgtttcggcggggcgtgtcaacccgcagaagcgcctacgcattttcccaccagcgcggatacgccgacctcatcagctctggcagaagcatccggaagaagcgcagccctcttgatgcgatcgttgccgacggtactgcggagtacagaaggactggtgattca

SEQ ID NO: 318840 - DNA, 3753 bp, Artificial Sequence
  derived and/or modified sequence
atgtcaacagaaagagattctgaaacaacgttcgatgaggattcccagccaaatgatgaagtggtgccttattccgacgacgagactgaagatgaactggacgatcagggatcagccgtcgagcccgaacagaaccgcgtcaacagggaggccgaagagaacagggaaccgtttcgtaaagaatgtacttggcaagtgaaagctaatgatcggaaatatcacgaacagccccactttatgaatactaaatttctatgtatcaaagagtctaaatatgccaacaacgctattaaaacatataagtacaatgctttcacttttatccccatgaatctctttgaacagttcaaaagggccgccaacctctatttcttagcccttctgattctgcaggcggtgccccagatctctactctggcctggtatacaactctggtccccctgttagtggtcctgggggtgactgccatcaaagatctcgtagatgatgtagcccgacacaaaatggataaagagattaataacaggacatgcgaagtcatcaaagatggaaggtttaaagtcgctaaatggaaggaaatacaggtcggagatgtgataagactcaaaaaaaacgatttcgttcccgctgatatactcctcctctcgagttcagaacccaattctctgtgttacgtggaaactgcagaacttgatggagaaacaaaccttaaatttaaaatgtcactcgaaatcactgatcagtatctgcaacgggaagatacactggctacgtttgatgggtttatagaatgtgaagaacccaacaacagactggataaattcacaggaacacttttctggcgcaacacatctttccctcttgatgccgacaaaatacttctacggggatgcgtcatccgcaatactgacttctgtcatgggctcgtcatctttgcaggagcagatactaaaattatgaagaactccggaaagactaggtttaagcggactaaaattgattacctaatgaattatatggtatacactatcttcgtggtactaatacttctgtccgcggggcttgcaattggacacgcctattgggaagcccaggtgggaaattcctcatggtatctatatgatggagaagatgatacacctagttatagaggatttctcatattctggggatatattatcgtactgaatacaatggtacccatcagtctttatgtgtcagtggaggtgatcagattggggcagtcacacttcattaattgggatctgcagatgtactatgccgaaaaagatacacctgccaaagccaggactactacacttaacgaacagcttggacagatccactatatcttctccgataaaactgggacactcacacagaacataatgacttttaagaaatgctgtataaacgggcagatctacggagatcatcgggatgcatctcagcataaccataacaaaatagaacaggttgatttttcatggaatacatatgcggatgggaaattagcattctatgaccattatttaatcgaacagatccagtcgggaaaagaaccagaagttagacagtttttttttcttttggccgtgtgccacacagtcatggttgatcggactgatggacaactaaactatcaagccgcctccccagatgaaggagctctcgttaatgctgctcgaaacttcggattcgctttcttagcacggacgcagaatacaatcactatctctgaacttggaactgagcgaacatataatgtgcttgccatcttagacttcaattcagacagaaaacggatgtcaataatagtaagaacacctgaggggaatataaaactttattgtaaaggagcagatacagtcatctatgaaagattacaccggatgaatcccactaaacaggaaactcaggatgcgctcgacattttcgctaacgaaactctccgaactttatgcctctgctataaagaaatcgaagaaaaagaatttacagaatggaacaagaaatttatggccgccagtgtcgcgtctacaaaccgggatgaggcactggataaagtgtatgaagagatcgagaaagatctgattcttctaggagccacagcaatagaagataaactacaggacggagtgcccgaaactatatccaaactcgctaaagctgatataaaaatatgggtattgacaggagataaaaaggaaacagcagaaaacataggattcgcttgcgaattacttactgaagacactacaatatgttatggggaagatattaatagtctcctccacgcccgaatggaaaaccagcgaaaccgcggaggggtatacgcaaaattcgctccaccagttcaggaaagttttttccctcctggggggaaccgggccctaataataacagggtcttggctaaacgaaattctcctagaaaaaaagactaaacgcaataaaatcttaaagttaaaattccctaggacagaagaagaaagacggatgcggactcagtccaaacgccggttagaagcaaaaaaagaacaaagacagaaaaacttcgtggacctcgcgtgtgaatgttctgcagtcatctgttgtcgggtgacaccaaaacagaaagccatggttgtggatctcgtaaaacggtataagaaggctataacactggccatcggagatggggctaacgatgtgaatatgattaaaactgcccatataggagtggggatctctgggcaagaagggatgcaggcggtgatgtcgtcggactacagttttgcccagtttaggtaccttcagcggctactactagtgcatggaagatggtcatacatccgaatgtgcaaattcctccgatatttcttttacaaaaatttcgcatttactcttgtacatttctggtactcatttttcaatgggtattcagcgcagactgcctatgaagattggtttattactctttacaacgtcctctacacttctctacccgtacttctcatgggactgcttgatcaggatgtgtccgataaactttctttacggtttccagggctctatatcgtggggcagcgcgatcttctgttcaactataaaagattttttgtgtccctcctccacggagtgctgacatctatgattctattcttcattccattaggagcctatttgcaaactgtaggacaggacggggaggcaccctcagattaccagagttttgctgtaacaattgcttctgcactcgtgattactgtgaactttcaaattgggcttgatacaagttattggacattcgtgaatgctttcagtatctttgggtcaattgccctgtattttggaatcatgtttgatttccactctgccgggatccacgtgctgttcccctccgctttccagtttacaggaacagcatcaaacgctcttcgccagccctatatctggctcactataatcctcgccgtcgcagtgtgccttctcccagtggtggccatccgattcctgtccatgactatttggccaagtgaatctgataaaatccagaaacacagaaagaggttgaaagcagaagaacaatggcaaagacggcagcaggtttttcggaggggggtgtccactcggcgctcagcctacgctttctcccatcagaggggatacgccgatttgatcagttcagggcgctccataaggaaaaagcggtccccacttgatgccatagttgctgatggaacagcagaatacaggaggactggggatagt

SEQ ID NO: 318841 - DNA, 3753 bp, Artificial Sequence
  derived and/or modified sequence
atgagtactgaacgggattcggagactactttcgatgaagattcgcaaccgaatgacgaggtggtgccctactcggacgatgaaacggaagatgaactggacgaccaggggtcagcggtggagccagaacaaaaccgcgtcaacagagaagctgaagaaaatcgggagccgttcagaaaggaatgcacttggcaggtgaaagctaacgatcggaagtaccacgagcaacctcatttcatgaacaccaagtttctctgtataaaggaaagcaagtacgcaaacaacgcgatcaagacctacaaatacaatgcgttcaccttcattccgatgaacctgtttgagcagttcaagcgggcggccaacttgtacttccttgcactcctgatcctccaggccgtgccacagatctccactctggcatggtacactactctcgtgcccctcctcgtggtgctgggcgtgactgccattaaggacctcgtggacgatgtggcccggcacaaaatggataaggaaatcaataaccggacctgcgaggtcatcaaggatggacgcttcaaggtggccaaatggaaagagatccaagtgggcgacgtgatccggctcaagaaaaacgatttcgtgccggcagacattctgctcctgtcctcatcagagcccaacagcctgtgctacgtcgagactgccgaactggacggagaaaccaacctcaagtttaagatgagcctggaaatcactgatcaatacctgcagcgcgaggacaccctcgctactttcgacggtttcatcgagtgcgaagagccgaataaccgcctcgacaagttcactggaacgctcttctggagaaataccagctttcctctggatgccgacaagatactcctgcggggatgcgtcattcgaaataccgacttctgccatggactcgtgatctttgccggagcagacaccaagatcatgaagaatagcggaaagactcgtttcaagaggacgaagatcgactacctgatgaactacatggtatacacgatctttgtcgtcctgatactcctctccgcgggtttggctatcggccacgcatactgggaggcccaagtgggaaactcgtcgtggtacctgtacgatggcgaggatgacaccccgtcctaccgcggctttctcatcttctggggatacatcattgtgctgaacactatggtgcctatttcgctgtacgtgtctgtggaggtgattaggcttggtcagtcccacttcatcaattgggacctccaaatgtactacgcggaaaaagatacccctgccaaggcacggacgactactttgaacgagcaactcgggcagatccactatatctttagcgataagacgggtacccttactcaaaacatcatgacgttcaagaagtgttgcatcaatggacaaatctacggagatcaccgggacgcctctcaacataaccacaacaaaattgagcaggtggacttttcatggaatacctacgccgatgggaagctcgccttctacgaccactaccttatcgagcagatccagtcgggaaaagaacccgaggtgcgccaattcttcttcctgctggctgtctgccacaccgtgatggtggaccgcacggacggacaattgaactaccaggctgcgtcgccggacgaaggggcactggtcaatgcagctagaaacttcggcttcgcattcctcgctagaactcagaatactattactatctccgagcttggaactgagaggacttacaacgtcctcgccatcctcgacttcaattccgataggaagcgcatgtcaatcattgtgcggacccccgaagggaatatcaaactctactgcaagggagccgacacggtgatttacgaaagactccatcgcatgaacccaaccaagcaggaaacccaggatgctctggacatttttgccaatgaaactctgcgcactctctgcctctgctacaaagaaatcgaagagaaagaattcactgagtggaataagaagttcatggcggcctcggtcgccagcactaaccgtgacgaagcactcgacaaagtgtacgaagaaatcgaaaaggacctcatactgctgggtgccactgcaatcgaggataagctccaggatggcgtgcccgaaactatctcaaagctcgccaaggccgacattaagatctgggtgctcaccggagataagaaggagactgcagaaaacatcggattcgcttgtgagctgctcactgaagataccaccatttgctacggtgaggacatcaactccctgctgcacgctagaatggaaaaccagaggaacaggggcggcgtgtacgcgaagtttgccccgccggttcaagagagcttcttcccgccgggcggcaaccgggccctgatcatcactgggagctggctcaatgagatcctgctggagaagaaaaccaagcgcaacaagatccttaagctgaagttcccgcggaccgaagaagaacggagaatgaggacccaatcgaagcgccgcctggaagccaagaaggaacagcggcagaagaattttgtggatttggcctgcgaatgctcagctgtgatttgctgccgcgttacgcccaagcaaaaggctatggtggtcgacctcgtcaaacggtacaagaaagctattaccctggcgatcggagatggcgcgaatgacgtcaacatgatcaagaccgcccacatcggcgtggggatctcagggcaggaaggaatgcaggcggtgatgtcctccgattattcgttcgcccagttccgctatctgcagcgtctgcttctggttcacggaagatggtcgtacattcgcatgtgtaagtttctgagatactttttctacaaaaactttgcttttactctcgtgcatttctggtactccttctttaatggatactcagcccaaaccgcctacgaggattggttcatcactctgtacaacgtgctgtacacctcactgcctgtcctgctcatgggactgctggatcaagacgtctcggacaagctgtcgctgagattccctggactgtacatcgtgggacagcgggacctcctgttcaactacaagagattcttcgtgtcgctcctccacggagtcttgacttcgatgatcctctttttcatcccgcttggggcttacctccaaacggtggggcaagatggcgaagcaccaagcgactaccagtcattcgcagtgactatcgcttccgcccttgttatcactgtgaactttcagatcggactggatacctcctattggactttcgtgaatgctttttccatcttcggttccatcgccctgtacttcggcatcatgttcgacttccacagcgcgggaatccatgtgctcttcccatccgcttttcagttcactgggaccgcatcgaatgcattgcggcagccctacatctggctcaccatcatcctggcggtggccgtgtgcctcctgccagtagtggcgatcaggttcctgtcgatgaccatctggccatcagaatccgacaagatccagaaacaccggaagaggcttaaagctgaggaacaatggcagcgccggcagcaggtctttcgccgcggtgtctcaacgcgccgcagcgcctacgcgttttcacatcagcggggatatgctgatctcatctcgtcgggcagatctatccgcaagaagcgctcccctcttgatgccatcgtggcggacgggaccgctgagtaccgcagaactggagactcc

SEQ ID NO: 318842 - DNA, 3753 bp, Artificial Sequence
  derived and/or modified sequence
atgagcaccgaacgcgactcagaaaccactttcgacgaggacagccaaccaaacgacgaagtggtcccttacagcgacgacgagactgaggacgagctcgacgaccaggggtccgctgtggaacccgaacaaaaccgcgtcaaccgggaagccgaagaaaatagggagccgttccggaaggagtgcacttggcaggtcaaggcaaatgatcggaagtaccatgaacagccccactttatgaacaccaagttcctttgcatcaaggagtcgaagtacgcgaataacgccatcaagacgtacaagtacaacgcatttacgtttatcccgatgaatctgtttgaacaattcaaacgcgccgccaatctgtacttcctcgcccttctcatccttcaagccgtcccgcagatttctactctggcctggtacaccaccctggtgccgctgttggtggtcctgggtgtgactgccatcaaggacctcgtggacgatgtcgcaagacacaaaatggataaggagatcaataaccgaacgtgcgaagtgatcaaggatggacggttcaaggtggcgaaatggaaggagatccaggttggcgacgtgatccgcctcaagaaaaacgactttgtgccggctgacatccttctgctgtcatcatcggaaccgaactcgctctgttacgtggaaaccgccgaactggacggggagactaatctgaagttcaaaatgtctctggaaatcacggaccagtacctccaacgcgaggatacgctggctactttcgatggcttcatcgaatgcgaagagcccaataaccggctggataagtttaccggaacgctcttttggcggaacacctcattcccgctggacgctgataagatcctccttaggggttgcgtgattcggaatactgatttctgtcatggcctcgtcatctttgccggcgccgacaccaaaatcatgaagaattctggaaaaacccggtttaagaggaccaagattgactaccttatgaattacatggtctacactatcttcgtcgtccttatactgctgtcggcgggacttgccatcggtcacgcctactgggaagctcaggttggaaacagctcgtggtacctttacgacggagaagatgacaccccgagctacaggggattcctgatcttctgggggtacatcattgtgttgaatactatggtgccaatctcactctatgtgtcagtggaggtcatccggctggggcagtcacacttcatcaattgggatctccaaatgtactacgccgagaaagatacgccagccaaggcccgtactactactctgaacgagcagctgggacagatccactacatcttctcggataagaccggaacgctgactcagaacatcatgactttcaagaaatgctgcattaatggacagatttacggagatcatcgggacgcttcgcagcataatcacaacaagatcgaacaggtcgacttctcgtggaatacgtatgcggacggaaagctggctttctacgatcactatttgattgagcagatccaaagcggaaaggaaccggaggtgagacaattcttcttcttgctggccgtgtgccacactgtgatggtcgacagaaccgatggtcagctgaactaccaagccgcttcaccagacgaaggcgccctggtgaacgcagccagaaactttggcttcgcctttctggcacgtactcagaacacgatcaccatatcagaactcggcactgaaaggacgtacaacgtgttggctatcctggacttcaattcggatcggaaaagaatgagcattatcgttagaaccccagaaggcaacataaaactgtactgcaagggggcggatactgtcatctacgaaagacttcatcggatgaaccccactaagcaggaaactcaagatgcactggacatcttcgcgaacgaaactctccgcaccctgtgtctctgttacaaggagatcgaggagaaagaatttactgaatggaacaagaagtttatggctgcctcggtggcctccactaatcgggatgaagcgctggacaaggtgtatgaagaaatcgaaaaggatctgatcctcttgggagccactgcgatcgaggacaagctgcaggatggtgtcccagaaactatctccaaactggcaaaggcggacatcaaaatctgggtgctcactggcgacaagaaggagactgcagaaaacattggattcgcatgcgagcttctgaccgaggacaccaccatatgctacggagaagatatcaactccctgctccacgcgcgcatggaaaatcagagaaaccgcggcggggtgtatgcgaaattcgcgcccccggtccaagagtcgtttttcccgccgggaggcaacagagctcttatcatcactggatcctggctgaacgaaatcctgctcgagaaaaagaccaagcgcaacaagattctcaagctgaagttcccgcggaccgaggaagagcggcgcatgcggacccagtctaagcggcgccttgaagcgaaaaaagagcaacggcaaaagaacttcgtggacctggcttgcgagtgctcggcagtgatctgctgcagggtcacccctaaacagaaggcaatggtggtggacctcgtcaaacgttacaaaaaggcgatcaccctggcaatcggtgacggcgccaatgatgtcaatatgatcaagactgcacatattggagtgggcatctcgggacaggaaggtatgcaagccgtgatgagctccgactacagctttgcgcaattcaggtatctccaacgcctcttgctggtgcatggtagatggagctacatcagaatgtgtaagtttctcagatacttcttctacaagaattttgctttcaccctggttcacttctggtacagctttttcaacggatacagcgcgcagaccgcatacgaggattggttcatcaccctgtacaacgtgctgtacacgtccctgccagtgctgctcatgggtctgcttgatcaagatgtgtcggataagctgtccctcagattccccggcctgtacatagtgggccagcgcgacctgctcttcaactacaaaaggttcttcgtgtccctgcttcatggcgtgctcacctccatgatcctgttctttatcccgctcggagcatacctccagaccgtggggcaggacggcgaggcgccgtcggattaccagtccttcgcagtgaccatcgcttcagcgcttgtgattaccgtcaacttccagatcggactcgacactagctactggaccttcgtcaatgcgttcagcatcttcggctcgatcgccctctactttgggatcatgttcgatttccactccgcggggattcacgtgcttttcccatccgcattccaatttaccggaaccgcctcgaacgcgttgcggcaaccttacatttggctcaccatcatccttgcggtggccgtttgtttgctgccggtggtcgccatcaggtttttgtcaatgactatctggccttcggagagcgacaagatccagaaacaccgcaagagactgaaggccgaggaacagtggcagaggcgtcaacaggtgttccggcggggagtctccactcggagatcggcctatgctttctcccatcaacgcggctatgccgacctgatctcgagcggacgcagcatccgcaagaagaggtccccactggatgccatcgtggcagacgggaccgcggagtaccggagaaccggtgactca

SEQ ID NO: 318843 - DNA, 3753 bp, Artificial Sequence
  derived and/or modified sequence
atgtcaactgagagggatagcgagaccacttttgatgaggacagtcagccaaacgatgaagtggtgccttatagcgacgatgaaaccgaggacgagctggatgatcagggctcagccgttgaacccgaacagaacagggtgaacagggaggccgaggagaacagggagccatttcgaaaagagtgtacctggcaggtgaaggccaacgacaggaaatatcacgaacagcctcattttatgaacacaaaattcttatgcataaaggagtctaagtacgccaataatgccattaaaacttataagtacaacgcctttacctttatcccaatgaacctctttgaacagtttaagcgcgctgcaaatttatattttctagctctgctgatccttcaagccgttccacagatttccacactcgcatggtataccacactggtccctctgttagtggttctgggcgtcaccgcaattaaagacctagtggacgatgtcgcccggcataagatggataaggagattaataaccgaacctgcgaggtgataaaggatggacgcttcaaggttgccaaatggaaagagatccaagtcggagatgtgatcaggctgaaaaagaacgactttgtacccgctgacattctgttactgtcttctagtgaacccaactccttatgctacgtggaaactgcagagctggacggggaaactaatctgaagttcaaaatgagcctggagattacagatcagtacctgcagcgggaagatactttagccactttcgatggcttcattgagtgtgaagagcctaataacaggctcgacaagtttaccgggaccctgttctggagaaacacctctttccctctcgatgctgataagattctgctacggggttgtgtgatccgtaacacagacttttgccacggactggtgattttcgccggggctgacaccaagattatgaaaaattccggcaaaaccaggttcaaaaggaccaaaatagattatctgatgaactacatggtgtatactatctttgtggtgctcatactcctgtctgccggcctcgctataggacacgcttactgggaagcccaggtgggtaattcctcttggtacctttacgatggtgaggatgacactccaagctacagagggttcctgatattttgggggtacataattgttctgaataccatggtgcccatcagcctgtatgtgtccgtcgaagttatacgcctgggccagagtcactttataaattgggaccttcagatgtattacgccgaaaaagacacaccagctaaggcccgcactaccactctgaacgaacagctgggccagattcactatatcttctctgataagaccggcaccctgacacagaacattatgactttcaaaaagtgttgcataaatgggcagatctacggcgatcacagggacgcaagccaacacaatcacaacaaaatagaacaggtggacttctcatggaacacatacgcagatgggaagctcgctttctacgaccactacctgatagagcagatccagtccggcaaagaaccagaggttcgacagtttttctttctgcttgctgtgtgtcacacagtgatggtcgaccggacagatggccagctgaactaccaagccgcctcccccgatgagggggccctggtgaacgcagcccgcaactttggctttgctttcctggcccggacacagaacaccatcactatctctgagttagggactgagaggacttataatgttctggccatccttgactttaacagtgacaggaagagaatgtcaataattgtgcgaaccccagagggtaacattaagctttattgcaagggcgctgacactgtgatttacgagaggctacacagaatgaacccaaccaaacaggagacacaagatgcactggatatcttcgcaaatgagactctccgcaccctttgtctgtgttacaaggagatcgaagagaaggagtttaccgagtggaacaagaagttcatggctgccagcgtcgcctccaccaacagagatgaggctctggacaaggtctatgaggagattgagaaagacttaattctgctgggagctaccgccatagaggacaaactgcaggacggcgtcccagagacaatctctaagctagcaaaggctgacatcaaaatatgggtgctgacaggggataagaaagagaccgcagaaaacatcggattcgcatgcgaactgctgaccgaagataccacaatttgctatggggaggatataaacagtctgctgcatgctcgtatggagaatcagaggaacaggggaggcgtgtacgccaaattcgcccctccagtacaagaatctttttttccacccggcgggaacagggcactgattattaccgggtcctggctgaacgagattttactggaaaaaaagactaaacggaataagatcctgaagctcaagtttcctagaaccgaggaggagcgcaggatgagaacccagtctaaacggaggctagaggctaaaaaagagcagaggcagaagaactttgtggacctagcctgcgagtgcagtgccgtgatttgctgcagggtgaccccaaaacagaaagccatggtcgtggacttggtaaagcgatacaagaaggccatcacactggcaattggcgacggagcaaatgacgtcaatatgattaagactgcccacatcggcgtgggcattagcggtcaggaagggatgcaagcagtgatgtccagtgattattcatttgctcagttccgatacctgcagcgattactgctagttcacggacgttggtcctatataaggatgtgtaagtttttgagatacttcttttataagaatttcgccttcacactggtgcacttttggtacagcttcttcaatggttactctgcacagaccgcatacgaggactggttcatcacactgtataacgtcctatacacctccttaccagttctgctgatgggcctgctggaccaggatgtttctgataagctgagtcttcgtttccctggtctgtacatcgtgggccagagggacttactatttaattacaagcggtttttcgtcagcctgcttcatggagtgctaaccagcatgatccttttcttcattccactgggagcttatttgcaaaccgtgggccaggacggcgaggccccaagtgactaccagtccttcgccgttactatagctagtgcactggtcatcaccgtgaattttcagattggactggatacttcttactggactttcgttaacgccttttccatcttcggaagcatagccctgtactttggcataatgtttgattttcattctgccgggatccacgtgttgttcccaagtgcctttcagttcactgggactgcctccaacgccctacgccaaccctatatctggctcaccataatcctggctgttgccgtgtgcctgctccccgtcgtcgctattcggtttctgtccatgaccatttggccatccgaatccgacaaaatacagaagcaccgcaagagacttaaagcagaagaacaatggcaaagacggcagcaggtgttccgccgtggcgtgtctactcggcgatctgcctacgccttttcccaccaacgcggttatgccgacttaataagcagcggcaggtctattcggaaaaagcgcagcccattagacgctatcgtcgctgatggaaccgcagagtatagaaggacaggtgactcc

SEQ ID NO: 318844 - DNA, 3753 bp, Artificial Sequence
  derived and/or modified sequence
atgagcacagagcgcgatagcgagacaacttttgatgaggactcacaaccgaatgacgaggttgttccgtattccgatgacgagaccgaggacgaattagatgatcaggggtcagccgtcgagccggaacaaaaccgagtgaaccgagaagctgaggaaaatagggaaccttttaggaaggaatgcacctggcaggtgaaggctaatgatagaaagtaccacgagcaaccacatttcatgaacacaaaattcctgtgcattaaggagtctaagtacgcaaataatgccattaagacatataagtacaatgcctttacattcatacccatgaatcttttcgagcagttcaaacgtgcggccaatctctattttctagcgctgctgatcctgcaggccgtcccacagatctccaccctggcttggtacactacactcgtcccgctgctggtggtccttggtgttactgcgattaaagacttggtcgatgacgttgcgagacacaagatggataaagaaataaacaacagaacctgtgaagtgatcaaagacggacgtttcaaggtggcaaagtggaaagagattcaggtaggtgacgttattcgcttaaagaaaaatgactttgttcctgcagatatcctgcttctctcgtcatctgagcccaatagtttatgctatgtcgagactgcggaactggacggagaaactaacctgaaattcaagatgagcctcgagattactgaccagtacctccagagagaggacactctggcgacgttcgatgggtttattgaatgtgaagagccaaacaatcggttagacaagtttactggtaccctcttctggcggaacacttcattcccccttgacgccgataaaattttgttacgggggtgtgtaattaggaacactgatttttgtcacggcctggtgatctttgccggtgccgatacaaagataatgaagaactcaggcaagacccggtttaagcgtactaaaatcgattacttgatgaattatatggtttacactatattcgtggtgctgatcctgctgtccgcgggcctagccattggacatgcctactgggaggcgcaggtaggaaactcttcctggtacctgtacgatggcgaggacgatacgccctcgtacagaggcttcctgatcttctggggatatatcattgttctcaataccatggtgccaatcagcctgtatgtcagcgtggaggtgatccgcctagggcaaagccattttatcaattgggacctgcagatgtactatgccgaaaaggacacacccgcaaaagcgaggaccacaaccctgaatgaacagctgggccagattcattatatcttttccgacaagacagggacgctgactcagaacataatgacatttaagaaatgctgcattaacggccagatatacggagatcacagagatgcaagtcagcacaaccacaacaaaatcgagcaggtggatttttcctggaacacatatgccgatggcaagctggccttttatgatcactatctaatagaacagatccagtctgggaaggagccagaggtccgacagttctttttcctgcttgcagtctgccacactgtgatggttgaccgaaccgatggtcaactgaattatcaagccgcctcccccgacgagggcgctctggtaaacgctgcccgcaactttggattcgcttttttggctagaacgcagaacacaattacaattagcgagctcgggacggagaggacttacaacgtgctggcaatacttgatttcaactcagacagaaagcggatgagcatcattgtgcgcacgcccgagggcaacatcaaattgtactgcaagggagccgacactgtgatctacgaacggcttcaccgtatgaatccaaccaaacaggagacccaggatgccctcgacatctttgcaaatgagaccctgcgtactctgtgcctttgctataaagagatcgaggagaaagaatttacggagtggaacaagaaattcatggcggcaagcgtagcttcgacgaatcgcgatgaggcattagacaaagtttacgaagaaattgagaaagacttgattttgctgggcgccaccgcaatagaagataagctgcaagacggtgtgcccgagactatatctaaactggccaaagccgacatcaaaatctgggtgctcaccggggacaaaaaggaaactgcagaaaacatcggcttcgcctgtgagctgctcacagaagatacaactatttgctacggagaggatataaacagcctgcttcacgcaaggatggagaaccagaggaaccggggaggtgtctacgcaaagttcgcgccccctgtccaggagtccttctttccaccagggggaaaccgagcgctcattataacgggcagctggttgaacgagatcctgctcgaaaaaaaaaccaaacgcaacaagattctaaagcttaagttcccacggaccgaggaagagaggcggatgagaacccagtcgaagagaaggctcgaagcgaaaaaagaacagagacagaaaaatttcgtggacctggcatgtgagtgctctgcggttatatgttgtagggttacgccaaagcaaaaggccatggtggtggacctcgtgaagcgctataagaaggctattacacttgctattggggatggagccaatgacgtgaacatgataaagacagcccatattggggtggggatttctggccaggagggcatgcaggcagtgatgtcctctgattacagtttcgctcagttccggtatctgcagcgcctcctactggttcacggcaggtggtcatatatccgaatgtgcaaattcttgcgctatttcttttacaaaaatttcgcctttacactcgtgcatttttggtattcattttttaacggatactccgcccagactgcctacgaggattggttcataaccctttataacgtgttgtacacctccctgccagtcctattgatgggccttttagatcaggacgtctcagataaactttcactgcgcttccccgggttatacattgtgggccagcgagacttgctgtttaattacaaacggttcttcgttagcctgttgcacggggtactgacttccatgattttgttttttatcccgctcggcgcatacctgcagaccgtgggacaggacggcgaagcccccagcgattaccagtcctttgccgtgaccattgcttccgcactagtaatcaccgttaatttccagataggcctggatacgtcttactggacttttgtgaacgctttttcgatcttcggctctattgccctttattttgggatcatgttcgatttccattccgcaggtatccacgttctgtttccatcagcatttcagtttaccggcacagcatctaacgccctgcgacagccctacatctggcttaccattattctcgcagtggctgtctgcctgctcccagtcgtggctatcaggtttctctccatgacaatctggcctagtgagtctgataagatacagaaacataggaagcggttgaaggccgaggaacagtggcaacgtaggcaacaagtgttcagaagaggagtttcaacgagacgttctgcctatgctttttcacaccaaagaggctacgccgatctgatttcctccggcaggtccatcaggaaaaagcgcagccccctggatgctattgtcgccgatggaacagccgaatatagacggaccggtgattct

SEQ ID NO: 318845 - DNA, 3753 bp, Artificial Sequence
  derived and/or modified sequence
atgtccactgaaagggacagcgagaccacctttgatgaggatagccagcccaacgatgaggttgtgccctatagtgatgatgaaactgaggacgaactggatgatcaaggtagtgcagttgagccagaacagaatcgggttaaccgggaggcagaggagaaccgagaacccttccgcaaggaatgtacttggcaggtgaaggcaaacgaccgaaaataccacgagcaaccccacttcatgaacaccaagtttctctgtataaaagagagtaagtatgccaataacgcaatcaaaacttataagtacaacgccttcacgtttatccccatgaatctctttgaacaatttaagcgggccgctaatctgtactttctggcgctgttgatcttgcaggccgtcccgcaaatttccacactcgcatggtataccacactcgtgccccttctcgtcgtgctcggcgtcaccgccattaaggacctggtagacgatgtcgcccggcacaaaatggacaaagaaattaataatcgaacttgcgaggttattaaggacggtaggttcaaggttgcaaagtggaaggagattcaagtgggagatgtgattagacttaaaaaaaacgacttcgtccctgcggacatactgctcctttcttcttccgaaccgaactcactctgttacgtggaaactgcagagctggacggcgagacaaatctgaaattcaagatgtccctcgagatcacggaccaatatctgcagcgcgaggatacccttgcgactttcgatggtttcatcgagtgtgaagagccgaataaccggcttgacaagttcacaggaaccttgttttggaggaatacctcctttccactggatgctgacaagatcctactgcggggatgcgtaatcaggaacaccgacttctgccacgggctggtcatttttgccggagccgacacgaaaatcatgaagaattccgggaaaacccgtttcaaaaggaccaagatagattacctgatgaactatatggtgtatactatatttgtggttctaatcttgctgagcgcaggtctagccatcggacacgcctattgggaggctcaggttggaaatagcagttggtacttatacgacggagaggacgacactccttcatatagaggctttcttattttttgggggtacattattgtgcttaacacgatggtacccatatctctgtacgtcagcgtggaggtgataaggctcgggcagtcccattttatcaattgggatctccagatgtattatgcagagaaagataccccggctaaagctcgcactacgaccctgaatgagcagctcggacaaatacactacattttctccgataaaaccgggacccttacgcagaatataatgacctttaaaaaatgttgcatcaacggacagatatacggtgatcacagggacgcctcacagcacaatcacaacaagattgagcaagtggacttttcctggaatacatatgcagacggcaagttagcgttctatgaccactacttaattgagcagattcagtctggcaaggaacctgaggtgagacaattcttctttctcttggcggtgtgccatacggttatggttgataggactgacggccaactgaattaccaggctgcctctccggatgaaggcgccctggtcaacgcagcccggaactttggatttgcttttctggcccggacccagaacacgattaccataagtgaactgggaacggagcggacctacaacgtgttggctatattagattttaacagtgataggaagaggatgtctatcattgtccggaccccagagggaaatataaaattgtactgcaagggggctgacacggttatatacgaacgtcttcataggatgaacccaacaaaacaggagacccaggacgcgttggatattttcgcaaatgaaactctgcggaccctgtgtctgtgctacaaggaaatcgaagagaaagagtttacagaatggaacaaaaaattcatggctgcttctgtcgcatccactaacagggatgaagcacttgacaaggtctacgaagaaatagagaaggaccttattctcctgggggccactgcaattgaggacaaactgcaggacggagtgcctgagacaatctctaagttggccaaagcggacatcaagatttgggtcctgactggtgacaaaaaagagacggcagaaaacatagggtttgcttgtgaactcctcactgaagacaccaccatatgctacggcgaggatattaattccttattgcatgctcgcatggagaaccagagaaatagaggcggggtgtatgcaaagttcgccccacccgttcaggaatcgtttttccctccaggaggaaatagagctctgataatcaccggctcttggctgaatgaaatactgctagaaaagaaaacgaagagaaataagatcctgaagttgaagttccctcgcactgaggaagaaaggcggatgcgaacacaatccaaacgacgcctggaggctaagaaggagcaaagacagaagaatttcgtggacctggcatgtgagtgttcagctgtgatctgttgtagagtaacacctaagcagaaggcgatggtggtcgacctggtgaaacggtacaaaaaggcgataacactggcaataggcgatggggccaacgatgtgaacatgatcaagaccgctcatattggtgtcggaataagcggccaggagggaatgcaagctgtgatgagtagcgattacagctttgcgcaattccgttatctccagcggctgctcttagtgcacggaagatggagttacatccggatgtgtaagtttcttcgctacttcttctacaagaattttgcctttaccctggtacatttttggtatagtttctttaatggttattcagcccagacggcctacgaggactggtttatcactctgtataacgtgctgtatacctcactgcccgtgctcctcatgggactgctagatcaggacgtgagcgataaattatcattacggttccccgggctttatatcgtggggcagcgggaccttttattcaattataaaaggttctttgtgtcgctcctgcacggcgttctgacaagtatgatcctgttttttattcccttaggtgcgtaccttcagacagttggacaggatggcgaagccccttcggactatcagtcgtttgccgtcacaattgcctccgcgctcgtgattaccgtgaactttcagattggcctcgacacctcttattggactttcgtcaacgcctttagtatatttggatccattgctctctacttcggaattatgtttgactttcactccgctggaatccacgtgctgttcccttccgcattccagtttaccggtaccgcatctaacgcgcttagacaaccatacatatggctgacgatcattttggctgtggccgtgtgcttgctccctgttgtcgccataaggtttctgtctatgacaatctggccgagtgaatccgataagatccagaaacaccggaaaaggcttaaggctgaagagcaatggcagcggaggcagcaggtgttccgcaggggtgtgtcgacacgccgatctgcctatgccttttcccaccagcgaggatatgccgatctgatatctagcggacggtccataagaaagaagcggagcccactcgacgcaattgtcgcagacggcaccgccgaatacaggaggacaggcgactca

SEQ ID NO: 318846 - DNA, 3753 bp, Artificial Sequence
  derived and/or modified sequence
atgtctactgaaagagattcagaaaccacatttgatgaagattcacaaccaaatgatgaagtcgttccttattctgatgatgaaactgaagatgaacttgatgaccaaggaagtgctgtagaaccagaacaaaatagagttaatagagaagcagaagaaaatagagaaccatttagaaaggaatgtacatggcaagttaaagctaatgatagaaaatatcatgaacaaccacattttatgaatacaaaatttctttgtattaaggagtctaaatatgcaaacaatgcaattaagacatataaatataatgcttttactttcattccaatgaatttatttgaacaatttaaacgagctgcaaacctatattttcttgcattgttaattttacaagcagtaccacaaatcagtactttagcatggtatacaacattagttccattattagttgttcttggagttactgctattaaagatttagtagatgatgttgcaagacacaagatggataaggaaattaataataggacttgtgaagttataaaagatggaagatttaaggttgcaaaatggaaagaaattcaagttggagatgtaatacgtcttaaaaaaaacgattttgttcctgctgacattttattgctttccagtagtgaacctaattcattgtgttatgtagaaacagctgaattagatggagaaacaaatcttaaatttaaaatgagtttagaaattacagatcaatatcttcaaagagaagatactcttgctacttttgatggatttattgaatgtgaagaaccaaacaatagacttgataaatttacaggaacattattttggaggaatactagttttccacttgatgctgacaagatattgcttagaggatgtgttatcagaaatactgatttttgtcatggtcttgttatttttgctggagctgatactaaaatcatgaagaactcaggaaagactagatttaaaagaacaaaaatagattatttaatgaactatatggtatatacaatttttgtagttttaattcttctatcagcaggattagcaattggacacgcttattgggaagctcaagttggaaatagttcttggtatctttatgatggagaagatgatactccatcatatagaggatttttaattttttggggatatattattgttcttaatactatggttcctattagtttatatgttagtgttgaagttattagacttggacaatcacatttcataaattgggatctacaaatgtattatgctgagaaggatacaccagctaaggcaagaacaacaacgcttaatgagcaattagggcagattcattatatatttagtgataaaactggtacattaactcaaaatattatgacatttaaaaaatgttgtattaatggacaaatatatggtgaccatagagatgctagtcaacataatcataataaaattgaacaagttgatttttcttggaacacatatgcagatggaaaattagctttttatgatcattatcttattgaacaaattcaatctggaaaggaaccagaagtaagacaatttttttttttacttgctgtttgtcatacagtaatggttgatcgtactgacggacaacttaattaccaagcagcatctccagatgaaggtgcattggttaacgctgcaagaaactttggattcgcatttttagcaagaacccaaaatacaattactatttcagaattaggaacagaaagaacatataatgttttagcaattttagattttaattcagatagaaaacgtatgtcaataattgttagaacaccagaaggaaatattaagttgtattgtaaaggagcagatactgttatttatgaaagactacataggatgaatccaacgaagcaagaaacacaagacgcattagatatttttgcaaatgaaactttaagaacactttgtctttgctataaagagatagaagaaaaagaatttactgaatggaacaaaaagtttatggcagcatcagttgcttcaactaatagggatgaggctttagataaagtttatgaagaaattgagaaagacttaattttattaggagctacagcaattgaagataaacttcaagatggagtgccagaaacaataagtaaacttgcaaaagcagatattaaaatttgggttttaacaggagataaaaaagaaactgcagaaaacataggatttgcttgtgaattattgacagaggatactactatttgttatggagaagacattaattctcttttgcatgctagaatggaaaaccaaagaaatagaggaggagtgtatgctaaatttgctcctcctgttcaagaatcgttctttcctccaggaggtaatagggcacttattataacaggatcatggttgaatgagattttattagaaaaaaaaacaaaaagaaataaaattctcaagcttaaattcccaagaaccgaagaggaaagaagaatgagaacacaaagtaaaagacgattagaggcaaaaaaggagcaacgacaaaagaattttgttgatcttgcatgtgaatgttcagcagttatttgctgtagagttactccaaaacaaaaagcaatggttgtagatctagttaaaagatataaaaaggctataacattagcaattggtgatggtgctaatgatgttaatatgattaaaactgcacatattggtgttggtatttcaggacaagagggaatgcaagcagttatgtcatcagattattcatttgcacaatttagatatttacaaagactattattagttcatggaagatggtcatatataagaatgtgtaaatttctacgttacttcttctataagaatttcgcttttacacttgttcatttctggtatagtttttttaatggatatagcgcacaaactgcatatgaagattggttcattacattatacaatgttctttatacttcattgcctgtattactaatgggtctacttgatcaagatgtttcagataaattatcattaagatttccaggattatatattgttggacaacgtgatttattattcaactataaaagattcttcgtatcattacttcatggtgtattgacttcaatgattcttttttttattccattaggagcttatcttcaaaccgtcggacaagatggagaagctccatctgattatcaatcatttgctgttacaattgcttcagctttagttattacagttaattttcaaataggtcttgatacttcttattggacttttgttaatgctttcagtatttttggaagtatagcactttattttggaattatgttcgatttccattcagcaggtattcatgtattatttccatcagcctttcaatttactggaactgctagtaatgctcttagacaaccatatatttggcttacaattattttggctgttgctgtttgtcttttacctgttgtagcaattagatttttatctatgacaatatggccatcagaatctgataaaattcaaaaacacagaaaaagattaaaggctgaggaacaatggcagagaagacaacaagtatttagacgtggagtttcaactagaagatctgcatacgctttttcacaccaaagaggatatgctgatttaatttcttcaggtagatcaattagaaagaaaaggtcaccacttgacgccattgttgctgacggaactgctgaatatagaaggactggggattct

SEQ ID NO: 318847 - DNA, 3753 bp, Artificial Sequence
  derived and/or modified sequence
atgtccaccgagcgagatagcgaaaccacgtttgacgaggatagccaaccaaatgacgaagtggtgccatacagcgacgacgaaaccgaagatgaactggatgatcaaggttcagcagtggagccagaacaaaatcgtgtcaaccgcgaagctgaagagaacagagaacccttccgcaaggaatgtacctggcaagtcaaggcgaatgatcgaaagtaccatgagcaaccacatttcatgaacaccaagttcctctgcattaaggagtccaagtatgcaaacaacgccataaagacttacaagtacaacgcatttactttcatacctatgaaccttttcgaacagtttaaacgtgccgctaacctgtactttctcgcactgctgatcttgcaagccgttcctcaaattagcaccctggcgtggtacaccactctggttccgcttcttgtggtgctgggagtcaccgcgattaaagatcttgtcgacgatgtggcgcggcataagatggataaggaaatcaataacagaacgtgcgaggtgattaaggatggccggtttaaagtggcgaaatggaaggaaattcaagtgggcgacgtgattaggctgaagaaaaatgatttcgtcccggctgatattctccttctttcatcctccgaacctaattcactctgttacgtggaaactgcagaacttgacggcgagactaatcttaagtttaagatgtcccttgaaattaccgaccaataccttcagagagaggacacgcttgccactttcgacggttttatcgagtgcgaagagcccaataatcgactcgataagttcaccggtactctcttttggagaaacacctcgtttcccctggacgctgataagattctgctgaggggatgtgtcatacgcaacaccgatttttgtcatggactggtgattttcgccggcgccgacaccaagattatgaagaactctggaaagactcgctttaaacggactaagatcgattaccttatgaactacatggtgtatactatctttgtggtgctcatccttttgtcagcgggactggcaattggtcacgcatactgggaggcacaggtgggaaactcctcctggtacctttacgacggcgaagatgatactccgtcataccgcgggttcttgatcttttgggggtacatcattgtgcttaacacgatggtgccaatttccctgtacgtgtccgtggaagtgattcggctgggtcaatctcacttcatcaattgggatcttcagatgtactatgctgaaaaggacaccccagcgaaagcccgaactactactctgaacgaacagctgggccagatacattacatcttctcagacaagactggcactctcactcagaacattatgaccttcaaaaagtgttgtatcaacggccagatctatggagatcaccgggacgcatcgcagcacaaccataacaaaattgagcaggtggatttttcttggaacacctacgcagatggaaagctggcattttacgatcattacctcattgagcaaattcagtccggaaaggaacctgaagtcaggcagtttttcttcctcctggcagtgtgccacactgtgatggtggaccgcactgacgggcaactgaactaccaagcagcttcaccagacgaaggcgcactggtgaatgcagcacggaactttgggtttgctttcctggccagaacccagaacaccatcaccattagcgagctgggaactgagcggacttacaacgtcctcgccattctcgacttcaattccgatcgcaagcgaatgtccataatagtgcgaaccccagagggaaacatcaagttgtactgtaagggggccgacaccgtgatttacgaaaggctgcatcggatgaaccctactaaacaagaaactcaagatgcgctcgatatctttgcgaatgagactctgcggaccctctgtctctgctacaaagaaatagaagagaaagagtttaccgaatggaacaagaaattcatggcggcatcggtcgcatcgaccaaccgggatgaggctctggataaagtgtacgaagaaatcgagaaagatctgatccttctgggcgcaaccgcaattgaagataaactccaagacggtgtccctgaaaccattagcaaactcgcaaaggccgacatcaagatctgggtgctgaccggggacaaaaaggagacggcagagaacatagggtttgcgtgtgaactcctgaccgaagataccaccatttgttacggggaagatatcaactcgttgcttcacgcaaggatggaaaatcagaggaatagaggaggcgtctacgcgaagttcgcaccccccgtgcaggaatcctttttcccacctggtggtaatagagccctgattatcactggatcgtggcttaacgaaattctgctggagaaaaagacgaagcgcaacaagatccttaagctgaaatttcccagaacggaagaagagagacgaatgagaactcagagcaagcgtcggcttgaggccaagaaggaacaaaggcagaagaatttcgtggatctcgcatgtgagtgttcggcagtgatctgttgtcgggtgacccctaaacagaaggctatggtggtcgaccttgtcaaaagatataagaaagccatcaccctggcgatcggtgacggtgcaaacgacgtgaatatgataaagacggctcatatcggggtcggtatttccggacaagagggtatgcaagctgtgatgtcctcggactactcttttgctcaattccggtaccttcagcggcttcttctggtgcatggaaggtggtcgtatatccggatgtgcaagtttcttcgctacttcttctataagaatttcgcgttcactctcgtccatttttggtactcgttcttcaacggctactcggcacaaacggcgtacgaagattggttcatcaccctctacaatgtcttgtacacttcactcccggtcctgcttatgggactgctcgatcaagatgtgtcggataagctctcactccgatttcccgggctgtacattgtgggccaaagagatctgcttttcaactacaagaggtttttcgtgagcctgctgcacggcgtccttacctccatgatcctcttctttatcccacttggggcatatttgcagacggtggggcaagatggagaagcccctagcgattaccagtcgtttgcagtcaccatcgcctcggcgttggttattactgtgaacttccaaattggcctcgataccagctactggactttcgtgaacgcattttcaattttcggttccattgcactttacttcggtattatgttcgattttcacagcgcaggaatccacgtcctgttccctagcgcattccagtttactggaactgcaagcaacgcactgcggcaaccttacatatggcttacgattattctcgccgtggcagtgtgtctcctccctgtggtggcaattcgttttctgtcgatgaccatctggccttccgaatccgataagatccagaagcaccgtaagcgccttaaagccgaagaacaatggcaacgccggcaacaagtctttagaaggggagtgtcaactcgtagaagcgcatacgcctttagccatcagcgcggttatgcagacctcatttcctcgggacggtccatccgaaagaaaagatcaccacttgacgctattgtggcggacggaactgcagagtaccggaggacgggtgattcc

SEQ ID NO: 318848 - DNA, 3753 bp, Artificial Sequence
  derived and/or modified sequence
atgagtacggagagggacagtgaaaccactttcgacgaggactctcaacccaacgacgaggtcgtgccatactccgacgacgagaccgaggacgaactggacgatcagggaagtgctgtcgagccagaacaaaatcgcgttaacagggaggccgaggagaatagggaaccgttcaggaaggaatgcacttggcaagtgaaggcgaacgatcgcaagtaccacgagcagccacacttcatgaacactaaatttttgtgcattaaagagtccaaatacgccaacaacgccattaaaacctataagtataatgcttttacgtttatcccaatgaatctctttgagcagttcaaaagggccgcgaacctgtacttcctggcattgcttattcttcaggccgtgccacagatctcaacacttgcttggtacaccaccttggtgccgctgttggtggtgctcggcgtcactgctattaaggatttggttgacgacgtcgcacgccataaaatggacaaagaaattaataataggacgtgcgaggtcatcaaggacggaaggttcaaagtagccaagtggaaagagattcaggtgggcgatgtaatccgcctgaagaagaacgattttgttcccgccgacatactgctgctcagctcctctgagcccaatagcttgtgttacgttgagactgcagagcttgacggcgagactaacttgaaattcaaaatgtcccttgagatcacagaccaatatttgcagagagaggacacgctggcaacgtttgacggctttatcgagtgcgaggaaccaaacaacagactggataagttcaccggaacactgttctggcgcaatacctctttccccctggacgcagacaaaattcttcttcgcggttgtgtcattagaaacaccgacttctgccatggtctggttattttcgctggcgcagacactaaaatcatgaagaacagcggaaagacaagattcaaaaggacaaaaattgattatttgatgaactacatggtttataccatttttgtggtcctcattctgctgtccgcgggcctggccatcggacacgcctactgggaggcccaagtgggcaattcatcttggtacctgtatgacggagaggatgacaccccgtcataccgcggatttcttatcttctggggctatatcattgtgttgaacacaatggtgcctatttctttgtatgtgtctgttgaagttattaggcttggccagtctcacttcataaattgggacctccagatgtattatgccgagaaggatactccagcaaaggcgaggaccacaaccctcaacgaacagctgggccaaattcactatatattcagcgacaagacaggcaccttgactcagaatattatgactttcaagaagtgctgcatcaacggacaaatttatggtgaccatagagatgcctcccagcataaccataacaaaatagagcaagtggatttttcttggaatacttacgcagatggcaagctcgcgttctatgatcactacctgattgagcaaatccagagcggaaaagaacccgaggttagacagttctttttcctgctcgccgtttgccacaccgttatggtggacagaacagacggccagctgaattatcaggcagcatcacccgacgagggcgccttggtcaatgctgcccgcaatttcggtttcgcctttctggcgagaacacagaatacaatcaccattagtgagctgggtaccgaaagaacttacaacgtccttgccatcctcgattttaactcagataggaagcgcatgtcaatcatcgtgagaaccccggaaggcaacatcaagctttactgcaagggcgctgataccgtcatctatgagagattgcacagaatgaatccaacaaagcaggagacacaagatgctctcgacatcttcgcaaacgagaccctgaggaccctctgtctctgctacaaggaaatcgaggagaaggagttcaccgaatggaataaaaaattcatggccgccagcgtggcttctaccaacagggatgaggctttggacaaagtgtacgaggagatcgaaaaggaccttatacttctgggcgcgactgctattgaggacaaattgcaggacggtgtccccgaaacaattagtaaattggcgaaggctgacatcaagatttgggtgttgaccggcgacaagaaggaaacagctgagaacataggctttgcttgcgagctgctcaccgaggacactacaatatgctatggcgaggacattaatagcctcctccacgcgagaatggaaaatcagagaaataggggaggagtttacgccaaattcgccccccctgtgcaagagtcctttttcccacctggcggaaaccgcgccctgatcattacaggttcctggctgaatgaaatcctcctggagaagaaaaccaagcgcaacaagattttgaaactgaagtttcctagaaccgaagaggagagacgcatgcgcactcagtcaaagaggcgcctcgaagcaaaaaaagaacaacgccagaaaaacttcgttgatttggcttgtgaatgttccgctgttatatgctgccgcgtcactcctaagcagaaggccatggtggtagacctggtgaaacgctacaagaaagcaataacattggctatcggcgatggcgctaacgatgtgaatatgattaagacagctcatattggagtgggcattagcggacaagaaggcatgcaagctgtcatgtctagcgactacagcttcgcgcaattcagatatctgcaaaggctccttctggttcacggacgctggagctacattcgcatgtgtaaattcctgaggtacttcttttataagaattttgctttcaccctggtgcacttttggtacagcttctttaatggctatagcgctcaaactgcatacgaagattggtttatcaccctgtacaatgtgctgtatacttctctccccgtgttgcttatgggtcttctggaccaggatgtcagcgataagctctccctccgctttccgggactgtacattgtgggccaacgcgacctgctctttaactataagagattcttcgtctcactgcttcacggagtgcttacttcaatgattctgttcttcatccccttgggagcctacttgcagacggtaggccaggacggtgaggctcctagtgattatcaaagcttcgccgtcaccattgcgtctgctttggtgatcacagtgaacttccaaatcggactcgatacgtcttattggactttcgtcaacgcattcagcattttcggtagcatcgctctttacttcggtataatgttcgactttcactccgctggaatccacgttctctttccatccgcctttcaattcacaggaactgcatctaatgcactgaggcagccctacatatggctgactattattctggcggtggccgtgtgtcttcttccggtcgtcgccattagattcctgagcatgactatctggccatccgagtcagataagatccagaagcataggaaacgcctcaaggccgaggagcagtggcaacgcagacagcaggtcttccgcaggggtgtgtcaaccagacgcagtgcctatgcgttttcccatcagagaggatacgcggacctgattagctccggcagatctatccgcaagaagaggtccccgctggacgctattgtggccgacggaaccgcagagtacagacgcaccggagatagc

SEQ ID NO: 318849 - DNA, 3753 bp, Artificial Sequence
  derived and/or modified sequence
atgtccaccgagcgcgatagcgaaaccacttttgacgaggactcgcaaccaaacgatgaagtggtgccgtactctgacgacgagactgaagatgaacttgacgatcagggatcggcagtggagcctgaacaaaacagagtgaacagggaggcggaagagaacagggaacctttccggaaggagtgtacctggcaagtgaaagccaacgatagaaaataccatgaacaaccccacttcatgaacactaagtttctgtgtatcaaagagtccaaatacgcaaacaatgcaatcaagacttacaagtacaacgcgtttacctttattcctatgaatctcttcgaacagtttaagagagcagcgaatctttacttccttgcactgctgatcctgcaggcagtgcctcagatctcaactcttgcatggtacactaccctggtccccctgcttgtggtgctcggtgtcactgccattaaggaccttgtagacgacgtggcaaggcataagatggacaaggagattaacaatcgaacttgcgaagtgattaaggacggtagattcaaggtggccaagtggaaggaaattcaggtgggcgacgtgatcaggctcaagaaaaatgattttgtgccagcggacatcctgcttctctcgtcaagcgaaccaaatagcctctgttacgtcgaaaccgctgaattggatggcgaaaccaacctgaagtttaagatgtccctggaaataactgaccagtatctgcaaagagaggacacgcttgcaactttcgatggttttatcgaatgtgaagaacctaataacaggcttgacaaattcactggaacgttgttttggagaaatactagctttcccctggacgcagataagatacttctgagaggttgtgtgattcgaaacaccgacttttgtcacgggctggtcatctttgcaggcgcagacaccaagatcatgaagaactccggtaagaccagatttaagcgcaccaagattgattacctcatgaattacatggtctataccatcttcgtggtgcttattctgctgtcagccggtctggcaattggtcatgcctactgggaggcgcaggtgggaaattccagctggtatctctacgatggtgaggacgatactccctcctaccggggtttcctcattttctggggttacattatagtgctgaacaccatggtgccaatttccctgtacgtctccgtcgaagtgataagattgggtcaatcgcatttcattaactgggacctgcaaatgtactacgccgaaaaggatacccccgcgaaagcacgaaccactacccttaatgaacagctgggacagattcattacattttctcggataagaccggtacccttacgcagaacattatgactttcaaaaagtgttgtatcaacgggcagatttacggtgaccaccgtgacgcatcccaacacaatcataacaaaattgaacaagtggacttctcgtggaatacctacgctgatggcaagttggcattttacgatcactacctcatcgaacagattcagagcggaaaagaaccagaagtccggcagtttttcttcctgctggctgtgtgccataccgtcatggtggaccgcactgatggtcagctcaactaccaagccgcatccccagacgagggtgcactggttaacgccgccaggaattttggattcgcatttctcgcaagaacccaaaacactattaccattagcgaactgggtaccgaacggacgtacaacgtcctggcaattttggatttcaactccgacagaaagcggatgtcaataatcgttcggacgcctgagggaaacatcaagctgtactgcaagggtgcggataccgtcatatacgaaaggctccacagaatgaaccctactaagcaggagacgcaggatgcactggatatctttgcaaatgaaacgcttagaaccctctgtctctgttacaaggaaatcgaagagaaagaatttactgagtggaacaagaagtttatggcagcctcagtggccagcactaaccgagacgaagccttggataaggtctacgaagagattgaaaaggacctgatcctccttggggccactgcaatagaagataagctgcaagacggagtgcccgaaaccatttccaaacttgcaaaggcagacatcaagatttgggtccttaccggcgacaaaaaagagactgcagagaacataggattcgcatgtgagctgttgacggaggatactaccatctgctacggagaggatatcaactcgctgctccacgctaggatggaaaatcagcggaatcgcgggggagtgtatgccaagtttgcaccaccagtgcaagagtcctttttccccccaggtgggaaccgtgctctgatcataaccggttcttggcttaatgagattctgctggaaaagaaaaccaagagaaataagattttgaaattgaaattccctagaacggaagaggaacgtcgaatgcggacccaatcgaagcgcagactggaagctaaaaaggagcagcgtcagaagaattttgtggatctcgcatgtgaatgctcagctgtgatctgttgccgagtcaccccgaagcaaaaggcgatggtggtggatctggtcaaaagatacaagaaagccattactctcgcaattggtgatggagctaacgacgtgaacatgattaagactgcacatatcggcgtgggaattagcggacaagaaggtatgcaagcggtcatgagcagcgattactcttttgcacagttcagatacctccagagacttttgctcgtccatggtcgttggagctatatcaggatgtgcaaatttctgcgatactttttctacaagaattttgcattcactcttgtgcatttttggtactcgtttttcaatggctactccgcccaaactgcatacgaagattggttcattaccctttacaatgtgctgtatacgtccttgcctgtgctgcttatgggactgctcgatcaagacgtgagcgataagctctcactgagatttcctggactgtacattgtgggccagcgggacctgttgtttaactacaagcgatttttcgtttcgcttctgcacggggtgcttacttccatgattctctttttcatccctctgggcgcatacctccagacggtgggtcaagatggggaggccccatctgattatcagtcgttcgcagtgactatcgcgtctgccttggtcattaccgtgaactttcaaataggcctggacacttcgtattggaccttcgtgaacgcgtttagcatcttcggatccattgcgctttactttgggattatgtttgattttcattcagcaggtattcatgtgctgttcccgtcggcctttcaattcactggtaccgcatccaatgccttgcggcaaccttacatttggcttacgatcatcctggcagtggccgtgtgtctcctgcctgtcgtggcaatacggttcctttcgatgaccatttggccttcagaatcggataagatacaaaagcacagaaagcggcttaaagcagaggaacagtggcaacggcgccaacaggtgttccgtcgaggtgtgtcaactcggaggagcgcatacgcatttagccaccaacgcgggtacgcggatctgatttcatccggcagatccatcaggaagaagcgttcgcctctggatgcaattgttgcagatgggaccgcggaatacaggagaactggagattca

SEQ ID NO: 318850 - DNA, 3753 bp, Artificial Sequence
  derived and/or modified sequence
atgtccaccgagcgggattcagaaaccacattcgatgaagactcccagccgaatgacgaggtggttccttacagcgatgacgagaccgaggacgagctggatgatcagggctccgccgttgaacccgagcagaatcgggttaacagagaagcagaggagaaccgtgaaccctttagaaaggagtgcacctggcaggtgaaggcaaacgatcgcaagtatcacgagcagccacatttcatgaatacaaagttcttatgcatcaaggagtccaagtacgccaataacgcgattaaaacatataagtacaatgcgttcaccttcatccccatgaaccttttcgagcagtttaaacgagcagccaatctttattttctggcgctgctaatcctccaggctgttccccagatttccactctggcatggtatacaaccctagtacctctgctggtggtgctgggagtgaccgctattaaagacctggtggatgatgtggcccggcacaaaatggacaaagagattaacaatcgcacttgcgaggtgattaaggatgggaggtttaaggtggctaagtggaaagagattcaggtcggagatgtgattaggcttaaaaagaacgatttcgtccctgccgatattctactgctctcctcttctgaacccaattcactttgttatgtggaaaccgcggaattggacggtgagacaaacctcaaatttaaaatgagcctcgagataaccgatcaatacctgcagagggaggacaccctggccacattcgacgggtttatagagtgcgaggaaccaaacaatcgcctcgataaatttactggcactttgttctggcggaacaccagctttcccctggacgccgacaaaatactgctgcgcggatgcgttatccggaacaccgatttctgccatggactcgtcatctttgcaggggcggatactaaaataatgaaaaattctggcaagacgaggttcaagaggactaagatcgactatttgatgaactacatggtctacacgattttcgtcgtgctgattctgctaagtgccggtctcgccatcggccacgcctactgggaggctcaagtaggtaattcaagctggtacttgtatgatggggaggacgacactcccagttatcgcgggtttctcatcttttgggggtacatcattgtgttgaatactatggtgcctatttcactctatgtcagcgtcgaagtaattcgattggggcagtcccactttatcaactgggatctgcagatgtactatgcggagaaggacaccccagctaaggctcgaaccacgaccttgaacgaacagctggggcaaatacactatattttttctgacaagaccggtacgttgactcaaaatattatgaccttcaagaagtgctgtatcaatgggcagatctacggtgatcacagagacgcctcacagcacaaccataataagattgaacaggtcgatttctcatggaacacctacgctgacgggaagctggccttctacgatcactatttgatcgagcaaatccagtccggtaaggagcccgaggtgaggcagttcttcttcttgttggccgtgtgccacacagtaatggtggaccggactgacggccaactgaattatcaggccgcaagtcccgatgaaggggcattagtaaacgctgcccgcaatttcggcttcgctttcctggcgcggacacagaacactatcacaatttcagaactggggacggagcgaacctataatgttctcgctatcctcgacttcaacagtgaccgaaagcggatgtccatcatcgtgcgaaccccggaaggtaacatcaagctgtattgcaaaggagccgacacagtcatatacgaacgcctgcacagaatgaatccaactaagcaggagactcaggacgcactcgatatatttgccaacgaaacactaaggacgttgtgcctgtgctataaagagatcgaggaaaaggagtttaccgagtggaacaagaagttcatggctgcctccgtagcgtcaacgaaccgagacgaagccctggataaagtgtacgaagagatcgagaaggacttaatcctattgggggccactgctattgaagataaactgcaggacggcgtgccagaaacgattagcaagctggcaaaggccgatattaagatctgggtgctgacgggtgacaagaaagaaaccgccgaaaatataggctttgcctgtgaactactgacagaggacaccaccatttgctatggagaagatatcaactcactgctgcacgcccgaatggagaatcaacgcaaccgcggtggcgtctacgctaaatttgctcctcccgtccaggaatcttttttccctcctggaggtaacagggccctaattattacggggtcctggctcaacgagatactgctcgagaagaagacaaaaagaaacaaaatcctgaagttgaagttccccagaaccgaagaggagagacgcatgaggactcagtccaaacgccgtcttgaagctaaaaaggagcaaaggcagaagaactttgtggatttagcatgcgaatgtagtgcggtaatatgctgcagagtgacccccaaacagaaggccatggtggttgatcttgtcaagagatataagaaggcaatcacattggctatcggagacggtgccaacgacgttaatatgatcaagacggcacatattggagtcggtatttctggacaagagggtatgcaggccgtcatgtcgtcagactactcttttgcgcagtttcgatatctccagaggctgctgttggtgcacggtaggtggtcctacatcagaatgtgcaagtttctgcggtacttcttctacaagaacttcgcttttacccttgtccacttttggtacagtttcttcaatggctacagcgcacaaacagcgtatgaggactggttcataacactgtacaacgtcctctatacatccttgcccgtgttactgatgggtctgcttgaccaagacgtttcagacaaactgagtctgcgcttccccggcttgtatatcgtgggtcagcgggacctcctctttaattataagagattctttgtcagcctgctgcacggagtgctgaccagcatgatcctctttttcattcccttgggggcctatctgcagaccgttgggcaggacggagaggcgccaagcgattaccagtcttttgccgtgaccatcgcttcagcccttgtgatcacggtgaacttccagataggactggacacctcctactggacattcgtcaatgcgttttctatcttcgggtccattgcactgtacttcggaatcatgtttgattttcattcagccggtattcacgtgttgttcccgagcgcctttcagttcacgggcacggcaagcaatgcactgcgtcagccttacatctggctcacaatcattttagctgttgcagtgtgtctcctgcccgtcgtggccatccggtttctgtcgatgactatctggccctccgaaagcgacaagatacagaaacaccgaaagaggctgaaggccgaagaacagtggcagaggcggcagcaggtcttccgtagaggggtgagcacaagacgatccgcatatgccttttctcatcagcggggatacgctgacttaatcagttccggcagaagcatcaggaaaaaacggtccccactcgacgccatcgtggcagacggtaccgctgaataccgtaggacgggagactct

SEQ ID NO: 318851 - DNA, 3753 bp, Artificial Sequence
  derived and/or modified sequence
atgtccactgagagggatagtgagactactttcgacgaagattcccagccaaatgatgaagttgttccctattcagacgacgaaaccgaagatgagcttgacgatcaaggctccgctgtggaacctgagcagaatagggtaaatcgtgaggcagaggaaaacagagagcctttccgtaaggaatgcacatggcaagtcaaggctaatgatagaaagtatcatgagcagccacattttatgaacacaaaattcctttgcatcaaggaatctaagtacgcgaataacgctatcaagacgtataagtacaacgcatttacctttattccaatgaacttattcgagcaattcaagagagcagctaatttgtatttccttgcacttttgattttgcaagcagtccctcaaatttcaacacttgcttggtatacgactcttgtacccttactagttgttctaggtgtcactgctatcaaagatcttgttgatgacgtcgcgagacataaaatggataaagaaataaacaaccgaacttgtgaagttataaaggatggtagattcaaggtcgctaaatggaaggaaatccaagtgggcgatgttatcaggcttaagaagaacgactttgttccggctgacatattgctgctgtccagtagtgaaccaaactcattgtgctatgtggaaacagccgagcttgatggagagactaaccttaaatttaagatgagccttgagataactgatcagtacctacaacgagaagacacattggctactttcgacggtttcattgaatgtgaagagcctaataacaggttagataagtttactgggacattattttggcgtaacaccagttttcctttagatgccgataagatcttgttgaggggttgcgttattcgaaatacagacttttgccacgggttagtcatctttgctggcgcggacactaagatcatgaaaaactcaggcaagactagattcaaacgcaccaagatcgactacctgatgaactatatggtatataccatttttgttgtgttgatactactttctgctggactagccataggtcacgcttactgggaagcccaagtaggaaattctagttggtatctttacgacggtgaagatgacaccccaagctatcgtggctttctgatattttggggatatataatcgttttgaacaccatggttcccattagtctttatgtgtctgtcgaagtgattagacttggtcaatcacattttatcaactgggatttgcagatgtactatgctgagaaggatacaccagctaaggcacgtactactactctcaatgaacaattaggacagatccactatattttttccgataagaccggcactctgacccagaatatcatgacctttaaaaagtgttgcattaatggtcagatttacggagatcaccgagatgctagccaacacaatcacaataaaatcgaacaggtggatttttcctggaatacgtacgctgatggtaaattggctttttatgatcactacttgatagaacagatacaaagtggaaaggagcccgaggtgcgccagtttttcttcttacttgctgtttgtcacaccgttatggttgacagaaccgacggacaacttaactatcaagcagctagtccggatgagggagctcttgttaacgctgctaggaactttggttttgcctttttagctagaacacaaaatactatcactataagcgaacttggcacagagcgcacctacaatgtgttggctattcttgattttaatagtgatcgaaagaggatgagtatcatagtgcgaactcctgagggaaatatcaaactgtattgcaagggtgcagatactgtcatatacgagcgacttcatcgtatgaatccaacaaagcaggaaacccaggatgcattggatatttttgctaatgagacactccgaacactctgcttgtgttacaaggaaatcgaggaaaaagagttcacagagtggaataagaagttcatggcagctagtgttgcttcaaccaaccgagatgaagcactggataaggtttacgaggaaatagagaaagacctaatattactaggcgctactgctatcgaggataagttgcaagatggcgttccggaaactatttcaaagctggcaaaggcagatattaaaatttgggtgcttaccggtgataagaaggaaacagccgagaatatcggatttgcctgtgagttattgaccgaagatactacgatatgctatggagaggatatcaattctttgcttcatgcgagaatggaaaatcaacgcaatcgtggaggagtgtatgcaaagttcgcgccaccggttcaagagtctttctttccgccaggtgggaaccgggctttaattataacaggatcatggcttaacgagatcttgcttgaaaagaagacgaagagaaacaagattctcaagttgaagtttcctagaactgaggaggaacggcgaatgcgaacccaatcgaaacgtcgattagaagctaagaaagagcaaaggcaaaaaaatttcgttgatctggcttgtgaatgctctgctgttatctgctgtagagttacccctaaacagaaggcaatggttgttgatctagttaaacggtacaagaaggcaattacacttgccataggtgatggtgctaatgatgtgaatatgatcaagactgctcatataggtgttggaatttctggacaagagggaatgcaagccgtgatgtccagtgattacagcttcgcacaattcagatatcttcaacggctattgctcgttcatggtcgatggtcatacattaggatgtgcaaattccttaggtactttttctacaagaatttcgccttcaccctcgtacatttttggtattcatttttcaacggttacagtgcacaaactgcgtatgaggattggttcattacattgtacaatgtgctttatacttcgcttcctgttctcttgatgggactcctggaccaagacgtctcagataaattgagtttgcgttttcctggtctttatattgttggtcaaagagatctcctcttcaactacaaaagattcttcgtcagcctccttcatggagtgctgaccagtatgatcttgttttttatacctctaggtgcttatcttcagactgtgggtcaagatggtgaggccccatcagattaccagtcatttgctgttaccatagcaagcgctttggttatcactgtgaattttcagatcgggttggatacgagctactggacattcgttaatgctttttcaatttttgggagcattgcactttacttcgggatcatgttcgatttccatagcgctggaatccatgtactttttccatcagcatttcagtttacgggtaccgctagtaacgcccttcgacagccttatatttggctcaccatcattctagcagtggcagtctgtctccttcctgtggttgctattagattcctttcaatgactatatggccaagtgaatcagacaagatccaaaagcataggaaacgtttgaaggctgaagaacaatggcaaagacggcaacaggtttttcgaaggggtgtgtcaactcgtcggagtgcctatgctttctctcatcaaaggggctacgccgatcttataagttcaggcaggtcaataagaaaaaaaaggtcgcctctagatgccattgtcgccgacggtacggctgaatatagaaggacaggcgattct

SEQ ID NO: 318852 - DNA, 3753 bp, Artificial Sequence
  derived and/or modified sequence
atgtccacagagcgtgattctgagaccaccttcgatgaggattcacagcctaatgatgaggtggtgccgtattccgatgatgaaacagaggatgaacttgatgaccaggggtcagccgtggagcctgagcagaaccgggttaacagggaagcggaagaaaatcgcgagcccttccgcaaggagtgcacctggcaggtaaaggcgaacgatcggaaatatcacgaacagccacattttatgaataccaaatttctgtgtattaaggaatccaagtacgccaataacgccattaagacttacaagtacaacgctttcacctttattcccatgaacctcttcgagcaattcaaacgagctgccaacctttatttccttgctctgctgattcttcaggcagttccccaaatcagcactctggcatggtatacaaccctggtccccctcctggtcgtcctaggggtcacagccatcaaagacctggtggacgatgtcgcgcgacacaagatggataaggagattaataacagaacatgtgaggtaataaaggatgggcgattcaaggtagcaaaatggaaggagattcaagtcggagatgttatacggctaaagaagaatgacttcgtcccagccgacattctgctcctgtcaagtagcgagcctaatagcttgtgttatgtggagaccgccgagttggacggagaaaccaacctgaagtttaagatgtctctggaaatcactgatcagtacctgcagcgggaagataccttggccacctttgatggcttcatcgaatgtgaagagcccaataacagactggataaatttactggtaccttgttctggcgtaacacaagcttccccctggacgccgataagattctcttgcgaggatgcgtgatacggaacactgatttttgtcacggactggtcattttcgcgggcgctgacacgaagataatgaagaattcagggaagactaggttcaaacggacgaaaatagattatcttatgaactatatggtctatactatctttgtggtcctgatcttgctgagtgctgggcttgcaatcggccacgcatactgggaggcacaagtgggcaatagctcctggtatctgtacgacggtgaagacgatacccccagttacaggggatttctgatcttctggggctacattatcgtcctcaacacaatggtgcccatctccctctatgtcagtgtggaagtgataagattgggacaatcgcacttcattaattgggatctccaaatgtactatgctgagaaggatacaccggccaaggctaggaccacaaccctgaatgaacagttgggccaaattcactacatcttctccgataagacagggacactgacccaaaacatcatgacatttaagaaatgctgcatcaatggtcagatctatggtgatcatcgggacgcctcccagcacaatcataataagattgagcaggtggactttagctggaacacttacgcagatggcaaactcgcattctacgatcactacctgatcgaacaaatccagtcaggaaaagagcccgaagtgcgtcagttctttttcctgctggcagtttgccatacggtaatggtcgacaggacagatggccagcttaattatcaagctgcctccccagatgagggggccctagtcaatgcagctcggaatttcggattcgcatttctagcccggacccagaatactatcaccattagtgaactgggcacagagcggacttataacgttctcgctattctggacttcaacagcgatcggaagaggatgtctatcatcgtgagaacaccagaaggcaatataaagctctactgcaagggcgccgataccgttatctatgagcgacttcataggatgaatcccactaagcaggagacgcaggacgcccttgacatattcgctaatgagactcttcggacactctgtctgtgttataaagagatcgaggagaaagaattcaccgaatggaacaaaaagttcatggccgccagcgtggctagtactaaccgggatgaggcactcgataaggtatacgaagagattgaaaaagacttgattctgttgggcgcaactgccatagaggacaaattacaggacggcgttcccgaaacaataagtaaactggctaaggcggatataaagatctgggtgttgaccggtgataagaaggaaaccgccgagaacattggttttgcttgcgagctgctcacagaagacactacaatatgctatggagaagacattaactctctcctccacgctcggatggagaatcagcggaacaggggcggcgtctacgccaagtttgcccctcctgtccaagagtccttctttccccccggggggaaccgggctctcattatcactggcagttggctgaatgagatcctgttagaaaaaaagacaaaacggaacaagattctgaaactgaagttcccaaggaccgaggaggagagacggatgaggacgcagtccaagcggcggctggaggcgaagaaggaacagcggcagaagaactttgttgacctggcatgcgaatgttcagccgtgatatgctgccgcgttacaccaaagcaaaaggcaatggtcgttgacttagttaagaggtacaagaaggccatcacacttgctattggcgatggcgccaatgacgtcaatatgataaaaacggcacacataggggtaggtattagcgggcaggaaggtatgcaggccgttatgtcctctgattattctttcgcacagtttcgctatctgcaacgcctgttactcgttcatggccgctggagttacattcggatgtgcaagtttctgagatatttcttctataaaaattttgcatttacattggtgcacttctggtactcctttttcaatggctattctgcccagaccgcttacgaggactggttcattaccctttataacgtgctctatacttccctaccggtgctgctgatgggcttgctggaccaggacgtgtcggacaagctatctctgaggttcccgggcctgtacattgtggggcaaagagatctgctgttcaattataaacggtttttcgttagtctattgcatggcgtcttgaccagcatgattctcttcttcatccccctcggtgcctatctgcagacagtgggccaagacggagaagcaccaagtgattaccagtcctttgccgtcacaattgcctcagctctcgtgatcacagtgaattttcagattggactggacactagctactggacgttcgtgaacgcattttccatcttcggcagcatcgcgttgtatttcggaattatgttcgatttccacagcgccggaatacacgtgctgtttccgagtgcatttcaatttaccggaacagcttctaacgccctgagacagccttacatttggctgacgatcattctcgcagtcgcggtgtgtctactgcccgtcgtagccatcaggttcctttctatgactatctggccctcagagtccgacaaaattcagaaacaccgcaaaaggttaaaagctgaggagcaatggcaacggcggcagcaggtgtttcgccgaggcgtgagcacacgccggagcgcctacgccttcagccatcaaagaggttatgcggatctcatttcctctgggagatcgatccggaagaaacgtagtccactggatgccatcgtggctgacggcacagcggagtaccgccgtactggcgattcc

SEQ ID NO: 318853 - DNA, 3753 bp, Artificial Sequence
  derived and/or modified sequence
atgtccaccgaaagggattcagagaccaccttcgacgaagattcccagcccaacgacgaggtggtgccctattcagacgacgagacggaagatgagcttgacgaccagggaagtgccgtggagcccgagcaaaacagagttaatcgggaggccgaagaaaaccgtgagccgttcaggaaggaatgcacttggcaggttaaggctaacgaccggaagtatcacgaacagccccatttcatgaatacaaaatttctttgtatcaaagagagcaagtatgctaataacgctatcaagacatacaaatataacgcttttaccttcataccgatgaacctctttgagcagttcaaaagggccgctaacctttatttcctggcgttgcttatattgcaagcagttccccagatctccacactggcttggtatactacactggtaccactgctggtagtattaggcgtgactgctattaaagatcttgttgatgatgtcgcgagacacaaaatggacaaagagatcaataaccgtacgtgcgaagttattaaagacggccgcttcaaagtggcaaagtggaaagagatccaagtcggagatgtcatcagactgaaaaagaacgacttcgtacccgcagatatattgcttctgagctcctctgaacctaactcattatgttatgttgagaccgccgagctggacggagaaacgaatttgaagtttaaaatgtcactagagatcacagatcaatacctgcagcgcgaggatacactggccacatttgacggattcattgagtgtgaggaaccaaataataggcttgacaaatttaccggtaccttgttttggaggaatacgagctttcctctcgatgctgacaagatactgttgcggggctgcgttattagaaacacagatttctgccatggtctcgtcatctttgctggcgccgatacaaagattatgaaaaacagtggcaaaacccgatttaagaggaccaaaatagattacctgatgaattacatggtgtatactatttttgtggtcttgatcctactgtctgctgggcttgctattggtcacgcctactgggaggcccaagtaggtaattcatcatggtatttgtatgatggggaggatgacactccctcataccgcggcttcttgatcttttgggggtatataattgtacttaacacaatggtgcctatctcactctacgttagcgttgaggtaattaggctcggtcagtcacattttatcaattgggatctgcaaatgtactatgccgaaaaagatacgcccgctaaagccagaacaaccactctgaacgaacagctgggccagatccactatatcttctccgataagaccgggacgctaacgcaaaacatcatgacattcaagaagtgctgtataaatggtcaaatctatggcgatcaccgggatgcgagtcagcataaccataataagattgaacaggtagacttctcttggaatacgtatgctgacgggaaattggcattttatgatcattatctcatcgaacagattcagtcgggaaaggagcccgaagtccggcaattctttttcctgctggccgtgtgccacaccgtcatggtggacagaacggatgggcagctaaactaccaggcagcgagccccgacgaaggcgctctggtgaacgccgccagaaacttcggttttgcgtttctcgcacgcactcagaataccattaccatctcagaactcggaaccgagcggacatacaatgtcttagcaattttggacttcaatagcgaccgtaaaagaatgtccataatcgttcgcactcccgagggaaacatcaagctgtattgcaaaggcgctgatacagtgatttatgaaagactccatcgtatgaaccccacaaagcaagagacgcaggacgcgctggatatctttgctaatgagacgcttcggaccctgtgtctatgttataaggaaatcgaagagaaagagtttaccgagtggaataaaaagtttatggccgcctctgtggcctctacgaaccgggatgaggctcttgacaaagtctatgaagaaatcgagaaagatctgattctcctaggggcaacggctatagaggataagttgcaggatggggtacccgagacgatcagcaaattagccaaagccgatattaagatctgggttctgacaggagacaagaaagagactgcagagaatattggtttcgcctgtgagctgctgaccgaagatacgacgatttgctacggagaggatattaattccctgctgcatgctaggatggaaaaccaaaggaacagaggcggggtgtatgctaaattcgctccaccagttcaagagagcttctttccaccgggtggtaacagagcactcattatcaccgggtcgtggctcaatgaaatcctgctagaaaaaaaaaccaagaggaacaagatactcaagctgaagtttccccggacggaagaggaaagacgcatgcggacgcagtctaaacgtcgattggaggccaagaaagaacaaagacaaaaaaattttgtggacctggcctgcgagtgttcagctgttatttgttgtagagtaaccccaaagcaaaaggcaatggtggtcgacctggtgaagcgctacaagaaagccatcactttggcgataggggacggcgctaacgatgtaaacatgatcaagactgctcatattggtgtgggcattagtggacaggaggggatgcaggccgtgatgagctccgactactctttcgcacagtttagatatcttcagcgactcctgttggttcatgggagatggagctacatccgcatgtgcaaatttctgcgctatttcttttacaaaaatttcgcgttcaccctcgtccatttctggtactcatttttcaacggttattctgcgcagacggcatacgaggactggtttatcaccctgtataatgtcctgtacacgtcattaccggtgctgctcatgggcctgttggaccaggatgttagtgacaagctcagtctgcggtttcccgggctgtatatagttgggcagagggatctgttgtttaactacaagcgcttcttcgtgtccctactgcatggggtattgacatccatgatcctatttttcatcccgctgggagcatacctgcaaacggtgggtcaggatggtgaggcaccttccgattaccagtcttttgctgtcacaatcgcgtcagcccttgtgataacggtgaactttcagatcgggctggataccagttactggacatttgtcaacgcattctccatcttcggatcaatagccttatatttcggcatcatgttcgacttccattcagctggtatccatgtgctgtttccatctgcattccagtttaccggcactgctagtaatgccctgcgtcagccatacatttggttgactatcatactggccgtcgctgtgtgcctcctcccagtggttgctattcggtttttgtcgatgaccatttggccctctgaaagcgataagatccagaagcatcgtaaacgtttgaaggcagaggaacagtggcagcggcgacaacaggtcttcagacggggcgtctccacaaggaggtctgcttacgcgttcagccaccaacgcgggtacgccgacttgatatcgtcgggcagatccatccggaagaaaaggagtcctctggacgccattgtggcagacggcaccgcagaataccgtcggaccggggactct

SEQ ID NO: 318854 - DNA, 3753 bp, Artificial Sequence
  derived and/or modified sequence
atgtcgaccgaaagagatagcgagactacctttgatgaggattcgcagccgaacgacgaagtggtgccctactccgacgacgagactgaagacgaactggatgatcagggaagtgcggtcgagccggagcagaaccgagtcaaccgagaggccgaggagaatagggagcccttccggaaggaatgcacctggcaagttaaagccaatgacagaaagtaccacgagcagccccatttcatgaacaccaaattcctgtgcattaaagagtccaaatacgctaataatgctattaagacttataagtacaatgcatttacattcatcccgatgaatctatttgagcaatttaagcgcgcagcgaacctctatttccttgccctgctaatccttcaggcagtgccgcaaatctcgacactcgcctggtacactaccttggtgccattgctggtggtgttgggcgtgacggcaattaaagacctggttgatgatgttgcccgacataagatggataaagaaataaacaatcgtacatgcgaagtgatcaaggacggcaggttcaaggtggcaaagtggaaggagattcaagtcggtgacgtgatccgcctgaagaaaaatgatttcgtgcccgccgacatcctgctgttgagctcgtccgagccaaattcactgtgctatgttgagacagccgagctggatggcgagaccaatctaaagttcaaaatgtcgctggaaataacggatcagtatctgcagcgtgaggacaccttggccactttcgatggcttcatcgagtgcgaggaaccgaataacagactggataagtttaccggaaccttgttttggcgcaacacttcatttccgctcgacgctgataagattctgctcaggggctgcgtgatacgcaacacagatttctgtcacggcctagtgatattcgccggagccgatacgaagataatgaagaatagtggcaagacgcgtttcaaacgtacgaagatcgactacttgatgaattacatggtatacaccatcttcgtggttttgattcttctatcagctggtttggcaattggccacgcctattgggaagcccaagtcggaaacagctcctggtacctgtacgatggcgaagatgacacaccgagctaccgcggtttcctcatcttttggggatatatcattgtgttgaacacaatggtgcctatcagcctgtacgtgtccgtggaggttatccgtctgggccaatcccacttcattaattgggacttgcaaatgtactacgcagagaaagacaccccggcgaaggctagaacaaccacattgaacgagcagctgggacagatccattacattttcagtgacaaaaccggtacactgacacaaaacataatgacgttcaagaaatgctgcatcaatggtcagatatatggtgaccatagggacgcgagccaacacaaccataataagatcgagcaggtggacttcagttggaacacttacgccgacggcaagcttgctttttacgatcattatctgatcgaacagatccaatctggaaaggagccggaagtccgtcagttcttttttctactggcagtatgccacacggtcatggtggatcgcacggatgggcaacttaactatcaggccgcaagccccgatgaaggggcactagtgaatgcagctaggaactttggattcgcgttcctcgcgcgcacgcagaacacgatcaccatcagcgagctgggcactgagcgcacatacaatgtgctggccatattggatttcaactcagatcggaagcgtatgtccataatcgtccgtacccccgagggaaatatcaagctgtactgcaagggtgcggacacggttatctatgaacgtttacatagaatgaatccaactaaacaagagacccaggatgccttggatatattcgctaacgaaaccttgcgtacgttatgcttgtgctacaaggagatcgaggaaaaggagttcacagaatggaataaaaagttcatggcagccagcgtcgcctcaaccaatagagatgaggccctggataaggtctatgaagaaatcgagaaggacctcatcctgctgggtgccacagccattgaagacaaactgcaggacggagttcccgagactatatctaagctggccaaagccgacatcaagatctgggttttgactggagacaaaaaggagacggccgaaaatatcggttttgcctgcgagttgctcaccgaggatacaacgatatgttatggagaagacatcaattccctcctgcacgcccggatggaaaatcagaggaataggggcggtgtttatgccaaattcgcccccccagtgcaggagtcgttctttccaccgggaggaaaccgagccttgatcataacggggtcctggctgaatgagatcttgcttgagaaaaagacgaagcgaaataagattctcaagctcaagtttccccggactgaggaggagcgtcgtatgcggacgcaaagcaagaggaggctcgaggcgaagaaggagcagcgccagaaaaacttcgtcgacctggcgtgcgagtgctcggctgtaatatgttgccgagtgacaccaaagcagaaggctatggtcgttgacctggtgaagcgctacaagaaggccataacactcgctataggcgatggcgcgaatgacgtgaatatgatcaagaccgcccatatcggtgtgggaatttcgggccaggagggcatgcaggcggtgatgagttccgattactcctttgcacagtttaggtatctgcagagactgctgctggttcatggacgttggtcctacatccgaatgtgcaaatttctgcgctatttcttctacaagaactttgctttcacgcttgttcatttctggtacagcttcttcaacggctatagtgcacagaccgcctacgaagattggttcataacactctacaatgtcctgtatacgagcctgcctgtcttgctaatgggcctacttgatcaagacgtttccgacaagctgtcgctgcgctttccgggtctatacatagtgggccagagagatctgctgtttaattacaaacgtttctttgtgtcgcttcttcacggcgtcctgacgagcatgatcctctttttcattcccctgggcgcatacctgcaaaccgtgggtcaagatggcgaggcccctagcgactaccagtcatttgccgtgacgattgccagcgcccttgtaattactgtgaacttccaaattggtttggacacgtcgtactggacctttgtgaacgctttttcaatctttggctcgatcgccctttacttcggaatcatgttcgatttccactcggcaggcatacacgtcctgtttccctcggctttccagttcaccgggacagcctcgaacgcgctgcgtcaaccctatatctggctgacaatcatcctcgcagtcgcggtctgcttgctgccggtcgtcgccatccgattcctctcgatgacgatctggccgagcgagtccgacaaaatccagaagcacaggaagcgcctcaaggccgaggagcaatggcagcgccgccaacaagtttttaggaggggcgtgtccaccaggcgcagtgcctatgccttctcacaccagcgcggctacgctgatctgatcagcagcggccgctccatccgcaaaaagagaagtcccctggacgccattgtagcagacggtaccgccgaatatcgtcgcacgggagatagt

SEQ ID NO: 318855 - DNA, 3753 bp, Artificial Sequence
  derived and/or modified sequence
atgtcgaccgagagagatagcgaaaccacctttgatgaggactcgcagcctaacgatgaagtggtcccgtactcagacgatgaaaccgaggatgagctcgatgaccagggatcagcggtcgagccggaacaaaacagggtgaatagagaagcagaagaaaaccgagagcccttcagaaaggagtgcacctggcaggtgaaagccaatgatcgtaagtatcatgagcagccacactttatgaacaccaagtttctgtgcattaaagaaagcaaatacgcaaataacgcaattaagacctacaaatacaatgcatttacgttcattcctatgaacctcttcgagcaattcaagagggcagcaaacctttactttctggcactcctgatactgcaagcagtgcctcaaatttcaactctggcgtggtacaccacgcttgtgccactgctggtcgtgctcggtgtcactgcaatcaaggatctcgtggatgatgtggcaaggcacaaaatggataaagagattaacaacagaacttgtgaagtgattaaggatggtaggttcaaggtcgcaaagtggaaagaaatccaggtgggcgacgtgatcagactcaagaagaatgattttgtgcctgcagatatccttctgctctcctcctcggagccaaattccttgtgttacgtcgaaactgcagagcttgatggtgagactaacctgaaattcaagatgtcccttgaaatcactgatcaataccttcaacgcgaagataccctggcgacctttgatgggtttattgagtgcgaggaacctaataaccgacttgacaagttcactggtacccttttttggaggaacacctccttccctctggacgcggacaagatcttgctgagggggtgcgtcatacgaaacactgacttctgtcacggtctggtcattttcgctggagcagataccaaaatcatgaagaactcgggaaaaactaggttcaaaagaaccaagatcgattaccttatgaactatatggtgtacactattttcgtcgtcttgatactgctttcagccggcctggcgatcggtcatgcgtactgggaggcacaggtgggaaattcctcgtggtacttgtacgacggcgaggatgatactcctagctaccgcggctttctgatcttctggggttacattattgtccttaacaccatggtgcctatctccctttacgtcagcgtcgaagtgataaggcttggacagagccacttcatcaactgggatctgcaaatgtattatgcagagaaagacaccccagccaaggccagaactactaccttgaatgaacaactgggtcaaatacattacatcttttccgacaagaccggtaccctgacccagaatatcatgacctttaagaagtgttgcattaatggacagatctacggagatcatcgagatgccagccagcacaatcacaataagatcgagcaggtggatttctcttggaacacgtatgcagacggtaagctcgcattttacgatcattaccttatagaacaaattcagagcggcaaagaacccgaggtgcggcagttctttttccttctggcagtgtgtcatactgttatggtcgatcgcactgacggtcagctcaactaccaagcagcctcgccagacgaaggagcattggtcaacgcggcacggaattttgggtttgcatttcttgctcgaactcagaatactattaccatctcggaacttggcaccgaaaggacttacaatgtgcttgcaatccttgactttaactccgatcgaaagagaatgtccataattgtccgtactccggaaggtaacataaagctgtactgtaagggagcggataccgtcatttatgagcgtctgcacagaatgaacccgaccaaacaggaaacgcaggatgctcttgacatttttgccaacgaaacgctgcggactctttgcctttgctacaaggaaattgaagagaaggagttcactgaatggaacaagaagttcatggcagcttcagtggcatcaaccaaccgagacgaagcattggataaggtgtacgaggaaattgagaaggacttgattttgttgggagcaactgcaatcgaagataagctccaagatggggtgcctgaaaccatttcgaaactggcaaaggcagacataaagatttgggtactcactggagacaaaaaggaaaccgccgaaaacatcggatttgcatgtgaacttctgactgaggataccactatttgttacggtgaagatatcaattcgttgttgcacgctaggatggaaaaccagcgaaaccgaggaggggtgtacgctaagttcgctccgccggtgcaggaatccttttttcctccaggtggaaaccgagcattgattatcaccggatcatggcttaatgagattctcctggaaaagaaaactaaaagaaataagatacttaagctgaagttccctcggaccgaggaagaaaggaggatgaggacgcaaagcaaacgccggcttgaggcgaaaaaggaacagcgacagaaaaactttgtggatctcgcatgtgaatgctcggctgtgatctgttgtagagttaccccaaagcaaaaggccatggtggtggatcttgtcaagagatacaagaaagcgatcaccttggcaatcggcgacggtgcaaacgacgtgaacatgatcaagaccgctcatatcggagtgggcatatctggccaagagggaatgcaagcggtcatgtcctcggattactcattcgcacagtttagatacctccaacggctgttgctcgtgcacggaaggtggagctacatacggatgtgtaagtttctgagatacttcttttacaagaacttcgcctttaccctggtgcatttttggtactccttcttcaacggctacagcgcacaaactgcttacgaggactggtttatcaccctctacaacgtgctttacacttcacttcccgtccttcttatggggctcctggatcaagatgtgagcgataagctgtcgctgaggttccccggactctatatagtgggccagcgcgatcttctctttaactacaaaaggtttttcgtgtcgctcttgcatggggtgctcacctccatgattctgttctttataccactcggcgcctacctccagaccgtgggacaggatggtgaggcaccatccgattaccagtcgtttgcggttactatagcatccgcgctggtgatcaccgtcaactttcaaattggtttggatacttcatattggactttcgtgaacgcattttcaatattcgggtcgattgcactttactttggtatcatgtttgactttcattcggcgggtattcatgtgctgttcccctcagcctttcaatttactgggaccgcctcgaacgcgctgcggcaaccttacatttggctgactatcatcctggcagtcgcagtgtgtctgcttccagtggtcgctatacgttttctttctatgaccatttggcctagcgaatccgacaaaatccaaaagcacagaaaaaggctgaaggcagaagagcaatggcagagacgccaacaggtctttcggagaggagtgtcgactcgtcgcagcgcatacgcattctcccatcagcgcggatacgccgatctgatcagctccggaagaagcatcagaaagaaacgctccccacttgatgcaattgtcgccgacggaaccgcggaataccgcagaactggagacagc

SEQ ID NO: 318856 - DNA, 3753 bp, Artificial Sequence
  derived and/or modified sequence
atgtcgacggagcgcgattcagaaacgactttcgacgaggactcgcagccgaacgatgaggtggtcccatactccgacgacgagacggaggacgaactggacgaccaagggagcgcagtggaacctgaacagaacagagtgaatcgcgaggctgaagaaaacagagaaccgttccgcaaggaatgtacttggcaggtgaaggccaacgaccgcaagtaccatgagcagccccatttcatgaatactaaattcctctgcatcaaggaatccaagtacgctaataacgccatcaaaacttacaaatacaatgcctttactttcatccctatgaatttgttcgagcaattcaagcgggcggccaacttgtacttcctcgcactgctgatcctgcaggcggtgccgcaaatctcgacccttgcctggtacactacgctcgtgccgctcctggtggtgctgggagtgactgccatcaaggatctcgtggatgacgtggcccggcacaaaatggataaagaaatcaacaaccgcacctgcgaagtcatcaaggacggacggttcaaagtggccaagtggaaggagatccaggtgggtgatgttatccgcctcaagaagaatgatttcgttcccgcggacatcttgctgctgtcctcctcggagccgaactcgctgtgctacgtggaaaccgcagaactggacggagagactaacctcaagttcaagatgtcgctcgagattaccgaccaataccttcaaagagaggacaccctcgccaccttcgatggattcatcgaatgtgaggagcctaacaacagactggataagttcaccggaacgctgttctggagaaacacctcgttcccgctggatgccgacaaaatcctcctgcgcgggtgcgtgatccggaacactgacttttgccacggactggtgatcttcgcaggagccgacactaagatcatgaagaattcagggaaaactaggttcaagcggacgaaaatagattaccttatgaactacatggtgtataccatctttgtggtgctgattctcctctcggcgggactggccatcggacacgcatactgggaagctcaagtcggaaatagctcatggtatctctacgacggagaagatgacacgccgtcatacaggggattcctgatcttctggggttacatcattgtcctgaacaccatggtcccgatcagcctgtatgtctcggtggaagtgatcagactggggcagtcgcactttatcaactgggacctccaaatgtactacgcagagaaggatactccggccaaggcccggactaccacgctgaatgagcaactcggacagatacattacatcttctcagacaagacgggaactctgacccagaacattatgactttcaaaaagtgctgcatcaatggacagatctatggggaccatagggatgcatcgcaacacaaccacaataagatcgaacaggtggacttttcctggaatacctacgcggatggcaaacttgccttctatgaccactacctgatcgaacagatccagtcggggaaggagccggaggtgcggcaattcttcttcttgctcgcagtgtgtcataccgtgatggtcgacagaactgacggccagctcaactaccaagcggctagcccggatgagggagcgctggtcaacgcggcaagaaatttcggcttcgcatttctcgccaggactcagaacactatcaccatcagcgagctcggaactgagcgcacctacaacgtcctggcgattctggacttcaattcggacaggaaacgcatgagtatcatcgtgcggacccccgagggaaacatcaagctgtactgcaagggagccgatactgtgatctacgagcgccttcataggatgaacccgaccaaacaagaaacccaggacgcactcgacattttcgcgaacgaaaccctgcgcaccctgtgtctgtgctacaaggaaattgaggaaaaagaattcaccgaatggaacaagaaattcatggcggccagcgtggcttcaactaatcgggacgaggctcttgataaggtgtacgaggagatcgagaaggacctcatcctcctgggcgcaaccgcgatcgaggataaacttcaggacggagtgccggaaactatctcgaagctcgccaaggccgacattaagatctgggtgttgactggcgacaagaaggaaaccgccgagaatatcggatttgcttgcgagctgctcaccgaggacaccactatctgttacggcgaagatatcaattccctcctgcacgcaagaatggaaaaccagcgtaacagaggcggggtgtatgccaagttcgcgccaccggttcaagagtcttttttccctccggggggcaaccgggccctcatcattactggatcctggcttaacgaaatcctgctggaaaagaaaacgaagcgcaataagatcctcaagttgaagttcccgagaactgaagaagaacggcggatgcggacccagtccaagaggagactggaagccaaaaaggaacaacgacagaaaaactttgtggacctggcgtgtgaatgctccgccgtgatctgttgccgggtcaccccgaagcaaaaagccatggtggttgacctcgtcaaaagatataagaaggcgatcacgcttgcgatcggtgatggtgctaacgacgttaacatgatcaaaaccgcgcatatcggggtggggatcagcggccaggaaggtatgcaggccgtgatgagctctgactactcatttgcacaatttaggtacttgcagcggctgctcctcgtgcacggaaggtggtcatacatcagaatgtgcaagttcctcagatacttcttttacaaaaacttcgccttcacgctggtccatttctggtactcgttcttcaacggatactccgcacagaccgcgtacgaagattggttcatcactctctacaatgtcctgtacacctcactgccggtgctcctgatgggactgctggaccaggatgtcagcgacaagctgtccctgcggtttcctggcctgtacatcgtgggtcaacgcgacctgttgttcaactacaagagattcttcgtgtcactgcttcacggcgtcctgacctccatgatcctgttcttcatcccgctgggagcctacctgcaaactgtgggtcaggacggtgaggccccgtcggactaccagtcgtttgcagttactattgcaagcgcattggttatcaccgtgaacttccagatcggattggatacctcgtactggacttttgtgaacgctttcagcatctttggatccatcgccctctacttcgggataatgttcgatttccacagcgcgggaatccatgtcctgttcccatcggccttccagtttactggtactgcatctaacgctctgaggcaaccatacatctggctgaccatcatcctggctgtggcagtgtgcctcttgccggtagtggctatccgctttctgtcgatgactatctggccttcagaatcagacaagatccagaagcacagaaagcggctgaaggcagaggaacagtggcagaggaggcagcaggtgttccgcagaggtgtctcaaccaggcggtccgcctacgctttttcacaccaaagaggatacgctgacctgatcagctccggacgatccatccggaaaaagaggtcgcctctggacgcgattgtcgcggacggaacggccgaatatcgaagaaccggagatagc

SEQ ID NO: 318857 - DNA, 3753 bp, Artificial Sequence
  derived and/or modified sequence
atgtccaccgaacgagacagcgaaaccacttttgacgaggactctcaacccaatgacgaagtggtgccttactctgacgacgaaaccgaagatgagctggatgaccaaggcagtgcagtggaacctgaacagaatcgtgtcaatcgcgaggcagaagaaaaccgggagccatttcgaaaagagtgtacgtggcaagtcaaggcaaatgacagaaaataccacgaacagccccacttcatgaacacaaaattcctctgtattaaggaaagcaaatacgccaataacgcaatcaagacatataagtataatgctttcacctttatacctatgaacttgttcgagcagttcaaacgggctgcaaatctgtacttcttggcgttactgatccttcaggctgtcccccagatctctactcttgcatggtatactaccctcgtgccgctgctggtggtcttgggggtgacggccataaaggacttggtggatgacgtcgcgcgccataaaatggacaaagagataaacaataggacctgtgaagtcataaaggacggtcgtttcaaggtggcgaagtggaaggagattcaagtcggagatgtgatacgcttgaagaagaacgattttgtccccgcggatatactcctgctgagtagttctgagcccaattcactttgctatgtcgagaccgcggagctggacggcgagacgaatctgaagtttaagatgtctctggagataaccgatcaatacttacagcgggaggatacgttggccacgtttgacgggttcatcgagtgtgaggaacccaacaacagacttgacaagttcaccgggactcttttctggaggaatacatctttccccctggatgccgataagatactgctgagaggctgtgtcatccgaaatactgacttctgtcacggcctggttatatttgccggcgccgacacaaaaattatgaagaactctggtaagacccgctttaaaagaacaaaaatcgactacctgatgaactatatggtgtacaccattttcgttgtgctcattctcttgagcgctggactggctatcggacacgcctactgggaggcacaagtcggcaattcctcctggtacctctatgatggagaggacgacaccccaagctacagaggctttctgattttttggggctatatcatcgtgctgaataccatggtgcccatttccctatatgtgtctgtggaagtcattaggctgggccagtcacactttataaactgggacctgcagatgtattatgctgagaaagatacccccgccaaggcccgcaccacaaccttaaacgagcagctgggtcagattcattatatcttctccgataagaccggtacactgacacagaacataatgacctttaagaagtgctgtataaacggccagatttatggggaccaccgagacgctagccagcacaatcacaataagattgagcaggttgacttttcctggaacacttacgccgatggcaaattagcattctatgaccactacctgattgaacagatccagtctggtaaggagcccgaagtgcgtcaattcttttttctgcttgccgtgtgtcacacagtgatggtcgaccgaaccgacggacagcttaactaccaggctgcatctccagatgaaggtgctctggttaacgccgccagaaacttcggtttcgccttcctcgctcggactcaaaatacaataacaatttcggagttggggacagagcggacgtataacgtgctagcaatcctcgattttaatagtgacagaaagcgcatgagcataatcgtacggacacctgagggaaacatcaagctgtattgcaaaggagctgatactgtgatctacgagcgtctgcaccgtatgaaccccaccaagcaggaaacacaagacgctttggacatctttgctaacgagactctgcgtacactctgtctgtgttataaagagatagaggagaaggagtttaccgaatggaacaaaaagttcatggcggcaagcgttgcatctactaacagggacgaggccctggacaaagtgtacgaagagatagaaaaagatctgattttgctgggggccactgctattgaagataaactgcaggacggggtgcccgaaaccatcagtaaacttgctaaagctgatattaagatctgggtgctgaccggcgataagaaggagacggcagagaacatcggattcgcctgtgagttgctgaccgaggatacgaccatttgttatggcgaagatataaactccctcttgcatgcccgtatggagaaccagcgaaaccgtggcggagtgtacgccaaatttgctccgcccgttcaagagtccttcttcccccctggaggcaatcgtgcactgataatcactggatcctggctcaacgagatcctgttggaaaagaagacaaaacggaataaaatattgaagctcaagtttcccagaaccgaggaggagcgccggatgcgtacccaaagcaaacgcagacttgaggcaaaaaaggaacagcgccagaaaaattttgtggatctcgcttgtgaatgctcggcagttatttgttgccgtgtgacccctaagcaaaaggctatggttgtagacttggtgaaaagatataaaaaggccattactctcgcgattggggacggggctaacgatgtcaatatgatcaaaacagcacatatcggggtggggatttcaggtcaggagggtatgcaggccgtcatgtcctccgattacagctttgctcagttccggtacttgcagcggctcttactcgtgcacggcagatggtcctacatacggatgtgtaagttcctgcgctatttcttctacaagaactttgcattcaccctggtacacttttggtactcattctttaatgggtactctgcccagactgcttatgaagattggtttataacactgtataatgttctctacacttccctcccagtacttcttatggggctcctggaccaggatgtaagcgataagctctcactgcgcttccccgggctctatatagtcggccagcgagatctcctgttcaattacaagagattcttcgttagtctgcttcatggcgtcctgacctcaatgattctgttcttcatcccccttggggcctatctccagacggtcgggcaggacggggaggctccaagtgactatcaatcgtttgccgtgactatcgccagcgctcttgtcatcaccgtaaacttccagatagggcttgatacatcttattggacgttcgtgaacgccttctctattttcggtagcatcgcgctgtatttcggcatcatgtttgactttcactctgccggcattcacgtactcttcccctctgcctttcagttcaccggtacagcttcgaatgccctacggcagccttacatctggctgaccatcatcctggccgtagcagtttgtctcttacccgttgtggctatcagatttctttctatgacaatttggccatctgagagcgacaagatccagaagcatcgtaagcggctcaaggcagaggagcagtggcagcgccggcaacaggtgttccgtagaggggtgtccaccaggaggtccgcctacgccttttctcatcagcgtggctatgccgacctgatctcttccggacgcagtatacgcaagaagcgtagcccgttggatgccattgttgccgatggcaccgctgaatataggagaactggcgacagc

SEQ ID NO: 318858 - DNA, 3753 bp, Artificial Sequence
  derived and/or modified sequence
atgtcgactgagcgggatagcgaaactacgtttgacgaggatagccaaccaaacgacgaagtggtcccgtactctgacgatgaaactgaagatgagctcgatgatcaggggagcgccgtggaacctgaacagaatagagttaaccgagaagccgaagagaacagagaaccgtttagaaaagagtgcacctggcaagtgaaggcgaacgatagaaaataccatgagcaaccgcactttatgaataccaagtttctttgtattaaggagtcgaagtacgctaacaatgcaatcaagacctacaaatacaacgcatttacctttatccctatgaacctgtttgaacaattcaagcgggcagcaaacctttacttcctggcattgctgattttgcaagcagtccctcagattagcactctggcatggtacacgacgcttgtcccccttttggtggttctcggtgtcactgcgattaaagatctcgtggacgacgtggcaagacataagatggataaggaaatcaataaccgtacgtgtgaagtcatcaaggacggtcggtttaaggtcgcaaaatggaaagagatacaggtgggagatgtgatcagactcaaaaagaatgacttcgtgcctgcggatatcttgctcctgtcaagctcagagcccaattcgctctgttacgtggaaaccgcagagcttgatggagagactaacttgaaattcaaaatgtctctggagatcaccgatcaatacctgcaacgtgaggatacccttgcaacctttgacggctttatagaatgtgaggaacctaacaatcggctcgataagttcaccggaacgctcttttggcgtaacacttcatttccactcgatgcagataagattctgctccgggggtgtgtgatcaggaacactgacttctgtcacggcctcgtcatcttcgcaggcgccgacaccaagataatgaagaacagcgggaaaactcggtttaagcgtaccaaaatcgattaccttatgaattacatggtctatacgatctttgtggtgctgattctcctgtccgctggccttgcaattggacacgcatactgggaagcacaagtcggaaactcctcctggtacctttatgatggagaggacgatactccgtcctaccgcggcttccttatcttttggggctacattatcgtactgaacactatggtccccatttcgctttacgtgtcggtggaagtgatccggcttggacagtcccatttcattaactgggatctgcaaatgtactacgccgagaaggacaccccggcaaaggctaggactactactcttaacgaacaattgggacaaatccattacatctttagcgataagaccggaactcttacccagaacattatgacctttaagaagtgttgcattaacggtcaaatctacggtgaccatcgtgatgcctcccagcacaatcacaacaagattgaacaagtggatttcagctggaacacctacgctgatggaaagctggcattctacgaccactaccttattgaacagatacaatcgggaaaggagcccgaagtgagacagtttttctttcttcttgcagtctgccataccgtcatggtggataggacggacgggcagttgaattaccaggcagcgagcccagacgaaggtgcattggtgaatgcagcaaggaattttggtttcgcatttctcgcaagaacccaaaacaccattacgatctcggagctgggtactgagaggacctacaacgtgctggcaattctggactttaactctgatagaaagcggatgtccattattgtgagaactcccgagggcaacattaaactgtactgtaagggagcggatactgtgatctacgaacgccttcaccggatgaatccgaccaagcaggaaactcaagatgcactcgacatctttgcaaatgaaaccctgcgtactctgtgcctgtgttacaaggaaatcgaagaaaaggagtttacggagtggaacaagaaattcatggccgcaagcgtggcctcgactaatagagacgaagcactggataaggtgtacgaggagattgaaaaggatcttatccttcttggtgctaccgcaatcgaagataagctccaagatggagtgcctgaaaccatttcgaagctcgcaaaagcagatatcaagatctgggtgcttaccggagataagaaggagactgcagagaatattggatttgcgtgcgaacttttgactgaggacaccacgatttgctacggtgaagatatcaactcgctcctgcatgcaagaatggaaaaccaacggaatcgcggcggagtgtacgccaaattcgccccaccagttcaagaatcctttttcccgcctgggggaaacagggcgctcataatcacgggctcctggctgaatgagattttgctggagaagaaaactaaaaggaacaaaatccttaaactgaagtttccccggactgaggaagaacgccgcatgcggactcagtcaaagcggcgtcttgaagcaaagaaggaacagcggcaaaagaacttcgtcgatctggcatgcgaatgttcggccgttatttgttgcagggtgacgcccaagcagaaagccatggtcgttgacctggtgaagcgttacaagaaggcgattacccttgcgataggagatggtgccaacgatgtgaacatgatcaagactgcacatattggtgtgggtatttccggacaggaaggaatgcaagctgttatgtcatcagactactccttcgcacaatttcgttacctgcaacgcctgcttctggtccacgggagatggtcctacatccgaatgtgtaagtttttgagatacttcttttacaagaactttgcgtttactctggtgcatttctggtacagcttctttaacggctactcggctcagaccgcatacgaagattggttcatcaccctttacaacgtgctttacacctccctgcctgtcctgctgatgggtctgctggatcaagatgtgagcgacaaactttcgcttagatttcctggtctgtacattgtgggtcaacgcgatctcctcttcaactacaagagatttttcgtgtcgctgcttcatggtgttcttacttccatgatccttttcttcatacctcttggagcctacctgcagaccgtgggacaggatggtgaggcgccttcggactaccagagtttcgcagtcacgattgcctccgccctggtcattactgtgaattttcagattggcctcgatacgtcgtattggacttttgtcaacgcattcagcatctttggcagcatcgctctgtactttggaatcatgttcgactttcattccgcaggaatccatgtcctttttccatctgcatttcagttcactggaaccgccagcaatgcactcaggcaaccttacatttggcttaccataatccttgcagtggccgtctgtctcctgccggtcgtggcgattaggtttctttccatgactatctggccttcagagagcgacaaaattcagaaacatcgcaagcgcctgaaggcagaagagcagtggcaacggagacagcaagtgttcagacgcggtgtgtcgaccaggcggtcggcgtacgccttctcccatcagcgcgggtacgcggatcttatatcttcaggacggtctatccggaaaaaacgatccccactcgatgcgattgtcgcggatggcaccgcagagtacaggcggacgggtgactcc

SEQ ID NO: 318859 - DNA, 3753 bp, Artificial Sequence
  derived and/or modified sequence
atgtcgactgaacgggacagcgagactacctttgatgaagattcccagccgaatgacgaagtcgtcccttatagcgatgatgaaaccgaggatgagctggatgatcaaggatcagcagtcgagcctgaacagaatagggtgaacagagaagcagaggaaaatcgagagccgtttaggaaggaatgtacctggcaagtgaaagccaatgatcgaaagtaccacgagcaaccccatttcatgaatactaagtttctttgtatcaaggagtcgaagtacgctaacaacgcaatcaagacttataagtacaatgcattcacctttatccctatgaatctcttcgaacagtttaaacgagcagcaaatctttacttccttgcgctgcttatccttcaagctgtgcctcaaatctccaccctcgcgtggtacactaccctggtgcctctcctggtggtccttggagtgactgccataaaggacttggtcgatgatgtggctcgccataagatggataaggagattaacaataggacttgcgaagtgatcaaagatgggcgattcaaagtggcaaaatggaaggaaattcaagtgggagacgtgattcggctcaaaaagaatgattttgtgccagcagatattctgctgctttcgagctccgaaccaaactcgctgtgctacgtcgaaaccgcagaacttgatggcgaaactaatctcaagtttaagatgtctctggagataacggaccaatacctccaaagagaggacactttggctacttttgatggattcatcgaatgtgaggaaccaaataacaggctggataagttcacgggtaccctgttttggagaaatacgtcctttcccctggatgcggataagattcttcttcgaggttgtgtgatccggaataccgatttctgtcacggactggtgatttttgctggcgcagatactaagattatgaaaaactccgggaaaactcggttcaagagaaccaaaattgattaccttatgaactacatggtgtacacgatctttgtggtccttatcttgctgtccgccggactggcgattggacatgcatactgggaagcccaggtgggtaacagcagctggtacctgtacgatggcgaagatgacacccctagctaccggggctttctgattttctgggggtacattatcgtgctcaatacgatggtgccaatctcactgtacgtgtccgtggaggtgattaggctgggacaatcccatttcatcaactgggatcttcaaatgtactatgcagagaaggacaccccggcaaaagcccggaccaccactctgaacgaacagcttggccagattcactacattttcagcgacaagactggaacgctgactcaaaacattatgaccttcaagaagtgttgtataaacggacaaatctacggtgatcacagagatgcaagccagcacaatcacaataagatcgaacaagttgacttctcctggaacacctatgccgatggcaagctcgccttttacgatcattatctgattgaacagattcagagcgggaaggaacctgaagtgaggcagttctttttcttgctggccgtgtgccacactgtgatggtggatagaaccgacgggcagctgaactaccaggcagcaagccctgatgaaggggccctcgtgaatgctgcacgaaactttggattcgcattcctggcgagaactcagaacaccataacgatttcggagctggggactgagcggacctacaacgtgctggcaattcttgactttaactcggaccgtaagcgaatgtcgattatcgtccgcaccccagaaggcaacataaaactttactgcaagggagccgacacggtgatatacgagcgccttcaccggatgaatcctactaagcaagaaacccaggacgcgctggatatcttcgcaaacgaaaccctccggaccctgtgtctgtgctacaaagagattgaagagaaagaatttacggaatggaacaagaaattcatggcagcatcggtcgcaagcaccaaccgcgacgaagctcttgataaagtctatgaagaaattgaaaaggatctcattctcctcggtgccactgcaattgaagataagttgcaggacggtgtgcccgagactatatccaagctggccaaggcagatatcaagatttgggtgctgactggggacaagaaagagactgccgaaaacataggattcgcgtgtgagttgcttactgaagataccactatttgttacggcgaggatatcaacagcctccttcatgctcggatggagaaccaacggaatcggggtggagtgtacgccaagtttgcacctccagttcaggaatccttttttcctccggggggaaacagagcgctcatcattactggatcgtggctgaacgaaatactcctcgaaaagaaaactaagcgcaataagatcctcaagctgaagtttcctaggaccgaagaggaacgtaggatgagaactcagagcaagcgtagacttgaggcgaagaaggaacaacgtcagaaaaactttgtcgaccttgcatgcgaatgctcggcagtgatctgctgtcgagtgactccaaaacaaaaagcgatggtggtggatctcgtgaagcgatacaagaaggcaattaccctggccattggggatggagccaacgacgttaacatgattaagaccgcacatatcggtgtgggcatctcaggtcaggaagggatgcaagctgtgatgtcatcggactactcgtttgctcagttccgctacctgcaacgacttctccttgtgcatggaagatggtcgtacataagaatgtgtaaattccttagatactttttctacaaaaactttgcatttaccctggtgcatttctggtacagctttttcaacggttactcagcacaaaccgcctatgaggactggtttatcactttgtataatgttctgtacacctcgctcccagttcttttgatggggctcctggaccaagacgtgtccgacaagctctctctgagattccccggtttgtacatcgtcggccagagagatctgctgtttaactacaaacggtttttcgtgtcactgcttcatggagtcctcaccagcatgattctgttctttatacctcttggggcatacttgcagactgtggggcaagatggagaagccccaagcgactaccaatcatttgccgtcaccatcgcatccgcgctggtcataaccgtgaattttcaaattggtctggacacttcgtactggacttttgtcaacgcattttccattttcggatctatcgcgttgtacttcggcattatgtttgattttcatagcgctggtatccacgtcctgtttccctccgcctttcagtttaccggaactgcgagcaacgcactgagacagccatacatctggctcaccatcatccttgcagtcgcagtgtgtctgctcccagtcgtcgcaattagattcctgagcatgactatatggccctcggagtcggataagatccaaaagcataggaagagactgaaggcagaagaacaatggcagcggagacagcaagtctttcgaagaggagtctctaccagacggtcggcatacgcatttagccatcaacgcggttacgcagacttgatctcgagcggccgatcgattcgaaagaaacgtagcccgctcgatgctatcgtcgcagacgggaccgccgagtacagacgtactggtgactcc

SEQ ID NO: 318860 - DNA, 3753 bp, Artificial Sequence
  derived and/or modified sequence
atgtccaccgaacgggattctgagacaacttttgatgaggatagtcagccgaacgatgaggtggtgccctattccgacgatgagaccgaggacgaactggacgatcaaggttcagccgtcgaaccggagcagaatcgtgtcaatcgcgaagctgaagaaaaccgcgaaccatttaggaaggagtgtacctggcaggtgaaggccaacgatagaaaataccacgagcagccacactttatgaatacaaaattcctgtgtatcaaggagagcaaatatgcaaacaacgccattaaaacctacaaatataacgctttcaccttcatacctatgaatctgttcgagcagtttaaaagggccgcaaacctgtactttctggccctcctgatcttacaggctgttccccaaattagcacacttgcttggtacacgacactggttccccttctcgtcgttctgggtgtcaccgctataaaggacctagtggacgacgtagcccggcataaaatggacaaggaaataaacaatcggacatgcgaagtgataaaagacggcagatttaaggtggcaaagtggaaggaaatacaggtgggcgacgtcattcgattaaaaaaaaatgattttgtgcctgcggacattcttctcctgagctcttccgaacctaattctctatgctacgtcgaaacagcggaactggacggagaaaccaacctaaaattcaagatgtctctggagattactgaccagtatctacaaagagaagacacgctcgccacatttgacggctttatcgagtgcgaggaacccaacaatcggctggacaaattcacgggcaccctgttctggcgcaacacaagctttcccctagatgcagataagattttgctgcgggggtgcgtgattcgaaatacagatttctgccacggacttgtgatattcgctggcgctgataccaaaattatgaaaaacagcggcaaaactcgctttaaacgcactaagatcgactacctgatgaattacatggtgtacaccatctttgtggtgctgattctcctgagcgccggccttgccattggacatgcctattgggaggctcaggtgggaaacagttcatggtacctgtacgacggagaagacgacaccccttcatataggggatttctcatcttttggggctatattatcgttctaaacactatggtcccaatttctttgtatgtttcagttgaggtgatccgactggggcagagccactttatcaactgggacctgcagatgtactacgcagagaaagacactcctgccaaggctagaactactaccctcaacgaacagctgggacaaattcactatattttttcagacaagaccggcacactgactcagaacatcatgacttttaaaaaatgctgcatcaatggccaaatctacggcgaccatcgtgacgcctcacagcataaccataacaaaatcgagcaggtagacttctcctggaacacttacgccgacgggaagctggccttttacgaccactatctcattgaacagatccagtccggaaaggaacccgaggttaggcagtttttctttctgctcgcggtgtgccacaccgtcatggtggatagaactgacggtcagttgaactaccaggctgcctcccctgacgagggcgcactggtgaatgcagctagaaattttggattcgcctttctggcgcgtactcagaataccatcactatctccgaactgggcaccgaacgaacctacaacgtgcttgcgattttggactttaactctgatcgaaagcggatgtccatcatcgtgcgcaccccggagggaaatattaagctatattgcaaaggcgctgatacagtgatctatgaacgcctgcatcgcatgaaccccacgaaacaggagactcaagacgccctcgacatatttgcgaacgaaacacttcgtacactctgcctctgctacaaggaaatagaggagaaagaattcacggagtggaacaagaagtttatggcagcctccgtggcctcaacaaacagagatgaggctctggacaaggtgtacgaggaaatcgagaaggatctgatccttctgggcgcgacagccattgaggataaactgcaggacggagtccctgaaaccatctcaaaacttgccaaggctgatattaaaatctgggtgcttaccggtgacaagaaagaaacggccgagaacattggctttgcttgtgaattgctaactgaggacaccacgatttgctatggagaagacataaacagcctgcttcacgccagaatggagaatcagaggaacagaggaggagtatatgctaaattcgccccgcctgtgcaggaaagtttttttcccccaggtgggaaccgggccctgatcatcactggctcttggctgaacgagattttactggaaaagaagacaaaaaggaacaagatcctgaaacttaagtttccccgcactgaggaagagagacgaatgcgaactcagtccaaaaggcgactggaggccaagaaagaacagcgccaaaagaacttcgtagatctggcatgcgaatgctccgccgtaatttgttgccgcgtcacgcctaagcagaaggctatggttgttgacttggtgaagcggtacaaaaaggcaataacgcttgccatcggtgatggtgccaacgacgttaatatgatcaagacagcccacattggagtcggtatctctggtcaggagggtatgcaggcagttatgagttcagattattctttcgcgcagttccgttatcttcagagactgctgcttgtgcacggcagatggtcctacatcagaatgtgtaaattcctgcgatactttttttacaaaaacttcgcgttcaccctggtgcatttttggtatagctttttcaacggctatagcgcacagaccgcatacgaagactggtttatcactctgtataacgtgctctatacatccctgccagtgctgctcatggggctgctggatcaggatgtttcagacaagctttcactgcggttcccgggactgtatatcgttggacagcgcgatttgctgtttaattacaagcgcttctttgtgagccttttacatggcgtcctcaccagcatgatcctattttttattccgctgggcgcttatctgcagaccgtggggcaggatggtgaagctccctctgactaccagagctttgcagtcactatcgccagtgccctggtaattaccgtgaacttccagatcggtctggacacgtcttattggacttttgtgaacgcatttagcatctttgggtctattgctctttatttcggcatcatgttcgatttccacagtgcaggcatccatgtccttttccccagcgcattccagttcacaggaaccgcgtccaacgcactcaggcagccttacatctggctgacaattatcctggccgttgccgtttgtcttttaccagtagttgcaatcaggttcctgtcaatgaccatatggcccagcgagagcgataaaatacaaaagcatcgcaaaaggttgaaagcagaggagcagtggcagcgacggcaacaggtgttcagacggggcgtctccacacggagatctgcctacgcatttagtcaccaaagggggtacgccgacctcatatctagtggaaggtccatcaggaaaaaaagatccccattagatgctatcgttgctgacgggacggccgagtacaggaggactggagatagc

SEQ ID NO: 318861 - DNA, 3753 bp, Artificial Sequence
  derived and/or modified sequence
atgtcgacggaacgggattcggaaacgaccttcgacgaagattctcaaccgaacgacgaggtggtcccgtactcggacgacgaaaccgaggacgaacttgacgatcagggctctgccgtcgaaccggagcagaatcgcgtcaatcgcgaggcggaagaaaaccgggagccgtttcggaaggaatgcacctggcaagtgaaggcaaacgaccggaagtaccacgaacagcctcatttcatgaatactaagttcctctgcatcaaggagtcaaagtatgctaacaacgcaatcaaaacttacaagtacaatgccttcacctttatcccaatgaaccttttcgaacagttcaagagagctgccaacctctatttcttggcgctcctgatcctgcaagccgtgcctcaaatcagcaccctcgcgtggtacaccaccctggtgcctcttctggtcgtgctgggagttaccgctatcaaagatctggtggatgacgtcgcaagacacaagatggataaggagattaacaacagaacctgtgaagtgatcaaggatggccgctttaaggtggccaagtggaaggaaatccaggtgggggacgtcatacgcctgaagaaaaatgacttcgtcccagccgacatccttctcttgagctcatcagaaccaaactctctgtgctacgtggagactgctgagttggatggagaaaccaaccttaagtttaagatgtcgctcgaaatcaccgatcaatacctgcagcgagaagataccctcgctactttcgatggattcatcgagtgcgaggagcctaataacagactggataagttcactggcactctcttctggagaaatacctcgttccctctcgatgccgacaagatcctgcttcggggatgtgtcattagaaatactgacttctgccacggacttgtgatcttcgccggagcggacaccaagattatgaagaactcgggaaagactcggttcaagcgcaccaaaatcgactacctgatgaattacatggtctataccatctttgtggttctcattctccttagcgccggtttggccatcggacacgcctactgggaggcccaggtgggaaacagctcgtggtacctgtacgacggagaggacgatacgccgtcgtaccgggggttcttgatcttttggggatacatcattgtcctcaatactatggtgccgatttcgctgtacgtgtcggtggaggttatccggctgggccagagccatttcattaactgggatctgcaaatgtactacgcggaaaaggacaccccggcaaaggcacggaccactaccctgaatgagcagctgggccagatccactatatcttctccgacaaaaccggtacgctgactcagaacatcatgacctttaagaaatgttgcatcaacggacagatctacggtgatcatagggacgcgtcgcagcacaatcataacaaaatcgagcaggtggatttctcgtggaacacctacgcggatggcaaacttgcgttttacgaccactaccttatcgagcagatccagtccggtaaggagccagaggtgcgccagttcttcttcctgctcgccgtctgccacactgtcatggtggaccggaccgacggacagctgaattatcaggctgcgtccccagacgaaggcgccctggtcaacgccgctcggaattttggattcgcattcctggctcggacgcaaaataccattaccatctcggaactcggaaccgaacggacctacaatgtgcttgcgattctggactttaactcagataggaaaagaatgtcaatcatcgtgcgtaccccagaggggaacatcaagctgtactgcaagggcgccgataccgtgatttacgaaagactccaccgcatgaaccctaccaagcaggagactcaggacgcccttgacatcttcgccaacgaaaccctgcggacgctttgcctgtgctacaaggagatcgaagagaaagaattcactgagtggaacaagaaattcatggccgcttccgtggcgagcactaatcgagacgaagcactcgacaaagtctacgaagagatcgagaaggacttgatcctgcttggcgctaccgcgatcgaagataagctgcaggacggcgtgcccgagactatcagcaagctggctaaggcagacatcaagatctgggtcctgactggtgacaagaaggaaacggcagaaaacatcgggttcgcatgtgaactgctcaccgaggacacgaccatctgttacggagaggacattaacagcctgctgcatgcccggatggaaaaccagcgaaacagagggggagtctacgccaagttcgcccctccagtgcaagaatcgttctttccgccaggagggaatcgcgcgctgattatcaccggatcatggctgaacgaaatcctgctcgagaaaaagaccaagagaaacaagatcttgaagctcaagtttccacgcaccgaggaagaacgccgcatgcggacgcagtcaaagaggagactggaagccaagaaggaacagagacagaaaaactttgtggatctcgcgtgcgagtgctcggccgtgatctgctgccgcgtcacgcctaagcaaaaggccatggtggtggatctggttaagcgctacaagaaggcgatcaccctcgcgatcggcgatggagctaacgatgtcaatatgatcaagactgcccatatcggggtgggcatcagcggacaggagggcatgcaggctgtgatgtcatcggactactcgttcgcgcagttccgctacctccaacggctgctgctggtgcatggacgatggtcttacatccgcatgtgcaagttcttgcgctacttcttctacaagaatttcgccttcactctggtgcacttctggtacagctttttcaacggatactccgcacaaaccgcttacgaggactggttcattaccctgtacaacgtcctgtacacgtcactgccagttctgctgatgggacttctggaccaggatgtgtctgataagctctccctgagattcccaggcctctacatcgtgggacaacgggatctgcttttcaattacaagcggttcttcgtgtccctcctccatggcgtactcacttcgatgatcctgttctttattccactcggcgcttacctccaaaccgtcggtcaggacggagaagctccatccgactatcagtcattcgccgtcaccattgcctccgctctggtcatcaccgtgaacttccagatcggactggacaccagctattggacctttgtgaacgccttctccattttcggatccatcgcgctgtactttggaatcatgtttgatttccattccgcgggaatccacgtgttgttcccttcggctttccaattcaccggaaccgcctccaatgcactgaggcaaccgtacatctggttgaccattatcctcgcagtggctgtctgtctcctgccggtggtggcgatccgcttcttgagcatgaccatctggccatcggagtccgacaaaatccagaagcaccggaagcggctgaaagccgaagaacagtggcagcgccggcagcaggtgttccgtagaggcgtgtctactcgaaggtcggcgtacgccttcagccatcagagggggtacgcagatctgattagctccggacggtcaatcaggaaaaagcgcagcccgcttgacgccatcgtggcggacggaactgcggaataccggcggaccggcgattcc

SEQ ID NO: 318862 - DNA, 3753 bp, Artificial Sequence
  derived and/or modified sequence
atgagcactgaacgggacagcgaaactacgttcgacgaagacagtcagcccaacgacgaggtggtgccatacagcgatgacgaaactgaagacgagcttgacgaccagggcagcgccgtggaacctgagcagaaccgcgttaacagagaggcggaagagaaccgcgagcccttcaggaaagagtgtacttggcaggtaaaggccaacgacagaaaatatcacgaacagccacacttcatgaatacaaagtttctgtgtatcaaggaaagcaaatacgccaataacgcaataaaaacctacaagtacaacgcgttcacctttatccctatgaacctgtttgagcagttcaagcgggccgctaacctttacttcctcgcactgctgatcctgcaggccgtgccccagatttcaacgttggcatggtacactacactggtgcccctgctcgtggtgttgggcgtcacggccatcaaagatctggtcgacgatgtcgcccgccataaaatggataaggagatcaacaaccgcacgtgcgaggtaataaaagacgggaggtttaaggtcgcaaaatggaaagaaatccaggtcggagacgtgatacgccttaagaaaaacgactttgtgccagctgacatattgttgctgtcttcctccgagcccaactctctttgttacgttgagactgcagagttggatggggagactaatttgaagtttaagatgagtcttgaaatcaccgatcagtacctccaacgagaggacaccctggccacatttgacggattcattgaatgcgaggagcccaacaaccgactcgataagttcacaggtacactcttctggcggaacacgagcttccccttggacgccgataagattctgctgagaggatgtgtgatcaggaacacagacttctgtcatggactggtcatctttgcaggagccgacactaaaattatgaaaaactctggaaaaacaagatttaagcgcactaaaatagactatcttatgaattatatggtgtacactatattcgtggtgctgattctgctctccgcaggcctggcaataggacacgcctactgggaggcccaagtgggtaatagttcctggtacctttacgatggcgaagatgacactccatcctacaggggcttcctgattttctggggctacattatcgtcctgaatacaatggttccaattagtctctacgtctcagtcgaagtgatcagactgggccagtctcacttcattaattgggatttgcagatgtactatgctgaaaaagacaccccggcaaaggcacgcaccaccactttgaatgagcagcttgggcaaatccactacatcttttccgataaaacggggaccctgactcaaaacataatgaccttcaagaaatgctgtataaatggccagatctacggtgatcaccgggacgcctcccaacacaatcataacaagattgagcaggtagatttctcttggaatacctatgccgatgggaaactcgccttttacgaccattatcttatcgaacagatccagtccggcaaggagccagaggtgcgacagttttttttcctgcttgccgtctgccacacggtgatggtcgatagaactgatgggcagctgaattaccaggctgcgtctcccgacgagggagcgttggttaacgccgctcgcaacttcggctttgcatttctggctaggacacagaatactattacaattagcgagctcggcactgagcggacatataacgtgctggcaattctggatttcaatagtgaccggaaaaggatgagcatcatcgtgaggactcccgagggcaatatcaaactctactgtaagggagcagatacagtgatttacgagaggctccatagaatgaatcccacaaaacaggaaacccaggacgcactggacattttcgccaacgaaacccttagaactctgtgcctgtgttacaaggagatcgaggaaaaagagtttaccgagtggaacaagaagttcatggccgcatctgttgcatccacgaatcgagacgaggccctcgataaagtatatgaagagatcgagaaggacctcatactgctcggcgcaaccgctatagaggacaaactgcaggatggagtcccagagaccattagcaaacttgcgaaggctgatatcaagatctgggtgctgaccggtgacaagaaagagactgctgagaatatcggatttgcatgcgaacttctcactgaagatacgacgatctgctacggggaggatataaattcccttctgcacgctcggatggaaaatcaaagaaacaggggtggagtgtacgccaagtttgccccgccagttcaggagtctttttttcccccgggtggcaatagggctctgatcatcaccggcagttggctcaatgaaatcttgctggagaaaaagacaaagagaaacaaaatactgaaattgaagttccccagaacagaagaagagagacggatgaggacccaaagcaaacggaggcttgaagcgaagaaggagcagagacagaaaaacttcgtggatttggcttgcgagtgctccgccgtgatctgctgtagggtgacgccaaaacagaaggctatggtagttgatctcgtgaaacggtacaaaaaagctatcacccttgccataggtgatggtgccaacgacgttaatatgataaaaaccgctcacattggcgttggcatcagcgggcaggagggtatgcaggctgtcatgtcctcagactactctttcgctcagttccggtatttgcaaaggctgctgctcgttcatgggcgctggtcatatatacggatgtgtaagttccttcggtactttttttacaaaaatttcgctttcactttggtgcacttctggtactcattttttaatggttattctgcacagactgcttacgaagattggtttattaccctgtacaacgtcctgtatacctccctgccagttctcctcatgggtctgctcgaccaggatgttagtgataaactgagcctgagattcccggggctttatattgtggggcagagggaccttctgtttaactacaagagattttttgtcagtctgctgcacggggtgctgactagtatgatcttgtttttcattcctctgggggcgtatctccagaccgtgggccaggatggggaagctcctagtgactatcagtcattcgcagtgactattgcctccgctctggtgatcaccgtcaattttcagattggcttggatacgagttactggacttttgtaaacgcatttagcatttttgggtccatcgccttgtatttcgggattatgtttgactttcattccgctgggattcacgtactttttcctagcgctttccagtttactggtaccgctagtaatgcccttcgacagccatatatctggctgacaatcatccttgcagtagcggtgtgtcttcttccagtagtcgccattagatttctgagtatgaccatctggcctagcgaatctgacaaaattcagaagcacaggaagcgcctcaaggccgaggagcagtggcagcggaggcagcaagtgtttaggcggggtgtgagtacccggagaagtgcttatgcctttagtcaccagagaggatatgcggatctcatatcttccggacggtccatccgaaagaaacgaagtccactggatgccattgtcgcagacggcactgcagagtaccgcaggacaggcgactca

SEQ ID NO: 318863 - DNA, 3753 bp, Artificial Sequence
  derived and/or modified sequence
atgagtaccgaaagagacagcgaaaccactttcgacgaggacagtcagcccaatgatgaggtcgtgccctatagcgacgatgagactgaagacgaactggatgatcagggaagtgccgtggagcccgagcagaaccgcgtgaaccgggaagcagaggaaaaccgcgagcccttccggaaagagtgtacgtggcaggtaaaggccaacgatcgcaaatatcatgagcagccacatttcatgaatactaaattcctttgcatcaaggaatccaagtatgccaacaatgcgattaaaacatataaatacaatgcatttactttcattcctatgaacctcttcgaacagttcaaacgggccgcaaacctctacttcctggctctgcttattctgcaggccgtaccgcaaatatccactctggcttggtacaccaccttggttcctttgttggtggtgctgggcgttacagcaataaaggacctcgtagacgacgttgcccggcacaagatggataaggaaattaacaacagaacctgtgaggtgatcaaagatggtcgttttaaagtcgccaaatggaaggagattcaggtgggcgatgtgatccgcctgaagaaaaacgacttcgtgcctgccgacatcctgctcctgtccagcagcgagcccaactctctgtgttatgtcgagaccgccgagctggacggagagacaaatttaaagtttaaaatgtccctcgagattacagatcagtacctccaacgagaggacactctcgccacgtttgacggctttattgaatgcgaagagcccaataaccgtctagataaatttaccgggacgctgttctggaggaataccagcttccccttggatgcggataagattctgctccgtggttgtgtgattcgtaataccgatttttgccacggcctggtgatctttgccggcgccgatactaaaattatgaagaattcagggaagacccggtttaagagaacaaaaattgattacctgatgaactacatggtctacaccatctttgtagtattgattctgctaagcgccggcttagcaatcggccatgcctattgggaggcacaggtgggcaactcatcctggtacctttacgatggagaagatgatactccatcttaccgaggcttcctgattttctggggttacattatcgtgctgaataccatggtgccgatctctctgtacgtgagcgtggaagtgataagactcgggcagagtcactttataaactgggatcttcagatgtactatgctgagaaggacacaccagctaaagcccggaccactacacttaacgagcaattaggacaaatccattacatttttagcgacaagaccggaactttgacccagaacattatgactttcaagaaatgttgcatcaatggccagatctatggagatcatcgcgatgctagtcagcacaaccacaacaagatcgaacaggtggactttagctggaatacctacgcagatggcaagctcgccttttatgaccactatttgatcgagcagatacagagcgggaaagagccagaagtgcggcagtttttcttccttctggcggtatgtcatacagttatggtggaccgcacagacggccagctgaactatcaggcggcctcccctgatgaaggcgcactcgtgaatgcggcccgcaatttcggctttgcattcctggcccgtacacagaatacaattacgatctccgagttgggcacggaacggacatacaatgtactagccatcttagattttaactctgaccgcaagcggatgagtataatcgtcagaacccccgaagggaatattaagctttactgcaaaggggccgacacagtcatctatgagaggctacacagaatgaacccgacaaagcaggaaactcaagacgcgcttgatatattcgccaacgaaaccctccgtaccttatgcctgtgctacaaggagatagaagaaaaagagttcacggagtggaataagaaatttatggcggcaagtgtggccagcacaaaccgagatgaagctctagataaggtgtacgaggaaatagagaaggatctaatattactgggagctactgctatcgaagacaagctacaggatggagtaccagagaccatatccaagcttgctaaggccgacatcaaaatctgggttttgactggagacaagaaagagacagctgaaaacatcggatttgcctgcgagcttctgactgaagacacgactatatgctatggtgaggacatcaactcacttctgcacgcccggatggagaaccagagaaatcggggcggagtgtacgcaaagttcgcacctcctgtgcaggagtccttcttcccaccgggaggcaaccgagccttgattatcactggatcgtggctgaatgagatcctgttggaaaagaaaacaaagcgcaataaaatccttaagctcaaattccctcgcaccgaagaggaacgacgtatgagaacccagagcaaacgaaggcttgaggccaaaaaagagcagcgtcaaaagaacttcgtggacctcgcatgcgagtgcagtgcagtgatctgctgtagagtgacccctaagcagaaagccatggtggttgaccttgtgaaacgctacaaaaaggcaattaccctggccatcggagacggggccaatgacgtgaacatgattaaaactgcccatattggagtggggatctctgggcaagaaggcatgcaagcggtgatgagcagcgactactcttttgctcaattccgatatctgcaaagattactgttggtgcatgggaggtggtcctatattagaatgtgcaagtttctacgctactttttctacaagaacttcgccttcacactcgtccacttttggtatagtttcttcaacggctacagcgctcaaacagcctatgaagattggttcataactctgtacaacgttctgtatacaagcctccctgtattgctgatgggattgctcgaccaagatgtttcagataagctttctctccgatttccaggactgtacattgtgggtcagcgagacctgcttttcaattataaaagattttttgtctcactgctgcatggagttctgaccagcatgatcttgttcttcatacccctgggggcgtatctgcagactgttggacaggacggcgaggcccctagcgattaccagtcattcgctgtaacgatcgcaagtgctctggtgatcaccgtcaactttcagataggcctcgatacatcttactggaccttcgtcaacgcattctcaattttcgggagcatagccctgtattttggtatcatgttcgactttcacagtgccgggatccatgtcctcttccccagcgctttccagtttactggaaccgcctccaacgccctgcgtcagccttacatctggcttactatcattttggccgttgctgtttgtctgctgcccgtagtcgcaatacgctttcttagcatgacaatttggccctctgagtctgacaagatacagaagcataggaagcgcttaaaggcagaggaacaatggcagaggaggcagcaggtgttccggcgcggggtgagtaccaggaggtcagcgtatgcttttagccaccaaaggggctacgccgatttaataagctcgggacgatccatcagaaaaaagcgctcacctctcgacgccatcgtggccgacgggaccgctgagtaccgcaggaccggcgacagt

SEQ ID NO: 318864 - DNA, 3753 bp, Artificial Sequence
  derived and/or modified sequence
atgtccaccgaacgcgattcagagactactttcgacgaggatagccaacctaacgatgaggttgtgccctactctgacgatgagaccgaggacgaactagacgaccagggaagcgcagtggagcccgagcagaaccgggttaatagggaggctgaggagaaccgtgagccatttagaaaggagtgtacgtggcaggtgaaggcaaatgatcgcaagtatcatgagcagccccatttcatgaacaccaaattcctatgcattaaggaaagcaaatatgccaataatgcgattaagacttataaatataatgcattcaccttcattcccatgaacttgtttgagcagtttaagagagccgcaaatttgtacttcctcgcgctgctaatccttcaggccgtgcctcagatttccacactggcctggtacactacactggttccattgctggtagtcctcggtgtcaccgcaataaaggatctggtcgatgatgtggcacggcacaagatggacaaagagatcaataataggacctgtgaggtcatcaaagatggacggttcaaagtggccaagtggaaggagatacaggtgggagacgtgatccgcttgaagaaaaatgattttgtgcctgcagacatcctactgctcagcagctccgaaccaaactctctgtgctatgttgaaacggccgaactcgacggcgaaacaaaccttaaatttaaaatgtctctggagatcaccgatcaatatcttcagagggaggatactcttgccacatttgacggcttcatcgagtgcgaggagcctaacaataggctggacaaattcaccggaaccctattttggcgcaatacttcatttcccctcgacgcagataagatcctgctaaggggctgcgttatcaggaataccgatttttgtcacgggctggtgatcttcgccggagctgatactaagattatgaagaacagtggcaagactagattcaagcgaacaaagattgactacctgatgaactatatggtttacactatttttgttgtcctcattctcctgtctgccggattggctatcgggcacgcttactgggaagctcaggtcggcaactctagctggtatctgtatgatggtgaagacgatacaccatcctaccgagggttcctgattttttggggatatattattgtgctgaacaccatggtgccaatttcactgtacgtgtctgtggaagtgattcgactgggccagagccacttcattaactgggatctgcaaatgtactacgctgaaaaggacacacctgctaaggctagaacgactacactgaatgagcagctgggtcagatccactacattttctcggataaaaccggaactttgactcaaaatataatgacatttaagaagtgttgcataaacgggcaaatttacggcgatcacagggatgctagtcagcataatcacaacaagatagagcaggtggatttttcgtggaatacttatgcggatggaaaactggcattctatgatcattatctgattgagcagatccagtctggtaaggagccggaggtgcgacagtttttttttctgctggctgtgtgccacacagttatggtggaccgcactgacgggcagctcaattatcaggccgcctcccccgatgagggagccctcgtcaacgcagcacggaacttcggctttgcctttctggcccggacccagaatactattaccatctccgagctcggtacggagcggacgtacaatgtcctggccattctcgattttaactccgatcgcaagcggatgagtattattgtaagaactcctgagggtaatattaaactgtattgtaaaggggccgacaccgtgatatacgaacgccttcaccgcatgaacccaaccaagcaagaaacccaagacgcccttgacattttcgccaatgaaacgctgagaaccctgtgcttgtgttataaagagattgaggaaaaagaatttacagaatggaataaaaaatttatggcagcctccgtggcttccacgaacagagacgaagccctagataaagtatatgaggagatcgagaaagatcttattctcttgggcgctactgccattgaagacaagctgcaggatggagtcccagagacaatttctaagctcgccaaagcagacatcaaaatctgggttctcacaggcgacaagaaggagacggcagaaaacatcggttttgcatgtgaactgctgacggaggatactacaatctgttatggtgaggacattaatagcctgctacacgcaaggatggagaaccagcgcaaccggggaggtgtctacgctaagtttgctccaccagtgcaggagtcttttttcccacctggaggtaaccgcgccttaatcatcaccggatcctggttgaatgagattttgctggagaagaagactaaaaggaataaaatactgaagctgaagttcccaaggactgaggaggagagacgcatgcggacccaaagcaaacgaaggctggaggctaagaaagagcaaagacagaaaaattttgtggatttggcttgtgaatgctccgccgtgatttgctgtagagttacacctaaacaaaaggcaatggttgtcgatctagtgaagcgatacaagaaagccatcactttggctatcggtgatggggccaatgatgtaaatatgatcaagactgcccacattggcgtgggtatctccggccaggagggcatgcaggctgtgatgagctctgactattccttcgcccagttcagatacctgcagcggctgctactggtgcatggtcgctggagctacatcagaatgtgtaaattcctccgctactttttctataaaaatttcgcatttaccttagtccatttttggtattccttcttcaatggatacagtgcccagaccgcatatgaggattggtttatcactttgtataacgtactgtatacatcactacccgtattgttgatggggttgcttgaccaggacgtgtctgataagctttcactaagatttcctggcttgtatatcgtcggtcagcgggacctgttattcaactataagagattttttgtgtctctcttgcatggggtccttacctctatgattttgttcttcattcccctgggggcttatttgcaaaccgtcggccaggatggagaagccccctccgattaccagtccttcgctgttaccatcgcctctgcactggttatcaccgtaaattttcagatcgggctcgacacctcttactggacgtttgtgaacgcttttagtatcttcggatcgattgccctgtacttcggaatcatgtttgactttcactccgccggcattcatgttctttttccaagcgctttccaatttacgggcacagctagtaacgccctaagacagccttatatttggcttactatcatactggcagtagctgtgtgcctgctgccagtcgttgcgattagatttctgagtatgacaatttggcccagcgaaagcgacaagattcaaaaacaccgaaagaggctgaaggcggaggaacagtggcagaggcgtcagcaggtctttcgccgcggggtgtcgacacgaagatctgcctacgcatttagccaccagcgcggttacgcagatttgatctcttcagggagatcaattaggaagaagcggagtcctttggatgccattgtcgctgatggtactgccgagtaccgccgcactggcgattct

SEQ ID NO: 318865 - DNA, 3753 bp, Artificial Sequence
  derived and/or modified sequence
atgagcactgagagggattcagagacgacattcgatgaagactcgcaacccaatgacgaggttgtgccgtactccgacgacgaaaccgaggacgagctggatgaccagggctctgctgtggaacccgaacagaatcgcgtaaaccgcgaggccgaggagaatagagaaccttttagaaaagagtgtacctggcaggtgaaggctaatgaccgaaaataccacgaacaaccccatttcatgaacacaaaatttctttgcattaaggaatccaaatacgccaataatgccatcaagacctacaaatataatgcattcaccttcataccgatgaacctatttgaacagtttaaaagggcagccaatctgtattttctggctcttttgattctccaagctgttcctcaaatttcaactttggcttggtataccacgctggtgcctctcctggtcgtgctgggggtgaccgccatcaaagacttggtggacgacgtggctcgacacaagatggataaggaaatcaacaacaggacatgtgaggttatcaaagacggccgatttaaagtggcgaaatggaaggagatccaagtgggggacgtgatacggctcaagaagaatgacttcgtgcccgccgatatactgctcctaagctcctctgaacccaacagcttatgctatgtcgaaaccgcggaattggacggcgagacaaatttgaagttcaaaatgtcccttgaaattaccgaccagtatctgcagagagaagacaccctggccacttttgacggcttcatcgaatgcgaagagccgaacaaccgccttgataagtttactggcactttgttctggcgaaataccagcttcccactggacgcggataaaatacttctaaggggatgcgtgatacgaaacacagatttctgtcacggactagtaattttcgccggggctgataccaagatcatgaagaactccggaaagacacgatttaaacggactaaaattgactatcttatgaactacatggtgtacacaatctttgtcgtgttaatcctcttgtcagcaggcctggccatcggtcacgcgtattgggaggcacaggttggtaactcatcttggtatctgtacgatggtgaggacgacactccctcctataggggattcttgatcttctgggggtatatcattgttttaaacaccatggtgccaatcagtctatacgtgagcgtggaagtgatccgactgggccagagccatttcatcaactgggatttgcagatgtactatgcggaaaaagacacaccagcaaaggctcgaaccactaccttgaatgagcagcttggacaaatacattacatcttttcagacaagaccggtaccctgacccaaaacataatgacatttaagaagtgttgtattaatggccagatctacggagaccatcgggacgcttcacagcacaatcataataagattgagcaagtggattttagttggaatacatatgccgacgggaagttggcattctacgaccactatctgatcgaacaaatccagagcgggaaggaacccgaggttcgacagtttttttttttactagccgtgtgccacaccgtgatggtcgacaggactgatggacaactgaattatcaggctgcatctccagatgagggtgctctagtcaacgcagctcggaactttggcttcgcattcttggctagaacccaaaacactataactattagcgagcttggcactgaaaggacatataatgtactggccattctggattttaattctgatcggaaaaggatgtccatcattgtgagaacacccgaaggtaacataaagctctattgcaagggagctgatacagtgatttacgagagattgcatagaatgaacccgacaaagcaggaaacccaggatgccttggacatcttcgccaatgagactctgagaactctttgtctctgctataaggagatagaggaaaaggaatttaccgagtggaacaagaagtttatggccgcgtccgtagcctctaccaatagggacgaagccctagacaaggtgtatgaagaaattgagaaggatctgattctactgggcgcgacagccattgaggataagttgcaagatggtgtgcccgaaacaatttccaaactcgctaaggctgatatcaaaatctgggtcctcaccggcgacaaaaaggagacagccgagaatattggctttgcttgtgagctgctgactgaagataccaccatttgctatggcgaggacattaattcacttttgcacgcaaggatggagaatcagcgaaacagggggggagtctatgcgaaattcgctcccccggttcaggaaagtttcttccccccaggaggaaatcgtgcactgattataacaggttcttggctcaatgagatcttgctggaaaagaaaaccaagcgaaataaaatcttaaaactcaagttcccgagaaccgaagaggagcgtaggatgcgaacccagagcaaaaggcgactagaagccaagaaggagcagcgacaaaagaactttgtcgatctggcttgtgagtgtagcgccgttatttgttgccgagtgactccgaaacaaaaagccatggtggtcgatctcgtcaagcgttacaagaaggccattaccttagcaattggggacggcgcgaacgatgtaaatatgatcaagaccgcccatataggcgtaggcatcagtgggcaggaggggatgcaagccgtgatgagctcggattactccttcgcacaatttagatacctccagcgactgctgttagtacacggcagatggagttacatcagaatgtgtaaatttttgcgatactttttttacaaaaatttcgcattcacgttagtacacttctggtactctttctttaacggatacagcgcacagaccgcctacgaagattggttcatcactctgtacaatgttctgtatacatcactccctgtgctgttaatgggcttacttgatcaggatgtgtccgataaactgagccttcggttccctggtttgtatatcgtcggccagagggatttattgtttaactacaagcgattcttcgtttccctcttgcatggagtccttacaagcatgatcctgttctttattcctttgggcgcctacctgcaaacagtcgggcaggatggagaggcgccaagtgactaccagtcttttgcagtgaccattgcctctgctctcgtgatcacagtgaacttccagattggtctagacactagctactggaccttcgtaaacgctttcagcattttcggttcaatagccttgtactttggaatcatgttcgactttcatagtgctggtatccacgtcctgttcccgtctgcgtttcagtttaccggtactgcatctaacgcacttaggcagccatatatatggttaactatcatcctggccgtggctgtttgcctcctgcccgttgtcgcaatccgattcctctctatgactatttggccatctgaaagtgataagatccagaaacatcgaaagagactcaaggcggaagaacagtggcagcgaagacagcaggtatttcgtagaggtgtgagcactcgacgatcagcttatgctttcagccatcagcgggggtacgcagatctaattagttcaggaaggtccatcaggaaaaaacgatcccctctggatgcaatcgtggccgatggcactgctgagtaccgaaggaccggcgactcc

SEQ ID NO: 318866 - DNA, 3753 bp, Artificial Sequence
  derived and/or modified sequence
atgagcactgagagggattccgaaactacctttgatgaagattcgcagcctaatgacgaagttgtcccatacagcgatgatgaaacggaggatgagcttgacgatcaaggaagcgcagtggaaccagagcagaacagagtgaatagagaagcagaagaaaatcgcgaacctttcagaaaagaatgtacttggcaagtcaaggctaatgaccgcaagtaccatgaacaacctcactttatgaacactaagttcctgtgtattaaggagtcgaagtacgcaaacaatgcaattaagacgtacaagtacaacgcttttaccttcattccaatgaatctttttgagcagtttaagcgggccgcaaatttgtactttcttgcgctgcttatcctgcaagcagtccctcaaatatcaactcttgcctggtacaccaccctggtcccactgcttgttgttctcggcgttaccgccatcaaagacctggtcgacgatgtggcaaggcataagatggataaagagatcaataaccgtacctgtgaagtgattaaagatggtcggttcaaggtggcaaagtggaaggagattcaggtgggagacgtcatccgtctgaagaagaacgactttgtccctgccgatattctgttgctgtcctcatcggagccaaactcgttgtgttacgtggaaactgcagagctggatggcgagactaacctgaagtttaagatgtcgctggaaattactgaccaatacctccaacgtgaagataccctcgcaacgtttgacggatttatcgaatgcgaggaacctaacaaccggcttgataagtttactggtactctgttctggcggaacacctcatttccactggatgccgacaagatcctgcttaggggctgtgtgattcgtaatactgatttttgtcacggccttgtgatttttgcaggtgcagacactaagattatgaaaaacagtggaaaaactcgattcaaaagaacgaagattgactatctgatgaactacatggtgtacactatcttcgtggtgctgatcttgctgtcggcaggtctggcgatcggacatgcctactgggaagcccaggtggggaactcatcctggtacctctacgacggagaggatgacactcctagctatagagggtttctcattttctggggttacattatcgtccttaataccatggtgccgatttcgctgtacgtctccgtggaagtgatccggctggggcaatcgcatttcatcaactgggatctgcaaatgtactacgcagaaaaggataccccagccaaagcacgaactaccacgctgaatgaacaactgggacagattcactacatattctcggataagacgggtactcttactcagaacatcatgactttcaaaaagtgttgtattaacggtcaaatctacggagatcatagggatgcatcgcagcacaatcataacaagattgaacaggtcgatttctcgtggaacacgtacgccgatggtaagctcgcgttctatgatcactaccttatcgaacagattcagagcgggaaggagccggaagtgcggcagtttttctttctcttggcagtttgccatactgtcatggtcgataggaccgacggacagctcaattaccaagcagcatccccagacgaaggggcactggtgaatgcagcacgaaatttcggttttgcgtttttggctcggactcagaacaccataactatctcggaactcggaactgaaagaacctacaatgtgctggcaattctcgatttcaatagcgatcggaagagaatgtcaattatcgtgcgcactcctgagggaaatatcaagctgtactgcaagggtgcagatactgtgatctacgagcgccttcatagaatgaacccgaccaagcaagagactcaagatgcattggacatctttgccaacgaaactctcaggactctgtgcctttgttacaaggaaattgaagaaaaggaattcaccgagtggaataagaagttcatggcagcctcggttgcgtccactaacagagatgaggcgctggataaagtgtacgaagaaattgaaaaggacctgattctgctgggagcaacggccatcgaagataagctccaggatggagtcccagaaaccattagcaaacttgctaaagcagacattaagatttgggtccttaccggtgataagaaagagactgctgaaaacattgggttcgcctgcgagcttctgacggaggataccaccatttgctacggagaggatatcaactcacttctgcacgctcgcatggaaaatcaaaggaaccgaggcggggtgtacgcaaagttcgcacctccagtgcaagaatcgttttttcctcctggtggaaatcgagccttgattatcactggctcctggctgaacgagattctgctggagaaaaagaccaagcggaacaagattctgaagctcaaatttccccgcaccgaagaagagaggagaatgcggactcagtccaagagacgacttgaagccaagaaggaacaacgacagaagaactttgtggatctggcatgtgaatgtagcgccgtgatatgctgcagagtcactcctaagcaaaaggcaatggtcgtcgaccttgtcaaaaggtacaagaaagcaatcactcttgcgatcggtgacggggcaaacgatgtgaatatgattaagaccgcccatatcggagtgggaatctccggacaggaggggatgcaggcagtcatgtcctcagattactcgttcgcgcaatttcgttatcttcagcgccttctgcttgtgcacggaagatggtcatacatcaggatgtgtaagtttctgcgctactttttctataagaactttgcatttacgctggtccacttttggtactccttcttcaatggttactccgcacaaactgcatatgaggattggtttatcactctttacaacgtcctgtatacctcccttccagtcctgctcatgggcctccttgatcaggacgtcagtgacaagctgagtcttaggttcccaggactgtacatcgtgggacaacgggacctgctgtttaactacaaaaggttttttgtgagcctgctgcacggcgtccttaccagcatgattctgttcttcattccgctcggtgcctaccttcagaccgtgggccaggacggggaagccccatcggactaccaatcctttgcagtcaccattgcgtcagccttggtgattactgtgaacttccaaattggtcttgacacttcgtactggacgttcgtgaatgcattttccatatttggatcgatcgcgctctactttgggattatgtttgacttccactccgctggcattcatgtgctctttccatctgcattccaatttaccgggactgcaagcaacgcactgaggcaaccatacatctggctgactataatcttggcggtcgcggtgtgcctcctgcccgtggtggcaataaggtttctgagcatgactatttggccctcagagtccgataagatccaaaaacatcgtaaacggctcaaagcagaagaacagtggcagcgcagacagcaagtgtttcgacggggcgtttcaacgagacgatccgcatacgcattttcacatcaacggggctacgcagacctgatcagctcgggaaggagcatacggaaaaagaggtcgccccttgatgccatcgtggccgatggaactgcagagtaccggcgtaccggggactcg

SEQ ID NO: 318867 - DNA, 3753 bp, Artificial Sequence
  derived and/or modified sequence
atgagcactgagagagactccgaaactacatttgacgaggatagtcagcccaatgacgaagtagtgccttacagtgacgacgagaccgaggatgagctggatgaccagggatctgcggtggagcccgaacaaaatcgagtaaatagagaggctgaggagaatagagagccatttcggaaagagtgcacttggcaggtcaaggctaacgacagaaagtatcatgaacagcctcattttatgaacactaagttcctgtgcataaaggagtcaaaatatgcaaataatgcaattaagacgtacaagtacaacgcgttcacatttattcccatgaacctattcgagcagttcaaacgcgccgccaacctttatttcctggctctcctgattctgcaggctgttcctcagatctcaacgttggcgtggtacactacgttggtcccactgctggttgtactcggcgttacggccataaaggatctggtggatgacgtagcaagacacaaaatggacaaggagataaacaaccgtacttgtgaggtgattaaagatggtagatttaaggttgccaagtggaaggaaatccaagtgggtgatgttattaggcttaagaagaacgattttgtccccgctgatatcctgctcctaagctcatccgagccaaactccctttgctacgtggagaccgccgagctggacggtgagacgaacttgaagttcaaaatgtctttggaaatcacagaccagtacttgcagcgagaagacaccttggcaaccttcgacggattcattgagtgcgaggagcccaacaatcgcttagacaaattcacaggaacgctgttctggcgcaatacctcttttcccctggatgcagacaaaattctgttgcgaggctgcgtgatccgaaacaccgatttctgtcacggcctggtcatatttgctggcgccgacacaaagatcatgaaaaatagcggcaagactaggtttaagcggactaaaattgactatctgatgaactatatggtatacaccatcttcgtcgtattgatactattatcagccggcctggccatcggtcatgcctattgggaagcacaggtcggcaattcctcctggtacctgtacgacggggaggatgataccccaagttatcggggtttcctgatcttctggggttacatcatagtccttaacaccatggtgcccatctccttgtacgtcagcgtagaggttatccgcttgggccagtctcatttcatcaactgggacctgcaaatgtattacgccgagaaagataccccagctaaggcacgaacaactaccttaaacgagcagctaggccaaatacactacattttcagcgataagactggcactctgacccaaaatattatgactttcaagaagtgttgtatcaatggacagatttacggagaccaccgtgatgcatcccagcataaccacaataagatcgaacaggtagatttctcttggaacacatatgccgatggtaagctggctttttatgaccactacctgatcgaacagatccagtctggcaaggaaccagaggtgcggcagtttttcttcctgctggccgtatgtcatactgtaatggtggatcggactgatgggcagttgaattaccaagcagcatccccggatgagggtgccctggtgaacgccgcgagaaactttggcttcgcctttctcgctcgtacccagaacacgatcaccatctctgagctgggcacagaacgtacttacaatgtgctcgctattctcgacttcaatagtgatcggaaaaggatgagcatcatcgtacgaacacccgaagggaacatcaagctctactgtaagggggcagacaccgtgatttatgagcgcctccacaggatgaatcccactaaacaagagacccaggatgctctggacatcttcgcgaatgaaactctgcggaccctgtgcctttgttacaaggagatagaagaaaaagagtttacagaatggaataaaaagttcatggcggcctccgtagcttctacaaaccgagacgaagcattggataaggtgtatgaggaaatcgaaaaggatctgatcctgctcggcgccacagctattgaagataagttgcaagacggtgtgcccgagacaatcagcaaactagcgaaggccgacattaaaatctgggtgctcacaggagacaaaaaagagactgccgagaatattggcttcgcgtgtgagttactaacggaggacaccactatatgttatggggaagacatcaactctctgctgcacgcacgcatggagaatcagagaaatagaggcggtgtgtatgcaaaattcgccccccctgtgcaggaaagctttttcccacctgggggcaatcgtgcactaatcattacaggaagctggctgaatgagattcttcttgaaaagaagacaaagcgcaacaagattctgaagctcaaattccccagaacagaggaagaacgaagaatgaggactcagtcaaagcgacggctggaggctaagaaggaacagcggcagaaaaacttcgtagacctggcctgtgaatgcagtgctgtgatctgctgtagggtgacacctaagcaaaaggctatggtagtggatctagttaaacggtacaaaaaagctatcacccttgcgattggtgatggcgccaatgacgtgaacatgatcaagacagcccacatcggggtgggaatctccggccaagaaggcatgcaggcagtgatgtcttctgactactcgttcgcccagttccgctacctgcagagattactgctggtgcacggtagatggagctacattcgcatgtgcaagtttcttaggtacttcttctacaaaaacttcgcattcaccctggtgcatttctggtacagcttctttaatggatattccgctcagacggcatacgaagattggttcattacgctgtacaacgtgttgtacactagccttcctgtactgttaatgggtctcctggatcaggacgtgtctgacaaactgtccttgaggttccccggtctatacatcgttggacagagagatttactattcaactataagaggttttttgtgtcgttacttcatggtgtgttgacttccatgatattgtttttcattcctcttggggcctacctgcaaaccgttggccaagacggcgaggcacccagtgactaccaaagcttcgctgttacaatcgcgtcggccctggttattaccgttaattttcagatcggcctagatacttcatactggaccttcgtcaatgccttctctattttcggctctattgccctctacttcggcataatgttcgatttccacagcgctggaatccacgtactgtttccttccgcgtttcaattcaccggcacggcctcaaatgcccttcggcaaccatacatttggctgactattatcctagctgtagctgtctgtcttctgcctgtggtagcgattcgttttctctccatgactatttggccctccgaatcagacaagatccagaagcataggaaaagacttaaagcagaggagcagtggcagcgaagacagcaagtgttcagaagaggagtctccacaaggagaagtgcctacgccttcagtcatcagcgtgggtacgcggacctaatatccagcggccgttccatacggaaaaagaggtcacccctagatgcgatcgtggcggatggcactgctgagtatcggaggactggcgattcc

SEQ ID NO: 318868 - DNA, 3753 bp, Artificial Sequence
  derived and/or modified sequence
atgagcactgagcgcgacagcgagaccacgttcgacgaggattcccagccgaatgatgaagtcgtgccatattccgacgatgaaacggaagacgagctggatgaccaggggagcgccgtggaaccagaacaaaaccgcgtcaatcgcgaggcagaggagaaccgggagccctttcgcaaagagtgtacatggcaggtcaaagctaatgatcggaaataccatgaacagccgcactttatgaatactaaattcctgtgtatcaaggagagcaagtacgcgaataacgcaatcaagacctataagtataatgccttcaccttcatcccaatgaacctgtttgaacagttcaagcgcgctgccaacctgtacttcctggctctgctcattctgcaagcagttccgcagatatccaccctggcgtggtacaccaccctggtgccactcttggttgtactgggcgtgaccgccatcaaggatctggtcgatgatgttgcaagacacaagatggataaagaaattaataataggacgtgtgaggtgatcaaggatggacgattcaaggtggcaaagtggaaggaaatccaagtgggcgatgtgatccgcctgaagaagaacgactttgtgccggccgacatcctgctgctgagctcatccgaaccaaacagtttgtgctacgtagagacagctgagttagatggcgagaccaaccttaagtttaagatgagcctggaaatcaccgatcaatacctgcagcgcgaggacactctggcaacttttgatggcttcatcgagtgtgaggaaccaaataatcgtttggacaaatttaccggtaccctgttctggcgcaatacgtccttcccgctggacgcggataagatcctgctgcgcggctgtgtcatccgtaataccgatttctgccacggtctggtcatcttcgcgggcgctgatacgaagatcatgaagaatagtgggaagactcgatttaaacgcacgaagatcgactacctgatgaattacatggtctacactatctttgtggtgctgattttgttgtctgccggcctggcgattggtcacgcatactgggaagcacaggttggcaacagctcgtggtacctgtatgatggcgaggacgacactccgtcatataggggtttcctgatcttttgggggtacataattgttctgaacacaatggtcccgatctcactgtacgtaagcgttgaggttatcaggctgggccagagccactttatcaactgggatctgcagatgtactatgccgagaaggacaccccagcaaaggcccggactacaaccctcaatgaacagctgggccagattcactacattttttccgacaaaaccggtaccctcacccaaaacattatgacattcaaaaaatgctgcattaatggtcagatctatggtgaccaccgtgacgcctctcagcataatcataataagattgaacaggtagacttctcttggaacacctacgcggatggtaagctcgccttttatgatcactacctgatcgagcagatccaaagcggaaaggaacctgaagtccgacagttcttttttttgctggctgtttgccatacggtgatggtggaccgcacggacggtcagcttaactaccaagcagcgagcccggatgagggtgctctggtcaatgctgcgaggaattttgggtttgccttcctggcccgtactcagaacacgatcaccattagcgaactgggtaccgaacgtacctacaacgtcctggcgatcctcgacttcaattcagatcgtaaacgtatgtctattattgtccgcacccctgagggcaacatcaaactgtattgtaagggtgcagacacggtcatctacgagcgcctgcaccgcatgaaccctaccaagcaagaaacgcaggacgctctggacattttcgcaaacgaaactctgaggaccctgtgcctatgttataaagaaattgaggagaaggaattcaccgaatggaacaaaaaatttatggctgctagcgtggcaagcaccaatcgggatgaggcgcttgacaaggtttatgaagaaatcgaaaaggacctgatcctgctgggtgcaaccgccatagaggataagctgcaggacggtgtgccggagacgattagtaaactggccaaagcggatattaaaatctgggttctcaccggggataaaaaggaaaccgctgagaacatcggcttcgcctgcgagttgctgacggaggacaccactatttgctatggtgaagacatcaatagcctgctgcatgcgaggatggagaatcagcggaatcgcggtggcgtgtacgccaagttcgctccaccagtccaggagtccttctttccaccgggggggaaccgagcgttgattatcaccggcagctggctgaacgagatcctcctggaaaaaaaaacgaagcgtaacaaaatcctgaaactgaagtttccacgcaccgaggaggaaaggcgcatgcgcacacagtccaagcgtaggttggaggctaagaaagaacaacgccagaagaactttgttgatctggcttgtgagtgcagcgcagttatttgctgtagggtcacgcctaagcaaaaggccatggttgtggacctggtaaagcgctataaaaaagcaattaccctggccatcggtgacggcgcaaacgatgtcaacatgattaaaacggcacatatcggcgttggcatttcagggcaggaaggaatgcaagcggtcatgtccagcgattactcttttgcacaatttcgctacttacagaggctactgcttgtgcatgggcgctggagctacatccgcatgtgtaagttcctgcggtattttttttacaaaaactttgctttcactctggtccacttttggtactcattctttaatggttatagcgcgcagacagcatacgaggattggttcattaccctctataacgtcctgtacacatctctgccagtgctgctgatgggcctgctggatcaggacgttagcgacaaactgtcgcttcgcttcccgggactgtatatcgtcggtcaaagagatctgctgttcaactataagcgcttttttgtgtccctattgcacggtgtgctgactagcatgatcctgtttttcatcccgctcggggcatacctgcagacagtggggcaggatggtgaggccccgtctgactaccagtcgtttgcagtcaccattgctagtgcccttgtgatcacggttaatttccaaatcggtttggacaccagctactggacatttgttaacgctttcagcatctttggaagcatcgccctctacttcggcattatgtttgattttcacagtgcgggcatccatgttctgttcccgagtgcctttcaatttactgggaccgcgtctaacgcgttacgccaaccatacatttggcttacaattatcctggcggttgctgtctgcttgctgccggtggtggctatacggttcttgtccatgactatatggcctagcgagagcgacaaaatccagaaacataggaaacggctgaaagcagaggaacagtggcagcgccgccagcaggtgttcagacgcggtgttagtacgcgccggagcgcatacgccttttctcaccagcgcggttatgcggatctgatcagcagcgggcgcagcattcgcaagaaacgatccccactggatgcgatcgtggccgacggaacggccgagtacagaagaacgggagatagc

SEQ ID NO: 318869 - DNA, 3753 bp, Artificial Sequence
  derived and/or modified sequence
atgagcaccgagcgggacagcgagaccacattcgacgaggacagccagcctaatgacgaggtggtcccatactccgacgatgaaacagaagacgagctggacgaccagggctccgccgtggagccagagcaaaatcgtgttaaccgcgaagccgaagaaaatagagaaccgtttaggaaggagtgcacatggcaggtaaaggccaacgatcgaaagtaccacgagcagccacatttcatgaacaccaagttcctgtgcatcaaggagtccaaatatgccaataacgcaatcaagacctataaatataatgctttcacatttatcccgatgaacctctttgagcagtttaagcgagcggccaatttgtactttctggctctgctgattcttcaggcagtaccgcagatttcaaccttggcctggtataccacactcgttccattgctggtggtactaggcgtgacagctattaaagacttggtcgatgacgtggcgaggcataaaatggacaaggaaatcaacaaccgtacctgcgaggtgattaaagacggtcggtttaaggtggccaaatggaaggaaatccaggtgggagatgttatccgcctgaagaaaaatgattttgtccctgccgatatactgcttctgtcttcaagcgagcccaacagcttgtgctacgttgaaaccgctgagcttgatggagaaactaacctgaagttcaagatgagtctggagattaccgaccagtacctccagcgcgaggatactctggcaaccttcgatggctttatagagtgtgaggagcccaataaccgcctggataagttcacgggaactctgttctggcgaaatactagctttccactggacgctgataagatactgctcagaggctgcgtgatcaggaacactgatttctgtcatgggctggttatatttgctggtgctgacaccaagatcatgaagaattcagggaagacgcgatttaaacgcaccaaaattgactatctaatgaactacatggtctatacgatttttgtagttctgatactcctttcggccgggctcgcaataggacacgcatattgggaagcccaagttgggaattctagctggtatctctatgatggcgaggacgacaccccctcttaccggggatttttaatcttttggggttatattatagtcttgaatacaatggttcctatctctctgtatgtgtcggtggaggttattaggcttgggcagagtcacttcatcaactgggatctccaaatgtattacgctgaaaaagatactcccgcaaaagccagaaccaccacgctgaatgagcagctgggtcagatacactatatctttagtgataagaccggtacattaacccagaatatcatgacatttaagaagtgctgtatcaatggacagatctatggtgaccatagagacgcgtcgcaacacaaccataacaaaattgagcaagttgactttagctggaatacctatgctgatggaaagttggcgttttatgatcactacttaatagaacagattcagtctgggaaggagccggaagttcgtcagttctttttcctgttggctgtatgtcatacagtgatggtggatagaacagacgggcagctcaattaccaagcagcttcacccgatgagggtgcgctcgtgaatgccgcccggaactttggtttcgccttcctggcccgcacacagaacacaattactattagtgaactggggacagagcgaacatataatgtgttggccattctcgactttaatagcgaccgaaaaaggatgagcatcatcgtgaggactccggaggggaatatcaaactgtactgcaaaggagccgataccgtgatatatgaacgccttcataggatgaatccgactaagcaggagactcaagatgctctggatatatttgcaaacgaaaccctacgaaccttatgcttgtgttataaggagattgaggaaaaagagttcaccgagtggaacaagaagttcatggctgcttctgttgcatcaactaatagagatgaagccctggacaaagtatacgaggagatcgagaaagatctgattctgctgggggccacagcaatagaggacaagctacaggacggcgtgcccgagaccatctccaagcttgctaaggctgatatcaaaatctgggtgcttacaggggacaagaaagagacagcggagaatatcgggtttgcctgcgagctgctgacagaggacactactatttgctacggggaagatatcaacagtttgttgcatgctcggatggaaaatcagaggaatcggggcggggtatatgcaaagttcgcacctccagtacaagagagcttcttccccccgggaggcaaccgagctctgatcatcaccgggtcttggttgaacgaaattctcctagagaaaaaaacaaagcggaataagatactaaaacttaagttccccagaaccgaagaagagcgcaggatgcgaactcagtcgaagaggaggttagaggcaaagaaggaacagcgccaaaagaattttgtcgatctggcctgtgaatgttctgccgtaatctgctgtagagtaaccccgaagcaaaaagcgatggtcgtggacctggtaaaacgctataagaaagccatcaccctggcaatcggcgacggagctaacgatgtgaacatgattaaaacagcccacatcggcgtcggtatttccggccaagaaggaatgcaggccgtgatgtcttcggattactcatttgcgcaattccgttaccttcagaggcttttgcttgtgcatggacggtggtcctatatccggatgtgcaagttcctgcgctactttttctacaagaacttcgcatttacactcgtgcacttttggtactctttttttaatgggtacagcgcgcagactgcgtacgaggactggtttataacactgtacaatgttctctacaccagcttgccagtgttgctcatggggctgttggaccaggatgtctccgacaaactgtctctccgctttccaggcctctacattgttggccagcgcgacctgttgtttaactacaaacgctttttcgtgtccttgttacacggggtactgacctccatgattttgtttttcatcccactcggagcatacctccagacagtcgggcaagacggcgaggctcccagcgattaccagagcttcgcagtgaccatcgcctccgctctggtgattacggtcaactttcaaattgggctcgacactagctactggacctttgtcaacgccttcagtatctttggcagcatcgcactctactttggcattatgttcgactttcactccgccgggattcacgttctgtttccctcggcattccagttcaccggcacagctagcaacgctcttagacaaccctacatctggctcaccatcatcctcgcagtagccgtttgtctgctacctgtagttgctattcggtttctgagtatgacaatttggccttcagagtccgacaaaattcagaaacatcgcaagcggctaaaagccgaggaacagtggcaacggcggcagcaggtgtttcggaggggagtcagcactcggcgctcagcttatgcctttagtcaccagagaggatatgccgaccttataagctccggcagaagtattagaaagaaacggagtcccttggatgctatcgttgccgacgggaccgccgaatacaggagaaccggggattcc

SEQ ID NO: 318870 - DNA, 3753 bp, Artificial Sequence
  derived and/or modified sequence
atgagcacagaacgcgatagtgagacaacctttgatgaggatagccagcccaacgatgaggtggtcccttactcggatgatgagacagaggacgaactggacgaccagggaagtgccgttgagccagagcagaaccgcgttaatagagaggcggaagagaatcgcgagcctttccggaaggaatgtacttggcaggtgaaggccaatgacaggaaataccacgagcagcctcattttatgaatacaaagttcctgtgcattaaagaaagcaagtacgccaacaacgctattaagacctacaaatacaacgctttcacctttataccaatgaacctgttcgaacagtttaaaagggccgccaatctgtactttttagccttgctgattttacaagccgtacctcagatctcaaccttggcttggtacaccaccctggtccctcttctggtggtgcttggggtgactgcaatcaaagatctcgtcgatgatgtggcaaggcacaagatggacaaagaaatcaacaaccgcacttgcgaggttatcaaagatggtagatttaaggtcgcaaagtggaaggagattcaggttggggatgtaattagactgaagaagaacgatttcgtgcccgccgacattctgttgctgtccagcagtgagccgaactccctttgttacgtcgaaactgctgagttggatggagagaccaatctcaagttcaaaatgagcctcgagattaccgatcagtacctgcagagggaggatactttggctaccttcgatgggttcatagaatgcgaagagccaaataacaggttggataagtttactggcacactgttctggaggaacacttcgttcccacttgacgcggataaaatacttcttcgtggatgtgtgataaggaacacagatttttgccacggactggtaatatttgcaggagcggacacgaaaatcatgaaaaacagcggcaagactagattcaaaaggaccaagatcgattacttgatgaattatatggtttataccattttcgtggtgctaatactgcttagtgcaggtctggccatcgggcacgcatactgggaagctcaggtcggtaacagcagttggtacctgtacgatggggaggatgacacaccatcttaccgcggattcctcatcttctgggggtacatcattgtactgaacaccatggttccaattagcctgtatgtgtccgtggaggttatccggctcgggcagtcacatttcattaactgggacctgcagatgtactatgccgagaaagatacccctgccaaagcacgcaccaccactctcaacgagcagctggggcaaatccattatatcttttccgataaaactggcaccctcacacaaaacattatgacctttaaaaagtgttgcatcaacggccagatctatggagaccatagagatgcaagtcagcataatcacaataaaattgaacaggttgactttagttggaatacatatgctgatggtaagttggcattttatgaccattatctgatagaacagatccagtccggcaaagaacctgaagtccgccagtttttctttctgctggcagtgtgtcataccgtgatggtcgaccgcactgatggacaactgaactatcaggctgctagccctgacgaaggtgcacttgtgaatgcggcaaggaatttcggctttgctttcctggcaagaacacagaacactattactatatctgagctgggcaccgaacggacgtacaatgtgctggccattcttgacttcaacagcgataggaaaaggatgtctatcattgttaggactccagagggaaacatcaagctgtactgcaagggcgccgacactgtgatttacgagcgacttcaccgtatgaaccctaccaagcaggaaactcaggatgccttggatatctttgcaaacgagacgctgagaacactgtgcctttgctacaaagaaatcgaggaaaaagagttcaccgaatggaacaagaaattcatggctgcctctgtcgcgagcactaaccgagatgaagcgctggataaagtctacgaagaaatagagaaggatttgatcttactgggtgccacagcaatagaagacaagttgcaggatggagtccccgaaactattagtaagctcgctaaagcggatattaagatctgggtccttaccggagacaagaaagagaccgctgagaacatcgggtttgcttgcgagctccttaccgaggatactactatttgctatggcgaagatattaattctctgctgcatgctagaatggaaaatcaacggaacagaggtggagtttatgctaaattcgcaccccctgtacaggagtcatttttccccccaggaggcaatagagctttaataataaccggatcatggctgaatgagatcctgcttgaaaaaaaaaccaagcggaacaaaatcttaaaactgaagtttccccgaaccgaggaggaaagaaggatgaggactcagtccaaaaggaggttggaagcaaagaaagaacaacggcagaaaaattttgtggacctggcctgcgaatgtagtgccgtgatttgttgtagagtcacacctaagcagaaagctatggtggttgacctcgtgaagaggtataagaaggcaatcacacttgccataggagatggagctaacgatgtgaatatgattaaaaccgcacacattggcgtcggcattagtggccaggagggaatgcaggccgtcatgtccagcgattattcattcgcacagttcagatatttacagaggctccttctcgtccatggcagatggagctacatccgtatgtgcaagttcctcagatatttcttctacaaaaatttcgccttcaccctcgtgcacttctggtactcttttttcaatgggtatagtgcccaaaccgcctatgaggattggtttatcacactgtacaatgtgctgtacacaagccttcccgtgttgttgatgggccttctggatcaggatgtgagtgacaagctgagcctacggtttccaggcctctatatcgtcggacagagagatctcctgtttaactacaagaggttctttgtctcccttctccacggtgtgttgaccagcatgatattgttctttattccactgggcgcatatttgcaaacagtaggacaggacggcgaggctccttccgactaccagtcttttgcggtgactatagccagcgccctcgtaatcacagtcaacttccagataggccttgatacctcttactggacctttgtcaacgctttcagcatcttcggaagcattgcactgtattttggaatcatgtttgatttccacagcgccgggatccatgttctgtttccctcggcgttccagtttacaggcactgccagcaacgccctgcgccagccgtatatttggcttactattatcctggccgtggccgtgtgcctcttgcctgttgttgcaattcgtttcctcagcatgaccatctggccctccgaatccgataagatccaaaagcaccgcaaacgccttaaggctgaagagcagtggcagcgcaggcaacaggtttttcgcagaggcgtctctacaaggaggagtgcctatgccttttctcaccagcggggctacgcggaccttataagcagcggaaggtctatcagaaaaaaaaggagcccgctggacgcaatcgtagcagatggtaccgctgagtataggcgcaccggggatagc

SEQ ID NO: 318871 - DNA, 3753 bp, Artificial Sequence
  derived and/or modified sequence
atgtctaccgagagggatagcgagacaacatttgatgaggacagccaacctaacgacgaagtagtgccatatagtgatgatgaaacggaagacgagttggacgatcagggcagtgcggtcgaacctgaacagaatagggtgaatagagaagccgaggagaatcgggaacccttccgcaaagaatgcacctggcaggtcaaggcaaacgatcggaagtaccatgaacagccgcatttcatgaatacgaaatttctatgcataaaggagtccaaatacgcaaacaacgccattaagacttataaatataacgcattcacctttatccccatgaacttattcgaacaattcaaacgagccgcgaatctttatttcctcgcactgctaattttacaagctgttccacaaatttcgaccctggcttggtacactacgctcgtccctctgttagttgtgctgggggtgacggcgattaaggatctcgttgatgacgtggctaggcacaaaatggataaggaaataaacaaccggacttgcgaggtcattaaggatggcagattcaaggttgcaaagtggaaggagatccaagtgggggacgtcattcgccttaagaaaaatgatttcgtaccagctgacattctgttgctctcttcctcggagcctaatagtctttgttacgtggaaactgctgagctggacggcgaaactaatcttaagttcaagatgtcacttgagatcaccgaccagtatctgcaacgggaagacaccctggctacattcgatggttttatcgaatgcgaagagccaaacaacagacttgataagtttactgggactctgttttggaggaacacatcattcccgttagacgccgataagattctgttaaggggatgtgttatacggaatactgatttttgtcacggccttgtcatattcgctggcgcagacaccaaaatcatgaaaaattcggggaaaacccgattcaagcgaacaaaaattgactatttgatgaactacatggtgtacactatcttcgtggtgttgatcctcctgagcgcgggcttagcaattgggcatgcttattgggaggctcaggtcgggaattcttcttggtatttgtacgatggtgaagatgatacaccaagttaccggggcttcctgattttctggggctacattatagtattaaataccatggtgcctatatccctgtacgtgtcagtggaggtcatccgcctcggccagtcacactttatcaactgggatctgcagatgtactacgctgagaaagacacaccagccaaggctcgcacgaccaccttgaatgagcagctgggccaaatccattacatattctccgacaagacaggcacgctcacccagaatattatgacatttaagaagtgttgcatcaacggacaaatatatggtgatcaccgggacgcctcccaacataatcataacaaaatagaacaggtggatttttcatggaatacttacgcagatgggaaattagcgttctacgaccactacctcatcgagcagatacaaagcggaaaggagcctgaggtccgccagttcttcttcctcttagcggtttgtcacacagtgatggtggataggaccgacgggcaacttaactatcaggctgctagcccagatgaaggcgctctggtcaatgccgcccgaaacttcggcttcgcctttctcgcaagaacccagaatacaattaccatatccgagctgggaacagagagaacttacaacgtgctcgcaatcctggacttcaacagcgacagaaagcggatgtccatcatcgtgcggacgcccgagggaaatatcaagctgtattgcaaaggagccgatacggtcatctacgagcggctacaccgtatgaacccaacaaagcaggagacacaggacgcgctcgatatcttcgctaacgagacgctgcgcactctgtgcttgtgttacaaagagattgaagaaaaggaattcactgagtggaataaaaaattcatggccgcttctgtggcctcaactaatagagacgaggccctggataaggtgtatgaggaaatcgagaaggatctgatcttactcggagctaccgcgatagaagacaagctgcaagacggtgtccccgaaaccatttctaagctggctaaagcagacataaaaatttgggttttgacaggcgataaaaaggagacagcggaaaacattggttttgcttgtgagctgctgaccgaggacaccaccatatgttacggagaggacatcaattcactcttgcacgcacggatggagaatcaacgcaaccgcggaggggtctacgccaaatttgcccctccagtgcaggagagttttttccccccaggtgggaatcgagctctgatcattacaggcagttggctgaatgagatcctgttagagaaaaaaaccaagcgtaataaaatcctgaagctgaagttcccaagaacagaggaggagcgtcggatgcggacacagtccaaaaggagactagaggcaaaaaaggagcagcggcagaaaaattttgtggatctcgcatgcgagtgttccgcggtcatttgctgtagagtgacaccaaagcaaaaggctatggtggttgatttggtcaagcgttacaagaaagccatcacgctggcaattggggacggcgcaaatgatgttaacatgattaagaccgcgcatatcggcgttggaatctccgggcaggagggcatgcaggccgtgatgagctccgattattcatttgcccagttcaggtatctgcagcgcctcctcctagtgcatggtcggtggtcctacatccggatgtgcaagttcctgaggtactttttctacaagaacttcgcctttaccctagtccacttttggtattctttttttaacgggtacagcgctcagacagcttacgaggattggttcatcaccctgtacaacgtgttgtacacgagtttgcccgtgctgttgatggggttgttggaccaggacgtgtcagacaagctgtctcttcgtttccctggtctctacatcgtgggacagagagacttgttattcaattacaagcggtttttcgtgtctctactccatggagtgttaacctccatgatcctattttttattccgctaggggcttatcttcagaccgttgggcaagacggggaggctccaagcgactaccagtcatttgccgtaactatcgcatccgctcttgtgattaccgtgaactttcaaattgggctggatacatcctactggacgtttgtgaatgcgttcagtatcttcggcagcatcgctctctattttgggattatgtttgattttcactccgctggtatccatgtgctgttccctagcgcttttcaatttactggcacggcctctaacgccctgagacagccttacatctggttgactataatccttgccgtggctgtgtgcctcctgcctgtcgtcgctattcgattcctgagtatgactatctggccctcagagtctgataagattcaaaagcaccgaaagcgattaaaggctgaggagcaatggcagcggcggcaacaggtgtttaggaggggcgtgagcaccagacggtcagcctacgcattctcacaccagcgtggctacgctgatctgatcagttctgggcggtctattcgaaaaaagcggtctccactcgacgcaatcgtggctgacggaactgccgagtatcgcagaaccggggacagc

SEQ ID NO: 318872 - DNA, 3753 bp, Artificial Sequence
  derived and/or modified sequence
atgagcaccgaaagggacagcgaaaccaccttcgacgaggactcgcagcccaacgacgaggtcgtcccgtactccgatgacgaaaccgaggacgagctggacgatcagggcagcgcggtggagcctgaacaaaatcgcgtcaacagagaggctgaagagaatcgggaaccttttcgcaaggaatgtacctggcaggtgaaagccaatgatcgaaagtaccatgagcagccacatttcatgaacactaagtttctttgcatcaaagaatcgaagtacgctaataacgcaatcaagacctacaagtataacgctttcacctttattccaatgaacctgttcgaacaattcaagcgcgccgcaaacctttacttcctcgcgctcctgatccttcaggccgttccacagatcagcaccttggcatggtacactaccctcgtgccgctcctggtcgtgctgggagtcaccgccatcaaggacctggtcgacgacgtggcgcgccataagatggacaaagagatcaacaacaggacttgcgaagtcatcaaggacggacgctttaaggtggcgaagtggaaggaaattcaagtgggagatgtcatcagacttaagaagaatgattttgtgccagcggatatcctgctcctctcctcaagcgagccgaattccctgtgctacgtggagactgcagagctcgatggagagacgaacctgaagttcaagatgtcacttgaaatcaccgaccagtacctgcaacgcgaagatactctggcgacgttcgacggttttatcgaatgtgaagaaccgaataaccggctcgataagtttactggaacgctcttttggcgcaacacgagcttcccactggatgccgacaagatcctcttgagaggatgcgtgatcagaaacaccgacttttgtcacgggctggtgatcttcgctggagcggacaccaaaatcatgaagaattcgggaaagacccgtttcaagcggaccaaaatcgactatctgatgaactacatggtatacactattttcgtcgttctgatcctcctgtcggccggtctggccattggccacgcctactgggaggcccaggtggggaactcgtcctggtacctttacgatggagaggatgacaccccatcgtaccgaggattcctgatcttctggggctacatcatcgtcctgaataccatggtcccgatctccctttatgtgtcagtggaagtgatccggcttgggcagtcgcacttcatcaactgggacttgcaaatgtactatgccgaaaaagatacgccggccaaggcgcgcacgaccacgctcaacgagcaactcggacaaatccactacatctttagcgacaaaactggaactctgacccaaaacatcatgactttcaagaagtgctgcatcaacggacagatctacggagatcacagagacgcatcccagcacaaccacaataagatcgagcaggtagacttcagctggaacacgtacgcggacggcaaattggctttctacgatcactacctcatcgaacagatccagtcgggcaaggaacctgaagtgcgccagttcttctttttgctggccgtctgccacactgtgatggtggatcgcaccgatgggcaactgaattaccaggccgcaagccctgacgaaggtgcactggtgaacgcagcgcggaacttcggattcgcctttctggcgaggactcaaaacactatcactatcagcgagttgggcaccgagcgaacctataatgtgttggcaatcctggactttaactcggacaggaagcggatgtcaatcatcgtgagaactccagagggcaatatcaagctctactgcaagggagcggataccgtgatctacgaacgtctccataggatgaacccgaccaagcaggagacgcaagatgccctggacatctttgcgaacgagactcttcggacgctgtgcctctgttacaaggagatcgaagaaaaggaattcaccgaatggaacaaaaagtttatggcggcctctgtcgcgtcgactaatcgcgatgaagcgctggataaggtgtacgaggaaatcgaaaaggacctgatccttctgggcgcgacggccatcgaggacaagttgcaggacggcgtcccagaaaccatcagcaagctcgccaaggcagacatcaagatctgggttctcaccggcgacaaaaaagagactgccgaaaacatcggtttcgcctgtgaactgctgaccgaggacaccaccatctgctatggagaggatatcaactcgctgctgcacgcgagaatggagaatcaacgcaaccggggcggagtgtacgcaaagttcgctccgccagtgcaggaatcattcttcccgccggggggtaacagagcgctgataatcaccgggagttggctgaacgaaatcctcctggaaaagaaaacgaaaagaaacaaaatcctcaaactgaagtttccgcgcaccgaagaggagcgccgcatgcggacgcagtcgaaaagacggctcgaagccaaaaaggagcaacgccaaaagaactttgtcgatctcgcatgtgagtgttccgcggtgatttgctgcagagtgaccccaaagcagaaagcgatggtggtcgacctggtgaagcgctacaagaaggcgattacgctcgctatcggagatggggccaacgacgtcaatatgattaagaccgcccatatcggagtcgggatctcaggacaggagggaatgcaggctgtgatgagctcggactactcgttcgcccagttcaggtatttgcagcggctgctgctggttcatggccgctggagctacatccgcatgtgcaagttcctgcggtacttcttctacaaaaactttgccttcaccctggtccatttctggtactccttcttcaacggatacagcgctcaaaccgcatacgaggactggttcattacgctctacaatgtgttgtacacctcactgcccgtgctgctgatgggcctgctcgatcaagacgtcagcgacaagctctccctgcggttccccggcctgtatatcgttggtcaacgcgacctcctgtttaactataagagattctttgtgtcacttctgcatggggtgctgactagcatgatcctcttctttatccccctcggtgcctacctgcaaactgtgggccaagatggcgaagcaccgagcgattaccagagcttcgccgtcaccatcgcgtccgcgttggtcatcaccgtcaacttccaaatcggactggacacgtcgtactggactttcgtcaacgctttcagcattttcggatcaattgcactgtacttcggaatcatgttcgattttcactcggcgggcatccacgtgctgttcccatcggccttccagttcaccgggacggcctcgaacgcgctgagacagccgtacatttggctcacgatcatcctggccgtcgctgtctgtctgctcccggtggtggcaatccggtttctgtcgatgactatctggccgtcagaatccgataagattcagaaacacaggaagcgcctgaaggcggaagagcagtggcaacggaggcagcaagtgttcagacggggggtgtccactcgtcggtccgcatacgctttctcccaccaacggggatatgccgacctcatctcgtcagggagaagcatccgcaagaagcggtcccctctcgatgcgatcgtggcggacggcactgcagaatacaggcggaccggagattcc

SEQ ID NO: 318873 - DNA, 3753 bp, Artificial Sequence
  derived and/or modified sequence
atgtcaaccgagcgggactcggaaaccacctttgacgaggactcccagcctaacgacgaggtggtgccatacagcgatgacgaaaccgaggatgagctcgacgatcaaggttcggccgtcgagccagaacagaatcgcgttaaccgcgaagcagaagaaaaccgggaacctttcagaaaggaatgcacctggcaggtgaaggccaacgatcgcaagtaccacgagcagccacatttcatgaataccaaatttctgtgcatcaaagagagcaagtatgcgaacaacgctatcaaaacctacaagtacaacgcgttcaccttcattccaatgaacctgtttgagcaattcaagagagctgcaaatctgtacttcctggcactgctgatcttgcaggctgttccacagatctcaaccctggcgtggtacaccacgctggtgccgcttcttgtggtcctgggagtgaccgccattaaggacctggtcgacgatgtggcgcggcacaaaatggacaaggagatcaacaatcgcacctgcgaagtgatcaaggacggccgcttcaaagtggctaaatggaaggaaatccaggtgggcgacgtgatcagactgaagaagaatgatttcgtgccggccgatatcctgctgctctcgtcgtccgaaccaaattccctgtgctacgtcgaaactgctgaactggacggagaaacgaatttgaagttcaagatgtcacttgaaatcaccgaccagtacctgcagagggaagatactcttgcgacctttgatggttttatcgagtgtgaggaaccgaataacagactcgacaagttcaccggaacgctcttctggcgaaacacttcctttccgctggatgcagacaagatccttctccgcggttgcgtgattagaaacactgacttttgccatggcctggtgatcttcgctggcgccgatactaaaatcatgaagaactcgggcaagaccagattcaagcgtactaagatcgactatctgatgaactacatggtgtacactatcttcgtggtcctgattctcctgtcagcaggactggcaatcggacacgcctattgggaagcccaagttggaaattcctcatggtatttgtacgacggggaggatgacaccccatcgtacaggggatttttgatcttctggggttatatcatcgtgctgaacactatggtgcctatctctctgtacgtgtctgtcgaagtgataagactcggccagtctcacttcatcaactgggacctccagatgtactacgccgaaaaagacacccctgccaaggcgcggacgaccaccctgaatgaacagctcggacagatccactacatcttctcggataagacgggtactctgacccagaacataatgactttcaagaagtgctgtatcaacggacagatatacggggatcacagagacgcgtcgcagcacaaccataacaaaatcgaacaggtcgacttctcatggaatacgtacgcggatggcaagctggcgttctacgaccattacctcatcgaacaaatccaatcgggaaaggaacctgaagtgcgacagttcttcttcctgctcgcagtgtgccataccgtcatggtcgacaggaccgatggtcaactgaattaccaggcggccagccccgacgaaggcgcgctggtcaacgcagccagaaactttggattcgccttccttgctcgaacccagaacaccatcaccatctccgaactggggacggaaagaacttacaatgtcctggccatcctggacttcaacagcgatcggaagaggatgagcatcatcgtgcggaccccggaaggaaacatcaagctctactgcaagggcgccgacaccgtgatctacgaacggctccatcgcatgaacccgactaagcaggaaacccaggacgccctggacatcttcgcgaacgaaacccttcggactctctgtttgtgctacaaggaaatcgaggaaaaggagttcaccgagtggaacaaaaagttcatggctgcgtccgtggccagcaccaacagagatgaagccttggataaggtgtacgaagaaatcgagaaggacctgatcctgctgggagctactgccatcgaggacaagctgcaggacggagtcccagaaacgatctccaaactcgccaaagccgatatcaagatctgggtgttgactggggacaaaaaggaaaccgctgagaatatcgggtttgcatgtgaactgctgactgaggacactactatctgttacggagaggacataaactcactgcttcacgcacgaatggagaaccagagaaatcggggaggagtctatgccaaatttgcgccgcctgtgcaggagtcattcttcccgccaggcggtaaccgggccctcatcattaccggaagctggctgaacgaaatcctgcttgaaaagaaaaccaagcgcaataagatcctgaaactgaaattccctcggactgaggaagagcggcgcatgcgtactcagtcaaagcggagactggaggctaagaaagaacaaagacagaaaaacttcgtagatctggcatgtgagtgcagcgcagtgatttgttgccgggtgacccctaagcagaaggcgatggttgtggacctggtgaaaaggtacaagaaagctatcaccctcgccatcggcgatggagcgaacgacgtgaacatgatcaaaaccgcccacatcggggtgggaatctcagggcaagagggaatgcaggctgtcatgagctctgactactccttcgcacagttccgctacctccagcggctcctgctcgttcacggacgctggtcgtacatccgcatgtgcaagtttttgcggtactttttctacaagaatttcgccttcacccttgttcacttttggtacagcttcttcaacggctactccgctcagaccgcctacgaggactggttcatcactttgtataatgtcctgtacacttcactgccggtgctgctgatgggactcctggaccaggatgtgtccgacaagctgtcgctgagattcccgggactgtacatcgtgggacaacgcgacttgctcttcaattacaagagattctttgtctccctcctgcatggagtgctgacctcgatgatcctgtttttcatccctctcggagcttacctgcagaccgtgggccaggacggtgaagccccctccgactatcagtcattcgcagtgactatcgcgtcggccctcgtgatcaccgtgaactttcagatcggcctcgacaccagctactggacgtttgtgaacgcattcagcatcttcggatcgatcgccctgtactttggtatcatgttcgatttccactcagctgggatccatgtgctcttcccgtccgcgttccaatttacgggaactgcgtcgaacgccctgagacaaccttacatttggcttactatcattctcgccgtcgctgtttgcctgctcccggtggtcgctatcaggtttctctcaatgaccatctggccgagcgaatccgacaagatccaaaaacaccggaagcggctcaaggcagaggaacaatggcagcggagacaacaggtgttccgccggggggtgtccactcgccggtcggcttacgccttcagccaccaacggggctacgctgacctgatctcgagcggacgcagcattcgaaagaagcggtccccgctggacgcaatcgtggccgatggaactgccgagtacaggaggaccggagactca

SEQ ID NO: 318874 - DNA, 3753 bp, Artificial Sequence
  derived and/or modified sequence
atgagcaccgagagggacagtgagactacatttgatgaagacagtcagccaaatgatgaagtcgtcccttactccgatgacgagactgaggacgaactggatgatcagggatctgccgtagaaccagagcaaaatagagtgaatcgggaagcggaggagaatcgggaaccctttcgtaaggagtgtacttggcaggtcaaggccaatgataggaaataccatgaacagccgcatttcatgaacactaaattcctgtgcatcaaagaatccaaatatgcgaacaacgccataaagacctacaaatacaacgccttcacctttatcccaatgaacctcttcgagcagtttaagcgcgcggctaacctctatttcctcgcattattgattctgcaggccgtgccccagattagcacattagcatggtacaccactctcgtacctctgctggtcgtccttggcgttacagccatcaaggatctggtcgatgatgttgccaggcataagatggataaggaaattaataacaggacttgtgaagttatcaaggatggaagatttaaagtcgcaaagtggaaggagattcaggtgggcgatgtgatccgactgaagaagaacgactttgtgcctgccgacattctgctgttgagttcgtctgagccgaactccctgtgctacgtcgaaacagccgaacttgatggtgagacgaatcttaagttcaagatgtccctcgaaataacagaccagtacttgcagagggaagacaccctcgcaactttcgatggatttattgagtgtgaagagccaaataaccggttggacaagttcacagggaccctcttctggagaaacacttctttccctcttgacgctgataagatattgctgcggggttgcgtgatcaggaataccgacttctgccacggattggtgattttcgctggagccgacactaagatcatgaagaattccgggaagacccggttcaaaaggacgaagatagactacctgatgaactacatggtttacactatattcgttgtcttgattttgttgtcagctggtcttgcgataggtcatgcttactgggaggcgcaagttggaaatagtagttggtacctgtacgacggcgaagatgataccccttcttacagggggttcctcattttctggggatatatcattgtgctcaacaccatggttcccatttcattatacgtgtccgtggaggtgattcgccttggacagagccatttcatcaactgggacctccagatgtattacgccgagaaagatacgcccgcaaaggctcggactacaaccctcaatgagcagttgggacagattcactacattttttctgataagacaggtacgttgacgcaaaatatcatgacttttaaaaaatgctgtatcaacggccaaatctatggggatcaccgcgacgctagccagcacaaccacaacaagattgagcaggtggatttctcttggaatacctatgcggatggcaagttagcattttacgatcactacctcatcgaacagatacagagcgggaaggagcccgaggtgcggcagttcttcttcctgttggccgtgtgtcacactgtgatggtggacagaactgacggccagctgaactaccaagctgcatctccagatgaaggcgccctggttaacgcagccagaaacttcgggttcgctttcctagcaagaactcagaacaccataacaatctctgaactgggaactgagcgcacttacaacgttctggctatacttgactttaatagtgatcgcaagagaatgtccatcatagtgaggacacccgaaggcaacattaaactgtactgcaaaggggccgacacagtgatatacgagcgccttcaccgcatgaacccgacaaaacaagaaacccaggacgctcttgacatattcgccaatgagacgttgcgaactctgtgtctgtgctataaggaaattgaggaaaaagagttcacggagtggaataaaaagtttatggctgctagcgtcgcttcaaccaaccgggatgaggccctggacaaggtgtacgaagagatcgaaaaggacctgatcctcctgggggcaaccgctattgaggataagctgcaggatggtgtgccagagaccatctccaagttggccaaggctgacatcaagatctgggtgctgaccggagataaaaaggaaaccgccgagaatatcggatttgcttgcgaactgttgacggaagacaccacgatctgctatggggaggatatcaattccctgctgcacgccaggatggaaaatcagaggaaccgggggggcgtgtatgctaagttcgccccgcctgtgcaagaatccttcttccccccagggggtaatcgggcccttattattaccggctcctggctgaatgagattctcttggagaagaagacgaagagaaacaaaatcctcaagttgaagtttccccggacggaggaggaacgacgcatgaggactcagagcaagagacgactagaggccaagaaggagcaaaggcagaagaacttcgtcgacctggcctgcgagtgctccgccgtgatttgttgcagagtgacccctaaacagaaagctatggtggtcgacttggtgaagaggtacaaaaaggcgataacattagccatcggtgacggcgccaatgatgtgaacatgattaagacggctcacatcggcgtcgggatcagtgggcaggagggcatgcaggcggtcatgtcttccgattacagtttcgcacagttcaggtacctgcaaagattgttactggttcatggcaggtggtcatacatccggatgtgcaaatttctccgttacttcttctacaagaactttgcctttaccctggtccacttctggtattcatttttcaacggatacagtgcgcagaccgcttacgaggactggttcataaccttgtacaatgtcctatatacgagccttcccgtcctgttaatgggactcctcgatcaggacgtgagcgacaagctcagcctgaggttccccggcctgtacattgtcggacagagggacctgctcttcaattacaagcggtttttcgtgagtctgttgcacggcgttctaacctcaatgattctgttctttatccccctgggtgcatatttacagactgtgggccaggacggggaagcacctagcgactaccaatcattcgctgtgacgatcgccagcgccctggttatcactgtgaactttcagatcggcctcgacacatcctactggacctttgtcaacgctttctctatcttcggctctatcgccttgtacttcgggatcatgttcgactttcactcagccggtatacacgtactgttccctagtgcattccagttcaccggcaccgctagtaacgctctgagacaaccctatatatggctcactatcatcctcgcagtagcggtatgcttgttaccagttgtagcgatacggttcctctccatgactatctggccttctgagagtgataaaatccagaaacatcggaagcgattgaaggcggaagaacagtggcagagaaggcagcaagtgtttcgcaggggtgtgagtactcgaagaagcgcctacgctttctcacatcagagaggctatgccgatttgatatcctcagggaggagcattaggaagaagagatctcccctcgacgcgatcgttgctgatggcacagccgagtatcgacggaccggcgattcg

SEQ ID NO: 318875 - DNA, 3753 bp, Artificial Sequence
  derived and/or modified sequence
atgtcgaccgagcgcgattccgagacgacctttgacgaagattcgcagcccaatgatgaagtcgtgccctacagtgacgacgagactgaagatgagctggatgatcagggttccgccgttgagcccgagcagaaccgggtcaatcgtgaggctgaagaaaaccgcgagcccttccgcaaagagtgcacctggcaagtgaaggcaaacgacaggaagtaccacgaacagccgcatttcatgaacaccaagttcctgtgtattaaagaaagcaagtatgccaacaatgcaatcaaaacttataagtataacgcctttacctttattcctatgaacctcttcgaacagttcaagcgtgcagctaacctgtacttcttggctctattaatcctccaagccgtcccccaaatctccactctcgcatggtacactacgcttgtccccctgcttgtcgtgcttggtgtcaccgctattaaagaccttgtggacgatgtcgcgcgccacaaaatggacaaagagatcaacaaccgtacatgtgaagttattaaggatggccgcttcaaggtcgctaagtggaaagagatccaggtcggtgatgtgatccgcctgaagaagaatgacttcgttccggctgacattcttctgctatcctcctctgagcctaatagtctgtgttacgtggagactgccgaattggacggtgagactaacttgaagttcaagatgtctctggagatcaccgaccagtatttgcaacgtgaggacaccctggccaccttcgatggattcatcgagtgcgaggaaccaaataaccgcttagacaaatttaccggaactcttttctggaggaacacatccttccccctagacgccgacaagatcttgctgcgcggctgtgtcatccggaacaccgatttctgccatggcctggttatcttcgccggggccgatacgaagatcatgaagaacagcggcaagaccaggttcaagcgcactaagatcgattacctcatgaattacatggtatacaccatcttcgttgtactcattttgttgagcgccggattggccatcggccatgcctactgggaagcccaggtcggaaacagttcctggtacctctacgacggtgaggatgatactccatcgtaccgtggtttcctgatcttctgggggtacatcattgtcctgaacacaatggtgccaatcagcctatacgtctcagtggaggtgatccgtctgggtcagagccatttcattaattgggacctacaaatgtactacgcggagaaggatacccctgctaaggcaagaaccaccacattgaacgaacagttgggacagattcactatatcttctcggacaagaccggcacactgactcaaaacatcatgactttcaagaagtgctgcatcaatggccagatttatggtgaccaccgcgacgcgtcgcaacacaaccacaacaagatcgaacaagttgatttctcctggaacacctatgcggatggcaagttggccttttacgaccactacctgatcgagcagatccagtcggggaaagaacccgaggtgcgccagtttttcttcctgctggctgtctgtcacacggttatggtggaccggacagatggtcagctgaactatcaggcggcctcgcccgacgaaggtgccttggtcaatgctgctcgcaacttcgggttcgcttttttggcccgtacacagaacaccatcaccatcagtgagctaggtaccgagcgtacatacaacgtgttggctatcctggattttaactccgaccgcaaaaggatgtcgatcatcgtccgcacgccagaaggtaacatcaagctttactgcaagggcgcagacactgttatttatgagcgccttcacaggatgaacccgaccaagcaagagacacaggatgctctggacatcttcgccaacgagacacttcgtacattgtgcctctgctataaagagatcgaagagaaggaattcaccgagtggaataagaagttcatggcggcttccgtcgcctctacgaacagggatgaagccctggacaaggtctacgaggagatcgagaaggacttgattctgttgggcgccaccgctatcgaggataagctgcaggatggcgtccctgagacaatctctaagctcgccaaagccgacattaagatatgggtcttgaccggtgacaaaaaggagaccgctgagaatatcggctttgcctgtgagctgctgaccgaagatacaacaatttgctacggcgaggacatcaactccctgttgcatgcccgtatggaaaatcagcgtaaccgtggcggtgtttacgctaagtttgccccccctgtccaggagagcttttttccgcccggtggcaatcgcgccctgatcatcaccggaagctggctcaacgaaattctgctcgaaaagaagacaaagcggaataagatccttaagctaaaattcccgagaaccgaggaagagcggcgtatgcggacccagtcaaagcgccgcctagaggccaagaaggagcaaaggcagaaaaacttcgttgacctggcttgtgagtgcagtgcagtgatctgctgccgcgtcactcccaagcaaaaggcgatggtggtcgacctagttaagcgctacaagaaggccattaccctagctattggggacggtgctaacgatgtcaatatgatcaagacagcccacattggagtcgggatttcaggacaggaaggtatgcaggccgtgatgtcatccgattacagtttcgcacagtttaggtatctccagagattgttgcttgttcatggacgttggtcgtacatccgcatgtgtaagtttctgcggtacttcttctacaagaacttcgctttcactctcgtgcacttctggtactcgttcttcaacggctactcagcacagaccgcgtatgaggattggttcattacactctacaacgtgctctatactagccttccggttctccttatgggcctgctcgatcaggacgtgagtgacaagttgagcctccgcttcccaggactgtacattgtcggccagcgggatctgctgttcaattacaagcgcttcttcgtatccctcttacatggagtactcacgagcatgatccttttcttcatcccgctcggtgcgtacttacagacggtcggtcaggatggcgaagctccgtcggactaccagagctttgccgtcacaatcgcctcggctttggtcatcaccgtgaacttccagattggtcttgatacttcctattggacgttcgtcaacgcattcagcatcttcggttctattgcactctactttgggattatgttcgacttccactccgcaggtattcacgtgctctttccctcggccttccagttcaccgggactgctagcaatgccctgcgccagccatacatctggcttaccatcatcctggccgtggccgtctgtctcctgcctgtggtggccatcaggtttctgtctatgacgatctggcccagtgagtccgacaagatccagaaacatcggaagcggcttaaagccgaggaacaatggcagcggcgccagcaggtgttccggcgcggcgtgagcacccgccgcagcgcctatgccttcagtcaccagcgcggttacgcagacttgatctctagtggccgtagcatccgcaaaaaaagatcgcctctcgacgccattgtcgctgacggcacagctgaatacaggcgcactggcgattcc

SEQ ID NO: 318876 - DNA, 3753 bp, Artificial Sequence
  derived and/or modified sequence
atgtcgaccgaaagagactcagagacgacttttgatgaagattcgcaacctaacgacgaagtggtgccatacagcgatgatgaaactgaagatgaattggacgatcagggctccgcggtggagcccgagcagaacagagtaaaccgggaagccgaagagaaccgggaaccttttcggaaagaatgcacttggcaggtgaaagcaaacgatagaaagtaccatgaacagccgcactttatgaacactaagtttctttgtattaaggaatcgaagtacgccaacaacgcaatcaagacgtacaagtacaatgcttttacgtttattcccatgaatcttttcgaacagttcaagcgagccgccaacctttactttcttgcattgctgattttgcaagccgtgccccaaataagcaccctggcatggtacacgacgctggtaccgcttctggtcgtcctcggagtgaccgccattaaggatctcgtagacgatgtggcgcgccataagatggataaggagatcaataaccgaacctgtgaggtgattaaggatggtcgctttaaagtggcaaagtggaaagaaatacaagtgggcgatgtgatcaggcttaagaagaacgatttcgttcctgcggatattcttctgctgtcgtcgtccgaacccaacagcctgtgttatgtagaaaccgcggaacttgacggcgagactaatctcaaattcaagatgagtctggaaatcaccgatcagtacctgcaaagagaggatactctcgcaacgtttgacggtttcattgaatgcgaggagcctaacaatagactggacaaattcaccggtaccctgttttggcgaaacacctccttcccgttggacgcagataagattctcctgcgaggatgtgtgatacgcaacaccgatttttgtcacggattggtgatcttcgccggggcggataccaaaatcatgaagaactcgggtaagactcgttttaagcggactaagatcgactacctgatgaactacatggtttatacgatatttgtggttctcattcttttgtcggcaggacttgcaatcggacatgcatactgggaagcacaagtcgggaatagctcctggtacctttatgacggcgaagatgatactccttcctaccgcgggttcctcatcttttggggatacataatagtgcttaatactatggtgccgatatcgctctacgtcagcgtggaagtcatacgtcttggacagtcccacttcatcaactgggatctgcagatgtattatgcagagaaagataccccagcaaaggcccggacgactactcttaatgaacagctcggacaaattcattacattttctccgataagaccggtactcttactcagaacattatgactttcaaaaagtgctgtattaacggccaaatctacggggatcacagagacgcaagtcaacacaaccataacaagattgaacaagtcgattttagctggaacacttacgccgacggcaaattggctttttacgatcattaccttattgaacaaattcaatcgggaaaggaacctgaggtgcggcagtttttctttctgttggcggtctgccataccgtgatggtcgatagaactgacggccaacttaactaccaagctgcctcaccagatgagggagcattggtcaacgccgcacgcaacttcggttttgcatttctggctcgaacgcagaatacgatcaccatcagcgagcttggtactgaacgtacctacaacgtccttgccattctggacttcaattcggatagaaaaagaatgtccatcattgtgcgaacccctgaaggaaacattaaactttactgcaagggagccgataccgtcatctacgagcgtctgcatcgtatgaatccgaccaaacaagaaacccaagacgcgctcgacatttttgccaacgagactcttcggaccctgtgtctttgttacaaggaaatcgaggaaaaggagtttactgaatggaataagaaattcatggcagcttcagtggcaagcactaacagggacgaggcactggataaggtgtacgaagaaattgaaaaggatcttatactgctcggggcaaccgcgatcgaagataaactccaggatggagtgcctgaaaccatctccaaacttgcaaaagcagacataaagatctgggtcctgactggtgacaagaaggagacggcagaaaacattggttttgcatgcgagcttttgaccgaggacactaccatttgttacggagaggatatcaattcactgctgcatgcccgaatggagaaccaaaggaatagaggaggcgtctacgcaaagtttgccccgcctgtgcaggaatcattctttccaccaggtggcaatagggcgttgatcattaccgggtcatggctgaacgagattctcctcgaaaagaaaaccaaacgaaataagattctgaaacttaagttccccagaaccgaagaagagcgccgcatgcgcactcagtccaagcgcagactggaagcaaaaaaggagcagcggcagaagaattttgtggatctggcatgtgaatgttcggcagtgatctgctgcagagtgaccccaaagcaaaaagccatggtggtcgatctcgtcaaaaggtacaaaaaggcgatcactctcgcgataggagacggcgcaaatgatgtgaatatgatcaaaactgcccacattggcgtgggtattagcggtcaggaaggaatgcaggcagtcatgtcctccgattattcttttgcccaatttaggtacctgcaacggctgctgctggtgcatggacggtggtcctacattagaatgtgtaagtttctgcgttactttttctacaagaactttgcattcaccctggtgcacttttggtacagctttttcaacggatacagcgcccaaaccgcatacgaggactggttcatcaccctgtataatgtgctttacaccagcctccccgtgctgctcatgggacttttggatcaagatgtttcagataagctcagcctccgctttccaggactgtacattgtggggcagagagatttgcttttcaattacaagcgattctttgtctctcttctccatggggtcctcacttcgatgattctgttctttatccctcttggagcatacctgcaaactgtcggtcaagacggcgaggccccttcagactaccaatcgttcgcggtgactattgcatcggcgctggtcataacggtgaattttcaaatcggattggataccagctactggacttttgtgaacgcattttccatctttggttcgattgcgctgtactttggaatcatgttcgattttcactcagccggaattcatgtgcttttcccgtcggcgttccagtttaccgggactgcatctaatgcacttcgccagccctacatatggctgacgatcattcttgctgtcgctgtgtgtctgttgccagtcgttgcaattagattcttgtctatgaccatttggccatcggaatcggataagatccaaaagcatcgcaagcggttgaaggccgaagaacaatggcagcggagacaacaggtgttcagacggggtgtctcaactcggcgaagcgcttacgccttttcgcatcagagagggtacgcggacttgatttcgtcgggccgttccattaggaagaagcggtcgccactcgacgcaatcgtggctgacggtaccgctgagtaccgtaggactggagactct

SEQ ID NO: 318877 - DNA, 3753 bp, Artificial Sequence
  derived and/or modified sequence
atgtccaccgaaagagattccgaaactaccttcgatgaggactcgcaacccaatgatgaagtggtgccctacagcgacgacgagactgaggatgagcttgacgaccagggatcggccgtggaaccagagcagaaccgagtgaacagggaggccgaggaaaacagagagcctttccgcaaagagtgcacttggcaagtcaaagcgaacgatagaaagtatcacgagcagccgcacttcatgaataccaaatttctgtgcattaaagaatcgaaatatgcgaacaatgccatcaagacgtacaaatacaacgcatttactttcataccaatgaacctgtttgagcaattcaagcgcgccgcgaacctgtacttcctggctttgctgatcctgcaggcggtgccacaaatctctactctcgcctggtacactactctcgtcccgcttctggtggtgctcggagtgactgccatcaaggacctggtggatgatgtcgcccggcataagatggataaggaaatcaacaaccgaacctgcgaggtcatcaaggatggacggttcaaagtggccaagtggaaagagattcaggtgggagatgtcatccgcctgaaaaagaatgactttgtgcctgccgacatcctcctgctctcctcttcagagccgaattccctgtgctacgttgaaaccgccgagttggacggcgaaaccaacctcaagtttaagatgtcccttgaaatcactgatcagtaccttcagagagaagataccctggctacctttgatggtttcatcgaatgtgaggaacctaacaaccggctggacaagtttaccggtacccttttctggcgcaacacgtcgttcccgctggacgccgataagatcttgcttcgtggttgcgtgattcgcaataccgacttctgccacggcctcgtcattttcgccggagctgacacgaagatcatgaagaattccggaaaaactcgcttcaaacgcaccaagatcgactacctgatgaattacatggtctacaccatctttgtcgtgttgatcctgctctcggccggattggcgatcgggcacgcgtactgggaagcccaagtggggaattcgtcgtggtatttgtacgacggtgaggacgacaccccaagctacaggggcttcctgatcttttggggatacattatcgtcctgaatactatggtgccgatttctctctacgtttcagtggaagtgatccggctgggacaatcacactttatcaattgggatctgcaaatgtactacgcagaaaaggacactccagcaaaggcgcggaccaccactttgaatgaacagctgggacagattcattacatcttctcggataagaccgggactctgacccagaacataatgacttttaagaagtgctgcattaacggacagatctacggagatcaccgagatgcgtcgcagcacaaccataacaagatcgaacaggtggatttctcgtggaacacttacgcagatggcaaactcgcgttttatgaccattatctgatcgaacaaatccagtcgggcaaagagccggaagtccgacaattctttttccttctggccgtgtgccataccgtgatggtggatcgcaccgacggccagttgaactaccaggccgcgtcccctgatgaaggagccctcgtcaacgccgccaggaactttggctttgccttcctggcgcggactcagaacacgatcactatttcagagctgggaactgagagaacctacaacgtgctggcgatcctggacttcaattccgacagaaagagaatgtctatcatcgtccggaccccggaaggaaacatcaagctctactgcaagggagcagacaccgtcatctacgaaagactccatcggatgaatccgactaagcaggaaacccaggatgctctggacatcttcgccaacgaaactctcaggaccctctgcttgtgctacaaggaaatcgaagaaaaagaattcactgagtggaacaagaagttcatggctgcctccgtggcgtcaaccaatagagacgaggctctggacaaggtgtacgaggagatcgagaaggacctgatcctgctcggagccaccgccattgaagataagttgcaggacggagtgccggaaaccatctcaaaactggctaaagcggacataaagatctgggtgcttacgggagacaagaaggaaactgcagagaacatcgggttcgcttgcgagctcctgactgaggacactacgatctgctacggtgaggacatcaattcgctgcttcatgcacgcatggagaaccagaggaaccggggaggggtgtacgcaaaattcgccccgccagtgcaggagtcgttttttcctccgggcggtaatagagcgcttatcataaccggatcgtggctgaatgaaatccttcttgaaaagaaaactaaacggaataagatcctgaagttgaagttcccgcgaacggaggaagaacggaggatgcgcacgcagtccaagcggagactggaagcgaaaaaggagcagcggcagaaaaactttgtggatctggcttgcgaatgcagcgccgtgatctgctgccgcgtgaccccaaaacaaaaggccatggtggttgacctcgttaagcgctataagaaggctatcactctcgctattggtgacggagcaaatgacgtgaatatgattaagacggcgcacatcggagtgggtatttccggacaggaaggaatgcaggctgtcatgtcctctgactactcctttgcccagttcagatacctgcaacggctgctcctggtccacgggaggtggtcgtacatccgtatgtgtaagttcctgcggtacttcttctacaagaatttcgcgttcaccctggtccacttctggtactcgtttttcaatggctactccgcgcagaccgcgtatgaggactggttcatcaccctttacaatgtgctgtacactagcctgcctgtcctgctcatgggactcctcgaccaagacgtttctgacaagctctccctgcgctttcctggactctacatcgtggggcagcgggatttgctgttcaactacaagcggttcttcgtcagcctcttgcacggtgtgctgacctcgatgatcttgttcttcatcccactcggcgcctacctgcaaactgtgggacaggatggtgaagcaccgtcagattaccagtccttcgcagtcaccattgcgtcagccctggtcattactgtgaacttccagatcggcctcgatacgagctactggaccttcgtgaacgcattcagcatctttggatccatcgcgctgtatttcgggataatgttcgactttcatagcgcaggcatccatgtgctgtttccttcggcgttccaattcactggcaccgcctcgaacgccctccggcagccttacatctggctcactatcatcctggccgttgctgtgtgcctgctgccagtcgtggccatcaggtttctgtccatgaccatctggccgagcgagtccgataagatccagaagcacaggaagagactcaaggcggaggagcagtggcaacggcggcagcaggtattccggcgcggagtgtccacccggagatcggcctacgccttttcccaccaacgcggatacgcggatctcatctcgtcgggccgcagcatccggaagaagcggagccccctggacgcgatcgtggccgacggtacggctgagtacagaagaaccggggactcg

SEQ ID NO: 318878 - DNA, 3753 bp, Artificial Sequence
  derived and/or modified sequence
atgagcactgagcgggattctgagacgacttttgacgaagatagtcagcctaatgatgaagtggtcccgtactcggatgatgagacagaagatgagctcgacgaccaaggcagcgccgtggaacccgaacagaatcgggtcaacagagaggctgaggagaatagggagcccttccggaaggagtgtacctggcaggtgaaggccaatgatagaaagtaccacgagcagccccatttcatgaatactaagtttctctgcattaaggagtccaaatacgcaaataacgccatcaaaacctataaatacaatgcattcacctttatacccatgaacttattcgaacagttcaaacgggccgccaatctttacttcctggctttactgatactgcaggctgtgccccaaataagcaccttagcttggtatactaccttggtgcctctgctggtggtgcttggggtaaccgctataaaggacctggtagacgacgtggcacggcacaagatggacaaagagatcaacaatcggacctgcgaagtgataaaggacggccgctttaaggtggcaaagtggaaggagattcaggtgggcgatgtaatccgcttgaagaaaaatgattttgttccagctgacatcctccttctttcttcgagtgagccaaacagcctctgctatgtcgagactgcggagctcgacggagagaccaatctgaagttcaaaatgtctctggaaattaccgaccagtacctgcagcgcgaagatactctggccacatttgatgggttcattgaatgtgaagaacctaacaatcgccttgataaatttacaggcaccctgttttggagaaacacctcgttcccactagacgcggacaaaattctactacgaggctgcgtcatccggaataccgacttttgccacggtctggtcatctttgctggagcggatacgaagataatgaagaattccgggaagactcgctttaaacggacaaagattgactacctaatgaactatatggtgtacactatattcgtggtattaattctgttgtccgccgggctcgccataggccatgcttattgggaggcccaggttggcaactcttcttggtatctttatgacggggaggatgatacaccctcctaccgaggcttcctgattttttggggttatattattgtcctaaatacgatggtgccgatcagcttatacgtcagcgtagaagtcattcgcctgggacaatctcatttcatcaactgggatctccaaatgtattacgcagaaaaagataccccagcgaaggctagaaccacaaccctgaatgaacagctcggacaaatccactacatcttttcggataaaacagggacactcacacagaatataatgaccttcaaaaagtgctgcatcaatgggcagatttatggagaccaccgggatgcttcccagcataaccataataagatcgagcaagtggactttagctggaacacttatgccgacggcaaattggccttctatgatcactatttgatcgaacagatccagtccggtaaagagcctgaggttagacagttttttttcttgcttgcagtgtgtcataccgtcatggtggataggaccgatggacaacttaactaccaggcagcaagcccagatgaaggcgcactggtgaatgcggctaggaatttcggcttcgcattccttgccagaacacagaatactataacaatctcggagctgggaacggagcgcacatacaacgtgctcgccattcttgacttcaatagtgaccgtaagagaatgagtataatagttagaactcctgaaggaaatatcaaattatattgtaagggagctgacaccgtaatttacgagcgtttgcacaggatgaacccaactaagcaggagacacaggatgctctcgacatcttcgctaatgagactttgagaaccctctgtctgtgctacaaggagatcgaagagaaggagtttaccgaatggaacaagaaattcatggcagctagcgtggcctccaccaatcgtgatgaagccctcgataaagtgtacgaagagatagagaaggatctcattctgttgggcgcaacagccattgaggataagctacaggacggagtccctgaaacaatcagtaaacttgcaaaggctgacattaaaatatgggtactgactggcgataaaaaggagacagcggagaacatcggatttgcctgcgaacttctaaccgaggacactactatctgttacggggaggacattaactcgctcctccacgctcggatggagaaccagaggaacagagggggtgtgtatgcaaaatttgctcctcccgtgcaggaatcattctttcctcccggagggaatcgcgctctgataataactgggagttggctcaacgagatcttgttggagaagaaaaccaaaaggaacaaaatactgaagttgaaatttcctcgcactgaggaggagcgtcgaatgcgcactcagtccaaacgccgcctggaagccaagaaagagcagcgccagaaaaacttcgtggatctcgcatgcgagtgctccgccgtgatttgttgtcgagttacaccaaaacagaaggccatggtggtggacctggtgaaacggtataaaaaggctattacccttgccattggcgatggagccaatgatgtgaatatgataaagaccgctcatatcggagttgggatctccggccaagaggggatgcaagctgtcatgtcttctgattactcattcgctcagtttagatatcttcagcggctgttactggtacacggacgctggtcgtacatcagaatgtgcaagtttctgcggtatttcttctacaaaaattttgcctttaccctcgttcatttctggtacagtttctttaatggctatagcgcccagactgcctacgaggattggtttatcacactttacaacgttctgtacacaagtttacccgtgctgttaatgggactgcttgaccaggacgtgagcgataagctgtcactaagattccctggcctctacattgtggggcaacgcgatctgctcttcaactataagcgtttcttcgtatcactcttgcatggggtcttaacttcaatgattcttttctttattcctctaggtgcatacctgcagacagttggtcaagacggtgaggcaccgtctgattaccagtccttcgcagtgacaatagctagcgcattggtcatcacggtgaatttccagatcgggcttgacacttcttactggaccttcgtgaatgcgttttcgatctttgggtctatcgcgctatattttgggatcatgtttgactttcacagtgccggaattcacgtactcttccccagcgctttccagttcacaggaacagcgagtaatgcgttgcgtcagccctatatttggctgaccattatccttgctgttgccgtctgtctgcttccagtggtggcaatccgttttttgagcatgaccatttggccgtctgaatccgacaagattcaaaaacaccggaagcgacttaaagccgaggaacagtggcaaaggaggcagcaagtgttccgccgtggcgtgagtacccgccgcagcgcatacgcattcagccaccagcggggttacgccgacctgatcagttcagggcggagcatccggaaaaaacgatctccccttgatgctatcgttgcagacggtactgccgagtatagacgtacaggtgactct

SEQ ID NO: 318879 - DNA, 3753 bp, Artificial Sequence
  derived and/or modified sequence
atgtccaccgaacgcgattcggaaaccaccttcgacgaagattcgcagcccaacgatgaggtggtgccctacagcgatgatgaaaccgaagatgaacttgacgaccagggaagcgcagtcgaacctgagcagaatcgtgtcaaccgggaagccgaggaaaacagggaaccttttcggaaggaatgtacctggcaagtgaaggctaacgatcgcaaataccatgaacaaccacacttcatgaataccaagttcctttgcattaaggagtccaaatacgcgaacaacgcgatcaaaacctacaagtacaacgcgtttacgtttattccgatgaatctttttgaacagttcaaaagggcagcgaatctctacttcctcgccttgctgattcttcaggctgtccctcagatcagcacccttgcgtggtacacgacgcttgtgccgttgctcgtggtgctgggtgtaacggccattaaggacctggtggatgatgtcgcaagacataagatggacaaagagataaacaataggacctgtgaagtcattaaggatggacgctttaaggtggccaagtggaaagagattcaggtgggggatgtcatcagattgaaaaagaacgattttgtgcccgcagatatactccttctgtccagctcagaacctaactctctgtgctacgtcgagacggcagaactggacggtgaaaccaatctgaagttcaaaatgagcctcgagattacggatcaatacctgcagagggaagatacccttgcgacttttgacgggtttattgagtgtgaagaacccaataacaggctggataagtttactggtactctcttttggagaaacacttcatttcctctcgatgctgataagatcctgctcagaggatgcgtcatcagaaacaccgatttttgtcatggactggtgatttttgccggagcagacaccaagataatgaagaactcaggaaagactcgttttaagagaactaaaatcgattacctcatgaattacatggtgtacacgatttttgtggtgcttattctgctctccgcaggtctggcaattggtcacgcctattgggaagcccaagtgggtaactcctcctggtacctctacgatggcgaagatgatactccttcgtacagaggatttcttatcttttggggctacataattgtgcttaacactatggtgccaatctccctgtatgtgtccgtggaggtgattcggcttggacagtcgcacttcattaactgggatctgcagatgtactacgctgaaaaggataccccagcgaaggcaagaaccacgactctgaacgaacaactcggacagatccattacatattctcagataagactggtactctgactcagaatatcatgacctttaagaaatgctgcattaatggtcagatctacggtgatcatcgagatgctagccaacataatcacaataagattgaacaggtggactttagctggaacacttacgcagatgggaaacttgcattttacgaccactacctcattgagcagattcaatcgggaaaagaacctgaagtgcgccagttctttttccttcttgccgtgtgtcacactgtgatggtcgatcggaccgatggacagctgaattaccaagccgcatcgcctgacgaaggtgctctggtgaatgcggcgcggaactttggattcgccttcctcgcacgcacccaaaacaccattaccatttcggagcttggtacggaaaggacttacaatgtgcttgccattctggactttaactcggatagaaaaagaatgagcatcatcgtcagaaccccagaaggaaatatcaagttgtactgcaaaggggctgacactgtgatctacgaaaggctgcaccgcatgaatcccaccaagcaagaaacccaggatgcactcgacatatttgcaaacgaaaccctcagaaccctgtgcctgtgttacaaggagatagaagagaaggagtttaccgagtggaacaagaagtttatggcagcatcggtggcctccaccaaccgcgacgaggcactcgataaggtgtacgaagaaattgagaaagacctcatacttcttggggcaactgccatagaagataagttgcaagatggcgtgccagaaactatttcgaagctcgcaaaagccgacattaagatctgggtcctgaccggcgataagaaagaaactgcagagaacattgggtttgcatgtgaacttctcaccgaagataccaccatttgttacggtgaggatatcaactcacttcttcacgcgcgtatggagaaccagcgtaaccgcggcggagtgtatgccaagttcgcgccacctgtgcaggaatcgttctttcctccaggggggaaccgggcactgatcattaccgggtcctggcttaacgaaatcttgttggagaagaaaactaaacgaaacaagattctgaagctgaagtttccgcgaactgaagaagaaaggcggatgcgcacccagtcgaagcgccgtctggaggcaaagaaggaacagcggcagaaaaactttgtcgacttggcttgtgagtgtagcgcagtgatctgttgccgtgtcacccctaagcaaaaggcaatggtggtggatctggtgaagaggtataagaaggcaataactcttgcgattggagatggagcaaacgatgtgaacatgattaagaccgcccacattggggtgggcatatcgggtcaagaaggaatgcaagcagtgatgtcatcggattacagctttgctcagtttcgttacctccaacggctgctcttggtgcatgggagatggagctacattaggatgtgtaagtttcttcgctacttcttctacaaaaactttgcgttcaccctggtgcatttttggtactcgttctttaacgggtacagcgcacaaaccgcatacgaagattggttcatcaccctgtacaacgtgctgtacacctcgctgcctgtccttctcatgggactccttgatcaggatgtgtcagataagctgtcactgcggtttcccgggctttacatcgtggggcaaagagatttgctgtttaactacaagagattctttgtctcgctgcttcacggagtgcttacctcgatgatcctcttctttatcccccttggtgcatacctccaaactgtgggtcaagatggggaagcacctagcgattaccagtcgtttgcagtgaccatcgcaagcgcactggtgatcactgtcaattttcaaatcggcctggacacttcgtactggactttcgtcaatgccttttcaattttcgggagcatcgctctgtactttggaatcatgtttgatttccactccgcgggcattcatgtgctctttccgtccgctttccagtttactggaaccgcgtcaaacgcactgagacagccttacatttggttgactatcattcttgcagtcgcagtctgccttctgcctgtggtcgcaattcgatttctctccatgaccatctggccttctgagtcggacaagatccaaaaacaccgaaagagacttaaggcagaagagcagtggcagcgcaggcagcaagtgttccggcggggtgtctcgactcgtcgctcggcatacgcatttagccatcaaaggggctacgcagatcttatatcaagtggacgctcaattcggaagaagcgcagccccctggatgcaattgtggcagacggtaccgctgaataccgccgaaccggcgattca

SEQ ID NO: 318880 - DNA, 3753 bp, Artificial Sequence
  derived and/or modified sequence
atgtcgacggagcgcgactcggaaaccacctttgacgaagatagccaaccgaacgacgaagtcgtgccatactccgatgacgaaaccgaagatgagctggatgaccaaggatccgccgtggaaccggaacagaaccgcgttaacagagaggccgaagaaaatcgggaaccatttaggaaggagtgcacctggcaggtcaaggccaatgatcgcaagtaccatgagcaaccacactttatgaataccaaattcctgtgcatcaaagaatcaaagtacgcgaacaatgcgataaagacgtacaagtacaatgcattcacttttatcccaatgaatctgtttgaacaattcaaacgcgccgcgaacttgtactttctggccctgctgattctgcaagcggtgccgcagatctccaccctcgcttggtacaccaccctcgtcccgctgttggtggtgctcggagtgacggcaatcaaggacctggtggacgacgtcgcacgccacaagatggacaaggaaatcaacaacagaacttgtgaagtgatcaaggatggaagattcaaagtggcgaagtggaaagaaatccaggtcggcgatgtgatccgcctgaagaaaaatgacttcgtccctgcagatatcctcctcctgtcctccagcgaaccgaacagcctgtgttacgtggaaaccgccgagctggacggagaaactaatctcaagttcaagatgtcactggagatcactgaccaatacctccagcgcgaggacactcttgccactttcgatggcttcatcgaatgcgaagaaccgaacaaccgcctggacaagtttaccggaaccctcttttggcgcaacactagctttcctctggacgccgataagatcctcctccggggatgcgtcatcagaaacacggacttctgccacgggctggtgatcttcgctggagcagatactaagattatgaagaactccggaaaaaccagattcaagcgcaccaaaatcgactacctgatgaattacatggtgtataccatcttcgtggtgctgatcctcctgtcagcaggccttgcgattgggcatgcctactgggaggctcaggtgggcaacagcagctggtacctgtacgatggagaggacgacaccccgtcctatagagggttcctgatcttttggggctacattattgtcttgaacactatggttcccataagcctttacgtctcggtcgaagttatccggttgggacaatctcatttcatcaattgggatttgcagatgtactacgcggaaaaagacacccctgctaaggcgagaactacgactctgaacgaacaactcggacagatccactacatcttctccgacaaaaccggtactctgactcagaacatcatgacttttaagaagtgctgcatcaacggacagatctatggagatcatcgagacgcttcacagcataaccacaacaagatcgagcaggtggacttctcatggaacacgtacgccgacggaaagctggcgttctacgaccattaccttatcgaacagatccaatcgggaaaagaaccggaggtgcgccagtttttcttcttgctggccgtctgccatactgtcatggtggatagaactgacggacagctcaactaccaggccgcttccccagacgaaggagcactggtgaatgcagctcgcaacttcggatttgcgttccttgcacggacccagaacactatcactatctcagagctcggcaccgaacgcacttacaatgtgctggcaattctcgacttcaactccgaccgaaaaagaatgtcgatcattgtgcggacgcctgaggggaacatcaagctctactgcaagggagcagataccgtgatatacgagcggcttcacaggatgaacccgaccaagcaagaaactcaggacgctctggatatcttcgccaacgaaactctgcgaacgctgtgcctctgctacaaggagattgaggaaaaggagtttaccgaatggaacaaaaagtttatggccgcctccgtcgcctccactaatcgcgacgaggctctggacaaggtgtacgaggagatcgagaaggacctcatcctgctgggagctaccgctattgaggataagctccaggacggtgtgcctgagacgatctcgaagttggctaaggcagacatcaagatctgggtgctgaccggtgacaagaaggagactgcagaaaacattggcttcgcctgcgaactgctgaccgaggacactaccatctgttatggggaagatatcaactcactgctccatgctagaatggagaaccagagaaaccgcggtggcgtgtacgccaaattcgccccgccggtgcaagaatctttcttcccgcccggcgggaaccgagcgctcatcattacgggatcatggctgaatgaaattctgctggaaaagaaaaccaaacgaaacaagatcctgaagctgaagttcccgcgcactgaggaagaacggcgcatgaggactcaatcgaaaagacgacttgaagcgaagaaagaacagagacaaaagaacttcgtagacctcgcctgtgaatgcagcgccgtgatctgttgcagagtgacgccgaaacaaaaagctatggtcgtcgacttggtcaaaagatacaagaaagccatcacccttgcaatcggggatggagcaaacgatgtgaacatgatcaagacggcacacattggagtgggaatctcaggacaggagggaatgcaggcggtgatgtcatcagactactcattcgcacaattccgctacctgcaaagactgctcttggtccatggcagatggtcttatatccgcatgtgtaagttcctcaggtactttttctacaagaatttcgctttcacgttggtccatttctggtactcgtttttcaatggttactccgcccaaaccgcctacgaggactggttcatcaccctgtacaatgtcctttacacctccctgccagtgctcctgatgggtctgctggatcaggatgtgtccgacaaactctcccttcggtttccgggcctctacatcgtgggccagcgcgacctcctgttcaactacaagcggttcttcgtgtctctgctgcatggagtcctgacgagcatgatcctgttcttcattcctctgggagcttacctgcaaaccgtcgggcaggacggagaagcaccgagcgattaccaatcttttgcggtgaccatcgcatctgcactggttattaccgtgaatttccaaatcggactcgataccagctactggaccttcgtgaatgctttctctatcttcggaagcatcgcgctgtacttcggaattatgttcgacttccactcagcaggcatccacgtgcttttcccttcagccttccagttcactggaaccgcctcgaacgcattgcgccagccttacatctggctgactattatcctggccgtggcagtgtgtctgctccccgtggtcgcgattaggttcctttcaatgaccatctggcctagcgaatccgacaaaatccaaaagcaccgcaagcggcttaaggccgaggaacagtggcagcgccgccagcaagtgttccgcaggggagtgtcgacccgcagatccgcctatgcgttcagccaccagcggggctacgccgacctcatttcatcggggcggtccatccgcaagaagcgctcaccattggatgcaatcgtggcagatggcactgccgagtacaggcgtaccggtgactca

SEQ ID NO: 318881 - DNA, 3753 bp, Artificial Sequence
  derived and/or modified sequence
atgagcactgaacgagattcagaaactacttttgatgaggatagccagcccaacgatgaggtcgtcccgtactccgacgacgaaactgaggacgaactcgatgatcagggatcagccgtggaacctgaacaaaacagggtcaaccgagaagcagaagagaatcgtgaaccatttagaaaggagtgtacttggcaagttaaagcaaacgatagaaaataccacgaacaacctcatttcatgaacactaagttcctgtgcatcaaggaatcaaagtacgcaaacaacgcaattaagacttacaagtacaatgcatttacgtttattccaatgaacctttttgaacagtttaaacgcgcggctaacctgtactttctggcattgctgattttgcaagccgttcctcaaatttcgactctggcctggtataccactcttgtgccattgctcgtggtccttggcgtcactgcgattaaggatcttgtggatgatgtggcccgccataagatggataaggagattaacaataggacctgtgaagtgattaaagatggaagatttaaggtggcaaagtggaaagagattcaggtcggcgacgtgattagactcaagaaaaacgatttcgtccccgccgacattctgctcctctcgtcctcagaaccaaactccctttgttacgtggaaaccgcagaattggatggcgaaaccaatttgaagtttaagatgtcactggagataactgatcagtaccttcaacgagaggataccctggcgacttttgatggattcatcgaatgcgaagaaccgaataacagactggacaaattcactggtaccttgttttggcgcaatacttcgtttccgctggatgcggataagattcttcttcgcggatgtgtcatacgaaacactgacttttgtcacggacttgtcatttttgcaggagcagacaccaagattatgaagaactcgggcaagacgagattcaagcgcactaagattgattacctgatgaactacatggtctacaccatcttcgtggtgcttattcttcttagcgcaggtttggcaataggccacgcctactgggaagctcaggtgggtaacagctcatggtacctgtacgacggagaagatgataccccatcctaccgtggattccttatcttctgggggtacattatcgtcctgaacaccatggtgcctattagcctgtacgtgtcagtggaagtgatacgactgggccaatcccatttcataaactgggatcttcaaatgtactacgcagagaaggacactcccgccaaagcacggaccactacccttaacgaacagctgggacagatacattacatcttttccgataaaaccggcactctgacccaaaacattatgaccttcaaaaagtgctgtattaacgggcaaatctacggcgaccatagagatgcatcacaacacaaccataacaagattgaacaagtggatttttcttggaatacttacgcagatggaaagctggctttttacgatcactacctgattgagcaaatccaatccggaaaggaacctgaggtccggcaattcttcttcttgctggcagtctgccataccgtgatggtggacaggactgatggacagctcaactaccaggcagcatcccctgacgaaggagcactggtgaacgcagcaagaaactttggttttgccttcctcgcaagaactcagaatactatcactattagcgaactgggaaccgaaaggacctacaacgtgttggccattcttgatttcaatagtgaccggaagagaatgtcgatcatagtgcgtaccccagagggaaacattaagctgtattgcaagggtgccgacaccgtgatttacgaacgtctccaccgaatgaatccaaccaagcaggaaacccaagacgcactcgacattttcgcgaacgagacgctgcgcactctttgtctgtgttacaaggaaattgaggaaaaagaatttaccgaatggaataagaagtttatggcagcctcagtcgcaagcactaatagggacgaggccctggacaaggtgtacgaagaaatcgagaaggatctgatcctgctgggagcaaccgccatcgaagataaactgcaagacggtgtgccagaaactattagcaaacttgctaaggcggacataaagatctgggtgctgacgggagacaagaaggagactgctgaaaacatcggattcgcctgtgaactcctgactgaggacactaccatttgctacggtgaggacatcaatagccttctccatgcccgaatggaaaatcaaaggaaccgcggtggagtttacgcaaagtttgctcctcccgtccaggagtcgttctttcctcccggcgggaaccgggccctgatcatcaccggctcatggcttaatgagatactgctcgagaagaaaactaagagaaataagatacttaaacttaagttcccgagaactgaagaggaacgcagaatgaggacgcagtcgaagagacgccttgaggcaaagaaagaacaaagacaaaagaactttgtcgatctcgcctgcgaatgtagcgcggtgatctgctgtcgcgtcacgcctaagcaaaaggcaatggtggtggaccttgtgaaacgctacaagaaggccatcacccttgccataggtgacggcgcaaacgacgtcaatatgattaagactgcacatataggagttggaatctccggccaagaaggcatgcaagccgtcatgtcctcagattacagctttgcccaatttagataccttcagcggctcttgttggtgcacggcagatggtcctacattcggatgtgtaagtttctccgctacttcttttacaaaaactttgcatttacgctcgtccatttttggtactcgttctttaatgggtactcggcccagaccgcctacgaagattggtttatcactctgtataacgtgctctacacgtcactcccagtgctgctcatgggcctcctggaccaggatgtctccgacaaactcagcctccggtttccaggactctacattgtggggcagcgggatcttcttttcaactacaagagatttttcgtctccctgcttcatggtgtcctgacttccatgatcctgttctttattccactgggcgcgtacctgcagaccgtggggcaagatggtgaagcaccttccgattaccagagctttgcagtcacgatcgcatcggcgctcgtcattaccgtgaacttccaaatcggacttgacacctcgtactggacttttgtgaacgcgttttccatctttggatcgattgcactgtactttggcatcatgtttgatttccactctgccggaattcatgtccttttcccctccgcttttcagttcaccggcactgcaagcaatgcgctgcgccagccctacatttggcttactattatccttgcagttgccgtctgtctgctcccggtggttgcaataaggttcttgtcgatgaccatttggccatccgaatccgataagattcaaaagcatcgaaagcgcctgaaggcagaagaacagtggcagcgcagacagcaggtgtttaggaggggagtgagcacccggcgctccgcatacgcatttagccaccagcgcggatacgcagacctgatcagctccgggcgatcaatcaggaaaaagagatcgccactggatgcaattgttgctgacggaactgccgaataccgccgaactggcgactcc

SEQ ID NO: 318882 - DNA, 3753 bp, Artificial Sequence
  derived and/or modified sequence
atgtctaccgaaagagactcggaaaccactttcgatgaggattcacagccaaacgacgaagtggttccgtactcagatgatgagactgaagatgaactggacgatcagggatcagccgtggaacctgaacagaaccgcgtgaacagggaagcggaagagaacagggagccgttccggaaggagtgcacttggcaggtcaaggcaaacgacagaaaataccacgagcagccgcactttatgaatactaaattcctgtgcatcaaggagtcaaagtacgcgaataacgccatcaagacttacaagtacaacgcattcaccttcatcccgatgaatcttttcgagcagttcaagagggcagcaaatctgtacttcctggcgctcctgatcctgcaggccgtgccgcagatctcgactttggcatggtacaccacgctcgtcccgctgctggtcgtcctcggagtgactgcgatcaaggatctggtggatgatgtggcacggcacaagatggataaggaaatcaataacagaacttgcgaggtgatcaaggacgggcggttcaaagtagcgaagtggaaagaaatccaggtgggcgacgtgatcagacttaagaagaacgactttgtcccggcagacatcttgcttctgtcctcctcagaacctaactccttgtgttacgtggaaaccgcagaactggatggagagactaacttgaagttcaagatgagcctggaaatcaccgatcagtacctgcaaagagaggatactctcgctacctttgatggattcatcgagtgtgaggagcctaacaatcggctggataagtttactgggaccctcttctggagaaacactagcttcccgctggatgcggacaagatcctcctgagggggtgtgtgatcaggaacactgatttttgccacggactggtgatcttcgcgggcgctgacaccaagatcatgaaaaactcaggtaagacccggttcaagcggacgaaaattgattacctgatgaattacatggtctacaccattttcgtggtgctcatcctcctcagcgccggactggctatcggacatgcctactgggaagcacaagtcggtaactcatcttggtacctgtacgatggcgaggacgataccccttcctatcggggattcctgatcttctggggatacatcatcgtgctgaatacgatggtgccgatctccctgtacgtctcagtcgaagtgatccgcctgggccaaagccactttatcaactgggacctgcaaatgtattacgctgaaaaggacactcctgcaaaagctagaacgacgactctgaacgagcagttgggccaaatccattacatctttagcgataagactggaactctgactcaaaacattatgactttcaagaagtgctgcatcaacggacagatttacggcgaccatagggacgcctcgcagcataaccacaacaagatcgaacaggttgatttttcgtggaatacttacgctgacgggaagctcgccttctacgatcactacctgatcgaacagatccagtccggaaaggagccagaggttcgccaattctttttcctgctggccgtgtgccacacggtgatggtggatagaaccgacgggcaactgaactaccaggcggcatcgccggacgaaggggcgcttgtgaacgccgcacgaaatttcggattcgcattcctggcgcggacccagaacactattaccatcagcgagcttggaactgagcgcacctacaacgtgctcgccatcctggacttcaattcggatagaaagagaatgtccatcatcgtgaggacgcctgaggggaacatcaagctctactgcaaaggggctgacaccgtgatctacgaacgattgcaccggatgaatccgaccaagcaggaaacgcaggatgccctggacatcttcgcaaatgaaactctgcggacgctgtgtctgtgctacaaggaaattgaagaaaaggaattcacggagtggaacaagaagtttatggcggcatcggtggcatcgactaatagagatgaagcccttgacaaagtgtacgaagagatcgaaaaggacctgatcctccttggcgccaccgccattgaggacaagctgcaagatggagtgccagaaaccatctccaaactggccaaagccgacatcaaaatctgggtcctcaccggagacaagaaggagactgccgagaatatcgggtttgcttgcgagctgctcaccgaagatactactatttgctacggagaggacatcaattccctcctgcatgccagaatggaaaatcagagaaaccgcggaggagtctacgccaagttcgccccacctgtccaagaatcgttttttccccccggaggaaatagggccctcatcatcactggcagctggctcaacgaaatcctgctggaaaagaaaacgaaaagaaacaaaatcctcaagctcaagtttcctcgtactgaagaggaaagacgcatgagaacgcagtccaaaaggcggctggaagcgaagaaggagcagagacagaagaatttcgtcgatctggcgtgcgaatgctcggcagtgatctgctgccgcgtgaccccaaagcagaaggcgatggtcgtggatctggtgaagcgctacaaaaaggctatcacgttggctatcggggacggagccaatgacgtcaacatgatcaagaccgcccacatcggagtgggtatcagtggtcaagaggggatgcaagctgtgatgtcctcagactactcattcgcgcagtttcgctatctgcagagactgctgctggtgcacggacggtggtcttacatcagaatgtgcaagttccttcggtacttcttctacaagaatttcgccttcactctggtgcatttctggtatagctttttcaacggatacagcgcgcaaaccgcttacgaagattggttcattaccctctacaacgtcctgtacacctcactgccagtgctcctgatgggactcctcgatcaggatgtgtcagacaagctctctctgcgcttcccgggactttacatagtgggacaacgggacctgctgttcaactacaagcgcttctttgtgtcgttgctgcatggagtgctgaccagcatgatcctgttcttcatcccacttggagcgtacctgcagactgtgggacaggacggcgaagccccaagcgactatcagtcattcgccgtcactatcgcgtcggcattggtcattaccgtgaattttcagattggcctggacacctcgtactggactttcgtcaacgcgttcagcatcttcggctcgatcgcgctgtacttcggaatcatgtttgacttccatagcgccggcatccacgtgctctttccaagtgcctttcaattcactggcactgcatccaacgccctgagacagccgtacatctggctcactatcatcctcgccgtcgcggtctgtctgctgccagtggtggcaatcaggttcctgtccatgactatctggccatccgagtctgacaagatccagaagcaccggaaacggcttaaggccgaagagcaatggcagaggcgccaacaagtgttcaggcggggagtctcaactcgcaggtccgcctacgctttctcgcatcagaggggctacgccgatctcatctcctcgggacgctcgatccgcaagaagaggtcccccctcgacgcgatcgtcgcggacggaactgccgaataccgccgcactggtgacagc

SEQ ID NO: 318883 - DNA, 3753 bp, Artificial Sequence
  derived and/or modified sequence
atgagtactgagagggactctgagaccacgtttgatgaggactcgcaacccaacgatgaggtggtaccgtactccgatgatgagactgaggacgagcttgatgatcagggatcagcagtggagccagagcaaaatagggtgaaccgcgaggcggaagagaacagagagcctttcagaaaggaatgtacttggcaggtcaaggccaacgatagaaaatatcatgagcagccgcattttatgaacaccaagttcctttgcatcaaagagagtaaatacgcgaataacgctattaaaacctacaagtataatgctttcacctttatccctatgaacctgttcgaacaatttaagagagcagctaatctctatttcctagcactcctaatcctgcaagcagtaccgcaaatttcaacgttggcgtggtacaccaccctggtccctttgctcgtcgtccttggagtgaccgctatcaaggacctcgttgatgacgttgcaagacacaagatggataaagagattaataaccgcacttgcgaagtgattaaagacggaagatttaaggtcgccaagtggaaggagatccaagtcggtgatgtaatcagactaaagaagaacgatttcgtccccgcggacatattgttgctctccagctctgaaccaaactcgttgtgttatgtcgagaccgccgaattggatggtgagaccaacctcaaattcaaaatgtcactggagatcacggatcaatatcttcagcgggaggacactctggccacttttgacggctttattgaatgcgaggagccaaataaccgtctcgataagttcaccggaactcttttttggaggaatactagcttccccttagacgccgataagattctgttacgggggtgtgtaatcagaaacacagatttctgccacggcctggtgatatttgcaggtgctgacactaagattatgaagaatagtgggaagacgcgtttcaaaaggactaagatcgactaccttatgaactatatggtgtacaccatttttgtagtccttattcttctatctgccggcctggcgattgggcacgcctattgggaagctcaggttggtaattcttcttggtacctgtacgatggggaggatgacaccccctcctacaggggtttcctgatcttctggggttacatcatcgttctaaacaccatggtacctatcagtttgtatgtttcggtcgaagtgatccgactcggtcagtctcattttattaactgggatcttcaaatgtattatgcggagaaagataccccggccaaagcccgtacaaccacacttaatgagcagctgggtcagattcattatatcttctcagacaagacaggtacacttacacagaacataatgacgtttaagaagtgctgtattaacggccagatttacggcgatcatcgcgatgcctcccagcacaatcacaataaaatcgagcaggtggacttcagctggaacacctatgcagatggtaagctcgccttctacgaccactatctcatcgagcagattcaatccggtaaagaaccagaagtgcgacagtttttcttccttcttgccgtgtgtcacacagtgatggttgaccgtacggacggtcagctcaactatcaggctgcttctccggatgaaggagcacttgtcaatgctgcccgcaatttcggtttcgcttttttggctcgaactcagaataccattacaatttctgagcttggtactgaaaggacctataacgtgctcgccattctcgacttcaactcagataggaaaagaatgtccatcattgttcggaccccagaaggtaacatcaagctgtattgtaagggtgctgatacggttatctatgaaaggctgcacaggatgaatcctacaaagcaggaaacccaggatgcactagacattttcgcgaacgaaacattgcgaacgctctgcctttgctacaaagaaatcgaagaaaaggagtttaccgagtggaacaagaagtttatggctgcctctgtggcatcgacaaatcgcgacgaagcgttggataaagtctacgaggaaatagagaaggacttaattttgctcggcgccacggccatcgaggataaactgcaagacggagtccccgagacgatttcgaagttagccaaagcggacataaagatctgggttcttacgggcgacaagaaagagacggcggagaacatcggttttgcttgtgagcttctgacagaagatacgacaatttgttacggggaagacatcaactcgctgcttcatgcgcgtatggaaaatcagcgaaatcgcggaggtgtttatgctaagttcgcacctccagtccaagaatctttcttccctcccggtggcaaccgggctcttatcatcaccggttcttggctgaatgaaatcctcttagagaaaaagacaaagagaaacaaaattctcaagctgaagttcccacgaactgaggaggaacggcgtatgagaactcagtcaaaaaggcggcttgaagctaagaaggaacagcgacagaagaactttgtggacctcgcttgtgagtgctccgccgtgatttgttgtcgagttacccctaagcaaaaggccatggtcgttgacctcgtcaagcgatacaaaaaggctataacactagcaattggggacggagccaacgacgttaatatgatcaagacggcgcatataggagtcggtattagcggacaagaaggcatgcaagctgtaatgagcagtgattattcgtttgcgcagttccgttacctccaaagactactgttggtacatggtaggtggtcgtacattcgcatgtgcaaatttctccgctactttttctacaaaaattttgccttcaccctagtacatttctggtattctttctttaatggctattctgcgcagacagcctacgaagattggttcattacgctctataacgttctttacacctccttgcctgtgcttttgatggggttgctcgatcaggacgttagcgacaagctttcgctacgcttcccgggattgtatatcgttggacaacgtgatttacttttcaactacaagcgtttcttcgtttcattactccatggagtcttaacgtctatgatcttgttcttcatcccgcttggagcttacttgcaaaccgtcggtcaagacggcgaggccccttctgattaccaatccttcgccgtgacgatcgcttctgcccttgtgatcactgtcaatttccagatcggactggacacgagctactggacttttgtaaatgcattttcaatattcggcagcatcgctttatactttggtatcatgttcgactttcattcagccgggattcatgtgctattcccttctgcatttcagttcactggtactgcctctaatgcgctgcggcagccctacatctggttgaccatcatcctggccgtggccgtctgtcttttaccggtcgtggccatccgctttctgtccatgacaatctggccctcggagtccgacaaaatccagaagcatcgtaagcggttgaaggcggaagagcagtggcaacggagacagcaagtatttcgtcgtggcgtctctacccgtcggagcgcatatgcgttctcacaccaaaggggttatgcagacctaattagttcaggtcgtagcatccggaagaagaggtccccccttgacgctattgttgctgacggcacagccgagtaccggcgtaccggtgactcc

SEQ ID NO: 318884 - DNA, 3753 bp, Artificial Sequence
  derived and/or modified sequence
atgtcaaccgagcgggactcagaaacaactttcgacgaagactctcagcctaatgatgaagttgttccatattctgatgatgaaactgaagatgaattggatgatcaaggatctgccgtagaacccgagcaaaaccgagtcaatcgagaagctgaggaaaatcgtgaaccatttagaaaggaatgcacttggcaagtgaaagcaaatgaccggaaatatcatgagcagccccactttatgaacacaaagtttctatgtattaaagaatcaaaatatgctaacaatgccattaagacttacaagtacaatgcatttactttcattccaatgaatttgtttgagcaattcaagagagcagcgaatctttacttcttggcattgcttattcttcaagctgtaccacagataagtacgctcgcatggtatacaacactagtgccattgttagttgttctcggagtaacagctataaaggatttggttgatgatgttgcaaggcacaaaatggataaagagattaataaccgaacatgcgaagtgatcaaagacggaagattcaaagtagcgaagtggaaagaaatccaagttggagatgtcattcgactgaaaaagaatgattttgtaccagctgatattcttctgcttagtagttcagagcctaattctctctgctacgtcgaaactgcggaactcgatggagaaacaaatttgaaattcaaaatgtcgctagagataacggaccaatatcttcagcgtgaagatacactcgctacatttgacggattcatcgaatgcgaagaaccaaataatcgactcgacaagttcacaggcacattgttctggaggaatacaagtttcccactggatgctgataagatattattacgtggatgtgttattcgtaatactgatttttgtcatggattggtcatctttgcaggtgccgatactaaaattatgaagaatagcggtaagacacgcttcaagagaactaaaatcgattacctcatgaactacatggtctacactattttcgttgtcctcatattattatctgcaggactggcaatcggacacgcttattgggaagcgcaagttgggaattcttcttggtacctttacgatggagaagatgatacaccaagttatagaggcttccttatcttttggggatatattatcgtacttaacacgatggttcctataagcttgtacgtatccgtggaagttattcgcctaggacaatcgcacttcatcaactgggatctccaaatgtactatgctgagaaagacaccccagctaaggcacgaacaacgacccttaacgaacaactggggcaaattcactatattttttcggataagacgggaactttgacccagaatattatgacgttcaagaagtgttgcatcaatggacagatttacggcgatcatcgcgacgcctcgcaacacaaccataacaaaattgagcaggtcgacttcagttggaatacgtacgctgatggcaaactcgcattctatgatcattacttgatcgaacagattcagagtggaaaagagcctgaagtaaggcaattcttcttccttcttgcagtatgtcacactgttatggtggataggaccgatggacaacttaattaccaagcagcaagtccagatgagggagcactagttaacgcagctcggaatttcggattcgcgttccttgcacgaacacagaatacaattactatatcagagttgggaacggaaagaacttacaacgtacttgcgatcctcgatttcaattccgatagaaagcgtatgtcaatcatcgttcggacaccagaaggtaatatcaagttatattgtaaaggagcagacaccgttatatatgaacgtttgcatcgaatgaatcctacgaagcaagaaacacaagacgcactagatattttcgctaatgagactttgaggaccttgtgtctctgctacaaagaaatagaggagaaggaattcactgagtggaataaaaaatttatggctgcatcggtagcaagcactaacagagacgaagccttggataaagtttatgaggaaattgaaaaggacctcatcttgttaggtgctaccgcaattgaggacaaacttcaagatggagtacctgagacaatttctaaacttgccaaggcggacataaaaatttgggtactgaccggtgataaaaaggagactgcggagaacattggatttgcatgcgagctactaactgaagacacaacaatttgctacggagaggacatcaactcattactccacgccagaatggaaaaccaacgaaatcgcggaggtgtttatgctaaatttgctccaccggtacaagaatcattcttcccgcctggtggaaatagagcgttgattataactggatcgtggctaaatgagatactcttggaaaaaaaaactaaaaggaataagatactgaaactcaaattcccacgaaccgaggaagaaagaagaatgagaacacagtcaaaacggagactggaggctaaaaaggaacagagacagaaaaattttgttgatttggcttgcgaatgttccgcagttatctgctgtagagttacaccaaaacaaaaagctatggttgttgacttggtgaaacgatataaaaaggctataactctcgcgattggagatggagcaaacgatgttaatatgattaagactgctcacatcggagttggtatttctggacaagaaggaatgcaagccgttatgtcatctgactacagcttcgcccaattccgctatttacaacgtctattattggtgcacggacgatggtcatatattagaatgtgtaagttcctccgatacttcttctataaaaacttcgcattcaccctggtacatttttggtacagctttttcaatggctatagtgcacaaacagcttacgaggattggttcatcactctctataatgttctttacacatcactgccagttcttctcatgggtttacttgatcaagacgtttcggataagctctcacttcgatttccaggactttatattgtcgggcaaagggatcttctatttaattacaaaagattcttcgttagtttgctgcacggagttctgacttccatgattctcttttttatcccgttgggagcatatcttcagacggtgggtcaggatggtgaggcaccaagtgattaccaatcattcgctgtgaccattgcgagtgctttggtcattacagttaattttcaaataggcttggacacttcgtactggacattcgttaacgctttttccatttttggatcaatcgccttatactttgggatcatgtttgatttccacagtgctggcattcatgtcctatttccatcagcctttcagttcactggaactgcttctaacgcccttaggcaaccttatatttggttaactatcattcttgctgtggctgtgtgcctgctcccagtcgttgcaatcagatttttgagtatgacaatttggccttcggaatctgataaaatccaaaaacaccgcaagcgtttaaaagccgaggaacagtggcagcgtagacaacaggttttcagacgaggagtgtcaacccgacgaagtgcctacgccttctcacatcaacgaggttatgcggacttaattagttcgggacggtcgattcgtaaaaagcgttcccccctcgacgccattgtcgcagatggtaccgccgaatatagaagaactggcgattca

SEQ ID NO: 318885 - DNA, 3753 bp, Artificial Sequence
  derived and/or modified sequence
atgtcgaccgaaagagattccgaaacgacctttgatgaggattcccagccgaacgatgaggtggtgccatattcggacgacgaaaccgaggacgaactggatgatcagggaagcgccgtggaacccgaacaaaaccgggtcaaccgcgaggcagaagagaacagagaaccgttccggaaggaatgcacttggcaagtgaaggccaacgaccggaagtaccacgaacagccgcatttcatgaataccaaattcctttgcattaaagagagcaagtatgccaacaatgccatcaagacctacaaatacaatgcattcaccttcatccctatgaacctgtttgaacagttcaagcgcgcggccaatctgtatttcctggctcttctcatcctccaagcagtgccacaaatctccactctcgcctggtatactaccctggtcccgctgctcgtcgtgctgggcgtcactgcgatcaaggatctggtggacgacgtggccagacataagatggataaggagatcaacaatcgcacctgcgaagtgatcaaagatggccggtttaaggtcgctaaatggaaagaaatccaagtgggggatgtgatcaggctcaagaagaatgatttcgtgcctgctgacatcctccttctctcctcaagcgagccgaattcgctctgctacgtcgagacggcagaactcgacggagaaaccaacctgaagttcaagatgtccctggaaatcaccgaccagtaccttcagcgcgaggatactctggctaccttcgacgggttcatcgaatgtgaagagccgaacaaccgcctggacaaattcaccggcactctcttttggcggaacacctcttttcctctcgacgcagacaaaattctgctgcggggatgcgtcatcaggaacactgacttctgccacggcctggtcatcttcgcgggggcagataccaagatcatgaaaaactccggcaagacgagattcaagagaactaaaatcgactacctcatgaattacatggtgtacactattttcgtggtccttatcctgctgtctgctggactggctattggccacgcgtactgggaggcccaggtcggcaattcgtcctggtacctctacgacggagaggatgatactccaagctatagaggttttcttatcttttgggggtacatcatcgtcctgaacactatggttcctatctccctctacgtgtcagtggaagtgatccgcctggggcagtcgcacttcatcaattgggacctgcaaatgtactacgccgagaaggataccccggcaaaggccagaactactacgctgaacgaacagctgggacagatccactacattttttcagacaagaccggaacgcttactcaaaatatcatgaccttcaagaagtgttgcatcaatggccaaatctacggcgaccaccgcgatgcatcacagcataatcacaacaagatcgaacaagtagacttctcctggaacacttacgcagatggtaagctggcattttacgatcattacctcattgagcaaatccagagcggaaaagaacccgaggtgaggcagttctttttcctgcttgcggtgtgccacactgtcatggtggaccgtactgacggccagctgaactaccaggccgcgtcaccagacgaaggagctctggtcaacgccgcgcggaacttcggattcgcgtttttggctcggactcagaacaccatcacgatcagcgagctgggaacggaaaggacctacaatgtcctggctattcttgacttcaactcagaccgcaagcgcatgagcatcatcgtgcgcaccccagaaggaaacatcaagctctactgcaagggagccgacaccgtgatttacgaaagactccatcggatgaaccctaccaaacaagaaactcaggatgcgctggacatcttcgccaatgagactttgcgcaccctgtgcctctgctacaaggagatcgaagaaaaggagttcaccgaatggaacaagaagttcatggctgcctcggtggcctccaccaatcgggatgaggctctggacaaagtctacgaggaaattgaaaaagacctcatactcctgggagcaactgccatagaggataaactgcaggacggtgtgcccgaaaccatcagcaaactggccaaggcggacatcaaaatctgggtgctgactggagacaagaaagaaaccgccgaaaacattggattcgcctgtgaattgctgaccgaggacactaccatctgttacggtgaagatatcaattcgctcctgcacgcgcgcatggagaatcagcggaacaggggaggggtgtacgccaagttcgcccctcctgtgcaggagagctttttcccgccgggaggcaacagggcgcttatcatcactggtagctggttgaacgaaatcctgctggaaaagaaaaccaagcgaaataagatcctgaagctcaaatttccgcgcactgaagaggaacggagaatgagaacccagtcaaagcgccgattggaggcgaagaaggagcaacgacagaagaatttcgtggatctggcttgcgagtgcagcgcggtcatctgttgtagagtcactccgaaacagaaagcgatggtggtggacctcgtcaagcggtacaagaaggccattaccctcgccatcggagacggcgcaaacgacgtgaacatgatcaagaccgctcatattggagtgggaatctcaggtcaggagggcatgcaggcagttatgtcgtcagactatagtttcgcccagttccggtatctgcaacggctcctgctcgttcatggacgctggtcctacattagaatgtgcaagttcctgaggtacttcttctacaaaaacttcgccttcaccctcgtccatttctggtactcattctttaacggatactccgcgcaaacggcgtacgaggattggttcatcactctgtacaacgtgctttacacctcgcttccagtgctgctgatgggactcctggaccaagatgtgtcggacaagttgtccctgaggttcccgggcctgtacattgtcggtcagagggacctcctcttcaattacaagcgcttcttcgtgtccctcctccacggagttctgactagcatgattttgttttttatcccgctgggggcgtacttgcaaacggtgggacaagacggggaggccccgagcgattaccagtccttcgccgtgactatcgcatcagcgctggtcatcactgtgaacttccagatcggactggacacctcgtactggacctttgttaatgctttttcgatctttgggtctatcgcactctacttcggaatcatgttcgacttccactcggcgggaatccacgtgttgttcccctcggcattccagttcactggcactgcctccaacgccttgcggcagccctacatctggctgactatcatcctggcagtggccgtgtgcctgttgccagtggtggccatccggtttttgtcaatgaccatttggccaagcgagagcgacaagatccaaaagcaccgcaagagactgaaggcggaagaacagtggcaacgtcgccagcaggtatttcgccggggagtgtcaacgcggcggtccgcctacgccttctcccatcaacgcggatacgctgatctgatctcgtcggggcgctcgattcgcaagaaaagatccccactcgatgctatcgtcgccgacggtaccgcagagtaccgccgaaccggcgattcg

SEQ ID NO: 318886 - DNA, 3753 bp, Artificial Sequence
  derived and/or modified sequence
atgtccacggaaagagactcggagacaactttcgatgaggacagccagcccaacgacgaagtggtgccctatagtgacgatgaaaccgaagacgaactggatgaccagggtagcgccgttgagccagaacagaatcgtgtgaaccgggaggccgaggaaaacagagagccatttcggaaagagtgcacctggcaagtcaaggcaaacgaccgcaaatatcacgagcagccgcattttatgaacacaaagtttttgtgcatcaaggaaagcaaatatgctaacaatgcaatcaagacttataaatacaacgccttcacttttatcccgatgaacctgtttgagcagtttaagcgagctgcaaacctgtattttcttgcactgctgattctgcaggccgtcccccagatctcgacattagcttggtatactaccttagtccccctgcttgtagttctgggcgtgacagccatcaaggacttggtcgacgatgtggccaggcacaagatggacaaagaaataaataaccggacctgcgaagtcataaaggatgggcgcttcaaggtggccaaatggaaggagatacaggtaggcgatgtgatccgacttaagaagaatgattttgtgcccgctgacatactcctgctgagttcatccgaaccgaattctctgtgctacgttgagacggccgagctggacggagagaccaatttaaaatttaaaatgtctcttgagatcactgaccagtacctgcagcgagaagataccctggctacattcgatggcttcattgagtgcgaggagcctaacaacaggcttgataagttcacaggcaccctgttctggaggaacacttccttcccattagatgctgacaagatcctgctgcggggctgcgtgatcagaaacacagacttctgtcacggactggtcatttttgccggtgccgacacaaagataatgaagaacagcggcaagacaaggttcaagcggacgaaaattgactacttgatgaactatatggtgtacaccatttttgtggtcctgatacttctaagcgccggcctcgcgatcggccacgcttattgggaggctcaggtgggcaacagttcttggtatctgtatgacggcgaagacgatactccatcctatcggggcttcttaatcttttggggatacataattgtgctgaatactatggtaccgatatccctctatgtaagcgtcgaggtgatcaggctgggtcagtcccattttatcaattgggatctgcagatgtactatgccgaaaaggatacccccgccaaggcccggacgaccaccttgaatgaacagctcgggcagatccactatattttcagtgacaaaacaggtacattgacacaaaatattatgacttttaaaaagtgctgcataaacggacagatttacggggaccacagggacgctagccagcacaaccacaacaaaatcgaacaggtggacttttcctggaacacttatgccgatggcaagctagcattttacgatcactacctgatcgagcagatccaatcaggaaaggagccagaagtgcgtcagttcttctttctactggcagtctgtcataccgttatggtggatcgcacagacggccagctgaactatcaggctgcgtcgcccgacgaaggcgccctagtcaatgctgcacgcaactttggatttgcgttcctggcacgcacgcagaacactatcacaatatcagagctgggcaccgagcgaacctataatgtcctcgctattctggacttcaactcagatcgtaaacgcatgagcattattgtgcggacaccagagggtaatataaaattgtattgcaaaggagctgatacagtgatatacgaacggttgcacagaatgaatcctacgaagcaggaaactcaggatgctctcgacatctttgctaacgagacgctcaggactctctgtctgtgttacaaagaaattgaagaaaaagaattcactgagtggaataaaaaatttatggcagcctctgtcgcgagcactaatagggatgaggcgttggataaagtgtacgaggagattgagaaggatctgattctacttggagctacagcgattgaagacaagctgcaggacggtgtgcccgagaccatctcaaagctggctaaggcagacatcaaaatctgggtactgaccggtgacaagaaagaaaccgcagagaatatcggatttgcttgtgagctactaacagaagatacaacaatctgctatggagaggatatcaactccttgctccacgcccgcatggagaatcagcgtaatcggggaggagtctacgcaaaattcgctccaccagtacaggaatcttttttcccaccagggggaaatagggcactgatcattacaggatcctggctgaacgaaattttgctggaaaagaaaacgaagcggaacaagatattaaagctgaaatttccgaggactgaggaagaaaggcgcatgcgtacacagtccaagcgtcgactagaggcaaagaaggagcagaggcagaagaacttcgtcgacctcgcatgcgagtgtagtgccgttatatgttgccgagtgacaccgaagcagaaagccatggtggtggatctggtgaaaaggtataagaaagccatcacactcgccattggcgacggagcgaacgatgtgaatatgattaaaacagcccacattggcgtcggcatcagcggccaggagggtatgcaggcagtgatgagtagtgactactcattcgcccaattcaggtatctgcaaagactgctcctggtgcacgggcggtggagctatatccggatgtgcaaatttctccgttattttttttacaaaaacttcgcgtttacattggttcatttttggtacagctttttcaacggctactcagctcagactgcttatgaggactggtttatcactctttacaatgtgctgtacacttccttgcctgtactccttatgggtcttctggaccaagacgtttctgacaaactgagtttacggttccctggcctttacatagtcggccagcgcgatctcctattcaactataagagatttttcgtgtccctccttcacggggtgcttacatcaatgatcctgttttttattcccctcggagcctatctgcaaacagtggggcaagacggagaggccccttctgactaccagtcgtttgcagttacaatagcaagtgcattagtaataacagtgaatttccaaatcggtctggatacatcttactggactttcgtgaacgcattttccatcttcggatctatcgctctttacttcgggatcatgttcgacttccactctgctggcatacatgtgttatttccaagcgcctttcagttcactgggacagcctccaatgcgttgcgacagccatacatctggttaacaatcattctcgccgtggccgtttgcctgcttccagtggtggccataaggtttttaagtatgaccatatggccctccgagagcgataagatacagaaacaccgaaaaagactgaaggctgaagagcagtggcagagaaggcaacaggtttttcggcggggagtatccactagacgctctgcctacgcatttagtcatcagcgcggttacgctgacctgatctcatcagggagaagtatcagaaaaaagcggagccccctggatgccattgtggccgatgggactgcagaatacagacggacaggtgactca

SEQ ID NO: 318887 - DNA, 3753 bp, Artificial Sequence
  derived and/or modified sequence
atgtcaaccgagcgcgatagcgaaacaacctttgacgaggattctcagcccaatgatgaagttgtgccttacagtgatgatgagactgaggatgaactggatgaccaaggctctgcagtcgaaccagagcaaaacagggtcaatagagaggccgaagaaaatcgcgaacccttcaggaaggaatgtacctggcaggtgaaggcaaacgatcggaagtaccacgaacagccacattttatgaacacgaagtttctgtgtatcaaggagtccaaatatgctaataatgcaattaaaacttacaagtacaatgcctttacttttattcctatgaacctttttgagcaattcaagagagcggctaatttatatttcttggctctgctgatactccaggccgtccctcagattagcacattggcctggtataccacgttagtccctctgctggtcgttctaggagtgaccgcgatcaaggaccttgtggatgatgtggcgagacacaaaatggacaaggagatcaacaatcgtacttgcgaagttatcaaggacggtcgctttaaagttgcaaagtggaaggagatccaggtcggggacgtcataagactcaaaaaaaatgatttcgtaccagcagatatccttctgttgtcgagtagtgagcccaattcactgtgttacgtggagacagcagagctcgacggagaaaccaacctcaagtttaagatgtccctggaaattactgaccagtaccttcaacgggaggacacgcttgccacattcgatggttttattgagtgcgaagagccaaataatcgcctggataagttcacaggcactcttttctggaggaacacgagctttcccctcgatgcggacaagatactcttgcggggctgtgtgatccgaaataccgacttttgtcacggactcgtgatttttgccggcgccgacacaaagatcatgaagaactctggtaaaactcggttcaagcggaccaagattgactacctcatgaactacatggtctatactatcttcgtggttcttatcctactgtctgcaggattggccatcggacacgcatactgggaggcgcaggtagggaattcctcttggtacctctatgacggagaagatgatactcccagctaccgcggttttctcattttttggggctacatcattgtactgaatactatggtgccgatctccctgtacgtgtctgtggaggtcattaggctgggacagagccatttcattaactgggatctgcaaatgtattatgcagagaaagatacaccagctaaggctcgcactacgaccctaaacgaacagcttggccagatccactatatcttctcagacaagacgggcactctgacacagaatattatgactttcaaaaaatgttgcattaacggacagatttacggagatcaccgggacgcctcccaacacaaccacaacaaaattgaacaagttgatttcagctggaacacatatgccgatggtaaactcgccttttacgaccattacttaattgagcagatacagagtgggaaggagcctgaggtgcggcagttcttcttcctgctcgccgtatgccacactgtaatggtggaccggactgacgggcagctcaactatcaggcagcatcaccggatgaaggggcactcgtgaacgctgctcgtaactttggattcgctttcctggctagaacccagaatactattacaatctcagaattagggaccgaaaggacatacaacgtgttggccatcctggactttaacagtgaccgaaagcggatgagtatcatcgtacgaaccccggagggaaacatcaagttgtattgtaaaggggcagatactgtgatttacgaacgattgcatcgtatgaaccccaccaaacaggaaacccaagacgccctggacatcttcgcgaatgaaacattgagaactctatgcctgtgttacaaagagatcgaggagaaagaattcaccgagtggaataagaagtttatggcggcctcagttgcctctaccaaccgggatgaggctctggataaagtttatgaggaaattgagaaggatttaatccttttaggcgctaccgcaattgaggataaattgcaggacggggtgcccgaaactatctccaagctggctaaagccgacatcaagatctgggtgcttaccggtgacaagaaggagacggccgaaaacatcggattcgcttgtgaactcctgaccgaggacaccacgatatgttatggagaggatatcaactctctcttgcacgcgagaatggaaaaccaacggaacaggggcggtgtgtacgccaagttcgctccacctgtccaggagtcctttttccccccaggcggaaacagggcgctgatcatcacaggaagctggttgaacgagatccttcttgagaaaaaaacgaaacggaataaaatcctaaaattaaagtttcctcggacagaggaagaacgaaggatgcggactcaatccaaaagacgcctggaggcgaaaaaggagcagcgccaaaaaaactttgttgacctagcgtgtgagtgctctgcagtgatctgttgtcgcgtcacccccaagcagaaggctatggtcgtcgacctggtgaagcgctacaagaaggccatcactcttgcaatcggagatggagccaacgatgtcaacatgataaaaactgcccacatcggggtaggtatctctggccaggagggcatgcaggctgtcatgagcagcgattattcttttgcccagtttcggtatctgcagcgcctgctgctggttcacggacggtggtcttacatccggatgtgcaaattcctacgatattttttctataagaacttcgcctttaccctcgtacatttctggtacagtttctttaatggctattccgcacaaacagcatatgaggactggtttatcaccctctataatgtcctgtacacgtctctgccagtgctgctgatgggacttttggaccaggatgtgagcgataaactgtcattgagattcccggggttatacatcgtgggccagcgggacctactttttaactacaagaggttttttgtgagtttactgcatggtgtgcttacgtcgatgattctcttttttattccattgggggcgtatctacagaccgtaggacaggacggggaagccccctctgactaccagagcttcgccgtcacgatcgcgagcgccctggttattactgtaaacttccaaattggacttgatacctcttactggacatttgtgaacgctttttcaatctttgggtctattgccctttacttcggcataatgtttgacttccattctgccggcatccacgtactgttcccaagcgcatttcagttcaccggaaccgccagtaacgcactgcggcagccgtatatttggctcaccataatcttggccgtggcagtgtgcctgcttccagtggttgctatccgctttctcagcatgactatatggccttccgagtctgacaagattcagaaacatcgaaaacggctgaaggccgaggagcagtggcagcgcaggcagcaagtgttcagacgaggcgtgtcaactcggaggtcagcttacgccttttctcatcagaggggttatgccgatttgatctcttccggaaggtcgataagaaaaaagcggtctcctctagacgcaatcgtggccgacggtacggctgaataccgtcggacaggcgacagc

SEQ ID NO: 318888 - DNA, 3753 bp, Artificial Sequence
  derived and/or modified sequence
atgtctacggagagggattctgagaccaccttcgacgaagactcgcaaccgaatgacgaggtcgtgccatactcagacgatgagaccgaggatgagctcgacgaccaagggtctgcagtcgaacccgagcaaaatagggtaaatagagaggctgaggagaaccgcgagccatttagaaaggagtgtacttggcaggtcaaagcaaatgataggaaataccatgaacaaccacactttatgaacacaaagtttctctgcattaaggagtctaagtatgccaataacgccatcaaaacgtacaagtataatgccttcacctttattcctatgaacttgttcgagcagtttaagagagctgctaatctctactttttagcactgctcattctgcaggccgtaccccagataagtaccctggcgtggtacacaaccttggtgcccttgctggtcgtgctaggcgttacagcaatcaaggacctggtcgatgacgtggccaggcataagatggacaaggaaatcaacaaccgcacttgtgaagtcattaaggacggccgctttaaagtggctaaatggaaagaaatccaggtgggggacgttattcgtctaaagaagaatgattttgtgcccgcagacatccttctcttgagttcatcagaacccaattccctgtgttatgtcgaaaccgccgaactagatggcgagaccaatcttaaattcaaaatgtccttggagatcacagatcaatatttgcaacgggaagacacccttgctacattcgatggttttattgagtgtgaagagccgaataacagactggacaaatttaccgggaccttgttctggaggaacacatcctttcctttggatgctgataaaattctcctcaggggctgtgttattaggaataccgatttctgccacggtctggtcatctttgccggagctgataccaaaattatgaaaaacagcggaaaaacgaggttcaagcgtaccaagatagattacttgatgaactacatggtctacacaatctttgtggtcttgattcttctgtcagccgggctggctattgggcatgcctattgggaggcccaggtgggcaacagttcttggtacctttatgatggggaggacgacacgccctcatatcgagggttcctgattttctgggggtatatcatagttctgaacactatggtaccaatctccctgtacgtcagtgttgaagtcattaggctgggacaatcccatttcatcaattgggatttgcagatgtattatgcggagaaagatactccagccaaggccaggacaacaactctgaacgaacaattggggcagattcattacatcttttctgataaaacaggtacccttacccagaatatcatgacctttaaaaagtgctgcattaatgggcagatatatggcgatcatagggatgctagtcagcacaaccataacaaaatagaacaggttgatttctcgtggaacacttacgctgatggaaaattggctttctacgaccattatctgattgaacagatccagagcggaaaagagcccgaggtaaggcaattctttttcctgctagccgtgtgtcacaccgtgatggtggatagaactgacggccagctgaattatcaggctgccagtcctgatgaaggggccctcgtgaatgcagcgcggaattttgggtttgctttcttggccagaactcagaacactatcactatcagtgaactggggacagagcggacctataacgtcctcgcaatattagatttcaattccgatcgcaagcgcatgagcatcatcgtgcggactccagaagggaacattaaactatattgcaagggggcagatacagtcatatatgagagactgcacaggatgaaccccacgaaacaggagacccaggacgcattggatatctttgccaatgagacccttaggacgctctgtctatgctacaaggagattgaggagaaggaattcacagagtggaacaaaaaatttatggccgcttctgtcgcaagtaccaatcgggacgaggccttagacaaggtgtatgaggaaattgaaaaggacttaatcttgttgggcgcaactgctatagaggataaacttcaggacggcgtacccgagacaattagcaagcttgctaaagccgacatcaagatctgggtgctgaccggcgataaaaaagagactgctgagaatataggcttcgcgtgcgagctgctgacagaggacacgacaatctgctatggcgaagatattaacagtctcttacacgcgcgtatggaaaaccagcgaaaccgtggcggcgtctatgcgaaattcgctcccccggttcaggaatctttttttccaccgggcggcaatagagccctgattattacaggaagctggctcaacgaaattctgttggaaaagaagacgaagagaaacaaaatcctcaaactgaagttcccaagaacagaagaagagcgcagaatgaggactcagtctaagcggcgccttgaggcgaagaaggaacagcgtcagaagaacttcgtggatctcgcatgcgaatgtagtgccgtgatatgttgccgcgtgactccaaaacagaaagccatggtggtcgatctggttaagcgctacaagaaggctattaccctggctattggagacggagcaaatgacgtgaatatgattaagaccgcgcatatcggggtgggtatcagcggacaggagggaatgcaggctgttatgtctagcgattactcttttgctcagttccgctacctccagcgactcttgcttgtgcacggccgttggtcgtacattcgtatgtgcaaatttcttcgctacttcttttacaaaaactttgcgtttacactggtccacttctggtactcattttttaatggctatagcgcgcaaacagcctatgaggattggtttatcaccctgtacaatgtgctctacacttcattgcctgttctgctcatgggccttctcgatcaggacgtctcggataaactctccctacgctttcctggtctgtacattgtaggccaaagggacctgcttttcaactacaaaaggttcttcgtgagcttgctgcacggtgttctcacctcaatgatcctgttttttatacctctgggcgcatacctgcaaacagtgggccaagatggggaggccccctctgattaccaatccttcgctgttacaattgcttccgcgctggtgatcaccgttaactttcagattgggctcgacacctcatactggactttcgtcaacgcattctctatttttggatccatcgctctgtattttggcattatgttcgattttcattcagcagggattcacgtgctgttcccatctgcgtttcagttcactggtaccgcttccaacgcactacggcaaccatacatttggcttactatcatcctcgccgttgccgtctgtctgctgcctgtggttgcaatacggtttttgagcatgacaatttggccaagcgagagcgacaaaattcagaaacaccgcaaacgactgaaagccgaagagcagtggcagaggcgtcagcaggtttttaggagaggtgtatccacacgaaggtctgcctacgctttcagccaccagcgggggtatgctgacctcatctcctctgggaggtcaatcaggaaaaagaggtctccactggacgctatcgtggcggacggcacagcagagtaccggcgcacaggagactcc

SEQ ID NO: 318889 - DNA, 3753 bp, Artificial Sequence
  derived and/or modified sequence
atgtcgaccgaacgcgattcagaaaccactttcgacgaggactcccagccgaacgatgaggtcgtcccgtacagcgacgatgaaaccgaagatgagctggatgatcagggatcggctgtggagccggagcagaatagggtgaacagagaagcagaggaaaaccgcgagccgttcagaaaggaatgtacgtggcaagtgaaagcgaatgacagaaagtaccatgaacagccgcatttcatgaacactaagttcctgtgcatcaaagagtcaaagtacgctaacaatgccatcaagacctacaaatacaatgcgttcactttcatccctatgaatcttttcgaacaattcaaaagagccgccaacctgtactttctggccctgctgattttgcaagccgttccgcagatctcgacgctggcatggtacaccacgctggttccgctcctcgtggtgctgggagtgacggccatcaaggacctcgtcgacgacgtggcacgccataagatggacaaagagattaacaacagaacctgtgaagtcattaaagacggaaggttcaaggtggccaagtggaaagagatacaggtgggcgacgtgatccgcttgaaaaagaatgattttgttcccgccgacatcctgctcctcagctcatcggaaccaaacagcctctgctacgtggaaaccgcagaactggacggagagactaacttgaagttcaagatgtcattggagatcactgaccaatacctccaaagagaagatacgctcgccaccttcgacggctttatcgagtgcgaagaaccgaacaaccggcttgacaagtttactggaacgctgttctggaggaacacttccttcccgctcgatgctgacaagatcctcctgcggggatgtgtgatccgcaacactgatttctgtcacggcttggtgatcttcgcgggtgctgacactaagatcatgaagaattcgggaaagacccggttcaaacggaccaagatcgactacctgatgaactacatggtctacaccattttcgtcgtgctcattctgctcagtgcgggactggccattggacacgcctactgggaagcccaagtcgggaacagcagctggtacctctacgatggcgaagatgatactccatcgtacagaggatttctgatcttttggggatacattatcgtgctcaacaccatggtcccgatctcgctgtatgtctccgtggaagtcatccggttgggacaaagccacttcatcaactgggacctgcaaatgtactatgcggagaaggacactccggcaaaagcccggaccaccaccctgaacgaacagctggggcagatccactacattttctcggataaaacgggaactttgactcagaatatcatgactttcaagaaatgctgcatcaacggacagatttacggagatcatcgggacgcatcacagcacaatcacaacaaaatcgagcaggtggacttcagctggaatacttatgcagacggcaaactcgcattttacgatcattacctcatcgaacagatccaatcagggaaggagccggaggtgcggcaattctttttcctgcttgcggtctgccacactgtgatggtggaccggaccgacggccaactgaactaccaagccgcatccccagatgaaggagccctggtcaatgctgcgcgcaatttcggattcgccttcctcgccagaacccaaaataccatcaccatctctgaattgggaaccgaacggacctacaatgtgctggctatcttggacttcaattcggaccggaagagaatgagcataattgtgcggacccctgagggcaacatcaagctctactgcaaaggagcagacactgtgatttacgaacggctccaccggatgaaccccacgaagcaagaaactcaggacgccctggacatctttgccaacgaaaccctcagaaccctgtgtctctgctacaaggagatagaagagaaggaattcactgaatggaacaaaaagttcatggccgcatcggtcgcgtctactaaccgcgatgaagccttggacaaagtgtacgaagagatcgagaaggacctgatcctgctgggtgcgactgcgatcgaagataaacttcaggatggagtgcccgagactatttcgaagctggccaaggcggacatcaaaatctgggtgctgaccggcgataagaaggaaaccgcggaaaacatcgggttcgcctgcgaactgctgaccgaagataccacgatctgctacggagaggacatcaacagcctgctgcacgcgagaatggaaaaccagcgaaatagagggggagtctacgcaaagtttgcgcctccggtccaggaatcctttttcccaccggggggcaatagagccctgatcatcaccggaagctggctcaacgagatcctgctggaaaagaaaacgaagcgcaacaagatcctgaaacttaagttccctcgcaccgaagaagagagaagaatgagaactcagtcaaagcgccggctcgaagccaaaaaggagcaaagacagaagaatttcgtggacttggcgtgcgaatgctcggcagtgatctgttgccgcgtgacccctaagcagaaggccatggtcgttgatttggtgaagagatataagaaggccattactctggccataggagacggagcgaacgacgtgaacatgatcaagactgcgcacatcggagtgggaatttcgggacaggaggggatgcaagcagtgatgtcatcagactacagcttcgcgcagttccgatacctccagcgcctgctgctggtgcacggaagatggagctacatcaggatgtgcaaattcctgcggtacttcttctacaagaattttgccttcaccttggtgcacttctggtacagttttttcaacggatactcggcacagaccgcctacgaagattggttcattactctgtacaacgtgctttacacttcactgcctgtgctgctgatgggactgttggatcaggacgtgagcgataagctgtcccttcggttcccggggctctacattgtgggccagagggatctcctgttcaattacaaaaggttcttcgtgtcgctgctgcatggtgtccttacctccatgattcttttctttatcccgctgggcgcgtaccttcagaccgtgggacaagatggagaggcaccttcagattaccaatccttcgcggttactattgcgtcggctctggtcatcactgtgaatttccagatcggacttgacacctcctactggacttttgtcaacgctttctcaatctttggatcaatagccttgtattttggcatcatgtttgacttccactcagctggcattcacgtcctttttccctctgccttccagtttacgggcactgctagcaacgccctcagacagccctatatctggctgaccatcattctggccgtcgcggtctgcctcttgccggtggtcgcgatccgcttcctctcgatgactatatggccgtccgagtccgacaaaatccagaagcaccgcaagcggctcaaggccgaggaacagtggcagcgacgccaacaggtctttcgcagaggggtgagcacgcgccgctctgcttacgcattctcacaccagcgcggatacgctgacttgatttcgtccgggaggtcgatccgcaagaagagatcgccactggacgcaatcgtggcggacggaaccgccgagtatcggcgtaccggagactcc

SEQ ID NO: 318890 - DNA, 3753 bp, Artificial Sequence
  derived and/or modified sequence
atgtcgacggaacgcgattccgaaacgacctttgatgaggactcacaacctaacgatgaggttgtgccatactctgatgatgaaaccgaggatgaactggacgatcaaggctcggcggtggagccggagcagaaccgggtgaacagagaagcagaggagaaccgcgaaccatttcgcaaggaatgtacttggcaggtgaaggcaaacgatagaaaataccacgaacaaccgcatttcatgaatactaagtttctgtgcattaaggaatccaagtacgcaaacaacgctattaagacttacaagtacaatgcattcacctttatcccaatgaacctctttgagcagtttaagcgagcagctaatctttacttcctggcccttcttatccttcaagcagtgccccagatttcaactctcgcatggtacacgactcttgttcctctcctggtcgtgctcggtgtgacggctatcaaagaccttgtcgatgatgtggcaagacacaagatggacaaggaaatcaacaaccggacttgtgaagtgattaaggatggcagatttaaggtggccaaatggaaggagattcaggtgggtgacgtgattcgattgaagaagaacgattttgtccctgcagatattctgctgctttcgtcctcggaacctaattccctgtgctacgtggaaactgcagaattggatggtgaaaccaacctgaagttcaaaatgtcacttgaaattactgaccaatacctccagcgagaagataccctggctacctttgatggcttcattgaatgtgaggagccaaacaacagacttgataagtttactggaactcttttctggagaaacacgtcatttcccctggacgcagataagattcttctgagaggatgtgtgatcagaaacacggatttttgtcatggacttgtgatatttgctggcgccgacaccaagattatgaagaactccggaaagactagattcaaaagaaccaagatagactaccttatgaactacatggtttacaccattttcgtcgtgttgatattgctctcagcaggtctggcgattgggcatgcctactgggaagcccaggtcggtaactccagctggtacctgtacgatggtgaggatgatacccctagctatagaggctttctgatcttttggggatacataatcgtgctgaacactatggtgcccatttcactttacgtctcagtggaagtgattcggctgggacaaagccatttcataaactgggatctccaaatgtactacgcagaaaaggatacccccgccaaagcgaggaccaccaccctgaacgagcagctcggtcaaattcactacatattcagtgataagaccggtactttgacccagaatatcatgaccttcaagaagtgctgcattaatggtcagatttacggagatcatagagatgcctctcaacataaccataacaagattgaacaggtcgacttttcgtggaatacttacgctgatggcaaacttgcgttttacgatcactaccttatcgagcaaatccagagtggaaaagaacccgaggtgcggcagttcttttttctgctcgctgtgtgccacaccgtgatggtggaccggaccgatggacaacttaactaccaagccgcgtccccagatgaaggagcacttgtgaatgcggctcgtaatttcggattcgcatttctcgcacggacgcaaaacactattaccatctcggaacttggtaccgagaggacttacaacgtcctcgccatcttggactttaactcggatcgtaagcgcatgtcaattatcgtgcggactcctgaaggtaacataaagctgtactgcaagggagcagatactgttatctacgaacgcctgcaccgcatgaaccctaccaaacaggaaacccaggatgcgcttgacatatttgcaaatgaaaccttgagaacgctttgcctttgttacaaagaaatcgaggaaaaggaatttaccgaatggaataagaagtttatggcagcaagcgttgcatctaccaaccgggatgaggcgcttgacaaggtgtacgaggaaatcgaaaaggacctgatacttctgggcgcgaccgctatcgaagataagttgcaggatggtgtccctgaaactatctcaaagctggcgaaagcagacattaagatctgggtgctcaccggagataagaaggagactgcagaaaacattggatttgcatgcgaactcctgaccgaggacactacgatctgctacggtgaagatatcaactcgctgctgcatgcacgaatggaaaatcagcggaaccggggaggcgtctacgcaaagtttgcgccaccagtccaagaatctttctttccccctggaggtaatcgcgcgttgataatcactggatcctggcttaatgaaattctccttgagaagaaaactaaaaggaacaagatccttaagctgaaatttccaaggaccgaagaggaacgcagaatgagaactcaatcaaaacggcgacttgaagcaaagaaggaacagcggcaaaagaactttgtggaccttgcatgtgaatgttccgcagtcatttgttgtcgcgtcactcccaagcaaaaagctatggtggtcgatctggtcaagagatacaagaaggcaatcaccctcgcgatcggagatggggctaacgacgtgaacatgatcaaaactgcgcatattggcgtggggatttcaggacaagaaggcatgcaggccgtgatgtcatcggactacagcttcgctcagttccggtacctccagcgtctgctgctggtccatgggcgatggtcatatatccgtatgtgtaagttcctgcgatactttttctacaagaacttcgcctttacccttgtgcatttttggtattcctttttcaatggttactcggcccaaaccgcatacgaggattggttcatcactctgtacaacgtgctttacacctcgcttcctgtccttctcatgggtctgctggaccaagatgtgagcgataagctctctttgcggtttcctggattgtacattgtcggacagagggatttgctctttaactacaagcggttttttgtgtcgcttctgcatggagtgctcaccagcatgatccttttctttatcccgcttggtgcatacctgcaaaccgtgggtcaagatggcgaagctccatcggattaccagtcgtttgcagtgaccattgcatccgcacttgtgatcactgtgaatttccaaataggacttgacacttcctactggaccttcgtaaacgcattctccatcttcggctccatcgcactctactttggtattatgtttgattttcattcagccgggattcatgtcctgttcccctccgcatttcagtttactggtactgcatcaaatgccctgcgccagccctacatctggttgactattatccttgccgtcgcggtgtgtctgttgcctgtggtggctattcggttcctgagcatgaccatatggccctcggaatccgataagattcagaagcatcggaagcggctgaaagcagaagagcagtggcagaggcgccaacaggtgtttcgcagaggtgtgagcacgcgccgctcagcttatgcattcagccaccagcgtggctacgcggacctgatttcatccgggcggtcgattcgtaagaaacggagccctttggatgccatcgtcgcagatgggactgcagagtatcgtagaactggcgatagc

SEQ ID NO: 318891 - DNA, 3753 bp, Artificial Sequence
  derived and/or modified sequence
atgagtacagagcgcgacagcgagaccacctttgatgaggattctcagcctaacgatgaagtcgtcccctactctgatgacgagaccgaggatgagctggacgatcaaggcagtgccgtggaacctgaacagaatcgtgttaatcgggaggcagaagaaaaccgcgaaccattccgcaaagagtgtacatggcaggtgaaggcgaacgacaggaagtaccacgagcagccgcattttatgaataccaaattcctgtgcatcaaggagtctaagtatgccaataacgcaataaaaacctataagtataatgcgttcacttttattcccatgaatctgttcgagcagttcaaacgcgccgctaacttgtacttcctagccctgttgattttacaagctgtccctcagattagcactctggcctggtacactacactcgtgcccctgctggtcgttctgggagtgactgcgatcaaagatctggttgacgacgtagcccgccacaaaatggacaaggaaataaacaaccgcacctgcgaggttatcaaggatggaaggtttaaagtggcgaaatggaaggaaatccaggtcggagatgtaattagactgaagaagaacgatttcgtgcctgctgatatcctcctcttgtcttcgagcgaaccgaactccctttgctacgtagaaacggccgaacttgatggggagacaaacctgaagttcaagatgagcctggaaataaccgatcagtatctgcagagggaggacactctggcaacctttgacgggttcatagagtgcgaagaacccaataacaggctggataaattcactgggactttgttctggcgcaatacatcatttcccctggacgcggacaaaattcttctgaggggctgcgttattcgcaacaccgacttctgccatgggctggtgatcttcgccggggccgatacaaagattatgaagaatagcggaaaaactcgcttcaagcggaccaagatcgattacctaatgaattacatggtgtatacaatctttgtggtcttgatactgctgtccgccggcctggccatcggccatgcttactgggaggcacaagtggggaacagcagctggtacctatacgacggtgaggacgacactcccagctatagagggttcctgatcttctggggatacattatcgtgctcaacacaatggttccgatttccctttacgtaagcgtcgaggtcatccgcttaggccagtcacattttattaattgggaccttcagatgtactatgcggaaaaagacacacccgccaaggcccgcacaaccaccctcaacgagcaactgggacagattcattacattttcagcgacaagaccggcactctcacccagaatattatgacgttcaagaaatgttgcataaatggtcaaatatatggtgatcatagagacgcgtcccagcacaaccacaataagatcgagcaggtagacttctcctggaacacatatgccgatggtaagctagctttttacgatcattatctaattgagcagatacagtcggggaaggagccagaagttcggcagttttttttccttctggccgtgtgtcacactgtgatggtcgataggacagatgggcagcttaattaccaggccgcctcaccggatgagggggccctggtgaatgctgctagaaacttcggcttcgccttcctggctcggacccagaatacgatcaccatctccgagctcggcacagagcggacctataatgttcttgccatcctcgatttcaacagcgaccggaagaggatgtccataatcgtgagaacccctgagggcaacattaaactctattgtaaaggcgctgataccgtaatttacgaacgcctgcaccgcatgaaccctactaagcaggaaacgcaggatgctctggatatctttgccaacgagaccctccgtaccctgtgtctgtgctataaggaaatcgaagagaaagagttcaccgagtggaataagaagttcatggctgcgagcgtggcatccacaaacagggacgaggccctcgacaaggtctacgaagaaattgagaaggacctaatactgctgggcgccacagccattgaggacaaacttcaggacggagtaccagagaccatcagtaagctcgccaaggcagacatcaagatctgggttttgaccggggacaagaaggaaacggccgagaatatcgggttcgcgtgtgaattgctcaccgaagatactacaatctgttacggtgaagacattaacagtctgcttcatgcaagaatggagaaccaacgcaacagaggtggcgtgtacgccaaatttgctccaccagtgcaggagagctttttccctcctgggggcaatagggccctgatcattacgggatcttggctaaatgagattctcctggagaagaagactaagaggaacaagatccttaagcttaagttcccccgaactgaagaagagcgtcgcatgcgaacacagtcgaagcgtcgactagaggccaagaaagagcagcggcagaaaaactttgttgatctggcctgtgaatgttccgccgtgatctgctgtcgagttacccccaagcaaaaggccatggtcgtggatctggtgaagagatataaaaaagccattaccctggccataggagacggcgcgaatgacgtcaacatgattaagaccgcccacatcggcgttgggatatccggtcaggaggggatgcaggccgtgatgtctagcgattattcgttcgcccagttccgctatttgcagcgtctgttattagtgcatggaagatggtcgtatatacgaatgtgtaagttcctaaggtactttttttataaaaactttgcctttacactagtgcatttctggtacagcttcttcaacggatatagcgcacagactgcgtacgaggactggttcatcacgctgtataacgttttgtacacatctttaccagtcttgttgatggggctgttggatcaggatgtgtctgacaaactttcacttcggttcccgggtctctacatcgtaggacagagagacctgctgttcaactataagcggttctttgtctccttactgcatggagtgctgaccagcatgattctcttcttcatccccctgggtgcctacctgcagactgtcggacaggacggggaagccccctccgactaccagtcttttgcggttaccatagcgtccgctctggtgatcactgtgaactttcagattggtctggacacatcttattggactttcgtcaacgcctttagtatcttcgggagtatagccctgtattttggcattatgttcgattttcatagcgcgggcatccatgtgcttttcccatcagccttccagttcacgggcaccgcatctaacgcccttagacagccatacatctggctcacaattattctagccgtggccgtttgcctgctccctgtagtcgctataaggtttctatctatgacaatatggccctcagaatctgataagattcagaaacaccgaaagagactcaaagccgaagagcagtggcagcgaagacaacaggtcttcaggaggggcgtgtccacgcgacgctcggcttatgctttcagccaccagcgggggtacgctgacctgatttcctccggtcgctcgatccgcaaaaagcgctccccacttgatgcaatcgtggccgatgggaccgccgagtatagaaggaccggtgattcc

SEQ ID NO: 318892 - DNA, 3753 bp, Artificial Sequence
  derived and/or modified sequence
atgtccacggagcgggacagcgagactacatttgatgaagacagtcaaccaaatgacgaggtggtaccttactcagatgacgaaacagaggacgagctcgatgatcaagggtccgcagtcgaacctgagcaaaacagagtgaacagagaagcggaggaaaatagggagccatttagaaaggaatgcacttggcaggtgaaagcaaacgaccggaaataccacgagcaacctcatttcatgaatacaaagtttctgtgcatcaaagagtccaaatatgctaacaacgcaattaaaacctataaatataatgcctttacctttatacccatgaacctgttcgaacaatttaagagagccgccaatctctacttcctcgccctgctgatccttcaagcagttccccaaatctccacccttgcttggtacactacccttgtacccctgctggtggtcctcggcgtgactgccattaaagacttggtggacgatgtcgctcgccataaaatggacaaagagatcaacaataggacatgcgaagtgataaaggacggaaggttcaaagtggccaaatggaaggaaatccaggttggggatgttatcaggttgaagaagaacgattttgttccggcagatatcttgctgctcagcagctcagagcctaatagcctttgttatgtggagactgccgagctggacggcgagaccaatctgaaattcaagatgagcctcgaaattaccgaccaatatttgcagagagaagacacactggccactttcgacggattcatcgaatgcgaagagccaaacaacaggctggacaaatttaccggcacattgttttggcgcaacacaagcttcccactcgacgctgacaagattttgctccgggggtgcgttatccggaacacggacttttgccatggtctcgtgatattcgccggagccgacactaaaatcatgaaaaatagtggcaaaacacggttcaagaggactaagatcgactacctgatgaactatatggtgtacactatcttcgtggtgctgatcctcctgtccgccgggctggccatcggtcacgcatactgggaagcacaggtggggaactccagttggtatttgtacgatggcgaggacgacaccccctcttatcgcggtttcctcatcttttgggggtacatcatcgtgctcaacaccatggtgccgatctccttgtatgtgtctgtggaggtgatcagactcggacaatcccatttcattaactgggacttgcagatgtactacgcagaaaaggacactcctgctaaggctagaacaactacacttaatgaacagttggggcagatccactatatctttagtgataagaccggaactctgactcagaatataatgacctttaaaaagtgttgtattaacggccagatatacggagaccaccgagatgcaagccaacacaatcacaataagatcgagcaggtggacttcagctggaatacttatgccgacgggaaactggcattctatgatcattacctgattgaacaaatccaaagcggtaaggaaccagaagtgagacagttcttttttctgcttgcggtatgtcacaccgtaatggtcgacaggaccgacgggcaattgaattaccaggcggccagtccagacgaaggtgcactcgtaaatgccgctcggaacttcggctttgcctttctggctcgcacccaaaataccatcacgatcagtgagctcggaactgaacgaacgtacaacgtactggccattctggactttaattccgacagaaaaagaatgagtattatcgtcaggacccctgagggcaacatcaagttgtattgcaagggcgctgacaccgttatttacgagcgcctccaccgaatgaaccctactaagcaagagactcaagatgcgcttgatatatttgccaatgaaaccctcaggacactgtgtctttgctacaaagaaattgaggaaaaagagttcactgagtggaataaaaagttcatggcggccagcgtcgcttccacaaaccgagacgaagccctggataaggtttacgaagaaatcgaaaaagatttgatcctgctgggcgccactgcgatcgaggataaacttcaggacggcgttcctgagactatttcaaagctggctaaggctgatattaaaatttgggttttgaccggagataagaaagagaccgccgaaaacatcggttttgcgtgtgagctgctcaccgaggatacgactatatgctatggtgaagacattaactcactgctccatgctcggatggagaaccagagaaacagaggcggcgtctatgccaagtttgctccaccggtgcaggaatcattcttccccccaggtgggaatcgcgctctcattattaccggttcttggttgaacgaaattctcctcgagaagaagaccaagaggaataaaatacttaagctgaagttcccccgcaccgaagaagaaagaaggatgagaacccagtcaaaaaggagactggaagctaagaaggagcagcgccagaaaaacttcgtagatcttgcatgtgagtgttctgccgtgatttgctgtagagtgacaccgaagcagaaagccatggtggtggatttggtgaagcgctacaagaaggctataaccctcgccatcggcgatggcgcgaatgatgtgaatatgattaagaccgcacacatcggagtaggcatcagcggtcaggagggcatgcaggctgtaatgagcagtgattattcattcgcacagtttcggtacctgcaacggctccttttggtccatggtaggtggtcttatatccggatgtgcaaattcctgagatacttcttctacaagaattttgctttcacccttgtgcacttttggtatagtttcttcaacggctatagtgctcaaaccgcttatgaggattggttcatcactctgtacaacgtgctgtacacttccctccccgtactgctgatgggcctgctggatcaggatgtcagcgacaaactgagcctgagatttccaggcctgtacatcgtcggacagcgcgatctgctgttcaattacaaacgcttctttgtcagcctgctccatggagtcctgacatctatgattctgttcttcatacccctgggtgcttacctgcagactgtggggcaggacggtgaggcccccagcgactaccagagcttcgccgtcaccatagcttctgccctggttatcactgtcaactttcagattggactcgacacatcttattggacttttgtgaatgcatttagtatcttcgggtccattgcgctgtattttgggatcatgttcgacttccattcagcaggtatccacgtgctgtttccttcagcttttcagtttacaggaaccgcgagtaacgctctgcgccagccatacatttggctcacgatcattcttgccgtggcagtgtgcctgctgcccgttgtcgcgatcaggttcttgtctatgactatctggccctccgaatctgacaagatccaaaagcacaggaagcgactgaaagccgaggagcagtggcaacggcgccagcaggtgtttcgcaggggggtaagcaccagaaggtccgcatacgccttctcacatcaaagagggtacgccgaccttataagcagcgggcgcagcatacggaagaaaagaagccctttggatgcgattgtggcagatggcacagcagagtaccggagaactggcgattca

SEQ ID NO: 318893 - DNA, 3753 bp, Artificial Sequence
  derived and/or modified sequence
atgagtactgagcgggacagcgagactaccttcgacgaggactctcagcctaatgacgaagtggtgccatactcagatgatgagaccgaggacgagctggatgatcagggcagtgctgtcgagcccgagcagaatagggtcaatagggaggccgaagaaaaccgggagccctttcggaaagagtgcacctggcaggtcaaggctaacgacagaaagtaccacgagcaaccacactttatgaacacgaaatttttgtgtattaaggagtctaagtatgcaaataacgcaattaaaacttacaagtacaatgctttcacatttatccccatgaacctgtttgaacaatttaaacgggcggcgaacctgtatttcctggccctcttgatcctgcaggcagttccccagatctcgactctcgcttggtatacgacgctcgtacccctgctggtggttctgggcgtcacagcaattaaggatttagtggacgatgtggctcgccataaaatggacaaagagataaataaccgaacctgtgaggttatcaaggatggacgatttaaagtggcgaagtggaaagaaatccaggtcggagacgtcattaggcttaagaagaacgactttgtgcctgccgatattctgctcctaagctcgagcgaacctaacagcctttgctacgtggagactgccgagttagatggtgaaaccaacttgaaattcaagatgtctctggaaatcactgatcagtacctccagagggaggacacactcgcaacctttgacggttttattgagtgcgaagaacctaataatcgcttggacaagttcactggaaccctgttttggagaaatacatcttttccgttggacgccgacaagatactgttgcgcggctgcgtgattaggaatacagatttctgccatggattggtgatctttgccggcgccgatactaagatcatgaagaacagtggaaagacgcgattcaagcgtactaagatcgactatcttatgaattacatggtgtacactatcttcgttgtgctcattctcctcagtgcaggcctcgctatcggacatgcttattgggaggcccaggtgggcaactcatcttggtatctttacgatggggaggacgatacccctagttacaggggattcctcatcttctggggttacataatcgtgctgaacacaatggtgcctatatccctttatgtgtccgtggaagtcattcgcctgggtcaatcacattttatcaattgggatctccagatgtactatgccgagaaggataccccggctaaagcgagaactactaccctcaatgaacaactcggacaaatccactacatctttagtgataagaccggaactctaactcaaaacataatgacttttaagaaatgttgcatcaacggacagatctatggggatcacagagatgccagtcaacacaaccacaacaagatcgagcaagttgacttttcgtggaacacgtatgctgacggcaaactggcattttacgatcactatctcatcgaacagattcagagcgggaaagaacccgaagttaggcaattcttttttcttctggccgtgtgtcacaccgttatggtggaccgcacagacggacagctgaattatcaagccgcgagccctgacgagggcgcgttggtgaatgctgcccgaaattttggcttcgcattcctggcccggacgcaaaacaccatcactatctccgagctgggcacagagaggacctataatgtccttgcaattcttgatttcaactccgaccggaagagaatgtccataattgtgaggacaccagaaggtaacattaaactgtactgcaagggggctgatacagttatttatgagcgcctgcaccgcatgaatccaaccaagcaagagacccaggatgctctggatatattcgccaacgaaaccctccgcacactgtgcttgtgctataaagagatcgaagagaaggaatttacagagtggaacaaaaagttcatggccgcttcagtggcaagtaccaatagagacgaagccctggacaaggtgtacgaggaaatcgaaaaagacttgattcttctgggagccacggcgatcgaagacaaactgcaggacggcgtccccgaaactatttcaaagctggccaaggccgacattaaaatctgggtgttaaccggagataaaaaagaaactgcggagaatatagggtttgcatgcgagctcctcaccgaggatacgactatatgttatggggaggacattaatagcctgctgcacgcaaggatggagaaccagaggaacaggggtggcgtctatgctaagtttgctcccccagtccaggaatctttctttccacccggggggaatcgagcactgataattactggctcttggttaaatgagatccttttggaaaaaaaaacaaagcgtaacaaaatcctcaaattaaaattcccacggacagaagaagaaaggcggatgcggacacagtcgaaaagacggctggaggcaaagaaggagcagaggcagaagaactttgtggaccttgcctgcgagtgttccgcggtgatctgctgtagagtaactcctaagcagaaagcaatggtggtggacctggtgaagcgatacaaaaaagccatcacacttgctatcggagacggagctaatgacgtcaatatgattaagacagcacatattggcgtggggataagtggccaggagggcatgcaagcggtcatgagctcagactactcttttgcccagttcaggtacctacagcggttactccttgttcacggccgctggtcctacataagaatgtgcaagtttcttaggtactttttttacaagaattttgcattcaccttggtgcacttctggtatagtttctttaatggatattccgcccaaactgcctatgaggactggttcatcaccctttacaacgtgctctacacctccctgccggtgctcctgatgggcctgttggatcaagatgtgtccgacaagctgtccctgcgattcccagggctgtacatcgtcggccagcgtgatctccttttcaattacaaacgattctttgtgtcccttctccatggcgtgttgacaagtatgatcttgttttttattccgctgggggcctacttacagactgtgggccaagatggcgaggctccatcagattaccagagctttgccgtgacaattgcaagcgcactagttattacagtgaatttccagatagggctggatacctcatactggacctttgtgaacgccttctctatcttcggctctattgcactttactttggcatcatgttcgactttcactctgcagggatacacgtgctattcccctccgcatttcagttcacagggactgcatccaacgcactcaggcagccatatatatggttgacgataatcttagctgtggccgtttgcttgcttcctgtggtcgccattcggtttctgtccatgacaatttggccaagcgaaagcgacaaaattcagaagcacagaaagaggctcaaggctgaggaacagtggcaacgacggcagcaggtgttccgtcggggggtgtcaaccaggaggagcgcttacgccttcagccaccaaaggggttacgcagacctcattagttctgggagatccatccgcaaaaaacgttcccctctggacgccatagtagccgacggaacagccgagtataggcggacgggagactcc

SEQ ID NO: 318894 - DNA, 3753 bp, Artificial Sequence
  derived and/or modified sequence
atgagcactgaacgggatagtgaaactacgtttgatgaggacagccagccgaatgacgaggtcgtgccgtactctgacgatgaaaccgaagatgaactggatgaccagggaagcgctgtggaaccggaacaaaatagagtcaatcgcgaggcggaggaaaatcgcgagccgtttcgcaaggagtgtacctggcaggtcaaagcgaacgatcgcaagtaccatgagcagccgcactttatgaataccaagtttctgtgcatcaaagaatctaagtacgcgaataacgcaatcaaaacctacaaatacaacgccttcacctttattccgatgaacctgttcgagcaattcaagcgggccgccaacctgtacttcctggctctcctgatcctgcaggctgtccctcagattagcaccctcgcatggtacactaccctggtgcccctgctcgtggttctgggagtgactgccatcaaagatctggtggatgacgtcgcaagacacaagatggataaggagatcaacaacagaacctgcgaggtcataaaggacggcaggttcaaggtcgcgaagtggaaggagattcaggtgggcgacgtaatccgcctgaaaaagaacgatttcgtccctgctgatattctcttgcttagcagctcagagccaaatagcctctgctacgttgaaaccgccgaactcgatggagagactaacctcaaattcaagatgtcgctggaaatcactgaccagtacctgcaacgagaggacacgctggccaccttcgacggattcatcgagtgcgaggaaccaaacaacaggcttgacaagttcaccggaacccttttctggcgaaatacgagctttccgctggatgctgacaagatcctgctgcgcggctgcgtgattagaaacactgacttctgccacggtctggtcatctttgccggggcagacaccaaaatcatgaaaaactccgggaaaactcgctttaagcggacgaagatcgattacctgatgaactatatggtgtacacgatttttgtcgttctcatcctgctgagcgccggcttggcgatcggacatgcatactgggaggcacaggtgggaaacagttcgtggtacttgtatgacggagaagatgacactccgagctacagaggtttccttatcttctggggctatatcatcgtgctgaacacgatggtgcctatctcactgtacgtgtccgtggaggtgatccggctgggtcaaagccacttcatcaattgggaccttcagatgtactacgccgagaaggacaccccggccaaggcgaggaccaccactttgaacgaacagctcggtcaaattcactacatcttcagcgataagactgggaccctgacgcaaaacatcatgactttcaagaagtgttgcatcaacggacagatttatggggaccacagggacgcgtcgcaacataaccataacaagattgagcaagtggatttctcgtggaatacctacgccgatggcaagctcgcattctacgaccactacctcatcgaacaaatccagtcgggaaaggaaccagaagttcgccaattcttcttccttctcgctgtgtgccacactgtgatggtggatcgcaccgacggccaactgaattatcaggcggcatccccagatgagggcgcactggtgaacgcggcccgcaacttcggattcgcgtttctggcgaggacccagaataccattactatctcggagctggggactgaacgcacctacaatgtgctggcaatcctggacttcaacagcgatcgcaaacgaatgtccatcatagtgcgcactcccgaggggaatatcaagctgtactgtaagggcgccgacaccgtgatctacgagcgccttcaccgcatgaaccccaccaaacaggaaactcaggacgcgctggatatctttgccaatgaaaccctccgcacgctgtgtctctgctataaggagatcgaggaaaaggagtttacggaatggaacaagaagttcatggcggcgtcggtcgcctccactaaccgggatgaagctctggacaaggtctacgaagaaatcgagaaggacttgatcctcctcggagcaacggccatcgaggacaaactgcaggacggtgttccagaaaccatctcaaagctggcgaaagccgacattaagatatgggttcttactggagacaaaaaggaaaccgctgaaaacatcggattcgcatgtgagttgttgacggaagataccactatctgctacggcgaggacatcaactcgcttctgcacgctagaatggaaaatcaacgtaacagaggaggagtgtatgccaagttcgcccctccggtgcaagagagtttcttccctcctggaggcaatcgggcactgattatcaccggcagctggcttaatgagatcctcctcgaaaagaaaactaagagaaataagatcttgaagctgaaattcccacgcaccgaagaggaacgtcgtatgagaacccagagcaagcgcagactggaggccaaaaaagagcagcggcaaaagaacttcgtcgatcttgcctgcgagtgctcggccgtgatctgctgtcgtgtgactccgaagcagaaagcaatggtcgtggatctggtcaagcggtacaagaaggccatcactctcgctatcggagacggagctaacgatgtgaacatgatcaagaccgcccatatcggagttggaatcagcggacaagaaggcatgcaggccgtgatgtcgtcggactactcgtttgcgcagttcaggtacctccagcgccttctgctggtacacgggcggtggtcctatatcaggatgtgcaagttcctccgctacttcttctacaagaatttcgccttcactctggtgcatttctggtactccttcttcaacgggtacagcgcgcagacggcctacgaggactggttcattacgctgtacaacgtgttgtatacttccctgccggtgctcctgatgggcctgttggaccaggacgtgtcagacaaactgtcacttcgcttccccggattgtacattgtcggacagagggacctgctcttcaactacaaaagattcttcgtgtcgttgctgcatggagtcttgacttcgatgattctgttcttcattccgcttggcgcatacctgcaaactgttggacaggatggtgaagcaccgtccgactaccagtccttcgcggtcactatcgcctcagccctcgtcatcactgtcaattttcagatcggattggatacttcatactggacttttgtgaacgccttctcgatcttcggatcgatagccctgtactttggcatcatgttcgatttccacagcgcgggaattcacgtgctgtttccgtccgcgttccagtttaccggaactgccagcaatgccctgcggcaaccgtacatttggctcactatcatcctggccgtggcggtctgcctcctgcccgtcgtggccatccgcttcctctccatgaccatctggccttcggaatcggacaaaatccagaaacatcgcaaacggttgaaggccgaagaacaatggcagcggcgccagcaggtgttccgccgcggcgtgtccactcggagatcggcctacgccttttcgcatcaaagaggttatgcggacctcatcagcagcggaagatcaatccggaagaaacgttcgccgctggacgccatcgtggcggacggcaccgcagaataccgccgcacgggggattcc

SEQ ID NO: 318895 - DNA, 3753 bp, Artificial Sequence
  derived and/or modified sequence
atgagcacggagcgcgattcggagactacgtttgatgaagatagccaaccgaacgatgaggtggtcccttactctgatgacgagacagaggacgaattggacgaccagggttcagcagtcgaaccggaacagaacagagttaatcgagaagcagaggaaaacagagaaccgtttagaaaagagtgcacgtggcaagtcaaagcgaatgatcgcaagtatcacgagcagccgcattttatgaacacgaaattcctttgtattaaggagagtaagtatgcaaacaatgcaattaagacctacaaatataatgctttcacatttattccgatgaacctatttgaacaatttaaacgcgcggcgaacttgtactttttggcactgctgattttgcaggccgttccccagattagcacattagcatggtacacgacattagttccgcttttagtcgtcctgggcgttacagccattaaggaccttgtcgacgatgtagctaggcataaaatggataaagagatcaacaatcgcacatgcgaagtcattaaagatggaagattcaaagtggcaaagtggaaggaaatacaggttggggatgtaatccgcttgaaaaaaaacgattttgtgcctgcggatattttgcttctttcgagttctgaacctaattcactgtgttatgttgaaaccgcagaattggacggagaaacaaacctgaaatttaaaatgtccttagaaattaccgaccagtatttgcagagagaggacacccttgcgacatttgacggctttatcgaatgtgaagaaccgaacaacaggctggataaatttacgggaacactgttttggcggaatacgtcatttccgctggatgccgataaaatcctgcttcgtggttgcgtaatccggaatacagatttttgccacggccttgttatttttgctggtgcggacacgaagatcatgaagaactcagggaaaacgcgttttaaacggacgaagatagattatctgatgaattacatggtatatacgatctttgtggtgcttatattgctttctgcagggttggcgatcggacatgcttattgggaagcccaagtgggcaacagcagctggtacttgtatgatggcgaagatgacacaccatcctaccggggattcctaattttttggggctatataatcgtattaaatactatggtgcctattagcctttatgtctcagttgaagtaatccgacttggccaatctcactttataaattgggaccttcagatgtattatgcggaaaaggatacaccggcaaaagctcgcacgacaactctgaacgaacagttagggcagattcattacattttttcagataaaacaggtacattaacacagaatattatgacatttaagaaatgttgtattaatggccagatctatggcgaccatcgtgacgcttcccaacataatcacaacaaaatcgagcaggttgatttttcttggaacacttacgccgatggcaaattggcgttctatgatcactaccttattgaacagattcaatctggcaaggaaccggaggttcggcaattcttctttttgttggcagtctgtcatacagttatggtcgatcgcaccgacggacagcttaactatcaggcagctagtccggacgaaggcgcgttagtgaatgcagcacggaattttgggtttgcgtttctggccaggacacaaaacacaatcacgatttccgagctgggaacagaacgcacgtataacgttttggcgattttagattttaactcggaccggaagcgcatgagcatcattgtaaggacccctgaaggaaacattaaactgtactgcaaaggcgccgacacagttatatatgaacgattgcaccgtatgaaccctacgaaacaggaaacgcaagatgcgttggatatttttgcaaacgagacacttcgaactttgtgcctgtgttataaagaaatcgaagagaaagagttcacggaatggaataaaaaatttatggctgccagcgtcgccagtactaatagagacgaggctcttgacaaggtttatgaggaaatagaaaaagatcttattcttttaggtgcaaccgcgatcgaagacaagttgcaagacggagttccggaaacaatatcgaagctggccaaagctgatattaaaatttgggtccttacaggagataagaaagaaacggcagagaatatcggtttcgcctgtgaacttcttactgaagatactacaatatgctatggcgaagatatcaatagcctgttacacgctcgtatggagaatcaaagaaacagaggaggtgtttatgccaaatttgctcctccggtgcaagaaagcttttttcccccggggggaaatcgcgcactgataatcacagggagctggcttaatgaaatactactagaaaaaaagacaaagagaaacaagattttgaaactgaaatttccgcggactgaagaagaacgtcggatgagaacccaatctaaacgcagactggaagcaaaaaaggagcaacgtcagaaaaactttgtagacctcgcatgcgagtgctctgcagttatatgttgccgtgttacacccaaacagaaagcaatggttgtagatttagtgaaaagatataaaaaagcgattactctcgcgattggagatggagctaacgacgtcaatatgatcaaaacagcacatataggagtgggaatctctggccaggagggaatgcaggcggtaatgagctccgactatagtttcgcacagttcagataccttcaacggttactgctggtacatggaagatggagctatatacgcatgtgcaaattcttaagatactttttttataagaactttgcgtttactctcgtgcacttttggtatagttttttcaacggttattccgcacaaacagcttatgaggattggtttattacgctgtataatgttttatatacgagcttaccagttttacttatgggcctcttagatcaagacgtgtcagataaactttctctgcgctttcccgggctgtacatagtaggccaacgggatttactgttcaattataaacgttttttcgtgtctctgttacatggagtgcttacatctatgattcttttttttattccgctcggagcctacttgcaaacggtcggccaagatggcgaggcgccgtctgactaccagtcatttgcagttacaattgcaagcgctttagtaattacagtgaactttcaaataggcctcgatacaagttactggacatttgtgaacgcgtttagcatttttggatcaatcgcactgtattttggcattatgtttgactttcacagtgccggcattcacgttctgtttccttctgcgtttcagttcacaggcacagcttccaatgccctgcgccaaccatatatttggttaacgatcatactagccgtcgctgtatgccttctaccggttgtagctatcagatttttatcaatgacaatctggcctagcgaaagcgacaaaattcaaaaacaccgcaagcggctcaaagctgaagaacagtggcagaggcgccagcaagttttcaggcggggcgtgtcaacacgccgttcagcatacgctttcagccatcagcgcggttacgccgacttaattagctctggacgctcaatcaggaaaaagcgttcccctttagatgctatcgtagcagatggtacagctgaatataggagaacgggagactcg

SEQ ID NO: 318896 - DNA, 3753 bp, Artificial Sequence
  derived and/or modified sequence
atgtccactgaaagagactccgaaactacttttgacgaggactcgcagcctaacgatgaggtcgtgccatactcggatgacgagacggaagatgagctcgatgaccagggatcagcagtggaacccgaacagaatagagtcaatcgggaggcagaagaaaatagagagccatttaggaaagagtgcacctggcaagtcaaggcaaacgatcgtaagtatcacgaacaacctcatttcatgaacactaagtttctctgtataaaggaaagcaaatacgctaataacgcaatcaaaacttacaagtacaacgcttttaccttcattcccatgaacctgtttgaacagttcaagagagccgcaaatctttacttccttgcacttctgatccttcaagcagtcccacaaatctcaactctggcatggtataccactcttgtgccgctgctcgtggtgcttggagtcaccgcaattaaggatctggtggatgatgtcgcaaggcataagatggataaggagataaacaacagaacgtgtgaggtgataaaggacggaagatttaaggtggccaaatggaaggagatccaagtgggtgatgtgatccgactcaagaagaacgattttgttcctgccgacattttgctcctttcgtcgtcagagcccaattccttgtgctacgtggaaactgcagaacttgacggagagactaacctgaagtttaagatgtctttggaaatcaccgatcagtacctgcagcgagaggacactcttgcaacctttgacgggtttatagagtgcgaagaacccaacaacagattggacaagtttaccgggacgctcttttggagaaatacttcctttcctctggatgccgacaagatacttctgagagggtgtgtgatacgcaataccgacttttgtcacggattggtcatttttgccggcgctgatacgaagattatgaagaattccggtaagaccagattcaaacgcactaagatcgattacctgatgaactacatggtgtacacgatttttgtcgtcctgatccttctctcggcagggcttgccataggacatgcgtactgggaagcacaggtgggaaacagttcgtggtacctttacgacggggaagatgataccccctcctaccgggggttcctgattttctggggctacattattgtgttgaacactatggtacctatttcattgtacgtcagcgtcgaagtcatccggcttggacaatctcatttcatcaactgggatcttcaaatgtactacgccgagaaggataccccggctaaggcgcggactactactctgaatgaacaactcgggcagatacactacattttctcagacaagactggaactcttacccaaaacattatgacctttaagaagtgctgtattaacggtcagatttacggggaccatcgcgacgcctcacagcacaaccacaataagatagaacaggtggatttttcttggaatacctatgcagacggcaaactggcattttacgaccattaccttattgagcagatccaatccggtaaagaacctgaagtccgccagttcttttttctccttgctgtctgtcataccgtgatggttgaccggacggatggacagctgaactatcaagcagcatcgccggatgagggtgcactcgtcaacgcagcacggaattttggtttcgcgttccttgctagaacgcagaatactattaccatttcggaactcggaaccgaacggacctacaacgtcctcgctatcctcgactttaactccgacagaaagcgaatgtcgattatcgtgcgcactccagaagggaacattaagctgtactgcaaaggtgcagataccgtgatttacgagcgtctgcatcgaatgaaccccactaagcaggaaacccaagatgcactggacatctttgccaacgaaactttgagaaccctgtgcctgtgttacaaggagattgaggaaaaggagttcaccgaatggaacaagaagtttatggcggcgagcgtggcatcaaccaatagagacgaggcactggataaagtgtacgaagagattgaaaaggatttgatactccttggtgcgaccgcaattgaagataaactgcaggacggagtgccagaaactatctccaaacttgcgaaggcggacattaagatttgggttctgactggagataagaaggaaaccgcagaaaacatcggattcgcatgtgaactgctgactgaggatacgaccatttgttacggcgaggatatcaattccctccttcatgcccgcatggaaaaccaaagaaacaggggcggagtgtacgcaaagttcgcgccacccgtgcaagagtcattctttcctcccggcgggaacagagcacttatcatcactggatcctggctgaacgaaatccttctcgaaaagaaaaccaagagaaacaaaatactgaagttgaaatttccacggactgaggaggagcgccggatgagaactcagtccaagcggaggctggaagccaaaaaggaacagaggcaaaagaacttcgtcgatctggcttgtgaatgctcggcggtgatttgttgcagggtcacccctaagcagaaggcaatggtggtcgatctggtgaagagatacaaaaaggcaattacgctcgcaattggagatggcgcaaacgatgtgaatatgataaagaccgcccacattggagtgggaatatccggtcaggagggcatgcaggcagtcatgagctcggactactcgtttgcacagtttcggtatcttcaaagactcctccttgtccatggtagatggagctacattagaatgtgtaaattccttcgatacttcttctacaagaatttcgcctttaccctcgttcatttttggtacagctttttcaacggatactccgcacagaccgcctacgaagattggttcataaccctttacaatgtgctgtatacttccttgccagtgctgctgatgggacttctggatcaagacgtgtcggacaagctctctctccggttccctggtctgtacatcgtgggacagagggaccttctcttcaactataagagattcttcgtcagcctgctccatggagtgcttacctcgatgatccttttctttataccgctcggtgcctacctgcaaactgtgggtcaggatggcgaggctccctcagattaccagtcgtttgccgtgactattgcttccgcgcttgtgatcaccgtgaactttcaaatagggctggatacttcctactggacctttgtcaatgcttttagcatatttggatcgattgccctctactttggaattatgtttgattttcactcggcaggtatccatgtgcttttccccagtgcgtttcagttcaccggaaccgcatcgaacgctcttaggcagccgtacatttggttgaccattattcttgccgtggcggtgtgtcttttgccagtcgtggctattaggtttctgagcatgactatctggccctcggaatctgataagatccagaaacatcgcaagcgcttgaaggcagaagaacagtggcagcgtcggcaacaggtgtttagaaggggtgtgagcacccggcgaagcgcctacgcattcagccatcagaggggttacgctgaccttattagcagcggtagatcgatcaggaagaagcgatcccctctggacgccatcgtggctgatggtaccgccgagtacaggcgaactggtgattcg

SEQ ID NO: 318897 - DNA, 3753 bp, Artificial Sequence
  derived and/or modified sequence
atgtcgaccgaacgggactcagagactactttcgatgaagattcgcagccaaacgacgaggtggtcccgtactcggatgatgaaaccgaagacgagctcgacgaccaaggttcagcagtggaaccggaacaaaaccgcgtgaaccgcgaggccgaagagaatagggaaccgttccggaaagagtgcacttggcaggtgaaagcaaatgaccggaaataccacgaacagccccatttcatgaacaccaagttcctctgcatcaaggaatcaaagtacgcaaataacgccatcaaaacctacaagtacaatgcattcaccttcatcccgatgaacttgttcgaacagttcaaacgggctgccaacttgtactttcttgcgttgctgatcttgcaagccgtgccgcagatctcgactctcgcgtggtacaccacgctcgtcccactcctcgtcgtgctgggagtgacggccatcaaggatctggtcgatgatgttgctcggcataagatggacaaggaaattaacaacaggacctgcgaggtgatcaaggatggacgcttcaaggtcgccaaatggaaggagatccaagtgggcgatgtgatccgcctcaaaaagaacgactttgtgcctgcggacatcctcctgttgtcctcatcagaaccgaactcgttgtgctacgtggagacggcagagctggatggggaaaccaacctcaagttcaagatgagcctggaaatcaccgatcaatacttgcagcgcgaagacactctggcgacctttgacggttttatcgaatgcgaagagccgaacaaccgtttggacaagtttactggaactctgttttggcggaacacctccttcccgttggacgccgacaaaattctgctgcggggatgcgtgatccggaacacggatttttgccatgggctggtcatctttgcaggagctgacaccaagatcatgaaaaactccggaaaaactcggttcaagcgcactaagatcgattacctcatgaactacatggtctacaccatctttgtggtgctgatcctcctgagcgcggggctggcaatcggacatgcgtactgggaggcccaagtgggaaattcgtcctggtacctttacgacggtgaggacgacaccccgtcctaccgcggatttctgatcttctgggggtacatcatcgtcctcaacaccatggtgcctatctcgctgtacgtcagcgtggaggtgatccggctgggccagtctcacttcatcaactgggatcttcaaatgtattacgccgaaaaagacacgcccgctaaggcgcggaccaccactctgaacgaacaattggggcaaatccactacatcttcagcgataagaccggcaccctgactcagaacatcatgaccttcaagaagtgctgtatcaatgggcagatctacggcgatcatcgagatgccagccagcacaatcacaacaagatcgaacaggtcgacttctcgtggaatacctacgcggacggtaaactggcattttacgatcactacctcatcgaacagatccagagcggaaaggagcctgaagtgaggcagttcttcttccttttggcggtgtgccatactgtcatggtcgaccgcactgacgggcagctcaattatcaggcagcgtcacccgatgagggagccctggtcaatgcggccaggaattttggtttcgccttcttggcgcggactcaaaacaccatcaccatctcggaactcggaacggaacgcacgtataacgttctcgcgatccttgatttcaattcggacaggaagagaatgagcatcatcgtgcggacgccggagggaaatatcaaactgtactgtaagggggccgacaccgtcatctacgagagactccaccggatgaacccgaccaagcaagaaacccaagacgcgctggacatcttcgccaacgagactttgaggactttgtgtctgtgttacaaggaaatcgaagaaaaggagttcaccgagtggaacaaaaagttcatggccgcttcggtcgcgagcaccaaccgcgacgaggccctggacaaagtgtacgaagagatcgagaaagatttgatcctgcttggcgcgaccgcgatcgaagataagctgcaagatggagtgcctgaaaccattagcaagctggcaaaggcggatatcaagatctgggttctgactggagacaagaaagaaactgcggagaacatcggatttgcttgcgagctccttaccgaagataccaccatctgctacggtgaggacattaatagcctcctgcatgcccgcatggaaaaccagcgcaaccgaggaggggtctacgctaaatttgctccgcctgtgcaagagtcgttctttccaccgggcggcaatcgcgcactgataatcacgggatcctggctgaacgaaattctgctggaaaagaagactaagcgcaataagatcctgaagctcaagttcccccgcaccgaggaggaacggagaatgcgcacccagtccaagagacgcctcgaggccaaaaaggagcaacggcaaaagaacttcgtggacctggcatgcgaatgttcagcggtgatctgctgccgggtgactccgaagcagaaggcaatggtggtggatctggtcaaacgctacaaaaaagccatcactcttgccatcggtgacggcgccaacgacgtgaacatgatcaaaactgcgcatatcggagtgggcatctcagggcaggaaggaatgcaggccgttatgagttcagactactccttcgcccagttccgctacttgcagagactgctgctcgtgcacgggcgctggtcgtacatacgcatgtgcaagttcctgcgctacttcttctacaagaatttcgctttcactctggtgcacttctggtactcattcttcaatggctactcggcccagactgcttacgaggattggttcatcactctgtacaacgtgctctacacctcgttgccggtactcctgatgggactgctggatcaggatgtctcggacaagctgtccctgcggttcccgggactgtacatcgtcgggcagcgtgacctgttgttcaactacaagcggttcttcgtctcgctcctgcacggggtcctcacctcgatgatcctgttcttcattcctctgggggcctacctgcagactgtgggacaggatggagaagcaccatccgattaccagagcttcgccgtgaccatcgccagcgctctggtgatcactgtgaacttccaaatcggactggacactagctactggaccttcgtcaacgccttctcgattttcggatcaatcgcgctctacttcggcatcatgttcgacttccacagcgccggaatccacgtgctcttcccttcggcattccaatttactggaaccgccagcaacgcgctcaggcagccatacatttggctcacgataatccttgccgtggctgtgtgcctgctgcctgtggtggctatacgcttcctgtccatgaccatctggccgtcagagtcggataagatccagaagcatcgcaagagactgaaggctgaagaacaatggcagcggcggcaacaggtgttccggcgcggtgtgtctacccggcggagcgcatacgcctttagccaccagaggggatacgccgacctgatctcatcgggacgcagcatccggaagaagcgctcccctctggacgccattgtcgccgacgggactgcagaatacaggcggaccggagactcg

SEQ ID NO: 318898 - DNA, 3753 bp, Artificial Sequence
  derived and/or modified sequence
atgtccacggagcgcgactcggagacgactttcgatgaggattcccaacccaatgacgaagtggtcccgtactccgatgatgaaactgaggacgaactggacgaccaaggcagcgctgtggaacctgagcagaatcgcgtgaatcgggaagccgaagaaaatcgggagccattccggaaagagtgcacctggcaggtcaaagccaacgataggaagtaccacgaacagccgcacttcatgaataccaagttcctgtgtatcaaggagagcaagtatgctaacaacgccatcaagacttacaagtacaatgcatttaccttcatccctatgaacctgtttgaacaattcaagcgggcggcgaatctctacttcctggctctgcttatactgcaggcggtccctcaaatctcgactctggcctggtacactaccctcgtgccactcctggtggtcctgggcgtgactgccatcaaggacctggtggatgatgtcgcacgacacaaaatggataaggagatcaataaccgcacgtgcgaagtgatcaaggacggccgcttcaaggtggcaaaatggaaggaaatccaggtgggagatgtgatccgcctcaagaagaatgactttgttccggcggatatcttgcttttgagcagcagcgagccgaattccctgtgctacgtcgaaactgctgagctggatggcgaaactaacctgaaattcaagatgtcactggaaatcacggatcaatacttgcagcgcgaggacactctggccacgttcgacgggttcatcgaatgtgaggaaccaaacaatcggctggataagtttaccgggacgcttttctggaggaatacctcgttcccgctggacgctgacaaaatcttgctgcgcggatgcgtcatccgcaacactgacttctgccacggccttgtgattttcgccggtgccgacaccaagatcatgaaaaactccggaaaaacccggttcaagcgcactaaaatcgattatctgatgaactacatggtgtacactatcttcgtcgtcctcatcctcctgtcagccggcctggctatcggtcatgcatactgggaggcacaagtgggcaactcgtcctggtacctttacgacggtgaggacgacactccgtcataccgcggattcttgatcttctggggatacattatcgtcctgaacacgatggtgccgatctccctctacgtgagcgttgaggtgattcggctgggacaatcccactttatcaactgggacctccagatgtactacgctgagaaggacaccccagccaaagcccgtaccacgaccctgaacgaacagctgggacaaatccattacatattctcggacaagaccggcactctgacccagaacatcatgacgtttaagaaatgctgcatcaatgggcagatatacggagatcatagagacgcttcacagcacaaccataacaagatcgaacaggtggacttttcctggaatacctacgcggacggaaaactggccttctacgaccactacctgatcgaacagattcagtctggtaaagagcctgaagtccgccaattcttcttcttgctggccgtgtgccacaccgtgatggtggaccggaccgatggacagcttaactaccaggcagccagccccgatgagggagcgctggtcaatgcggcacggaatttcggttttgcattcctggcgcggactcagaacactatcactatctccgaactgggcacggagcggacttacaatgtgctggccatcctcgatttcaatagcgacagaaagcgcatgtcgatcattgtccggaccccggaagggaacatcaagctgtactgcaaaggggcagacactgtgatctacgagcggctccatcgcatgaacccgaccaagcaggaaacccaagatgctctcgatatcttcgccaacgaaaccctgcgcactttgtgtctctgctacaaagagatcgaggaaaaagagttcacggagtggaacaagaagttcatggccgcgtcggtggccagcactaacagagacgaggcgttggacaaggtgtatgaagagattgaaaaggacctgatcctgctcggagcgactgccattgaagataagttgcaggacggggtgcctgaaaccatttcgaagctcgccaaggccgacattaagatctgggtgctcactggagacaagaaggagacggcggagaacattggttttgcttgcgagctgctcactgaagataccacgatttgctacggcgaggacatcaactcacttctccacgcccgcatggaaaaccaacgcaaccggggaggcgtctacgctaagttcgccccaccggtgcaggaatccttcttcccaccgggaggtaaccgcgcacttatcatcacgggatcgtggctgaatgagatcctgctcgaaaagaaaactaagagaaacaaaatcttgaagctgaagttcccgcgcactgaggaagagagaagaatgagaactcagagcaaacgtagactcgaagccaaaaaggagcagcgccagaaaaacttcgtggatctggcatgtgaatgctcggcagtcatttgttgcagggtgactccgaagcagaaggcgatggtcgttgacctcgtcaagaggtataagaaggccataacgctcgcaatcggcgatggtgccaacgatgtgaatatgatcaagaccgcccacatcggggtcggaatctcgggacaggaaggaatgcaagcagtgatgtcaagcgactactcattcgcccagttccggtacctccaacgccttcttcttgtgcatggtaggtggtcgtacatccgcatgtgtaagtttttgcggtactttttctataagaactttgccttcactctggtgcacttttggtactccttcttcaacggctactcagcccagaccgcatatgaggactggtttatcactctttacaacgtgctgtacacctcgctgccggttctgctgatgggactgttggatcaagacgtgagcgacaagttgtcgctgcggttcccgggactgtacatcgtcggtcagcgagacttgctctttaactataaacggttcttcgtctcgctgcttcatggagtcctgacctccatgattctcttcttcatcccgctcggagcgtatctgcaaactgtgggccaggacggagaggctccttccgattaccagtcttttgccgttactatcgcctcagcactggttatcactgtgaacttccagataggcctcgacacttcctactggaccttcgtgaatgcgttcagcatcttcggcagcatcgctctgtacttcgggatcatgttcgacttccactccgcgggaatccacgtgctgtttccctcagcttttcaattcactgggactgcatcaaacgcgctgcgccagccgtacatctggctgaccatcatcctcgccgttgctgtgtgtctcctccctgtggttgccatccgcttcctttccatgactatctggccttcggagtcggataagatccagaagcatcgcaaaagactgaaggcggaagaacagtggcaaagacggcaacaggtgttccggagaggcgtgtcgactcggcgctcagcgtacgcttttagccatcaacgcggctacgccgacctgatctccagcggacgctcaatccgcaaaaagcgcagcccactcgacgctatcgtggctgatggaactgcggaataccggcggaccggagactcg

SEQ ID NO: 318899 - DNA, 3753 bp, Artificial Sequence
  derived and/or modified sequence
atgagcacggaacgcgatagtgagactaccttcgacgaggactctcaacccaacgacgaggtggtgccctactctgatgacgaaactgaagatgaactcgacgatcagggcagtgccgttgaacctgagcagaacagggtgaacagagaggcagaggagaacagggagccctttaggaaagagtgtacatggcaggtcaaggccaatgaccgtaagtatcatgagcaaccacactttatgaatactaagttcctgtgcataaaggaaagtaagtacgcgaataatgctattaagacttacaagtacaacgcgttcaccttcatcccaatgaatctgttcgagcagttcaagcgagctgctaacctctactttttggcccttctgatactacaggccgtcccccagatctccaccctggcatggtacacgacattagttcctctattggtggttctgggagtaacagccataaaagacttagtagatgacgtagccagacacaagatggacaaagagattaataatcgcacatgtgaggtcatcaaagatgggcgttttaaagttgcaaaatggaaagagatacaggttggggatgtgattagactgaaaaagaatgacttcgtgcctgccgacatccttctcttatcatcatctgagcccaacagtctttgctacgtcgagactgcagagctcgacggggaaacgaatcttaaatttaaaatgtcccttgagatcacagaccagtacctgcaacgcgaggacacccttgcgacctttgacggatttattgagtgtgaggagccgaataacagactggacaaatttacaggcacgctgttttggaggaacacgtcatttccattggacgccgataaaatcctgttgagaggatgcgtgattaggaacactgatttttgtcatggtctggtcatttttgccggggccgatacaaagatcatgaagaactcaggaaaaaccagattcaagcgaacaaaaatagattatttaatgaattatatggtgtataccatttttgttgtgttgatcttgctatcagctgggctagccattggacacgcctactgggaagcccaggtgggtaacagcagctggtatctttatgacggagaagacgacactcctagctacaggggctttttgatattttgggggtacatcatcgttctgaacactatggtccccataagcttgtacgtgagcgtggaggtgataagattaggccagtctcactttatcaattgggacttgcaaatgtattacgccgaaaaggacacgcccgccaaagcgagaacaacaacactgaacgagcagctcggtcagattcactatattttcagtgataagacaggaacactcacccagaacatcatgaccttcaagaagtgctgtatcaatggacagatctatggtgaccatcgagacgcctctcagcataaccacaataaaatcgaacaggttgacttcagttggaacacttacgcagatggaaaattagcattttatgaccactatctaattgagcagatccagtcaggtaaagaaccggaggtgcgccagttctttttcttactggccgtctgtcacaccgtgatggtcgaccgtactgacggacagctaaactatcaggcggcgagccctgatgaaggcgccctcgtgaatgccgcccggaactttggattcgccttcttagcccgtacacagaacactatcacaatatccgagcttgggactgaacgcacatataacgtcctcgcaatcctggattttaattccgaccgtaaaagaatgagcataatagtgaggacccccgaggggaacatcaagctgtattgcaagggcgcagacacagttatctatgagcggctgcaccggatgaaccccaccaaacaggagacacaggatgccctagacatctttgccaatgagactcttcggaccttatgcctctgctataaagaaattgaagagaaagaattcactgaatggaacaagaaatttatggccgctagtgttgcttctaccaaccgcgatgaggccctggacaaggtgtacgaggaaatagaaaaagatctcatcctattgggggccacagctatcgaggataagcttcaggatggcgtgcccgagaccatatcaaaacttgctaaggccgacataaagatctgggtgctcaccggtgataagaaggagacagctgaaaacattgggtttgcttgcgaactgctcactgaggacactaccatttgctatggggaggatatcaacagtttgttacacgctcggatggaaaatcagagaaatcggggcggggtctatgccaagttcgccccacccgttcaggaatctttttttccacctggcggcaaccgggccttgattatcacaggaagctggcttaatgagatactgctagagaaaaaaaccaaaaggaataagatactgaagttgaagtttccgcgcactgaggaggaacggagaatgcgaacccagtccaaacgcagactagaggcaaagaaggaacaaaggcagaaaaactttgtggacctggcttgtgaatgttccgcggtgatttgttgtagggtgacccccaagcagaaagctatggtagtcgatttggtgaagagatacaagaaagcaatcacccttgccattggcgatggagccaacgacgtaaatatgatcaaaaccgcccacataggtgtcggcatctccggccaggagggcatgcaagcagttatgagttcagactactcctttgctcagtttcgctatctgcagaggctcctcctggtgcatgggagatggagctatattcgaatgtgcaagttcctccggtattttttctacaagaacttcgcattcacactggttcacttctggtactccttctttaacgggtatagcgcacagacggcctacgaggattggtttattaccctctataatgtgctttacacatcactgcctgtactcctgatgggcttactcgatcaagacgtgtccgataaattgagtctgaggtttcctggcctgtacatagtgggacagagggatctgctgtttaattataagcggtttttcgtctcgctgttgcacggcgttttgaccagcatgatcctgttttttattcctttaggcgcgtacttgcagaccgtaggccaggacggcgaggcaccctccgattatcagtctttcgcagtgacaatcgcgtccgctttagtcattacagtcaatttccagatagggctggacacaagctactggacatttgtgaacgcattttccatttttggcagtattgcactatatttcggaattatgtttgatttccatagcgccggcatccacgtgttatttccttcagcctttcaattcacaggcactgccagtaatgctctacggcagccgtacatttggctcacgataatcctggctgtggccgtttgccttctccctgttgtcgcaattcgcttcctctctatgactatatggccaagcgagtccgataagattcagaagcatcgtaagcgtctgaaggctgaggagcaatggcagcggcgtcagcaagtgtttagacgtggcgtgtccacacgacggtctgcctatgccttctctcaccaacggggttatgccgacctgatatcctcaggacgctctatacgaaaaaagaggagtcccctggatgctattgtcgccgacggcaccgccgaatatcgacgaacaggagacagt

SEQ ID NO: 318900 - DNA, 3753 bp, Artificial Sequence
  derived and/or modified sequence
atgagcacagagagagattccgaaactacttttgatgaggattctcagcctaatgatgaggtggtgccatactccgacgacgagaccgaggacgaattggacgaccagggtagtgcagttgagccagagcagaatagggtgaatagggaagccgaggagaatcgcgagcccttccgcaaggagtgtacttggcaggtcaaagcaaacgataggaagtaccatgaacagccccattttatgaacacaaaattcctctgcatcaaggagagcaaatatgctaacaacgctatcaagacatacaaatacaacgctttcaccttcatcccaatgaacttgtttgagcaattcaagcgtgcagcaaacctgtactttcttgctctcctgatcctgcaggccgtacctcagatctccactctggcatggtacactacccttgtgccactgctggtcgttttgggagtgaccgccataaaggatctcgtggacgacgtggcaaggcacaagatggacaaagaaatcaacaatcgtacatgtgaagtaattaaggatggcagattcaaggttgcaaagtggaaagagattcaggttggcgacgtgatcaggctgaagaaaaatgacttcgtgcctgctgacatacttctgctctcttcatcagagcctaattctctctgctacgttgaaacagcagaactcgacggcgagacaaatctcaagttcaagatgagcctggagatcactgaccagtacttgcaacgcgaggacaccttggctactttcgacggctttatcgaatgcgaagagcctaataacaggctggataaatttaccggtacccttttctggagaaatacctcatttcccctggatgcagataagatcctgctgcgcggttgcgtgatccgtaacaccgatttctgccatggattggttatctttgccggcgccgatactaagattatgaagaacagcggcaagactaggtttaagcgcaccaaaatcgattatcttatgaactatatggtgtataccatctttgtggtgctcatccttctgtccgctggacttgccatcggacacgcctattgggaggctcaagtgggtaactcatcatggtacctgtatgatggagaggacgacactccttcctaccgcggcttcctgattttctggggctatattatcgtcctgaatactatggtgccaatctcactgtatgtgtccgtggaggtgattcgtcttggtcagtcacactttattaattgggacctgcagatgtactacgcagagaaagatacccccgccaaagcaaggactacaactttgaacgagcagctgggccagatccactatatcttctcagataagaccggaacccttacccaaaacatcatgactttcaaaaaatgctgcataaacggccagatctatggcgaccatagggacgcttcccagcacaatcataataagatcgaacaagtcgatttttcatggaatacctacgcagatggtaaattggccttctacgaccattatcttattgagcaaatccagtcaggtaaagagcctgaggtccgtcaatttttctttctcctggccgtgtgccacactgttatggtagacaggactgacggacagctgaattaccaggctgcttcccctgatgaaggtgctctggtaaatgcagcccgtaactttggatttgcattcctggctaggactcagaacaccatcaccatatctgaactgggaactgagcgcacttataacgtgctggctatcctggacttcaactctgatcgcaaacgtatgtctataatcgttcgtactcccgagggcaacataaagctgtactgcaagggtgcagacaccgtgatttatgagcgcctccatagaatgaaccctactaagcaagagacccaggacgccctggacatatttgcaaacgagaccctgaggactttgtgtttgtgttacaaggagatcgaagaaaaggagtttacagagtggaacaaaaaattcatggccgcctcagtggcatcaactaaccgtgacgaagctctggataaggtctacgaggagatcgagaaggacctcattctgcttggcgcaacagcaattgaagataagcttcaagacggtgtgcccgagaccatctccaagttggctaaggccgacattaagatatgggtgctgacaggagacaagaaagagactgccgagaacattggattcgcttgcgagcttctcacagaggacaccacaatctgttatggagaggacatcaactccctcctgcacgccagaatggaaaaccaaagaaaccgtggtggagtctatgctaaattcgctccccccgttcaggaatccttctttcctcccggcggtaacagagccctcatcatcacaggcagttggctgaacgaaatcctcttggagaaaaagacaaagagaaacaagattctgaagctcaagtttccaagaacagaagaagaaaggaggatgagaacacagagcaagcgtaggttggaggccaagaaggaacagaggcagaagaactttgtggatttggcttgtgaatgctccgccgtcatttgctgcagagttacccctaagcaaaaggctatggttgttgacctcgtgaaacgctataagaaggctatcaccctggctatcggcgacggagccaacgacgtcaacatgataaagaccgctcacatcggagtaggtatatcaggacaggagggtatgcaggccgtcatgtccagcgactattccttcgcccagtttagatatttgcagcgtctcctcctcgtccacggcagatggagctacatccgtatgtgcaagttcctgaggtacttcttctacaaaaattttgctttcaccctcgttcatttctggtatagcttctttaacggttactctgctcaaactgcttacgaggattggttcattacactctataacgtactgtacacaagcctgcctgtacttctcatgggcctgcttgaccaagacgtcagtgacaagttgtctctgcgcttccccggactttacatcgtgggtcaaagggatcttctgttcaattacaagcgcttcttcgtctctttgctgcatggtgtacttactagtatgatcctgtttttcataccactgggagcatacctccagacagttggccaggatggagaggctccctcagattaccaatccttcgctgtcacaattgccagtgcactcgttatcactgtgaactttcagatcggcctggataccagctattggacattcgttaatgcattcagcatctttggttccattgccctgtactttggcatcatgttcgatttccactctgctggaatacatgtccttttccctagcgcattccagttcactggaacagcctctaacgcactcagacaaccctacatctggctcacaatcattctggcagtggccgtatgcctcttgcccgtcgtggcaatccgttttctctccatgaccatatggccttccgaatcagacaaaatccaaaaacaccgtaagagactgaaggcagaggaacaatggcagaggaggcaacaggtgttccgtcgcggcgtgtccactcgtagatctgcatatgctttcagccaccagagaggttacgccgatttgatctcctccggtcgtagcataagaaaaaagcgtagccctctcgacgctattgtggccgatggcaccgccgaataccgtcgcacaggcgacagc

SEQ ID NO: 318901 - DNA, 3753 bp, Artificial Sequence
  derived and/or modified sequence
atgtcaacggaacgagacagcgaaaccaccttcgatgaggattcacagccaaatgacgaggtggtgccgtactccgacgacgaaactgaggacgaactggacgaccaaggatcggcagtcgaacctgaacagaatcgggtgaaccgggaagccgaagaaaatagagagccatttagaaaagagtgcacctggcaggtgaaggcaaacgatcgcaaatatcatgagcagccgcatttcatgaacactaagtttctgtgcattaaagaaagcaagtatgcaaataacgcaattaagacgtacaaatacaacgcattcactttcatccctatgaatctgtttgaacagtttaagcgggctgcgaatttgtacttccttgcccttctcatcctccaggcagtgccgcagatctccactctcgcgtggtacactactcttgtgcctctgctggtggtgctgggcgtgaccgccattaaggatctggtggatgatgtcgcaagacacaaaatggataaggaaatcaacaacagaacttgtgaagtcataaaggacggccgctttaaagtggccaagtggaaggaaatccaagtgggtgatgtgatccgacttaagaaaaacgattttgtaccagcggacatcctgcttctgtccagcagtgaacctaactctttgtgttacgtggaaaccgccgaactcgatggcgagacgaaccttaagttcaaaatgtcactggaaatcaccgatcaatacctgcaacgcgaagatactcttgcgacgtttgacgggttcatcgaatgcgaggagccaaataaccgcctggacaaattcactggaactctcttctggaggaatacctcctttccactggatgcggataagattctcctccgcggctgtgtgattagaaacactgacttttgtcatgggttggtgatttttgcaggagctgatactaagattatgaagaactccgggaaaactcgctttaagaggaccaagattgattacctcatgaactacatggtgtataccattttcgtagttctgatcctcctttcagcagggctcgcaattggtcacgcgtactgggaggcacaagtcggtaactcttcgtggtacctttacgacggggaagatgataccccctcgtacaggggttttcttatcttctggggttatatcatagtgcttaatactatggtccccatttcactgtacgtgtccgtagaggtgatcagactgggtcaaagccatttcattaactgggaccttcaaatgtattacgccgaaaaggatactcctgccaaggcacggactactactttgaatgagcagctgggccaaatacattacatcttttcggataagaccgggacgctgacccagaacatcatgacgtttaagaagtgctgcataaacggtcagatctatggtgaccatcgagatgcatcacagcacaaccataacaagatagagcaagttgattttagctggaacacgtacgcagatggaaagctggcattttacgatcattaccttattgaacaaattcaatccggtaaggaacctgaggttcgccaattcttcttcttgcttgcagtctgtcataccgttatggtggatcgtaccgacggccaactgaattaccaggctgcgtcgcccgatgaaggtgcactggtgaacgcagcccggaattttggttttgcttttctcgccagaacgcaaaacaccattaccattagcgaacttggaactgaaaggacgtacaacgtgctcgcaatcctcgatttcaattccgatagaaagcggatgtccataattgtgagaacccctgaaggtaacatcaagttgtactgtaagggtgctgatacggttatctacgaaagactgcacagaatgaatcctacgaagcaagagactcaggatgcgttggacatattcgctaacgaaacgctccgtactctctgtctctgttacaaagaaatcgaagaaaaggaatttactgaatggaataagaaattcatggcagcaagcgtcgcatcgactaaccgagatgaagcacttgacaaggtctacgaagagattgaaaaagatttgatacttctgggcgcaaccgcaattgaggacaaacttcaggatggagtccctgaaactatcagcaaactggctaaggcagatatcaagatttgggtgcttactggtgacaagaaggaaactgctgagaatataggatttgcttgtgaacttcttaccgaagataccaccatctgctacggagaggacattaactcgcttctgcacgcaagaatggaaaatcaaagaaacagaggaggcgtctacgcaaagttcgcacctcccgtgcaagaatcgttcttccctccaggaggaaatcgagcactcatcattaccggatcctggctgaacgaaattctgctggagaaaaagaccaagcgaaacaagattcttaaacttaagttcccacgtactgaagaagagcggagaatgcggacccaatcgaagcggagactggaggcaaaaaaggagcagcgccagaagaacttcgtcgatttggcatgcgagtgttcggcagtgatttgctgtcgggtcacgccaaaacaaaaggcaatggtcgtggacctggtgaagaggtacaaaaaagcaatcaccctcgccattggcgatggagcgaatgatgtgaatatgatcaaaaccgcacatatcggtgtgggtatctcggggcaggaagggatgcaggctgtgatgagctcagactactcgtttgcccaatttcggtacctccaaagactgctccttgtgcacgggcggtggtcatacatccgaatgtgtaagtttctgagatacttcttttacaaaaacttcgcatttacccttgtccatttctggtacagctttttcaacggctactcggcacaaactgcatacgaggactggttcatcactctttacaacgtcttgtatactagcctccccgtgctccttatggggttgctggatcaagacgtgtcggataaactgtccttgcgcttcccaggactgtacatcgtgggacaaagagatctgctgttcaattacaagcgcttttttgtaagccttcttcacggcgtgcttaccagcatgattctgttctttattccgctcggtgcgtaccttcaaaccgtgggccaggatggagaggccccttccgactaccaatcctttgcggtcaccatcgcgagcgcactcgttatcaccgtcaacttccagatcggtctggatactagctactggactttcgtgaacgcattttccatcttcgggtccattgccctgtactttggaattatgttcgactttcattccgccggtattcacgtgctttttccctccgcatttcaatttaccggcactgcgtctaacgcactcaggcaaccatacatctggttgaccatcatcctggcagtggctgtctgtctgcttccggtggtggcgattcgttttctgtcaatgaccatttggccttcagagtcggataagatacaaaagcaccggaagcgcctgaaggcagaggaacaatggcagagacgccaacaagtctttcgcaggggagtgtccacgcgaagatcggcctatgcattttcacaccagagaggatacgcagaccttatctcgtcaggaagatcaattcgaaaaaagcggtcgccgctggatgccatagttgcagacgggaccgccgagtatcgcagaacgggtgactcg

SEQ ID NO: 318902 - DNA, 3753 bp, Artificial Sequence
  derived and/or modified sequence
atgtccacggaacgggactctgagaccacctttgatgaggatagccagccaaatgatgaagtggtgccttacagcgatgatgagaccgaggatgaactcgacgaccaaggttccgcagtcgaaccagaacaaaatcgagtcaacagggaagcagaagaaaacagagagccttttagaaaggaatgcacctggcaagtcaaggccaacgataggaagtaccacgaacagccccattttatgaacactaaatttctctgtatcaaagagagcaagtatgcaaacaacgcaatcaagacatataagtacaacgcgttcacatttattccgatgaacttgtttgaacaattcaagagagccgccaatttatactttctggcactgctgatcctccaggccgtaccccagatctcaacccttgcttggtataccaccttagtaccactgctggtcgtcctgggcgttacggctattaaagacctggtcgacgatgtggcccgccataaaatggataaggagatcaataacaggacgtgcgaagtaatcaaagatggccggttcaaagtggcgaaatggaaggaaatccaagttggcgatgtgattagactgaaaaaaaacgactttgtgccagcagacatactgctgctgagctcaagcgagcctaacagcctttgttacgttgaaactgccgaactggacggagagacaaacctgaagtttaagatgagcctcgagattacagatcaataccttcaaagggaagatactcttgccaccttcgacggattcatcgaatgcgaggagcccaacaaccggcttgacaagttcaccggaacacttttctggaggaacacatcctttccgctggatgctgacaagatccttcttaggggatgcgttattagaaacacggacttttgtcacggcctggtaatctttgccggcgcagacacaaagatcatgaagaactccgggaagaccaggttcaagaggactaaaattgactatcttatgaactacatggtctacaccatcttcgtcgttcttattctcctgagtgctggcctagctatagggcatgcctactgggaggctcaggtggggaacagctcgtggtacttgtacgacggagaagatgacacacccagctatagaggattcttgattttttggggatatattattgtcctcaacacaatggtgccgatctccctttacgtgagcgtggaggtcatcagactgggccagagccatttcatcaactgggatttacagatgtactatgctgaaaaagatactcccgcgaaagctcggaccactactctgaacgagcagcttggccagatacattacatcttttcagataaaacaggaaccctgacccagaatattatgaccttcaagaagtgttgtattaacggacagatctacggtgaccacagggacgcttctcagcacaaccataacaagattgagcaggtcgatttcagttggaacacgtatgctgatggaaaactggcattctatgaccactacctcatcgaacagatacagagcggtaaagaacccgaagtgaggcagttttttttcttgctggccgtgtgccatactgtgatggtggatagaacagacgggcagcttaactatcaagccgcctcaccagacgagggagctctcgtcaacgctgccagaaactttggcttcgctttcttggctaggacacagaatacaatcacaatctctgagctaggcaccgaacggacctacaacgtccttgccatcctggacttcaactctgacagaaagaggatgagcatcatcgtgagaacacccgagggcaatattaaactgtactgcaaaggggcagatacagttatttatgaacggctgcaccggatgaacccaaccaaacaggaaacccaagatgctcttgatatcttcgcaaacgagaccctccgtaccctatgtctatgctacaaggaaattgaggaaaaggaatttacagagtggaataagaagttcatggccgcttctgtcgcctcaacaaaccgtgatgaagcactcgacaaagtgtacgaggaaatagaaaaagacttgatactgctgggggcaaccgctatcgaggacaagttgcaagatggagtccctgagacaatcagtaagcttgccaaggcggatattaaaatctgggttttgaccggcgacaagaaggagaccgctgaaaatatcggatttgcatgcgagcttctgacagaggataccaccatctgctacggagaagacatcaattccctgcttcatgccagaatggaaaaccaacggaacagaggaggagtgtacgccaagtttgcgccgcccgtgcaagagagcttctttccaccaggcgggaacagagccttgattatcaccggctcctggctgaacgagatcctgcttgaaaagaagaccaagaggaacaaaatcctgaagctgaaattcccacggactgaagaagagcgcagaatgaggacacaaagcaaacgtagacttgaagctaaaaaggagcagcgccagaagaactttgtggacctcgcctgtgaatgctccgccgtgatctgttgccgggttactcccaaacagaaagcaatggtcgtggacctcgtgaaaaggtacaagaaggctatcaccctcgccatcggggacggagccaatgacgtgaacatgattaagacagctcacatcggagtcggaattagcgggcaggaaggcatgcaggctgtcatgagtagcgattactccttcgctcagtttagatacctccaaagactgctgcttgtccatgggagatggagctacatccggatgtgtaagtttctgcgctacttcttttacaagaacttcgctttcactctggttcacttttggtattccttttttaatggctatagtgcccagacagcctacgaggattggtttattacgctgtacaacgtcctttacactagccttcccgtgcttctcatgggattgttggaccaggacgtgtccgataagctgagtctgcgcttccccggactgtacatagtgggccaacgcgatctgctttttaactacaagagattttttgtgagcctgcttcatggggtgttgacgtctatgatcttgttcttcattccattgggagcgtatcttcagacagtgggacaagatggcgaggcaccatctgattaccagagtttcgccgttaccattgcctctgcactggtgattacagtgaactttcagatcggactagatacttcatactggacattcgtcaacgctttttctatcttcggctctattgcgctgtattttggcattatgttcgatttccacagcgcaggcattcacgtgctgttcccaagcgcctttcagttcacaggcacagcctcaaacgccttgcgacagccctacatatggctgaccatcatcctggctgtcgccgtgtgcctgctgccggtagtggctataaggttcctgtcgatgacgatttggccatccgagagtgacaagattcagaaacatcgcaagaggttaaaggctgaggaacagtggcaaaggagacagcaggtctttaggaggggagtatccaccaggcgatccgcttacgctttctcccaccagcgcggatacgccgacctcataagcagcggcagatcgatacgcaaaaaaaggagtcctctggatgcgatcgtagcggacggaactgccgagtacaggcgcacaggggacagc

SEQ ID NO: 318903 - DNA, 3753 bp, Artificial Sequence
  derived and/or modified sequence
atgtcaaccgagagagacagcgaaaccacattcgatgaggatagccagcctaatgatgaagtggtgccctactccgatgacgagactgaggatgagttggacgaccagggctccgccgtcgaaccagagcagaaccgagtcaacagggaagcagaggaaaatcgtgaaccttttaggaaggagtgtacatggcaagtaaaggcaaatgatcgcaagtaccacgaacagccgcatttcatgaacactaaatttctttgtatcaaagagtctaaatatgccaataacgccattaagacctataaatataatgcatttaccttcatacccatgaatcttttcgaacagttcaagcgggccgcgaacttgtatttcctggcattacttatactgcaggccgtgccccagatcagcacgctcgcctggtacacaacactggtccctctcctggtggtcctgggcgtcaccgccattaaggatctggtagatgatgtggctcggcacaaaatggataaagagatcaacaaccgcacctgtgaagtaattaaagacggccggtttaaggtggctaagtggaaggagattcaagtgggtgacgttattaggctgaagaaaaacgactttgttcctgctgacatcctcctgctgtcatccagcgaacccaacagcttatgttatgtggagactgccgagctggatggcgagactaatctcaaattcaagatgtccctcgagataaccgaccagtacctgcagagagaagatacgctggcaaccttcgacggtttcattgaatgcgaagaacctaataaccgattggacaagtttactggcactctgttctggcgcaacacgagcttcccactagacgccgacaagatccttttgcggggttgtgttatccgcaacaccgatttttgccacggtctcgtaatattcgctggagccgatactaaaatcatgaagaattcgggaaagactcgttttaagcggactaagattgattacctgatgaactacatggtgtatacaatcttcgtggtacttatcctcttgagcgcaggattggccatcggtcacgcgtactgggaggcacaggtcggcaacagcagttggtatttgtatgatggcgaagacgacaccccttcctatcgagggtttctaattttctggggatatatcatcgtccttaataccatggttccgatttcactgtacgtctccgtggaggtcatccgcctgggacagtcacacttcataaattgggatctgcagatgtactacgccgaaaaggataccccggccaaagccaggactactacacttaacgaacagctgggacagatccattacatcttcagcgacaagacaggaacactgacccagaatatcatgaccttcaagaagtgctgcatcaatgggcagatttacggggatcacagagacgcgagtcagcataatcacaacaagattgagcaagttgacttctcttggaacacgtatgccgacggcaagctcgccttttatgatcattatctcattgaacagattcagagcggcaaggaacctgaggtgaggcagttcttcttcctgttggccgtctgccatacggtaatggtggatcgaactgatgggcaactgaattaccaggcagcatctcccgacgagggagcgctcgtgaatgccgctagaaatttcggctttgcatttctggccagaacccaaaacaccatcacaatcagcgaactcggcactgaaaggacgtataatgtgctggcgatcctggactttaacagtgatcgcaaaagaatgagcattatcgtccggacgccagagggaaacatcaaactgtattgtaagggcgctgacactgtgatttacgagcggctccaccgtatgaatcctaccaaacaggaaacacaggacgccctagacatttttgctaacgaaaccctcagaacactttgtttgtgttacaaggagatagaggaaaaagaattcacggaatggaacaagaaatttatggcagcttctgtggcctccacgaacagagatgaggctctggacaaggtgtatgaggaaatcgagaaagacctaatcctgcttggggcaaccgctatcgaagacaagctgcaggacggagtgcctgaaacaatttccaagctagccaaggctgacatcaagatttgggtgttgaccggcgacaagaaagagaccgcggagaacatcggatttgcatgtgagttactgacagaggataccacgatctgctatggcgaggatattaactccctgcttcacgccaggatggagaaccagcgcaaccggggtggcgtctatgccaaatttgctcctcccgtgcaagaaagcttctttccgcccgggggaaatcgggccctgattattacagggtcctggctgaacgagatactccttgaaaagaagactaaaaggaacaagatcttgaaattgaaattcccaaggacggaagaggaacgacggatgcgaactcagtcaaagagaaggctagaggcaaagaaagaacagcgacagaaaaactttgtggacttggcctgtgagtgctctgccgtgatttgctgtcgagttaccccaaagcagaaggccatggtggtggacctggtgaagcggtacaagaaggcaatcaccctggcaataggggacggggctaatgacgtgaatatgattaaaactgcccacatcggcgtgggaattagtggacaggagggcatgcaggccgtgatgtctagcgactacagtttcgcgcagttcaggtacttgcagcggctcctgctggtgcacggtcgatggtcctatattcggatgtgcaaattcctgaggtacttcttttacaaaaatttcgcatttacgctggtgcacttctggtactcttttttcaacggctacagtgctcagacagcatatgaagactggtttattacactgtacaatgtgctgtacacatcacttcctgtgctactcatggggctgctggatcaggatgtctccgataagctctcattgcgatttcccggactctatatagttggccagagggacctcctgtttaactacaagcgattttttgtcagcctgctacatggagtcctcacttctatgatccttttttttatcccgctgggcgcatatctacagacagtgggccaggacggggaggccccttctgattatcagtcatttgcggtgacaatcgcaagcgctttggtcattaccgtgaacttccagatcggtctcgatacaagctattggaccttcgtcaacgctttctccatctttggctcgattgcgttgtacttcggtatcatgtttgatttccactcagccggtattcacgtgctcttcccctccgctttccagtttacgggcaccgccagtaatgcattgcgtcagccgtatatatggctcacgatcatattggccgttgcggtttgtctactccctgttgtggccattagattcctgagtatgactatttggcccagcgaatcggacaagatccagaaacatagaaagaggctcaaagccgaagaacagtggcagagaaggcagcaggtgtttcgtaggggagtgagtacccgtcggagtgcctatgctttctctcatcagcgcggttacgcagatttgatttccagcggcaggagcatcaggaagaaaagatctccactggacgccatcgtagccgatgggacagccgaatatcgacggactggcgattcc

SEQ ID NO: 318904 - DNA, 3753 bp, Artificial Sequence
  derived and/or modified sequence
atgtcaacagaacgtgatagcgaaactaccttcgatgaagactcacaaccaaatgatgaggtcgtcccctactcagatgatgagacagaagacgagctggatgaccagggaagcgccgtggaacccgaacagaatagagtgaatagagaagccgaggagaatcgtgaaccatttcgtaaggaatgtacctggcaagtcaaagcaaacgatcggaaataccacgaacaaccacacttcatgaacacgaaattcttatgcattaaggagagcaaatatgcaaataacgctattaaaacctacaagtataatgccttcacatttatacccatgaatctgtttgaacaattcaagagagcggcaaacttgtactttctcgccttgttaattctgcaagccgttccccagatttcgactctcgcctggtacactacccttgtgccattgctggtggtccttggcgtgacagctataaaggaccttgttgacgatgtagctaggcataagatggacaaggagattaacaatagaacttgcgaagtcatcaaggatggcaggtttaaagtggctaagtggaaggaaatccaagtcggggacgttataagactgaagaagaatgattttgtgcccgcagatatccttttgttgtcttcctccgaacctaactccttgtgctatgttgagacagcagaactcgatggagagacgaatctgaagtttaaaatgagcctggagatcaccgatcagtatctccagagagaagacacactggccaccttcgatggcttcatcgagtgcgaagaacctaataatcgactggacaaatttaccggcacactgttttggagaaacaccagtttcccactagatgccgataaaatccttttaagaggatgcgtgataaggaatacagatttctgccacggcctggttattttcgctggcgccgacactaagataatgaaaaattctggaaagacaagattcaaaaggactaagattgattaccttatgaattacatggtgtacaccatcttcgtagtgttaatcctgcttagtgccgggctcgcaattggccacgcatactgggaagcacaagtagggaattcctcgtggtacctgtacgacggtgaggatgataccccatcatatcgcggcttcttgattttctggggttacataattgtcttgaataccatggtgcccattagcctttacgtgtccgtggaagtcattagactcggccaaagccacttcataaactgggacctccagatgtactatgccgagaaggacactcctgcaaaagcaaggacaacaactctgaatgaacagctgggacagatccactacatattttcagacaaaactgggactttaacccagaacatcatgactttcaagaagtgttgcatcaatggacagatatatggtgatcatcgtgacgcgtcacagcacaaccacaacaaaattgagcaggtggacttctcgtggaatacatatgccgatggcaagttggccttctatgatcattacctgatcgagcaaatacagtcgggcaaggaaccagaggtgcggcagtttttctttctcttagctgtctgtcacactgtcatggtcgataggacagacggtcagttgaattatcaggcagcttcaccagatgaaggggcacttgtcaatgccgcccggaattttggatttgcctttcttgctcgaactcagaatacgatcacaatctccgaattgggaactgagcgtacttacaatgttctggccattttagattttaatagcgacagaaagagaatgtctataattgtgcggactcccgaaggcaacattaagctgtactgtaagggagccgacaccgtgatttatgaaagactgcaccggatgaatcctacaaaacaagagacacaagatgcattagacattttcgccaacgagacactgaggactctgtgcctgtgctacaaagaaattgaagaaaaagagttcacagagtggaataaaaagttcatggcggcaagcgtggcttctaccaacagggacgaggctttggacaaggtctacgaggaaattgagaaggatttaattctactcggcgctactgccatcgaagacaaactccaggatggcgtgccagaaactatctccaagcttgcaaaggctgatatcaagatctgggtcctcactggagacaaaaaggaaactgcagagaacatcggtttcgcgtgcgagctcttgacggaagacacaacaatttgttacggagaggatattaattcattgttgcacgcgagaatggaaaaccaacgaaaccgcgggggagtttatgcaaaattcgcacctcccgtccaagagtcattcttccctccaggagggaatcgagcgctgataataaccggctcttggctgaacgagatcctccttgaaaagaagacaaaaagaaacaaaattctgaagctcaaatttccgcgtacagaagaggagagaaggatgcgcacgcaatccaaacgcaggcttgaggcgaaaaaagaacagagacagaaaaatttcgtggatcttgcgtgtgagtgtagcgccgtgatatgttgtcgagtcacacccaaacagaaagccatggtagtagatctcgttaaacgatataagaaggctattaccctggccatcggagatggcgccaatgatgtgaatatgatcaagacagcccacattggagtcggcatctctggacaggaaggaatgcaggccgtcatgtcttccgactattcgttcgcacaattccggtacctgcagaggttgttgttggtgcacggcagatggagctatattcgcatgtgtaagtttctgagatatttcttttataagaattttgcctttaccctggtccatttttggtattcgtttttcaacgggtattcagcccagaccgcctacgaagactggtttataacattgtacaatgtgttatatacatctttaccggtgttgcttatggggttgcttgatcaagatgtgtccgacaaactgtcactgcgtttcccgggcctctatatcgtggggcaacgagacttactgttcaattacaaaagattctttgtgtccctgctgcacggggtactgacttctatgattctatttttcatcccactgggagcttaccttcagaccgtgggccaggacggcgaagcccccagcgattaccagtcttttgccgtgactatcgcttccgctttggtgatcaccgtaaatttccagatcggcctggacacaagttattggacttttgtgaatgccttctctatctttggcagtatcgctctttatttcggcatcatgtttgacttccacagcgcaggcatccacgtcctttttccatccgccttccagttcactggaaccgcatctaatgccctgcgccaaccatacatctggttaaccatcatcctggccgtagcggtctgtctattgcccgtggttgctatccgatttctgtcaatgacaatctggcctagcgagagtgataaaattcagaaacataggaagagactgaaagccgaagagcagtggcaacgacgtcaacaggtctttcgaaggggagtcagcaccagacgcagtgcttacgccttttcgcatcaaagaggctacgcagacttgatctcgagcggccgatcgataaggaaaaaaagatcaccactggacgcaatcgtggctgacggtaccgccgagtatcggcgtaccggagatagt

SEQ ID NO: 318905 - DNA, 3753 bp, Artificial Sequence
  derived and/or modified sequence
atgtctactgaaagagactcagaaaccactttcgacgaggattcgcagcctaatgacgaggtggtgccatactcagacgacgagactgaagatgagctggatgaccaaggaagcgcagtggaaccggaacaaaacagggtcaacagagaagccgaagaaaacagagaaccctttaggaaggaatgcacgtggcaggtgaaagcgaacgacaggaagtaccacgaacaaccgcactttatgaacactaaattcctgtgcatcaaggagagcaagtacgctaacaacgctatcaagacttacaagtacaacgccttcaccttcatcccgatgaacctctttgaacagtttaagcgcgccgcgaacctgtacttcctggcgcttctcatccttcaggcagtccctcagatttccactctggcttggtacaccactctggtgccactgctcgtggtgttgggagtgactgcaattaaggaccttgtggatgacgtcgctagacacaagatggataaggagatcaacaaccggacctgcgaagtgatcaaggacggacgcttcaaagtagctaagtggaaggaaatccaagtcggagatgtgatccgcctgaagaaaaatgacttcgtacctgctgacatcctcttgctttccagctcagagccaaattcactgtgctacgtggaaactgccgagctcgatggggaaaccaacctgaaattcaaaatgtccctggaaatcaccgaccagtacctgcagcgcgaggacaccctggccacgttcgatggattcatcgaatgcgaggagccaaataaccgccttgacaaattcactggaaccctcttctggcggaacaccagcttccctctcgatgccgacaagatccttcttaggggatgcgttatccggaatactgatttctgccatggcctggtcatctttgctggggccgacactaagatcatgaagaattcgggcaagacccggttcaaacgcaccaagatcgattacctgatgaactatatggtgtacactatcttcgtggtcctgattctgctgtcggccgggctggctatcggacacgcctattgggaagcacaagtcggcaactcgagctggtacctctacgacggagaggacgatacgccgtcgtacagaggctttttgatattctgggggtacatcatcgtgctgaacaccatggtcccaatttccctgtacgtgtcagttgaggtgatcagactcggacagtcccacttcataaactgggacttgcagatgtactacgcggaaaaagatactccggcaaaggcgcggaccaccaccctcaacgagcagttggggcagatccactacatcttctccgataaaactggtactttgacgcagaatatcatgacgttcaaaaagtgctgcatcaacggtcaaatctacggcgaccatcgtgacgcttcgcaacataatcacaataagatcgaacaagtcgacttcagctggaacacctacgccgacgggaaactggccttttacgatcattacctcattgaacagatccaatcaggaaaggaaccggaagtgcgccagttcttcttcttgttggcggtctgtcacaccgtgatggtggaccgcactgatggccagctgaattaccaggcggcgagccccgacgagggagctctcgtcaatgccgctcgcaattttggcttcgcatttctggcgcgtactcaaaacaccatcaccatttccgaactgggaaccgagcgcacgtacaacgtcttggccatcctggacttcaactcagaccggaagagaatgtcgatcatcgtccgcactccggagggaaatatcaagctctactgcaagggagcagacacggtgatctacgagcgcctgcaccggatgaacccaactaagcaggaaactcaagacgcactggatatcttcgcgaacgagactcttagaaccctgtgtctgtgctataaagagatcgaggagaaggaattcactgaatggaacaaaaagttcatggccgcttccgtggcttctacgaaccgcgacgaggcactggacaaagtgtacgaggagatcgaaaaagacctcatcctgctcggagcgaccgctattgaagataaactgcaagacggcgttcctgagactatctccaaattggcaaaggccgatatcaaaatctgggtcctgaccggtgacaagaaggaaaccgcggaaaacatcggcttcgcctgcgagttgctcactgaagataccaccatctgctacggcgaggatatcaactcgcttcttcacgcccggatggaaaatcagcggaatagaggaggggtctacgctaagttcgccccgccggtccaggaatccttttttcccccgggaggcaatagggccctcatcatcaccggatcctggctgaatgaaatactcctggaaaagaaaaccaagcgcaacaagatcttgaagctcaagttcccgcgcaccgaggaggaacggcgcatgcgcacccagagcaaaagacggcttgaggcgaagaaggaacagcggcagaagaattttgtcgacctcgcctgtgagtgctcagcggtgatctgttgccgggtgacccctaaacagaaggcaatggttgttgacctcgtcaagaggtacaaaaaggcaatcaccctcgccatcggcgatggagcgaacgatgtaaacatgatcaaaaccgcgcatatcggagtgggaatatccggtcaggaaggtatgcaggccgttatgagcagtgattactccttcgcacaatttcgatacctgcagcggctcctgctggtccatggacgatggagttacatccgaatgtgtaagttcctgcgttacttcttctataagaacttcgccttcacgctcgtccacttctggtactcgttcttcaatggctactcggcccaaacggcctacgaagattggtttatcactctttacaacgtcctgtacacttccctgcccgtgctgcttatgggactgctcgatcaggacgtgagcgataaactttcgctccgcttcccaggactgtacatagtcggtcagcgcgacctcctcttcaactacaagaggttctttgtgtccctgctgcatggggtgctgacttctatgatcctgttctttatcccgcttggagcgtacctgcagaccgtgggacaggatggagaagctccatccgactatcaatcgtttgctgtaactattgcttccgccctcgtgattaccgtcaattttcagattggactcgacacgtcctactggactttcgtgaatgccttctcaattttcggatcgatcgcattgtacttcggtatcatgttcgattttcattcagcaggtatacacgtgctctttcctagcgcgttccaatttactggcactgccagcaatgcgttgagacaaccctacatctggctgactattatcctggccgtggcagtgtgtctcctgccggtcgtcgcaatccggttcctgagcatgaccatttggccctccgaaagcgacaagattcagaagcaccgcaagaggctcaaggcagaagagcaatggcagcgtcgccaacaagtgttccgccgaggagtgtcgactcggcggtccgcttatgcgttcagccatcagcgcgggtacgccgacttgatctcgtcgggacgctcgatccgcaagaaaaggtccccactcgacgccatcgtcgcagacgggaccgcagaataccggagaacgggtgattca

SEQ ID NO: 318906 - DNA, 3753 bp, Artificial Sequence
  derived and/or modified sequence
atgtccacagaaagggatagcgagaccacctttgatgaggactcccagccaaatgacgaggtcgtgccttacagcgatgacgagacggaggatgagcttgacgatcaggggagcgctgtggagcccgaacagaatagggtgaatagagaagcggaagaaaatagagagcctttccgaaaggaatgtacgtggcaagtaaaagccaatgatagaaagtaccacgaacagccgcacttcatgaacacaaaattcctttgtataaaagaatctaagtatgccaataacgccataaaaacctataaatacaacgccttcaccttcattccaatgaatctgttcgagcaattcaaaagagctgccaacctgtactttttggccctcttgatcttacaggcggttccccagatatccacactagcttggtacacaaccttagttcctctgctggtggtgctgggagtgaccgcgattaaggacctggttgatgacgtggctcgacacaagatggataaggaaataaacaacagaacgtgtgaggtgattaaggacggccgattcaaggtcgccaaatggaaggagatccaggtaggtgacgtgattaggctcaagaaaaatgattttgtgccagccgatatccttctactctcttcgagtgaacccaacagtctttgctatgtggaaactgccgaactcgacggggaaaccaatcttaagtttaagatgtcattggaaattaccgaccaatacctccagagggaagacactttggcaacatttgacggatttatcgagtgcgaggagcctaataacaggctggataagttcaccggcacccttttctggcgaaacacttctttccccttggatgcggataagattcttctaagaggttgtgtgattcgtaacactgacttctgtcacggcctcgtgatctttgctggggcagatactaaaatcatgaagaactctggaaagacccgatttaagcgcaccaaaatagactacctgatgaattacatggtttacacaatattcgtggttcttattctgttgtcagcaggcctcgccattggccatgcgtattgggaagcccaagtgggaaatagctcctggtatctttacgacggcgaggacgacaccccctcctaccgtgggttcctcatcttttggggttacataatcgtgctgaatactatggtgcccatctccctgtatgtaagcgtcgaagtgatacgcttgggccagagccattttattaattgggatcttcaaatgtactatgctgagaaagacacccctgccaaggcccggactactactctgaatgagcaactcgggcaaattcattacatctttagtgataagaccggaaccctgacacagaatatcatgacctttaagaagtgttgcattaatggacagatctatggcgaccacagagacgcttcccagcataatcataacaaaatcgagcaggttgatttctcctggaacacctacgccgacggcaaattagccttttacgaccactatcttattgaacagattcagtccggaaaagagcccgaagtacggcagttcttcttcctcctagctgtatgccatactgtgatggtagatcgcaccgatgggcagctgaattatcaggcagcatccccagacgagggagccctggtcaatgccgcacgtaacttcggattcgcctttttggcaagaacccaaaatactataactatctccgaactgggcaccgagagaacctacaatgtgcttgccattctcgactttaattctgaccgcaaacgaatgtccatcattgtgagaactcctgaggggaatattaagttatattgcaagggtgccgataccgtaatctacgagaggctgcaccgtatgaacccgacgaagcaagagacacaggatgctctcgacatttttgccaacgagaccctgcgtacgctgtgcctctgctataaagagattgaggaaaaagagtttacagaatggaacaagaagttcatggccgcatctgtcgcgtcaacaaaccgcgacgaggccttggacaaagtttacgaagagatcgaaaaggatctgattctactgggcgcgaccgcgatagaagacaagctccaggacggagtacctgaaacaatctctaagctcgccaaagcagatatcaagatttgggtgctcacgggagataagaaggaaacggcggagaacatcggcttcgcctgcgaattgcttactgaggacacaacgatttgttacggcgaagacattaactctcttctgcacgcaagaatggaaaaccagcggaaccgtggtggagtgtatgctaaatttgctccccctgttcaagagagttttttcccaccaggcgggaacagagccctgatcatcacagggtcctggctgaacgagatcctgctagaaaagaaaacaaaacggaataaaatactgaaacttaagtttcctaggactgaggaggagcgtaggatgcgcacccagagcaagcgtaggctcgaagcgaagaaagagcagcggcagaagaatttcgtggatttggcatgcgagtgttcagcagtgatttgttgtcgcgtcactcctaaacagaaggccatggtcgtggatctggtcaaaaggtacaagaaggcaatcacacttgcgataggtgacggcgcaaatgacgtgaacatgatcaagactgcgcatattggggtgggcatttctggacaagagggcatgcaggctgtgatgtccagtgactactccttcgcacaatttcggtacttgcagcgcctactgctggtgcacggcaggtggagttatatccgcatgtgcaagtttctccgctattttttttataaaaactttgcttttacgttggtacacttctggtactccttttttaacggttatagtgcacagaccgcttatgaggattggttcatcactctatataacgtcctttataccagcttacctgttctcttgatggggctactggaccaggatgtaagcgacaagctatccttgcggtttccaggactctacatagtgggacagcgggatctcctatttaattacaagaggttctttgttagcctcctgcacggggtccttacaagcatgatcctcttttttattcctttgggggcctacttgcaaacagtcggccaagacggcgaagccccttccgattatcagtctttcgctgtgacaatcgcctccgcactggtgatcaccgtaaacttccaaatcgggctggacacttcgtactggactttcgtgaacgcatttagtatcttcggttccatcgcgctgtacttcggcatcatgtttgacttccattccgctgggattcacgtgctcttcccttcagccttccagttcactggtactgcatctaacgccttgcggcaaccctacatctggcttactattattttagcagtcgccgtgtgtctattgcctgttgtagcgattagattcctgtctatgactatttggccctccgagagtgacaagattcagaaacatcgtaaaagactcaaagccgaagaacagtggcaacggagacagcaagtttttcgcaggggcgtgagcaccaggcggagcgcctatgcattttcacaccagcgtgggtatgcagatctgattagctcaggaagatctattcgaaagaagcggtctcccctcgatgcgatcgtggctgacggaactgccgagtaccgtagaaccggggactca

SEQ ID NO: 318907 - DNA, 3753 bp, Artificial Sequence
  derived and/or modified sequence
atgagcactgagcgcgactctgagactactttcgatgaggacagccagccgaacgacgaggtcgtgccttactcagacgacgaaaccgaggacgagctggatgatcaaggcagcgccgttgaaccggaacaaaacagagtgaacagagaggcggaagagaacagagaaccgttcaggaaggaatgcacctggcaagtcaaggccaatgacagaaaataccatgaacagccccatttcatgaacactaagtttctctgcatcaaggaatctaagtacgccaacaacgccatcaagacttataagtacaacgcgttcaccttcatcccgatgaacctttttgaacagtttaagcgcgcggccaacctgtacttcctggcccttctcatcctccaggcggtgccacagatctcgaccctggcttggtacaccacgctcgtcccgctcctggtggtgctcggagtaaccgcgatcaaggacctggtggacgatgtggctcgccataagatggacaaggaaatcaacaaccgcacttgtgaagtgataaaagacggacggtttaaagtggccaagtggaaagaaatccaggtgggtgacgtgattagactcaagaaaaatgatttcgtgccggctgacatcctgcttctctcctcatcggagccaaattcactctgctacgtggaaaccgccgagctggacggcgagactaacctgaagtttaagatgtccctcgagatcacggatcagtacttgcagcgggaggacacgctcgccacctttgacggcttcatcgagtgcgaggaacctaataacagattggacaagttcaccgggacccttttttggcgcaacacttcattccccttggacgcagataagattctgctgaggggatgcgtgatccggaatacggatttttgccacggtctggtcatcttcgccggggccgacaccaagatcatgaaaaactccggaaagaccagattcaaacggaccaagatcgattacctcatgaattacatggtgtacactatctttgtggtcctcatcctgctgagcgccggcctcgccatcggccatgcatactgggaggcgcaggtggggaattcgagctggtacctttacgatggcgaggatgacactccatcctaccggggcttcctgatcttctgggggtacattattgtgctgaacactatggtgcctatctctctgtacgtcagcgtggaggtgatcagattgggccaatcgcacttcatcaactgggacctgcaaatgtactacgcagaaaaggatactcctgcaaaggcgcggaccaccaccttgaacgaacaactcggacagatccactacattttctccgacaagacgggcactctcacccaaaacatcatgaccttcaagaaatgctgcatcaacggacagatctacggcgaccaccgggacgcctcccaacacaatcacaacaaaatcgagcaggtggatttctcgtggaacacttacgcagacgggaagctcgctttctacgatcactaccttatcgaacagatccagtctggaaaagagcccgaagtgcgccaattcttttttcttctggccgtgtgccatactgtgatggtcgaccgcaccgatggacagctgaactaccaggcagccagcccagatgaaggagcactggtcaatgctgccagaaatttcggtttcgcttttctggctcggactcagaacactatcactatcagcgagcttggaactgagcgcacttacaacgtcctggcaatcctcgactttaacagcgatagaaagcggatgtccatcattgttcgcactccggagggcaacatcaagctgtactgcaaaggagccgataccgtcatctacgagaggctgcatcgcatgaacccgactaagcaggaaactcaggatgcgctggacatcttcgccaacgagacgctgcggactctctgcctgtgctacaaagaaatcgaagagaaggaattcactgagtggaacaaaaagtttatggctgcctctgtggcatccaccaaccgggacgaagcactggacaaagtgtacgaagaaatcgagaaggacctgattctcctcggagcgactgccatcgaagataagctgcaggatggggtgcctgaaaccatctcaaagctggcaaaagccgacatcaagatatgggtgttgaccggagataagaaggaaacggcagagaatattgggtttgcctgtgaactgctcacggaggataccaccatttgctacggagaggacatcaactcactgctgcatgctcggatggaaaatcaaagaaatcggggaggcgtttacgctaaattcgcaccgccagtgcaagagtccttcttcccacctggtggaaaccgcgcgcttatcatcaccggaagctggctcaatgagatcctgctggaaaagaaaacgaagcggaacaaaattctgaagctgaagttcccacggaccgaggaagaacgccggatgaggacgcagtcgaaacggcggctggaggccaagaaggaacaacgccagaaaaacttcgtggacctggcctgcgaatgtagcgccgtgatctgctgcagagtgacccctaaacagaaggccatggtggtggatctcgtcaagcgttacaagaaggccatcactcttgccatcggcgacggcgctaacgatgtgaacatgatcaagaccgcccacatcggcgtcggaatctcgggtcaagagggtatgcaggcagtgatgtcgagcgactactcgtttgcccagttccgctatctgcaacgcctgctcctggtgcatggtagatggtcgtacattcgcatgtgcaagtttctgcggtacttcttctacaagaatttcgctttcacgctggtgcatttctggtacagcttcttcaacggatactcagcgcaaactgcgtatgaagattggttcatcacgctgtacaatgtcctgtacacttcgctgccggtgctgctgatgggacttctggaccaggacgtttcagacaaactttcgctccgttttcctgggctgtacatcgtgggccaaagggatctcctcttcaattacaagcggttcttcgtctcgttgttgcacggagtgctcacctccatgatcttgttcttcatcccactgggagcatatctgcagactgttggacaggacggggaagctccgagcgactaccagtccttcgcggtgaccattgcgagcgctctggtgatcaccgtcaacttccagatcggacttgacacttcgtactggaccttcgtgaacgccttcagcatcttcggttccattgccctgtacttcggaatcatgttcgatttccattcggcaggaatccacgttctgtttccgagcgcattccaatttaccggcaccgcctccaatgcgctccggcaaccatacatctggctcactatcatccttgctgtggccgtgtgtctcctcccagtggttgccatcagattcctctctatgaccatctggccgagcgaatcagacaagatccaaaagcacagaaaacggttgaaggccgaggaacaatggcagcgccgccagcaggtgttccgccgaggtgtgtcgactcggcggagcgcctatgcgttcagccatcagcgcggatacgcggatctcatcagctcaggacgctcgatccgcaagaagcgcagcccgctcgacgccatcgtcgcggatggaaccgccgaataccggaggaccggagactcc

SEQ ID NO: 318908 - DNA, 3753 bp, Artificial Sequence
  derived and/or modified sequence
atgagcactgagcgagattcagagaccacttttgatgaagactctcagcccaacgacgaagtcgttccttactccgatgacgagaccgaagatgagcttgatgaccagggctctgcagttgagcctgaacagaaccgagttaacagggaggctgaggagaatcgtgaaccatttaggaaggaatgtacgtggcaagttaaggcgaatgataggaagtatcatgagcagccccattttatgaatacaaaatttttatgcatcaaagagagtaagtacgctaacaatgctattaagacttacaagtacaacgctttcacatttatacctatgaacctctttgagcagttcaagagggctgctaacttgtatttccttgctctgttgattcttcaagcagtgccccaaatttccacgctggcttggtacacaaccctggtgcccttgctggtcgttttgggtgttacagctataaaggacctggtcgatgatgtcgcacgccacaagatggataaggagattaacaaccgaacctgcgaagtcattaaggacggccgcttcaaggtggcgaagtggaaggaaatccaagtgggcgatgtgatacggctgaaaaagaatgacttcgtgcccgctgacatcttgctcttatcgtcatcagaacctaattccctctgttacgtcgaaaccgccgagctggacggggagaccaacctgaaatttaagatgtcgctcgagatcaccgatcagtatctgcagcgggaagacacgctggcgaccttcgatgggtttatcgagtgcgaggagcccaataatcgtcttgacaagttcaccggaacgctgttctggaggaacaccagcttcccccttgatgccgataaaatccttctcaggggatgtgtaattcggaacactgacttctgccatggccttgtaatcttcgctggtgccgataccaaaattatgaagaactccggcaaaacacgtttcaaaaggacaaaaatagattacctgatgaactatatggtgtatacgattttcgtggtattgatcctgctgtctgccggtttagccatagggcatgcatattgggaggcacaagtggggaacagttcgtggtacctctacgacggtgaggatgatacacccagctatcgtggattcctgatcttctggggatatattattgtgctgaacacgatggtacccatctctctctacgtctccgtggaagtgatccgcctcggtcagtcgcatttcattaactgggacttgcagatgtattatgctgagaaggatacacccgccaaagcccgcaccacaaccctcaacgagcaactgggccagatccactatatattttccgacaaaaccggtaccctcacccaaaatattatgacattcaagaaatgttgcatcaacggacagatttacggcgaccatcgagatgcctcccagcacaatcacaataaaattgagcaagttgacttctcgtggaatacatatgctgatggaaaactggccttttatgatcattatctcatcgaacaaatacagagcggcaaagagccagaggtacgccaatttttcttcttgttggctgtttgccatacagtgatggtggatagaaccgacggtcagctgaactatcaagccgccagtcctgatgagggcgccttggttaacgcagccagaaattttgggttcgctttcctcgcacgcacccagaataccataactattagtgaactcggaactgaaaggacctacaatgttctcgcaatcctggactttaactccgacaggaagcggatgtccattattgtccggactcccgagggcaacataaaactgtactgtaaaggggctgatacagtcatctatgaacggctgcacagaatgaatcctaccaaacaggaaacacaagatgccctcgacatctttgccaatgagactctgcggaccctctgtctttgctacaaggagattgaagagaaggagtttacagagtggaataagaagtttatggccgcctccgtcgcatcaacgaatagagatgaggccttagataaagtgtatgaggagatcgagaaagacttgatcctgctgggggctactgccatcgaggataagctgcaagacggtgtccctgagactatctccaagctcgcgaaagcggacattaagatctgggtcctgaccggcgataagaaagagactgctgaaaacatagggttcgcctgtgagttacttacagaagacactactatatgttacggagaggatattaatagtttgctgcacgcacgcatggagaaccaaaggaatagaggtggcgtttacgcaaagtttgctccacctgtccaggaatccttcttcccacccggcggaaatcgcgcacttattataaccgggtcatggttaaatgaaattctattagaaaaaaaaacaaagagaaataagatattaaaacttaaattcccgagaacggaggaggaaagaaggatgcgaacacagtccaaacgacgtctcgaagctaaaaaggaacagagacaaaagaattttgtggacttggcttgtgaatgctcagcggtgatctgctgtagggttacacctaagcagaaggcaatggtggttgacttggtcaagcgttataaaaaggccattaccttggccatcggagatggagccaacgacgtgaatatgattaaaaccgcccatataggagtgggcatctctggacaagagggcatgcaggcagtgatgtcctccgactactccttcgcccaattcagatacctgcagagactcctgctggtgcatggtaggtggtcttatatcaggatgtgtaaatttctccggtattttttctataaaaactttgcattcactctggtgcacttttggtattcgttttttaatggctattctgcccagacggcctatgaagattggtttatcacactctataatgtgttatatacaagcctgcccgtgctcctcatggggcttctggaccaggacgtgtccgacaagctgtcactcaggtttcccggtctttatatcgtcggtcagcgcgaccttctgtttaactataaacgatttttcgtctccctgcttcatggtgtgctgacctctatgatcctattctttataccccttggcgcttaccttcaaacagttgggcaagacggtgaggccccatccgactaccagtcttttgcagtgacgatagcctctgcccttgtcataactgtaaattttcaaatcggtcttgatacctcctattggaccttcgtgaacgcattctctatcttcggcagtatcgcactgtacttcggcattatgttcgactttcactctgctggaatacacgtgttgttcccttccgcattccaattcacaggcaccgcttctaatgctctgcgccagccctacatctggctgactattatcctggccgtggccgtctgtctcctccccgtggtggcaatcaggttcttgtcaatgaccatatggccatccgagagcgataagattcaaaaacatcgcaaacgtttgaaggcggaagagcagtggcagagacgccaacaagtttttcgtaggggcgtatccaccagaagatccgcctacgcattctcacaccagaggggttacgctgatctgatctctagtgggagatcgattaggaagaagagaagtccccttgacgccatcgtcgcagatgggaccgcagaatacaggcgaacaggggactcg

SEQ ID NO: 318909 - DNA, 3753 bp, Artificial Sequence
  derived and/or modified sequence
atgagcaccgaacgcgatagcgaaaccaccttcgacgaggactcgcagcctaatgacgaggtcgtgccgtactcagacgatgagactgaggacgagcttgacgaccaggggagcgcagtggagcctgagcagaacagagtgaacagagaagcagaggagaatcgggaaccctttcggaaagaatgcacttggcaggtgaaggcgaacgacagaaaataccacgagcagcctcactttatgaacaccaaattcctctgtatcaaggagagcaagtacgcgaacaacgcaatcaagacctacaagtacaacgccttcacttttatcccgatgaatctgttcgagcagttcaagcgcgccgcaaatctctactttctggcactgttgatcctgcaggcggtcccgcagatcagcactctcgcttggtacacgaccctcgtgccactgcttgtcgtcctgggcgtgaccgcaatcaaagatcttgtggacgatgtggcccggcataagatggataaagagatcaataacaggacctgcgaagtcatcaaggacggcagattcaaagtggctaaatggaaggagatccaggtgggagacgttatcagactgaagaaaaacgatttcgtgcctgctgacattttgctgctcagctcgtcggaaccgaacagcctgtgctacgtcgagactgccgaactggacggggaaaccaacctgaagttcaagatgtcgctggaaatcactgatcagtacctgcaacgggaggatacgttggctactttcgatggttttatcgagtgcgaggaaccgaataaccgactggacaaattcaccgggactttgttctggcgaaacacttcgttcccgctggacgcggataagatccttcttcggggatgcgtcattcgcaataccgacttctgccacggactcgtgatcttcgcaggagcagatactaagataatgaagaattctgggaaaacgagatttaagcgcacgaaaatcgattacctgatgaattacatggtctacacgatctttgttgtgctgattctgctctccgccggtttggcgatcggacacgcttactgggaagcacaggtcggaaattcctcgtggtacctgtatgacggagaagatgacaccccttcataccgaggatttctcatattctggggatacatcattgtgctgaacaccatggtgccgatcagcctctacgtgtctgtggaagtgatccgcctggggcaatcacactttatcaactgggaccttcaaatgtactacgctgaaaaggacactccagccaaggctagaaccaccaccctgaacgagcagctcggacagatccactacatcttctcggataagactggtactttgacccagaacatcatgacgttcaagaaatgttgcatcaacggacaaatctacggtgaccacagggatgcctcacagcacaatcacaacaagatcgagcaggtcgacttttcatggaacacttatgccgacggcaaactcgcgttctacgaccattacctgattgaacagatccagtccgggaaggaaccggaagtccgccaattcttcttcttgctggccgtgtgtcacaccgtgatggtcgatagaactgacggtcaactcaactaccaagcagcctcgcctgacgagggagcgctggtcaacgccgcgcggaactttggatttgccttcctcgccagaactcagaacaccataaccatttccgagctggggactgaacgcacctacaacgtcctggccatcctggatttcaactcggaccgcaaacggatgtctatcatcgtgagaaccccagagggtaacatcaagctgtactgtaagggtgccgatacggtgatctacgagcgcctccacagaatgaacccgaccaagcaggagacgcaagacgcgctggatatctttgctaatgaaactctccggactctgtgcctgtgctataaagagattgaagagaaggaattcactgagtggaacaagaagttcatggcggcttcagtggcatcgaccaacagagacgaggctctggacaaggtctacgaagaaatcgaaaaggacttgatcctgttgggagccactgcgatcgaggacaagctgcaagacggagtccctgagactatctcaaagctggcaaaggcagatatcaagatctgggtgttgactggagacaagaaggaaaccgcggagaacatcgggtttgcctgtgaactcctgaccgaagatactactatctgctacggagaagatatcaattcgctgctgcacgcccggatggaaaatcaacgcaaccgcggcggcgtctacgcaaagttcgcacccccagtccaagaatccttcttcccacccggcggtaacagagccctcatcatcactggctcgtggctgaatgagatcctgctggaaaagaaaaccaagcgcaacaagattctcaagctcaaattccctcggactgaagaagagagacggatgagaactcaaagcaagcgccgcctcgaagcaaagaaggaacaaagacagaagaatttcgtggacctcgcatgtgaatgctctgcggtgatctgctgccgcgtcacgccaaaacagaaggctatggtggtggatctcgtgaaaaggtacaaaaaggccataaccctggctatcggggacggggccaatgacgtcaatatgatcaagactgcgcatattggtgtggggatctccggccaagagggaatgcaggcggtcatgtctagcgactactcctttgcccaattccggtacctgcagcgccttttgctcgtgcatggacgctggtcctacatccgaatgtgcaagttccttcggtactttttctacaaaaactttgcgttcactttggtgcatttctggtactcttttttcaatggatactcggctcagactgcatacgaggactggttcatcaccctgtacaatgttctgtatacgtcgctccctgtgctgttgatgggacttctcgaccaggacgtgtcagacaaactctcactccgcttcccgggactgtacatcgtgggacagagggacctgctctttaactacaaaagattcttcgtgtcactcctgcatggagtgctgacgagcatgatcctgtttttcatccccctgggagcttatttgcagaccgtcggacaggacggagaagccccgtcggattaccaatcctttgccgtcactatcgcctcggccctggtgatcacggtgaattttcaaatcggactcgataccagctactggacgttcgtgaacgctttttcaatcttcgggagcatcgctctgtacttcggaatcatgtttgacttccattccgccggtatccacgtcctctttccgagcgcttttcaattcactggcaccgcgagcaatgcacttcggcaaccgtacatttggctgacgatcatcttggccgtggccgtgtgcctgctgccagtggtggctatccggttcttgtccatgactatctggccttcggaatccgacaagatacagaagcaccggaagcgcttgaaggctgaagagcagtggcagagacggcagcaagtgttcaggcgcggtgtgagcacgcgtcggtcagcttatgccttctcccaccagcggggatacgcggacctgatctcctccgggcgcagcatccggaaaaagaggtcaccgctcgatgctattgtggctgatggaactgccgaatatagacggaccggagactcg

SEQ ID NO: 318910 - DNA, 3753 bp, Artificial Sequence
  derived and/or modified sequence
atgtcgacggaacgagattcggaaacgacgtttgatgaagattcgcaaccgaatgatgaagtagtaccgtattcggatgatgaaacggaagatgaattagatgatcaaggttcggcggtagaaccggaacaaaatcgagtaaatcgagaagcggaagaaaatcgagaaccgtttcgtaaagaatgtacgtggcaagttaaagcgaatgatcgtaaatatcatgaacaaccgcattttatgaatacgaaatttctatgtataaaagaatcgaaatatgcgaataatgcgataaaaacgtataaatataatgcgtttacgtttataccgatgaatttatttgaacaatttaaacgagcggcgaatttatattttctagcgttattaatactacaagcggttccgcaaatatcgacgctagcgtggtatacgacgttagtaccgttattagtagttttaggtgtaacggcgataaaagatctagtagatgatgtagcgcgtcataaaatggataaagaaataaataatcgtacgtgtgaagtaataaaagatggtcgttttaaagttgcgaaatggaaagaaatacaagttggtgatgtaatacgactaaaaaaaaatgattttgtaccggcggatatattattattatcgtcgtcggaaccgaattcgttatgttatgtagaaacggcggaactagatggtgaaacgaatctaaaatttaaaatgtcgttagaaataacggatcaatatctacaacgtgaagatacgttagcgacgtttgatggttttatagaatgtgaagaaccgaataatcgattagataaatttacgggtacgctattttggcgaaatacgtcgtttccgttagatgcggataaaatattattacgtggttgtgttatacgaaatacggatttttgtcatggtttagttatatttgcgggtgcggatacgaaaataatgaaaaattcgggtaaaacgcgttttaaacgtacgaaaatagattatttaatgaattatatggtatatacgatatttgttgttctaatattactatcggcgggtttagcgataggtcatgcgtattgggaagcgcaagttggtaattcgtcgtggtatctatatgatggtgaagatgatacgccgtcgtatcgaggttttctaatattttggggttatataatagttttaaatacgatggttccgatatcgttatatgtatcggttgaagtaatacgattaggtcaatcgcattttataaattgggatttacaaatgtattatgcggaaaaagatacgccggcgaaagcgcgtacgacgacgttaaatgaacaactaggtcaaatacattatatattttcggataaaacgggtacgttaacgcaaaatataatgacgtttaaaaaatgttgtataaatggtcaaatatatggtgatcatcgtgatgcgtcgcaacataatcataataaaatagaacaagtagatttttcgtggaatacgtatgcggatggtaaattagcgttttatgatcattatttaatagaacaaatacaatcgggtaaagaaccggaagtacgtcaatttttttttctactagcggtatgtcatacggtaatggtagatcgaacggatggtcaactaaattatcaagcggcgtcgccggatgaaggtgcgttagtaaatgcggcgcgaaattttggttttgcgtttttagcgcgaacgcaaaatacgataacgatatcggaattaggtacggaacgaacgtataatgtattagcgatactagattttaattcggatcgaaaacgtatgtcgataatagtacgaacgccggaaggtaatataaaattatattgtaaaggtgcggatacggttatatatgaacgattacatcgtatgaatccgacgaaacaagaaacgcaagatgcgttagatatatttgcgaatgaaacgctacgtacgttatgtctatgttataaagaaatagaagaaaaagaatttacggaatggaataaaaaatttatggcggcgtcggttgcgtcgacgaatcgtgatgaagcgttagataaagtatatgaagaaatagaaaaagatttaatattattaggtgcgacggcgatagaagataaactacaagatggtgttccggaaacgatatcgaaattagcgaaagcggatataaaaatatgggtattaacgggtgataaaaaagaaacggcggaaaatataggttttgcgtgtgaattactaacggaagatacgacgatatgttatggtgaagatataaattcgctattacatgcgcgtatggaaaatcaacgaaatcgtggtggtgtatatgcgaaatttgcgccgccggttcaagaatcgttttttccgccgggtggtaatcgagcgttaataataacgggttcgtggttaaatgaaatactattagaaaaaaaaacgaaacgtaataaaatattaaaattaaaatttccgcgtacggaagaagaacgacgaatgcgaacgcaatcgaaacgacgtctagaagcgaaaaaagaacaacgacaaaaaaattttgtagatctagcgtgtgaatgttcggcggtaatatgttgtcgagtaacgccgaaacaaaaagcgatggtagttgatctagtaaaacgatataaaaaagcgataacgttagcgataggtgatggtgcgaatgatgtaaatatgataaaaacggcgcatataggtgttggtatatcgggtcaagaaggtatgcaagcggttatgtcgtcggattattcgtttgcgcaatttcgatatttacaacgattactattagttcatggtcgttggtcgtatatacgtatgtgtaaatttctacgttattttttttataaaaattttgcgtttacgttagtacatttttggtattcgttttttaatggttattcggcgcaaacggcgtatgaagattggtttataacgctatataatgtattatatacgtcgttaccggtactattaatgggtctattagatcaagatgtatcggataaactatcgttacgttttccgggtctatatatagttggtcaacgagatctattatttaattataaacgtttttttgtttcgctactacatggtgtattaacgtcgatgatactattttttataccgctaggtgcgtatctacaaacggttggtcaagatggtgaagcgccgtcggattatcaatcgtttgcggtaacgatagcgtcggcgttagtaataacggttaattttcaaataggtttagatacgtcgtattggacgtttgttaatgcgttttcgatatttggttcgatagcgctatattttggtataatgtttgattttcattcggcgggtatacatgtattatttccgtcggcgtttcaatttacgggtacggcgtcgaatgcgctacgacaaccgtatatatggctaacgataatattagcggttgcggtatgtttattaccggtagttgcgatacgatttctatcgatgacgatatggccgtcggaatcggataaaatacaaaaacatcgtaaacgtctaaaagcggaagaacaatggcaacgtcgtcaacaagtttttcgacgtggtgtttcgacgcgacgttcggcgtatgcgttttcgcatcaacgtggttatgcggatttaatatcgtcgggtcgatcgatacgaaaaaaacgatcgccgctagatgcgatagtagcggatggtacggcggaatatcgacgaacgggtgattcg

SEQ ID NO: 318911 - DNA, 3753 bp, Artificial Sequence
  derived and/or modified sequence
atgagcacagagagggacagcgagacaactttcgatgaggactcgcagcccaacgatgaggttgttccttattcagatgacgaaacagaggatgagctggacgaccagggctcagcagtggagcccgaacagaatagggtgaaccgggaggccgaggaaaatagggagccttttaggaaagagtgcacatggcaggtcaaggcaaatgacaggaagtaccatgagcaaccccactttatgaacaccaagttcctttgcatcaaggagtctaaatatgcaaataacgccatcaaaacctataagtataacgcatttacatttatccccatgaacctgtttgaacagttcaaacgtgctgctaatctttactttttggcgctgttaatcctccaggcagtgccacagatatctacactggcctggtataccaccctggtgcccctgttggttgtgctgggggtcacagcaattaaagacttggtggatgacgtagcccgccataaaatggataaggaaatcaacaataggacgtgcgaggtgattaaggatggccgcttcaaagtggccaaatggaaagaaatccaggttggagacgtgattagactgaaaaagaatgatttcgtgccagccgatatacttctgctgtctagtagcgaaccaaattccctctgttatgttgagaccgccgagttggatggcgagaccaaccttaagttcaaaatgagccttgaaatcacagatcagtacttgcagcgggaggatacactggctactttcgacggctttatagaatgcgaagaacctaacaataggctcgacaagttcacaggcactctgttttggagaaacacctcgtttccgctggacgccgacaagatcctgttgcgtggctgtgtaatccggaatacggacttctgccatgggctggttatattcgctggcgccgacactaagatcatgaaaaattctggaaagacacggttcaaacgcactaaaattgactacctcatgaactacatggtgtacactatctttgtagtgttgatcctgctcagcgcaggattagctattgggcacgcatactgggaggctcaggtcggaaattcttcctggtacctctatgacggtgaagacgacactcctagctaccgggggtttttaatattttggggctacattatcgtcttgaacaccatggtaccaattagcctctatgtttcagtcgaggtgatacgactgggacagtctcattttataaattgggatctccagatgtactatgctgagaaggacaccccggcaaaagctaggaccactaccctaaatgaacagctaggccaaattcattacatcttttcagacaagactgggacactaacacaaaatattatgacttttaaaaagtgttgcatcaacggacagatctacggcgatcacagagacgccagtcagcataaccacaacaaaatcgaacaggtggatttctcttggaatacttatgctgacggcaagctcgccttctacgatcactatttaatagaacagattcaaagcgggaaggagcccgaggttcgccagtttttcttcctcctggccgtgtgtcataccgttatggtagatcggacagatggacaacttaattatcaggcggcctcaccggatgaaggggctctcgtaaatgctgcccgcaacttcgggtttgctttcttggcacggacacagaataccatcacgatatccgaattgggaaccgagagaacatacaatgtgctcgcaatcttagacttcaacagcgatagaaagcgtatgtccattattgttaggactcctgaaggcaacattaaactgtattgtaaaggggccgacaccgtgatctatgaacgcctacacagaatgaatccaactaagcaggagactcaggacgccctggatattttcgctaatgagacactgagaacgctctgcctttgctacaaggaaatcgaagagaaggagttcacagagtggaataagaagttcatggccgcatccgtggccagtacgaatcgagatgaggctctcgacaaagtgtacgaggagatcgagaaggacttaatactgctgggcgccactgccattgaagacaagctgcaggatggcgtcccggagacaatcagcaaactggcgaaagccgatattaaaatatgggtgctcacgggagacaaaaaagaaacagcagaaaatatcggattcgcgtgcgaattactgacggaggatacaaccatctgttatggagaagacatcaatagtttgctccatgcacgcatggagaaccagcgaaacagggggggcgtctacgctaaatttgctcccccagtacaggaaagcttctttccccccggcggcaacagagcactgattattacagggagctggctgaatgagattctgctcgaaaagaagactaaacggaacaaaatcttgaaattaaagtttccccggaccgaagaggagcgtcgaatgaggacccagtcaaaaaggcgtctggaagcaaaaaaggagcaacgccaaaagaactttgttgatctcgcatgtgagtgctccgctgttatatgctgtagggtcacgcccaagcaaaaggctatggtggtggatttggtcaagcggtacaagaaagccataactcttgcaatcggagacggcgcaaacgacgttaacatgatcaaaaccgcccatattggcgtgggaatcagtgggcaggaaggcatgcaggcggttatgagctccgactattcctttgcccagttccgatacctgcagcgcctgctgctggtccacggccgctggagctatatccgcatgtgcaagttcctccgctacttcttctacaaaaattttgccttcactttggtccacttttggtattcattcttcaatggctacagtgcccagacagcatatgaggactggttcatcactctgtacaatgtgctgtatacttctttgcccgttctattaatgggcctgttagaccaggacgtcagcgataaactatcattgcgattccccggcctgtacatcgtgggtcagagagacctgttatttaactataagcgcttcttcgtctccctactgcatggagtgcttaccagcatgattcttttcttcattcctttgggcgcctacttgcagaccgtcgggcaggacggcgaagccccctctgactatcaaagcttcgccgtgactatagccagcgcgttagttatcacagtaaattttcaaattggtctggatacatcttattggacctttgtaaatgcttttagcatcttcggatcaattgctttatacttcggcattatgtttgacttccacagcgccggtattcatgtgcttttcccatcagccttccagtttaccggtaccgcctctaacgccctcagacaaccctatatctggctaaccatcatactcgctgtggcagtgtgtttgctccctgtggtcgcgatccgctttttgagcatgaccatttggcccagcgaatctgataaaatacagaagcaccggaagcgcctcaaagcagaggagcaatggcagagacgtcaacaggtgtttcgccgtggagtgtctactcggcgcagtgcatacgccttctcccaccaacgtggctatgcagacctgatatcgagtggccgctcgattcggaagaagcgatccccactggatgcgattgtggctgatggtacagcggagtaccgacgcacgggagactcc

SEQ ID NO: 318912 - DNA, 3753 bp, Artificial Sequence
  derived and/or modified sequence
atgtctaccgagcgagacagtgaaacgacattcgacgaggattcacaaccaaatgacgaggtcgtcccctatagtgatgacgagaccgaagatgagctggatgaccaggggagcgctgtggaacccgagcagaacagggtgaaccgtgaggctgaggaaaacagggaaccttttcgaaaggaatgcacgtggcaggttaaagctaacgaccgaaaataccacgaacaacctcatttcatgaacacaaagtttctctgtattaaggaatcaaaatatgctaacaacgccattaaaacttacaagtataacgcttttacgttcatcccaatgaatctgttcgaacagtttaagcgagctgccaatctgtacttccttgctctgctgatcttgcaggcggtccctcagatatctaccctcgcatggtacacaactctggtgccattgttagtggtattaggcgtgactgccattaaggacctcgtcgatgatgtagcccgccataagatggataaggaaatcaacaatcgtacatgtgaggtgataaaagatggccgattcaaagtagctaagtggaaggaaatccaggtcggtgacgtgattcggttaaagaaaaatgactttgtgcctgctgacatacttctgctgtcctcctcagaacccaactccttatgctatgtggaaacggcagagcttgacggcgagacaaacctgaagtttaaaatgagtctggaaattaccgaccaatacttacagagggaggataccctggccacttttgatggattcatcgagtgtgaagagcccaataaccgtctcgacaagttcactggcacactcttctggagaaacacatcttttcctctggacgccgacaagatactgctgcgaggatgcgtgatacgaaacacagacttctgtcatggcctcgtgattttcgcaggagccgataccaagataatgaagaacagcggcaaaactaggtttaagaggaccaaaatcgactaccttatgaattatatggtgtatactattttcgtggtgctgatactgctgtcagctggtctagccatcgggcatgcatactgggaggcgcaggtgggtaactcttcctggtatctttacgacggggaagacgacacacctagctatcgaggcttcctcatcttctgggggtacatcattgttctgaacaccatggtgcctatttcactttatgtgagcgtagaagtgatccgcttgggacagtcacacttcataaattgggacttgcagatgtactacgcagaaaaagatacgcccgcgaaagcaagaactactaccctgaacgaacagttgggccagatacactatattttttccgacaagaccggcacccttacacagaacattatgactttcaagaaatgctgcattaacggtcaaatctacggcgatcacagggatgcttctcaacataatcataacaagatcgagcaggttgacttttcatggaatacatatgctgatggtaagctggcattttatgatcattatctcatcgagcagattcagtcaggaaaagagcccgaggtccgacagttctttttcctattggccgtgtgtcacaccgttatggtcgatcgcaccgacgggcagttaaactaccaagccgcgtctccagacgaaggtgcactggtgaatgctgctagaaacttcggtttcgcctttctggccaggactcagaacacaatcacaatcagtgagctgggaacagaacggacatataacgtgctggctattctggacttcaacagtgatcgtaagcgtatgtcaattatcgtgcgtactcctgagggaaatatcaagctttattgcaaaggggcagataccgtgatctacgaacgccttcatagaatgaacccaaccaagcaagaaacacaggatgctctcgacatctttgcaaacgagacactgcggactctctgcctgtgctataaagagattgaagagaaggagtttaccgaatggaacaagaaatttatggctgcttccgtagccagcactaatagggacgaggctttggacaaagtctacgaagagatagagaaggatctcatccttctgggggccactgccatcgaagataaactacaggatggtgtgcccgaaacgatttcaaagctcgccaaggccgacatcaagatctgggtcctgactggggataagaaggaaaccgcggaaaatattgggtttgcatgtgagctgttgaccgaggataccacaatctgctacggcgaggatattaactccttgctgcacgccagaatggagaatcagaggaacagaggaggcgtgtatgcgaagttcgcgcctcctgtccaagagtcctttttccctccggggggcaaccgagccctgattatcaccggatcctggcttaacgagatcctgctagaaaagaagacaaaacgtaataaaattctgaaactgaaatttccgcgtacagaagaggaacgtcgaatgcgaacgcagagcaaacggcgactcgaagctaagaaggagcagaggcagaaaaacttcgtggacctggcttgcgagtgcagcgccgtgatttgctgccgtgtcactcctaagcagaaggccatggtcgtggacctggtcaaaagatataagaaagccatcaccctcgccataggagacggggccaatgatgttaacatgataaaaactgcccacataggcgtggggatctctggccaggaaggcatgcaagcggtcatgtccagtgactattcattcgctcagtttaggtatctgcagcgacttctgttagtgcacgggcggtggtcttacattcgcatgtgtaagtttctgagatacttcttttacaaaaatttcgcgttcaccttagtgcacttttggtacagtttctttaatggttacagtgcccagactgcgtacgaagactggtttatcaccctctataacgtgctctatacttccttacctgtcctcctgatgggcctgctggaccaggacgtgagcgacaaactgtccctgagattcccgggcctgtatattgtcggccagagggatctcttgttcaactacaagcggtttttcgtctctctgcttcacggagtgttaactagtatgatccttttcttcataccacttggggcatacttgcaaactgttgggcaggacggcgaggcaccatctgactaccaaagcttcgctgtaacaattgcctcggcacttgtgattacagtaaattttcagatcgggctcgacacatcttattggactttcgtaaatgctttctcaattttcggctcaatagccctctatttcggcataatgtttgactttcacagtgccggaatacacgtactgtttccgtccgctttccaatttaccggcacagcatccaatgccctacgtcaaccatatatttggctgactattattttagctgtagctgtatgcctgctccccgtcgtggccatacgctttctgtcgatgactatctggccgtccgagtcggacaagattcaaaaacataggaaaagactaaaagctgaagaacagtggcagaggcgacagcaagtttttagacgaggggtgtccacccgaagatcagcatacgccttctcgcaccagagggggtatgccgatctcatctcctcaggcaggtctatccggaaaaagcgtagccccctggacgccatcgtggccgatggaacagccgaatataggaggacaggcgattct

SEQ ID NO: 318913 - DNA, 3753 bp, Artificial Sequence
  derived and/or modified sequence
atgtcgaccgagcgtgattcagaaaccacttttgacgaggattcccaaccaaacgatgaagtggtgccctactcagatgatgaaactgaagatgaactggatgatcagggttccgctgtggaacctgaacagaaccgagtcaatcgcgaagctgaggagaatcgggaaccctttagaaaggagtgtacctggcaagtcaaggccaatgatagaaaataccatgagcaacctcactttatgaacactaagtttctgtgtataaaggaatccaagtatgcaaacaacgccatcaaaacttacaagtacaacgcattcacttttatccctatgaatttgttcgagcaattcaagagagcagctaacctgtacttcctggcactcttgattcttcaggcagttccacaaatttcgaccctggcatggtacactaccctggtccctctgcttgtggttctgggagtgacggcgattaaggatcttgtggacgacgtggcacgccacaaaatggataaggagattaacaaccgaacttgcgaggttatcaaggacggtcgttttaaggtggcaaagtggaaggagatacaggtgggagatgtgatccggctgaagaaaaacgattttgtcccggcagacattcttcttctgtcctcctcggagccaaattcgctgtgctacgtggaaactgcagaattggatggcgaaaccaacctgaagtttaagatgtccctggagattaccgatcaatacctccagcgcgaggacactcttgccacttttgatggctttatagaatgcgaagaacctaacaataggctcgacaaattcactggaactttgttttggaggaacacttcatttccccttgacgcagacaaaatactgcttcgcggatgtgtgattcggaacaccgacttttgtcatgggctggtgatttttgccggggcagatactaagataatgaagaattcggggaaaactcggtttaagaggaccaaaatcgattacttgatgaactacatggtgtataccattttcgtggttctcattctgctgagcgccggattggccataggacacgcttattgggaggctcaggtgggaaattcctcctggtacctttacgacggggaagatgacaccccaagctatagagggtttctgatcttttggggttacattatcgtgctgaatacgatggtgccaatttcgctctacgtgtcagtggaggtgattagacttggccaatctcactttatcaactgggatctccagatgtactacgcagaaaaggataccccggcaaaagcacggactacgaccctgaacgaacagctcggacagatccattacatctttagcgacaagacgggtactcttacccagaatatcatgacttttaagaagtgttgtatcaacgggcagatctacggtgatcacagagacgcatcgcaacataaccacaataagattgaacaggtcgactttagctggaacacctacgcagatggaaagttggcgttctacgaccattacctcattgaacaaatacaatcgggaaaggaacccgaagtgaggcaattcttttttctccttgctgtgtgtcataccgtgatggtcgatagaaccgatggtcagcttaactaccaagcagcaagccctgatgaaggagcactggtgaacgccgcaagaaatttcggattcgcattccttgcccgcacccagaataccatcaccatatctgaattgggcaccgagagaacttacaacgttctggcaattttggactttaactctgatagaaagaggatgtccatcatagtcagaactccagaaggaaacattaagctgtactgtaagggagcagatactgtgatttacgaaagactgcatcgtatgaaccccactaaacaggagactcaagatgcccttgatatctttgcgaacgaaactctgaggacgctgtgtctgtgctataaagaaattgaggaaaaggaatttactgagtggaacaagaaattcatggcagcctccgtggccagtacgaatcgagatgaagccctggataaggtgtacgaagaaatcgagaaggacctgattctcctgggtgcgactgcaattgaggataaacttcaagatggtgtgccggaaaccatctcgaagctcgcaaaggcagacatcaagatttgggtgctgacgggcgacaagaaagaaactgccgaaaacataggtttcgcttgtgagctgctcaccgaagatactaccatctgctatggggaggacattaacagtctgcttcatgccagaatggaaaatcagcggaacagaggaggagtctacgcaaaattcgcacccccagtccaggagtcgttttttcctccggggggcaatcgggcgctgatcattaccgggtcgtggctcaacgaaatactccttgagaagaaaacgaaaaggaacaaaattctcaagctgaagtttccacgcacggaggaggaacggcgcatgagaacccagtccaagcggagactcgaagccaagaaggaacaaagacagaaaaacttcgtggatctggcctgcgaatgctcggcagtgatttgctgtcgagtcacgcctaaacagaaggcaatggtggtggatctggtgaagcggtacaagaaagcaatcactttggccataggtgatggtgcgaatgacgtaaacatgatcaaaactgcacatatcggggtcggaatttccggccaagagggaatgcaagccgtcatgtcctccgactactcatttgcacaatttaggtacttgcaacgtttgctcttggtgcacggtcgctggagctacattcgtatgtgtaaattcttgagatactttttctacaagaatttcgcttttactctcgtgcatttctggtactccttctttaacggctacagcgcccaaacggcctacgaggattggttcattaccttgtataatgtgctttacacgtcgctgccagtgctcctgatggggctcctcgaccaggatgtctcggacaagctgtcgttgcgctttcccggactttacattgtgggtcagcgcgatctcttgttcaattacaaacggttttttgtctcccttttgcatggggtgcttacctcgatgattctcttcttcatccctttgggagcctaccttcaaaccgtgggtcaagacggtgaagccccatcggattaccagtcgttcgcggtcaccattgcatccgcgctcgtgatcacggtgaacttccaaattgggctcgatacgagctactggacctttgtgaatgcgttctccattttcgggtcaatcgcactgtactttggcatcatgttcgacttccactcggctggtattcatgtgttgtttccctccgcctttcagttcacgggtaccgcatcgaatgcacttaggcaaccatacatttggcttaccatcattctggcagtcgcagtgtgtctgcttcctgtcgtcgcaatcagatttctctccatgaccatttggccatccgaatccgataagatccaaaaacaccgcaaaagactcaaggcagaggaacaatggcagagacgacaacaagtctttcgtagaggagtgtcaacccgtaggtcagcgtacgcatttagccatcagcgcggatacgcagacctcattagctcaggcagatcgattcgaaagaagagatcgcctttggacgcgattgtggcggacgggactgcggaataccgccgcacgggtgactcc

SEQ ID NO: 318914 - DNA, 3753 bp, Artificial Sequence
  derived and/or modified sequence
atgagcactgagcgcgatagcgaaaccacttttgatgaggatagccaaccaaacgatgaggtcgtcccttacagcgatgacgaaaccgaggacgaacttgatgaccaaggatcggcagtcgaacctgaacaaaacagggtcaatcgcgaagccgaggagaatagggagccgtttcgaaaggaatgcacttggcaagtcaaagccaacgatcgcaagtatcatgaacaaccacactttatgaataccaaattcctgtgcatcaaagagtcaaagtacgccaacaacgccattaagacctataagtacaatgcgtttacctttattcccatgaaccttttcgaacaattcaagagagcagcaaacttgtactttctggcactgcttattctccaggcagtgccgcaaatcagcactcttgcctggtacactactcttgtgccactgctggtggtcctgggagtcactgcaattaaggacctggtggatgatgtggcgcgccataagatggataaggagataaacaaccgtacctgtgaggtgataaaggacggtaggtttaaggtcgcaaagtggaaggaaatccaggtgggggatgtgattaggctgaaaaagaatgactttgtgcctgcagatattctgcttctgtcctcatcagaacccaactcgctgtgctacgtcgaaaccgcagaactggatggtgaaactaacctcaaattcaagatgtcccttgagattaccgaccagtaccttcaaagagaagatacgctcgcaacttttgatggtttcatagaatgcgaagagccgaacaatagactcgataagtttactggtaccctgttttggcggaacacctcattcccacttgacgctgacaagatactgctccggggctgtgtcattagaaataccgatttttgccatgggctggtcatctttgcaggagcagataccaagattatgaaaaactcgggtaaaacccggtttaagcgtaccaaaattgattatctcatgaattacatggtgtacacgatcttcgtggtgttgattcttttgagcgccggactggccatcggtcacgcgtactgggaagcacaggttggaaattcttcctggtacttgtacgatggggaagatgataccccttcctatagggggttccttatcttttggggttacataatcgtgctgaatacgatggtgccaatctcactttacgtgtcggtggaagtgataagacttggacagagccacttcataaactgggacctgcaaatgtactacgcggaaaaggatactccagcaaaggcacgcaccactactctgaatgaacaacttggacagattcattacattttctcggataaaactggaactctgacccaaaacataatgacctttaagaagtgttgtattaacgggcagatttatggcgaccatagagatgcatcccaacataaccataacaaaattgaacaagtggacttttcctggaatacttacgccgatggtaagctcgcattttacgatcattacttgatcgaacagatccaatcaggaaaggaaccagaggtgcggcaattcttttttctcctggccgtgtgtcatactgttatggtagataggactgatggtcagctgaattaccaagcggcatctccagatgagggtgcgcttgtaaatgcggcacgtaatttcggattcgccttcctggcaaggacccagaacacgatcaccatttccgagcttggtaccgagagaacgtataacgtgcttgccattctggacttcaactctgacagaaagcgcatgtccattatcgtgcggacgccagaaggcaacataaagttgtactgtaagggcgcagataccgtaatctacgagcgcctccaccggatgaatcccactaagcaggaaacccaggatgctctggacatatttgctaacgaaacgctcagaactctgtgcctttgttacaaggagatcgaggagaaggaatttactgagtggaacaagaagtttatggctgcatcagttgcctccaccaacagagacgaagcacttgataaagtgtacgaagaaatagagaaggacctgattctgcttggtgcaaccgcaatcgaagataaacttcaagatggcgtcccagaaactatttctaaacttgcgaaggcagacattaagatttgggtacttaccggagataagaaggaaacggcagagaacatcggttttgcttgtgagcttctgacggaggacaccaccatatgttatggagaggacatcaactctctccttcatgccaggatggaaaatcagcgtaaccgtggaggtgtgtacgccaagtttgcccctcctgtccaagagtcatttttccctcctggagggaatcgagcattgattatcaccggatcctggcttaatgaaattcttcttgagaaaaagactaaacgaaataagattctgaaattgaagtttccccgaaccgaagaagaacggcgcatgcggacgcagtccaaacggaggctggaagcaaagaaagaacagcggcaaaagaacttcgtcgaccttgcctgtgaatgctcagcggtcatctgctgtagagtcacgccgaagcagaaggcaatggtggtcgatctcgttaaacgttacaagaaggcaatcactctcgcaataggagatggcgcaaatgacgtgaacatgatcaagactgcgcatataggtgttggaatttcaggccaagagggcatgcaggccgtgatgagctcggattacagttttgcccagttcagataccttcagcgccttctgctcgtgcacggtcgttggtcgtacattcgtatgtgtaagtttttgaggtatttcttttacaaaaactttgcatttactcttgtgcacttttggtactcgttcttcaatggctactctgcacaaaccgcatatgaggattggttcattacgctttacaacgtgctctacacttcgctccccgtgctgctcatggggctcctggaccaagacgtctcggacaagctgtcgctgcgttttcccggactgtacatcgtgggccagcgtgatcttcttttcaactacaaaaggttttttgtctcccttttgcacggagtgctgacctcgatgatcctcttctttatacctttgggagcctacctgcagactgtcggtcaagacggagaagccccttccgattaccaatcctttgcggtgaccatcgcctcggctctcgtcatcaccgtcaactttcaaataggtctggatacgtcatactggacctttgtcaacgcgtttagcatctttggttcaatcgcactgtacttcggcattatgttcgattttcattctgctggtatccatgtgctttttccttcagcattccaattcaccggcaccgccagcaatgcgttgcgccaaccctacatctggctcaccattatactggcagtcgctgtctgtctgctccctgtggtggcgattagatttctgtcgatgactatttggccatcggaatcggacaagattcaaaagcaccggaaacggctcaaggcagaagaacaatggcagcgacgacagcaagttttccggcgaggcgtgtccacccggagatcagcctacgcgtttagccatcagcggggatatgccgatctcatctcgtccggcagaagcattcgcaaaaagagatcgcctctcgacgctattgtggcagacggtactgcggaatataggagaactggggacagc

SEQ ID NO: 318915 - DNA, 3753 bp, Artificial Sequence
  derived and/or modified sequence
atgagcaccgaaagggactcggagacgaccttcgacgaggattcgcagccaaacgatgaggtggtgccttactcggacgacgagacggaggacgagcttgacgatcaggggtcagcggtggaacctgaacagaatagagtaaaccgcgaagccgaggaaaacagggagccatttcggaaagaatgtacttggcaggtgaaggcaaacgatcgcaagtaccatgaacagcctcatttcatgaatactaaattcctgtgcatcaaggaatcaaaatacgcaaacaacgcaattaagacgtacaagtacaacgcatttacgttcatacctatgaacctctttgaacagtttaagagagcagcgaacctgtactttctggcacttcttatcctgcaagcggttccacagatctcaaccctggcctggtacactacccttgtgcctctgctcgtggtcctgggtgtgaccgcgatcaaagatttggtcgacgacgtggcaagacataagatggataaggagataaacaaccgaacttgtgaggtcattaaggacggcagattcaaggtggccaaatggaaggaaattcaggtcggagacgtgatccggctgaagaagaatgattttgtgcccgcagatattctgctcctttcatcctcagaaccaaattccctctgttacgtggaaaccgccgaacttgacggtgaaactaacctcaaattcaaaatgtcgctggaaataaccgaccaatacttgcagcgggaagatactctcgccaccttcgatggtttcattgaatgtgaggagcctaacaatagactcgacaagttcaccgggacgcttttttggcgcaatacttctttcccactggacgcagacaagatactcctgcggggttgtgtcatccgcaacaccgacttctgtcacggtctggtgatctttgcaggcgcagatacgaagatcatgaagaattcgggtaaaaccagatttaagcgcaccaaaattgattatctcatgaattacatggtttatacgatttttgtcgttcttatcctcttgagcgcaggcttggcgattggacacgcctactgggaggcccaagtgggtaactcgagctggtacctttacgacggcgaagatgacaccccctcctatagaggatttctgatcttttgggggtacatcattgtcctgaacaccatggtccctatctcgctgtacgtctccgtcgaagtgattcgtcttggccagtcacactttatcaattgggacttgcaaatgtactacgctgaaaaggatacccctgcgaaagcaaggaccaccacgttgaacgagcaactcggacaaatacattacatattctcagacaaaactggcactctcacccagaacattatgacctttaagaagtgctgcattaatggacaaatctatggtgaccatcgggacgcatctcaacataaccataacaagattgagcaagtggatttctcctggaacacctacgcggatggaaaacttgccttctacgatcattaccttatagaacagatccagtcagggaaagagccggaagtgagacaattctttttccttctggccgtgtgtcacactgtcatggtggatcgtaccgatggacaactcaattaccaggccgcctcccccgatgaaggggccttggtaaacgccgccagaaactttggtttcgctttcctcgcccgtacccaaaacacgatcaccatctcggaacttggaactgaaaggacctacaacgtgctggcaattctggatttcaactcggatcgcaagcgaatgagcattattgtccggacccctgaaggtaacatcaagctctactgtaagggagcagacactgtcatatacgaacggctgcacagaatgaacccaactaaacaggaaacccaagacgcacttgatatcttcgcgaatgagactctgcgaaccctttgcctgtgctacaaggaaattgaagagaaggagtttactgaatggaacaaaaagtttatggcagcctcagtcgcatctaccaatagagatgaagcactcgacaaagtgtacgaggaaatagagaaagatttgattcttctcggtgcgaccgctatagaagataagctccaagacggagtacctgaaactatcagtaagctcgccaaagccgacattaagatctgggtcttgaccggagacaaaaaggaaactgcggagaacattgggtttgcctgtgagcttctgaccgaagataccactatttgctacggagaggacataaacagcctgctccacgcgcgtatggaaaaccagcgcaatagaggcggggtgtacgcaaaattcgcacctcccgtccaagagtcttttttccccccaggtggaaatagagcactgatcatcaccgggagctggctcaacgagattctgcttgagaaaaagacgaagagaaacaagatccttaagttgaagtttccccggaccgaggaagaaagaagaatgcggacccagtccaaaagacgacttgaggcgaaaaaggaacagcgccagaagaacttcgtggacctggcatgtgaatgctccgcagtcatctgttgtagagtgacgcctaagcaaaaggctatggtggtcgacctcgtgaagaggtataagaaggcaataactctcgcgattggtgatggcgcgaacgatgtcaacatgattaagaccgcccatattggcgtgggaatctcaggtcaggagggaatgcaagccgtgatgtcctcagattactcattcgcacaatttcggtaccttcagaggcttctcctggttcatggaaggtggtcctacatccgcatgtgtaagttcctgagatacttcttctataagaactttgcattcacgctggtgcacttttggtacagcttctttaatggatactcggcccaaaccgcttacgaggattggttcataactctttacaacgtgctctatacttcactgccagtcctccttatggggcttctcgaccaagatgtctcggataagctcagccttagatttcctggcctttacatcgtgggtcaaagagatctccttttcaattacaagcggttttttgtgtcccttcttcatggggtgcttacctccatgattctctttttcattccacttggagcatacctccagaccgtggggcaagatggagaggcaccctcggattaccaatcgtttgccgtcactatcgcatccgctctggtgatcaccgtgaattttcagatcggtcttgacacctcctactggactttcgtcaatgccttttcgatttttgggagcatagccctctactttggaatcatgttcgattttcattccgcaggcatccatgttttgttcccttccgcttttcaatttactggcaccgccagcaacgcacttcgccagccctacatttggctgaccataattcttgccgtcgcagtgtgtttgctgcccgtcgtcgcaattagatttctttcaatgactatctggccgagcgagtccgacaagattcaaaagcacagaaagagactcaaggcagaggaacagtggcagcgcaggcaacaggtgtttagacggggtgtctcaacccggcgatccgcctacgcattttcgcatcagcgcggctacgcagatctgatttcgagcggaagaagcattaggaaaaagcggtcgccacttgatgcgattgtggcagatggtactgcagaataccgaagaacgggagatagc

SEQ ID NO: 318916 - DNA, 3753 bp, Artificial Sequence
  derived and/or modified sequence
atgtccacggaacgcgattcggaaactaccttcgacgaggactcgcagccgaatgatgaagtggtgccgtacagcgacgacgaaaccgaggatgaactcgacgatcaaggaagcgcagtggaaccagaacaaaaccgcgtcaaccgggaggctgaggaaaacagggagccgttccgcaaagagtgcacctggcaggtcaaagctaacgatcgcaagtaccatgaacaaccacacttcatgaacaccaagttcttgtgtatcaaggaatccaagtacgccaacaatgcaatcaagacctacaagtacaatgcattcacgttcatccctatgaacttgttcgagcagttcaagcgcgccgctaacctgtacttcttggcactgctgatcctgcaggcggttccacagattagcactctggcgtggtacactactctggtgcccctcctggtggtcctgggcgtgactgcaatcaaagatctcgtcgacgatgtggcgcggcacaaaatggacaaggagatcaacaaccgcacttgcgaggttatcaaggacggacgctttaaagtggccaaatggaaggaaatccaggtgggtgacgtcattcgcttgaagaagaatgattttgttccagcggatatcctgctgctgagctcatccgaaccgaactcgctctgttacgtcgagactgcagagctggacggggaaactaatctgaagtttaagatgtcgctcgaaatcactgatcaatatctgcagcgggaggatactttggccacgttcgacggctttatcgaatgtgaggaaccgaacaaccgcctggacaaattcactggaacccttttctggagaaacaccagcttcccactggatgccgacaagatcctccttcggggatgcgtgatccggaacaccgacttctgccatggactggtgatcttcgccggggcagacacgaagatcatgaagaacagtggaaagactcgctttaaacgtactaagatcgactacctgatgaattacatggtgtatactatcttcgttgtgttgatcttgctcagcgcgggattggcaatagggcacgcttactgggaggcgcaggtcggcaattcgtcctggtacctgtacgatggagaagatgacactccctcgtaccggggattcctgattttctggggttacatcatcgtcctcaacactatggtgcctatctccctttacgtctcagtggaagtgatcaggctggggcagtcccatttcatcaactgggacctgcagatgtactacgccgaaaaggatactccagccaaagcacggacgactaccctcaatgagcaactcggtcaaattcattacatcttctcggataagaccgggaccctgactcaaaacatcatgaccttcaaaaagtgctgcatcaatggacagatctatggcgatcacagagatgcctcccaacacaatcacaataagatcgagcaagtggatttttcatggaacacttacgccgacgggaagctggctttctacgaccactaccttatcgaacaaatccagtcaggaaaggagccggaggtcaggcagtttttcttcctccttgcggtgtgccacaccgtgatggtcgaccgcactgatggacagctgaactaccaagccgcctcgcctgacgaaggcgctcttgtgaatgccgcccgcaacttcgggttcgctttcttggctcggactcagaataccatcactatctcggaattggggactgagagaacctacaatgtcctcgcaatcctcgactttaactcggatcgcaagcgtatgtcgatcatcgtccggacccctgagggcaacattaagctctactgcaagggggctgacaccgtcatttacgaaagactccaccgcatgaacccaaccaaacaggaaactcaggacgccctggacatctttgccaacgaaactctgcgaacgctgtgtctctgctacaaggaaatcgaagagaaagagttcaccgagtggaataagaaattcatggctgctagcgtcgcatcgaccaatcgggatgaggccctcgacaaggtctacgaggaaatcgagaaagatctgatccttctgggagccactgccatcgaagataaactgcaggacggagtgccagagactatcagcaaactggccaaagcggacatcaagatttgggtgctgaccggcgacaagaaggaaactgcggagaatatcggattcgcatgcgagctccttaccgaggataccaccatctgttacggcgaggacatcaacagcctcttgcacgcccgcatggagaatcaacggaatcgcggaggggtgtacgctaagttcgctccaccggtgcaggaatccttcttcccaccgggaggaaaccgcgcacttatcatcaccggcagctggctgaacgagatcctccttgagaaaaagactaaacggaacaagatcctcaagctgaagttcccgcggactgaagaggagagaagaatgcgcacgcagtccaaacgcagactcgaagcgaagaaggaacagcgccagaagaatttcgtggacctcgcgtgcgaatgttcagcggtgatctgttgccgcgtgactccgaagcagaaggctatggtcgtggacttggtcaagaggtacaagaaggccatcaccctggcgatcggagatggtgccaacgacgtgaacatgatcaagactgctcatattggtgtgggtatctccggccaggaaggtatgcaagccgtgatgagctccgactactccttcgcccagttcaggtacctccaacgcctgctgttggtgcacgggcgctggagctacatacggatgtgcaagttcctgcgctacttcttctacaagaatttcgccttcaccctcgtccacttctggtacagcttctttaatgggtactcggcccagactgcctatgaggactggttcattaccctctacaacgtgctgtatacttccctccccgtgttgctgatgggactgctcgatcaggacgtctcagacaaactgtcgctccgttttccaggactgtacatcgtgggtcaacgcgacctgctgttcaattacaaacggtttttcgtgtcgctcctgcatggggtgctgacctccatgatcctgttcttcatccctcttggggcatacctgcaaaccgtcggccaagacggcgaagcgccgtcggactaccaatccttcgcagttactatcgcttctgcactggtgatcaccgtgaactttcaaatcgggctggatacttcctactggactttcgtgaacgcgttttcgatcttcggatccatcgccctctactttggcattatgttcgatttccattcagcaggaatccacgtgcttttcccttcagcgttccaatttactgggactgcttccaatgctctgcgccagccatacatctggcttactatcatcttggctgtggcggtgtgcctgctcccggtggtggctatccggtttttgtcaatgaccatctggccgtcggagagcgacaagatccagaaacaccggaagcgcctgaaagcagaagaacaatggcaaaggagacagcaagtgtttagaaggggcgtgtcaactcgccgctcagcttacgccttcagccaccagcggggctacgccgacctgatctcctcgggaaggtcgatccgcaagaagcgctcgccgctggacgcaatcgtggccgacggtaccgcggagtatagacgcactggggacagc

SEQ ID NO: 318917 - DNA, 3753 bp, Artificial Sequence
  derived and/or modified sequence
atgtcgaccgaacgagactctgagacgacatttgacgaagattcccagcccaatgatgaggtcgtaccgtactcggatgatgaaactgaggatgaattagatgaccaggggagcgccgtggaacctgaacagaaccgggtgaatagagaagccgaagaaaacagagaacccttcagaaaagaatgtacctggcaagtcaaagccaacgaccgaaagtatcacgaacagccgcattttatgaacacaaaattcttgtgtattaaggagtctaagtatgccaataacgctattaagacctataagtataacgcgttcacgtttattcctatgaatctttttgagcaatttaagagagcagccaacctatatttcctggcactgctgatcttgcaggccgtacctcaaatctctactctcgcgtggtacactactctggtgccgctgctggtggttcttggggtcactgcaattaaagatcttgttgatgacgtcgccagacacaagatggacaaagaaataaacaacagaacctgtgaggttatcaaagacgggcgattcaaggttgccaaatggaaggaaatccaggtgggagacgtaataaggttaaagaaaaatgacttcgtgcctgcagacatcctcctgctatcttctagtgagccaaatagcctttgttacgttgaaacagcagagctcgacggtgaaactaaccttaagttcaaaatgtccttggaaataaccgatcagtacctgcagagagaagacactctggccacatttgatgggttcatcgaatgtgaagaacctaataacaggctggataagttcactgggacactcttctggaggaatacttcattccccctggacgccgataagattctgctgaggggctgcgtgatcaggaacacggatttttgccatgggctggtgatctttgccggggcagacaccaaaataatgaaaaattctggtaaaacgagattcaaaagaacaaaaattgactatctgatgaactacatggtttataccatttttgtggtgttgattctcttaagcgccggcttagcaatcggccatgcctactgggaggcccaggttggaaattcaagctggtacctctatgacggcgaagatgatacaccatcttatcgaggtttcctgatcttttgggggtacattatcgtactgaacacaatggttcccatctcactgtacgtgtcagttgaagttataagactcggtcaatctcattttataaactgggatttgcagatgtactatgctgagaaagacacccccgctaaggcccggacaacaacactgaatgaacagctgggacaaattcactacatttttagtgacaagaccgggactctcacccagaatattatgacgtttaagaagtgttgcatcaacgggcagatatacggggaccacagagatgcatctcagcataatcacaataagatagagcaggttgacttttcatggaatacatatgctgatggcaagctggctttctacgatcactacctgatcgagcaaatacagagcgggaaggagcctgaggtaaggcaattcttctttcttctcgccgtatgtcataccgtgatggtggaccgcactgacgggcagctaaattaccaggctgccagccccgatgagggagcgctcgttaatgctgccaggaattttggatttgcatttctcgctcgcacgcaaaacaccatcaccatctctgagctgggtaccgaaaggacatataatgtgctagcgatcctcgattttaactccgaccgaaagagaatgagtatcatcgtcagaactcccgagggcaacataaaactctactgtaagggcgcggacaccgtgatttacgaacgtctgcacaggatgaacccaactaagcaggagactcaagatgcactggatatcttcgcgaacgagacccttagaactttatgtttgtgctacaaagaaatcgaagaaaaggagttcacggaatggaacaaaaaatttatggctgccagtgtggcttctaccaacagagacgaggctttggacaaggtttacgaagaaatagagaaggatcttatcctgcttggggccacggctatagaagataagttgcaagatggcgtgcctgaaaccattagcaagctcgctaaagccgatatcaagatatgggtcctcaccggggacaaaaaggaaaccgccgagaacatcgggtttgcatgcgaactattaacagaggatacaacgatctgctacggagaagacataaactctctgcttcacgcgaggatggaaaatcaaaggaacagaggaggagtgtacgccaaattcgcgccgcctgtgcaggaatccttttttcctccaggtggcaatcgagcccttatcataactggaagctggctgaacgagatactcttggagaaaaagacaaagcgaaataaaattctgaagcttaagttcccacgaaccgaagaggagcgaagaatgcggacccagagcaaaaggagactcgaagctaagaaggagcagcgacagaaaaattttgtcgacctggcatgtgaatgttccgccgtgatttgctgtcgagtcacccccaagcagaaggctatggtggtcgatctggtaaaacgctacaagaaagctataactttggcaatcggagacggagccaacgatgtgaacatgatcaagaccgcgcacatcggggtgggaatttctggacaggagggtatgcaggctgtaatgtcatcagactacagcttcgctcagttccgatatctgcagagattattgctcgtacacggccgctggtcttacatacgtatgtgcaagttcctccgttacttcttctataaaaacttcgcatttaccctcgtgcacttttggtattccttctttaatgggtattcagctcagactgcctacgaagactggttcattacactgtataacgtactctacacaagcctgccggtgttgctgatgggactgctggatcaggacgtgtcagacaagctttcactacgtttccccggcctgtacatcgtaggacagcgagacctgctgttcaattacaaaaggttttttgtgtccctgctccacggggtgctcacatccatgatactcttctttatcccgctgggagcgtaccttcagaccgtggggcaagacggcgaggcaccctcagattatcagtcatttgctgtgaccattgcctctgctttggttattaccgtcaattttcagattggcttggacactagttactggacgtttgtcaacgcattctctatcttcggctcaatcgccctctactttggaattatgttcgacttccactctgctgggattcacgtgctcttcccgagtgcctttcagtttaccggtaccgcttcaaacgctctcaggcagccttatatttggctcacaatcatcctagcagtggctgtctgtttgctgcccgttgtggctattcggttccttagcatgacgatatggccgagtgaatctgataagatccagaaacatcgaaaacggctgaaggcagaggaacagtggcagagaagacagcaggtgtttaggaggggcgtgagtacgcgaaggagcgcttacgcattttcccaccagcgagggtacgcggacctcatctcatcaggccgaagcatccgaaaaaaacgaagcccactggacgcaatcgtggctgatgggacagcagaatatcgacgaactggtgatagt

SEQ ID NO: 318918 - DNA, 3753 bp, Artificial Sequence
  derived and/or modified sequence
atgtctacagaacgggacagcgaaacaactttcgacgaggattctcagccgaatgacgaagtcgttccatactctgatgatgagaccgaagacgagctggatgatcagggttccgctgttgaacccgaacagaatagggtgaatcgggaagctgaagaaaatagagaaccctttcgcaaagagtgtacatggcaggttaaagcaaacgatcgaaagtaccatgagcagccccacttcatgaacacgaagttcctgtgcatcaaggagtcgaagtatgctaacaacgcgattaagacctataaatacaacgcctttacctttattccgatgaatttattcgaacaattcaaacgcgctgcgaatctgtacttcctggccctgctgatcctgcaagcagtgccacagataagcacgttagcttggtacacaaccttggtacccctgcttgtagttttgggggtgacagctataaaggatttggtggatgacgttgctagacacaaaatggataaagagatcaataatagaacatgcgaggtcatcaaagacggacggttcaaggtggccaagtggaaagagattcaggtcggtgacgttattcgattaaaaaaaaacgatttcgtcccagccgacatcctgcttctatccagttcagagcccaattcattgtgctacgtggaaaccgcagagctggacggggaaaccaatcttaaatttaagatgtcactggagatcaccgatcagtacctgcagcgcgaggacactttggctactttcgatggctttatcgaatgtgaggagcccaataatcggctagacaagtttacggggaccctcttttggaggaatacttctttccctcttgatgctgataaaatcctgcttcggggctgtgtgattcggaatacagacttctgccacgggctggtgatcttcgctggcgctgataccaagatcatgaaaaactccggtaagacacgattcaaacgcactaagattgattaccttatgaattacatggtgtacacgatattcgtggtactcattttactttccgctgggctagcgattggacatgcgtactgggaggctcaagtggggaactccagctggtacctctatgatggcgaggatgatactccttcctatagaggttttctcattttttggggttacataattgtgctgaacacgatggtccctatttccctttacgtttctgtcgaggttatcaggcttggccagtcccacttcattaactgggaccttcagatgtattacgctgagaaggacacccctgccaaagcaagaacaaccaccctaaatgaacagctaggtcaaatccactacatcttctccgataaaactggtacattaactcagaacatcatgacctttaaaaagtgttgtataaatgggcaaatttacggagaccatagggacgcaagccagcacaatcacaacaagatcgaacaggtcgatttttcgtggaacacatacgcggacggcaagcttgctttctatgaccactaccttatcgagcagatccagagcgggaaagagcctgaggtaagacagttctttttcctgctcgccgtgtgccacaccgttatggtggaccgtacagacgggcaactgaactatcaggccgctagcccagatgagggcgcattggtgaatgcagccagaaatttcggattcgccttcctggcacgcacccagaataccattacaatcagcgagctgggaactgaacggacctacaacgtactggctatactcgacttcaattcagatagaaagcgcatgagcatcatcgtccgaacgccggaagggaacattaaactatactgcaagggcgctgacactgttatctacgagcgactgcacaggatgaacccgactaaacaagaaactcaagacgctctggatatctttgctaacgaaaccctaagaaccttgtgtctgtgctataaagagatcgaggaaaaagaattcaccgagtggaacaaaaaattcatggctgcctccgtggcgtcaactaatagggacgaagcacttgataaggtctatgaagagatcgagaaggatcttatccttttaggagcaacagcaatcgaggacaagcttcaagacggagtccccgaaacaatctctaaattagcgaaggctgatataaaaatctgggtactgacgggcgataaaaaggaaacggctgaaaatattggcttcgcctgtgagcttctgaccgaagacacaaccatctgctacggagaagacataaactcactcctgcatgctaggatggagaaccagcgcaatagaggaggtgtgtatgccaagtttgccccgcccgtacaggaaagcttcttcccgcccgggggcaacagggctcttattatcacagggtcctggctcaatgagatcctgctggagaaaaaaaccaagcgaaataagattttgaagctgaaattcccccgtaccgaagaggagagacgcatgcggacccagagcaaacggcggcttgaggctaaaaaggaacaaagacagaagaatttcgtagaccttgcctgcgagtgctccgctgtcatctgctgtagagtgacgcccaagcagaaggcgatggttgtagatctagtgaagcgctacaagaaagccattactctcgctattggcgatggcgcaaatgatgtgaatatgataaagaccgcgcatatcggcgttgggattagcggccaggagggtatgcaggcagtgatgtctagtgactacagtttcgctcagttccgctatctccagcggctgctgttggtgcacggccgatggagttatatccggatgtgtaagttcctcaggtattttttctacaaaaatttcgcgttcacattggtacacttctggtacagcttttttaatggttactccgcacagacagcatatgaagattggtttattacgctttacaatgtgctatatacctcactgccagttctcctgatgggactattagaccaggatgttagtgacaaactatccttacgcttccccgggctatatatagtaggacagagagacctgctgtttaattataagcggttttttgtatcactcctgcacggggtgctgacaagtatgatcctcttctttattcctctcggggcctatcttcaaaccgtcggccaggatggggaagccccttcggattaccagagtttcgctgtgactattgcttctgccctggtaattacagtcaatttccagattggactcgatacctcatactggactttcgtgaacgctttctccatctttggctcaatcgctctttactttgggatcatgttcgatttccatagcgctgggatccatgtgctgtttccttcagccttccagtttacggggacggcgtccaacgcactcagacaaccctatatttggctgaccatcattctcgcagtggccgtttgtctgctccctgtggtggcaatcagattcctgtcaatgaccatttggccttccgaatcagacaagatacagaagcatagaaagagactgaaggcggaggagcagtggcagcgcagacaacaagttttcaggagaggagtctcaacccgacggtctgcgtatgcttttagccatcagcgcggatatgcagatctgatttcatcgggtcgctcaattcgcaagaagcggagcccccttgatgccattgtggcggatgggactgctgaatatagaaggacaggggactcc

SEQ ID NO: 318919 - DNA, 3753 bp, Artificial Sequence
  derived and/or modified sequence
atgagcaccgagcgagactcggagactacctttgatgaagattcccagccaaatgatgaggtggtgccttactcggatgatgaaacggaggatgaattggatgaccaaggatcggcagtggagcctgagcaaaatcgcgtgaacagggaggcagaagaaaacagagaaccatttcgtaaggaatgtacctggcaagtgaaggcaaatgatcggaaataccatgaacaaccacatttcatgaatactaagttcctgtgtataaaggaatctaagtatgcaaataacgcaatcaaaacttacaagtacaatgcattcaccttcattccaatgaacttgtttgaacagttcaagagagccgccaacctttactttctggcacttctcatccttcaggcagtgccccaaatttctacccttgcttggtacaccacccttgtgcctctccttgtggtgctcggtgtgactgcgattaaggatctggtcgatgacgtggcccggcacaaaatggacaaggagataaacaacaggacttgtgaagtcattaaggacgggagatttaaggtggcgaagtggaaggagatccaggtgggtgatgtgattagacttaagaagaatgatttcgtgccagcagatatcctcctgctgtcgagttcggaacctaattcactttgttacgtggaaacggcagagctggatggtgagactaacctgaagtttaagatgagcctggagatcaccgatcaatacctgcagcgagaagataccctcgcaacctttgatggctttattgaatgtgaggaacccaacaataggctcgacaagtttaccggaaccttgttctggagaaacacgtccttccccctcgatgctgacaaaatcctcctgcgaggttgtgtgattagaaacactgatttttgccatggcctcgtcatcttcgccggtgcagacactaagatcatgaaaaactcagggaaaactagattcaagagaaccaagatcgattatctgatgaactacatggtgtacactatattcgtggtgcttatcctgctgtctgcaggacttgcaatcggtcatgcgtactgggaggcgcaggtgggcaactcctcgtggtacctctacgatggtgaggacgatacgccatcgtaccgtggttttctcatcttttggggctacatcatagtgctgaacaccatggtcccaatttcgctgtatgtctcagtcgaggtgattagattggggcaatcccatttcatcaattgggaccttcagatgtactacgccgaaaaagataccccagcaaaggcccgaactaccactcttaacgaacaactgggacaaattcactacattttctccgacaaaactggtactctgacccagaacattatgacgtttaagaagtgttgcattaacggccagatttacggcgaccaccgagacgccagccaacacaatcacaataagattgaacaagtggattttagctggaacacttacgcagacggcaaacttgccttttacgatcattacttgattgaacaaattcaatccggaaaggagccagaagtgaggcaattctttttccttctcgcggtgtgccataccgtgatggtggataggaccgatggacagctgaactaccaggccgcctccccagatgaaggagcactcgtgaacgcagcacggaacttcggttttgcctttctggcaagaacccagaacaccattaccatttcggaactggggactgagagaacttacaacgtcctggcgatccttgatttcaactcggaccggaagcgaatgtcgattatcgtccggacccctgaagggaatatcaaactgtactgtaagggtgcagataccgtgatttatgaaaggcttcaccggatgaaccccaccaagcaagaaacccaagatgcacttgacatatttgcaaatgaaactcttagaactctttgcctttgttacaaggaaatcgaggaaaaggagttcactgaatggaataagaagttcatggcagcctcggtggcaagcaccaatagggatgaagcgcttgacaaggtgtacgaggagattgagaaagatcttatactcctgggagcaaccgcgatcgaggacaaactgcaagatggcgttcccgagacgattagcaaactggccaaggcagacattaagatttgggtgctcactggagacaaaaaggagactgcagaaaacatcggattcgcgtgtgaacttcttaccgaagatactaccatctgttacggcgaggacatcaattcgctgcttcatgcgagaatggagaaccagaggaataggggaggagtctacgcaaagtttgcaccccctgtgcaagaatcatttttcccacctggcggaaatcgtgcactcatcattaccggaagctggctcaatgagatcttgctggagaaaaagactaaaagaaacaagattctcaaactgaaatttccacggaccgaagaagaacgccggatgcgaactcaatcgaagcgtagacttgaagcgaagaaggaacagcgtcaaaagaacttcgtcgatctggcttgcgaatgctccgctgtgatttgttgcagggtcaccccgaagcagaaagcaatggtggtggaccttgttaaaagatacaagaaagcgatcaccctggcaatcggcgatggcgccaacgatgtcaacatgatcaagactgcacacattggagtcggcattagtggccaagaaggtatgcaggcagtcatgagctctgattattcattcgcacaatttaggtacttgcagcgcctcttgcttgtgcatggacgttggtcttacattagaatgtgtaagtttctgcggtactttttctacaaaaacttcgcctttactctggtgcacttctggtactcgttctttaacggctactccgcgcaaacggcctacgaggactggttcatcaccctttacaacgtgctgtacacctccctgccagtgcttcttatgggacttcttgatcaggatgtcagcgataaactgagcctccgttttccaggactctacatcgtgggtcagcgggatttgcttttcaactacaagcgtttctttgtgtcccttctgcatggcgtgctcactagcatgattctgtttttcatccctctgggtgcataccttcagacggtgggacaggacggcgaggcgccctcggactaccagtcctttgcagtgactattgcttcagcactcgtgattacggtgaactttcaaattggattggatacttcgtactggacctttgtgaatgcgtttagcattttcggttccatcgcactttactttggtataatgtttgatttccattcggcaggaatacatgtgctctttccatccgcatttcagtttaccggcactgcaagcaacgccctcagacaaccgtacatttggctcaccatcatcctcgcagtggcggtctgtctgctgcctgtggtggctatacgttttctgtcgatgaccatctggccaagcgagtcagataagatacagaagcaccgcaagcgccttaaggcagaagaacaatggcaacggcgtcagcaggtgtttcgccggggtgtgtcgaccaggcgaagcgcatacgcgttttcccaccaaagagggtacgccgacctcatttcgtcaggacgatcgattagaaagaagcgctcccctcttgatgcgattgtggcagacggaacggcagagtaccgccggaccggagactcc

SEQ ID NO: 318920 - DNA, 3753 bp, Artificial Sequence
  derived and/or modified sequence
atgagcaccgaacgcgacagcgaaactacgttcgacgaggactcccaacccaacgatgaggttgtcccgtactctgatgatgaaactgaagatgaacttgacgatcagggatcggccgtggaaccggagcaaaatcgcgtgaatcgcgaagcagaggagaatagggaaccgttcagaaaggagtgtacgtggcaagtgaaggcaaacgaccggaagtaccatgagcagccgcactttatgaataccaagttcctctgtatcaaagagtcgaagtatgccaacaacgcgatcaaaacctacaagtacaatgcattcaccttcatccccatgaacctgtttgaacaattcaagcgggccgcaaacctgtatttcctcgcccttctgatcctgcaagctgtgccgcagattagcactctggcgtggtacaccaccctggtcccactcctggtcgtgctgggagtgaccgctatcaaggacctcgtggatgacgtggcccggcacaaaatggacaaggaaatcaacaaccgcacttgcgaagtgatcaaggatggacggttcaaagtggccaagtggaaggagatccaggtgggagatgtgatccggctcaagaagaacgacttcgtacctgcagatatactcttgctgtcaagctccgagccaaattccctctgttatgtcgaaacggccgagctggatggcgagactaacctgaagttcaagatgtccctggaaatcactgaccagtacctgcagcgagaagatactctcgcgactttcgatgggttcatcgaatgcgaagaaccgaacaatcggctcgacaagttcaccggaactttgttctggagaaacaccagctttccgctcgacgcggacaagattctgcttcgcggctgcgtgattaggaataccgacttttgccacggcctcgtgatcttcgcgggggcggacaccaagatcatgaagaacagcggaaagactagattcaagcgcaccaagatcgattacttgatgaactatatggtgtacactatcttcgtagtgctgatccttctcagtgccggactcgcaatcggacatgcctactgggaagcgcaggtcggaaattcgtcctggtacctctacgacggagaggacgacaccccgtcgtacagaggatttctgatcttctgggggtacatcatcgtgctgaatactatggtcccgatctcgctgtacgtgtcggtggaagtgatcagactcgggcaatcgcacttcatcaactgggatctgcagatgtactatgcggagaaggacaccccagccaaagcgcggaccactaccttgaatgaacaactcggacagatccactacatctttagcgacaagactggtactcttacccagaatatcatgactttcaaaaagtgttgcatcaacggccagatctacggtgaccatagagatgcctcgcagcataatcacaataagatcgaacaagttgatttttcgtggaacacctacgcagatgggaagctcgccttttacgaccactacttgatcgagcagatccaatccggtaaagagcctgaggtgcggcagtttttcttcctgctcgcagtgtgccatactgtgatggtggatcggaccgacggacagttgaactaccaggcagcctccccagacgaaggagcgcttgtcaacgcggcccggaactttggatttgcattcctggcccggacccaaaacaccatcaccatcagcgaactcgggacggagcgcacttacaacgtgctggccatcctggactttaactctgatcgcaagcgaatgtcgatcattgtgaggactcctgagggaaacatcaagctgtactgcaagggggccgacaccgtgatctacgaacggttgcacagaatgaaccctaccaaacaggaaacccaggacgccttggacatattcgccaacgaaaccctgcgcacgctgtgcttgtgctacaaggagatcgaagaaaaagagttcacggaatggaataagaagttcatggcagcctctgtggcgtcaaccaacagggacgaggccctcgacaaagtgtacgaggagatcgagaaggatctgatcctgctgggcgccaccgcgatcgaggacaagctccaggacggagtccctgaaactattagcaagctggccaaggcggatatcaagatctgggtgctgaccggggataagaaagaaactgctgagaatattggtttcgcctgcgaactgctgactgaagataccacgatctgctacggcgaagatatcaacagcctgctgcacgcccgaatggagaatcagcggaataggggtggagtctacgctaaattcgctccaccggtgcaagagtcattcttccccccaggaggaaaccgggcactgatcatcactggatcgtggctgaacgagatcctcctcgagaaaaagaccaagaggaacaagatcctgaagctcaagtttccgcggaccgaagaggaacgccggatgagaactcaatcaaagcgccggctggaagcgaagaaggagcagcggcagaagaactttgtggacctggcttgcgaatgctccgcggtgatctgttgtagagtcactccaaagcaaaaggccatggtggtggatctggtgaagaggtacaagaaagccattactctggctatcggcgatggtgctaatgacgtgaacatgatcaaaactgcgcacatcggggtgggcatctcaggacaggaaggaatgcaagcggtgatgtctagtgattactcgttcgcgcaattccgctacctgcagcgcttgctgctggtccatggacgctggtcctatattcggatgtgtaagttcctccgctactttttctacaagaatttcgccttcaccctggtgcacttctggtactcgttcttcaacggatactcggcgcagactgcttacgaggattggttcatcaccctctacaatgtgctgtacaccagccttcctgtgctcctgatgggcctgctcgatcaggacgtctcggataaactgagcttgcgctttcctggcctgtacatcgtgggtcagcgagacttgctgttcaattacaagcgcttcttcgtgtccctcctccatggtgtcctcaccagcatgattctgtttttcatcccgctcggagcctacctccagactgtgggacaagacggcgaggccccttcggactaccagtcgttcgctgtgactatagcaagcgcgctggtcataacggtcaatttccagatcggcctggacacgtcctactggactttcgtgaacgcttttagcatcttcggcagcattgccctgtatttcggcatcatgttcgacttccattcggcgggaatccacgtcctgttccctagcgctttccaatttactgggaccgcgtccaacgcgctccgccaaccgtacatttggctgactatcatcctcgcagtggcagtctgcctgcttcccgtcgtggccatacgcttcctgtcgatgactatatggccatcggaatcggacaaaatccaaaaacacaggaagaggttgaaggcagaagaacaatggcaacgccggcagcaggtctttagacgcggcgtctcgacgagacggtctgcttacgcgttctcgcaccagcgcggatacgcggacctgatctcatcaggaaggtccatcagaaagaagcggtcacccctcgacgcgatcgtggcggacggaaccgccgagtaccgccgcactggagactcg

SEQ ID NO: 318921 - DNA, 3753 bp, Artificial Sequence
  derived and/or modified sequence
atgtcgactgagcgggattccgaaacgacctttgacgaggactcacagccaaatgacgaagtggtgccgtactccgacgatgagactgaggacgagcttgatgaccaggggagcgccgtcgaaccagaacaaaaccgcgtgaacagagaagcagaggaaaaccgcgaacctttccgcaaggaatgcacctggcaagtgaaggcaaatgaccggaagtaccacgagcaaccacacttcatgaacactaagtttctctgcattaaggagtccaaatatgccaataatgccattaagacttacaaatacaacgcgttcaccttcatcccgatgaacctcttcgaacagtttaaacgggccgccaatctctacttcctcgcacttttgatccttcaagccgttcctcagatcagcactcttgcttggtacactacccttgttccgctgttggtggtcttgggagtgaccgcgatcaaggacctcgtggatgacgtggcaaggcacaaaatggataaagaaatcaacaatagaacttgcgaagtgatcaaagacggcaggttcaaagtggctaaatggaaggagatccaggtcggagacgtgatcagactgaaaaagaacgacttcgtgccagccgacattctgcttctctcctcctcggagccgaactcgctgtgctacgtggaaaccgctgaactggacggcgagactaaccttaagtttaagatgagcttggaaatcaccgaccagtacttgcaaagggaagatactctcgcgaccttcgacggatttatcgagtgcgaagagccaaacaaccgcctggacaaattcaccgggacccttttctggcggaatacttcctttccactggatgccgacaagattctcctgcgcggatgcgtcatccggaatactgatttctgccacgggctggtgatcttcgctggcgctgacaccaagattatgaagaacagcggaaagacccggtttaagcggacgaagatcgactacctgatgaattacatggtctacaccatctttgtcgtgttgatcctgctctccgcgggactggctatcggtcacgcatactgggaggcacaggtgggtaactcatcctggtacctgtatgatggagaagatgacactccttcataccgcggattcctgatcttctggggttacatcatcgtcctgaacactatggttcccatctcactgtacgtgtcggtggaagtcatccgcttgggacaatcgcacttcatcaactgggacctccagatgtactatgctgaaaaagacactccggcgaaggcccggactactactctcaatgagcagctcggccagatccactacatcttctccgataagaccggcaccctgacccaaaacatcatgaccttcaaaaagtgttgcatcaacgggcagatctacggggatcatcgcgacgcctcgcagcataatcacaataagatcgagcaagtggatttttcatggaatacctatgcggacggaaagttggcgttctacgatcattatctgatcgaacaaatccagtcaggaaaagagccggaggtccgccagttcttctttctgctggccgtttgccataccgtcatggtggatagaaccgacggccagcttaactaccaggccgccagcccagatgaaggggcgctggtcaacgcggcgcgcaatttcggattcgcattcctcgctcgcacccagaacacgatcaccatctcagagctcgggactgagagaacttacaacgtgctcgccatcctcgacttcaattccgacagaaagaggatgagcatcatcgtgcgcaccccagaggggaacatcaaactttactgcaagggagcggataccgtgatctatgaacgccttcaccgcatgaacccgactaaacaagaaacgcaggatgcccttgacattttcgccaacgagacgttgagaaccctttgcctgtgttacaaagagattgaggaaaaggaattcaccgagtggaacaagaagtttatggccgcatcggtcgcttcgactaatagagatgaggcgctggataaggtgtacgaggaaatcgaaaaggacctgatcctccttggggcgaccgcgatcgaagataaactgcaggacggagtgcctgaaactatatcaaaactcgcaaaagcggatatcaagatctgggtgcttactggagacaagaaggaaactgccgaaaacattggatttgcatgcgaactgctgactgaggacaccactatttgctacggagaggacattaactctctccttcatgctaggatggaaaaccaacggaatcggggaggtgtgtatgccaagttcgccccgcctgtgcaagagagctttttcccccctggtggcaacagagccctgatcataaccggctcgtggctgaacgagatcctcctcgaaaagaaaactaagcggaacaagatcctgaagctgaaattccctcggaccgaggaagaaagacgcatgcgaactcagagcaaacgtagactggaggccaaaaaggagcagcgccagaagaattttgtcgatctggcatgcgagtgttcagctgtgatttgctgtcgggtcacccccaagcagaaagctatggttgtggacctcgtgaagcgatacaagaaggctatcacgcttgcaattggcgatggagccaatgacgtgaatatgatcaagactgcccacatcggagtgggcatcagcggccaagaaggcatgcaggccgtcatgtccagcgactactcgtttgcacagtttcggtatctccaacggttgctgctggtccacggaagatggagctatatccgtatgtgcaagtttcttcgctatttcttctacaagaacttcgccttcactctggtccacttctggtacagcttcttcaacggatattcggctcaaaccgcctacgaagattggttcatcactttgtacaacgtcctgtatacctctctgccggttctcctgatgggactgctcgatcaagacgtgtctgacaagctgtcgctccggttccccggtctttacatcgtgggacagcgggacctcctgtttaactacaagcgcttcttcgtctcactcctgcatggcgtgcttacctcaatgatcctgttcttcatcccactgggagcttacctccagacggtcgggcaagatggagaagctccttccgattaccagtcgtttgccgttactatcgcatcggcgctggtgatcacggtcaatttccaaatcggcctggatacctcatactggaccttcgtgaatgccttcagcatcttcgggtccatcgcgctctacttcggtatcatgttcgactttcacagcgctggtattcatgttctgtttccctccgccttccagtttaccgggaccgccagcaatgcactgaggcaaccatacatctggctgacgatcatacttgctgtcgcagtctgtctgctgccggtggtggctatccgcttcctgtcaatgaccatctggccgtcggagtcggacaagatccagaaacaccgcaagcggctcaaagcggaggagcagtggcagaggcgccaacaagtctttagaagaggagtgtctactcgcagatcggcctacgcattctcacaccaacggggctacgccgacctcatctcgtcagggcgaagcattagaaagaaaagaagcccgctggacgcgattgtggccgacgggaccgccgaatacaggaggaccggcgattcc

SEQ ID NO: 318922 - DNA, 3753 bp, Artificial Sequence
  derived and/or modified sequence
atgtccaccgagcgggacagcgaaactactttcgacgaagattcacagcctaatgacgaggtggtgccatattcggacgacgaaacggaggacgagctggatgaccagggttccgctgtcgaacccgaacagaatcgcgtcaaccgagaagcagaggaaaaccgcgagcctttcagaaaagaatgcacatggcaggtgaaagcaaacgatcgtaaatatcacgagcaaccacatttcatgaataccaagttcttgtgcattaaggagtcaaaatacgccaacaatgccatcaagacatacaaatataacgcttttacctttatccctatgaatctgttcgaacaattcaagagagccgccaacctgtatttcctggccttgttgattttgcaggctgtgccacagatatctaccttggcatggtacactaccttagtccctcttctggtggtgctgggagttactgccattaaagacctggtagatgacgttgcacggcacaagatggacaaggagatcaataaccgcacatgcgaggtgattaaagacggtcggttcaaagtcgccaaatggaaagagatacaagtcggcgatgtgatacgcctgaagaagaatgactttgtgcccgccgatatactcctcctttcctctagtgagccaaactccctgtgctatgtggagactgccgagcttgatggggagacaaacttaaaatttaagatgtcactagaaatcaccgatcaatatcttcagcgcgaagatacccttgccacctttgacgggtttatcgaatgcgaggagcccaataatcgcctggataagttcactggtaccttgttttggaggaatacttctttccctctggatgctgataaaattctgttacgaggttgtgtgatccggaatacagacttctgccacggtctggtcatcttcgccggagccgataccaagatcatgaaaaactccggaaagacacggttcaagcgcaccaagatagattacctgatgaattatatggtgtatactatctttgtggtgctgatcctgctgtctgccggactagccatcggccatgcctattgggaggcacaagtggggaactcatcttggtatctatatgacggggaggatgacacccccagttacagagggttccttattttttggggatatataatagtccttaacaccatggttcctatcagtttatatgtgtctgtggaggtaattcggctgggccagtcccatttcatcaattgggatttgcagatgtactacgctgagaaagacacacctgctaaagccaggacaaccaccctgaatgaacaacttggccaaattcattatatattcagtgataagaccggaacactgacccaaaatatcatgaccttcaagaagtgctgtatcaacggtcagatttacggcgaccaccgggatgcatcccagcacaaccacaataaaatagaacaggtggatttcagttggaacacttatgccgatggaaagctggcattttacgaccactatctaatcgagcagattcagtccgggaaggagcccgaggtgcgtcagtttttttttttgcttgctgtgtgccatacggttatggtagaccgcactgatgggcaattaaactatcaggccgcttcacccgatgagggtgcactggtgaacgctgccagaaatttcggattcgcctttctggcgaggacgcagaacacgataacgatcagcgagttgggcactgagcggacatacaatgttctggcaattcttgactttaactcagacaggaaacgcatgtcaattattgtccggacacccgaggggaacattaagctctactgtaagggggctgacactgtgatttatgaaagattgcataggatgaatccaaccaagcaagagactcaagatgccctcgatatttttgctaacgagacacttcgtactttgtgtctgtgctacaaagaaatcgaggaaaaggagttcactgaatggaacaagaaatttatggctgcgtccgtcgcctcaaccaaccgcgacgaggccctcgataaggtctatgaagagatcgagaaagacctgatactgctgggagccaccgcaatagaggataaactccaagacggtgtccctgagaccatttctaaacttgccaaagctgacatcaagatttgggttctgacaggtgacaagaaagaaaccgccgagaacatcggatttgcctgcgaattgttaacagaggatacgacaatttgctatggcgaggatatcaacagcctcctgcatgcccgcatggagaatcagcgtaatcggggtggagtgtacgcaaaattcgccccccccgtccaggaatctttcttccctccggggggaaacagagccctgatcataaccggatcctggctcaacgaaatcctcctagaaaaaaagaccaaacgcaacaaaatcctcaaactgaagtttccgcgtaccgaagaagagcggcgaatgcgtacacagtctaaaaggcgactggaagctaagaaagaacaaaggcaaaaaaactttgtggatctcgcgtgcgaatgctccgccgtcatctgctgccgagtgacccccaagcaaaaggccatggttgtcgacctggttaaacggtacaaaaaagccattaccctggctattggcgacggcgccaacgacgttaatatgatcaaaacagcacatatcggtgtcggaattagtgggcaagaagggatgcaggcagtgatgtcatctgattatagctttgcacagtttcgctatctgcagcgcttgctgctggttcacggccgctggagctatatccgcatgtgcaagtttctgcggtatttcttctataagaacttcgctttcacgctggtccacttctggtattcatttttcaacggatattccgcccaaacggcatatgaagactggtttatcaccctgtataatgtgctttacacaagccttcccgttttgttgatggggctgctcgatcaggatgtttcagacaagctgtccctgagattccctggtttatacattgtgggacagcgagatttgctcttcaactataaacgcttcttcgtgagcctcttgcatggcgtgttgacgtcaatgatcctgttttttatcccattgggtgcctacttgcaaactgtgggacaagatggcgaagcaccatctgattaccagtctttcgcggtgaccattgccagcgctctagttattaccgtcaattttcaaattgggctggacacctcttattggaccttcgtgaatgctttttctatctttggatccatcgccctgtactttggcatcatgttcgatttccactctgctggtatccatgtgctgttcccaagcgcttttcagtttacaggaactgcatccaacgcactgcgccaaccatacatttggctaaccattatcctggcagtcgcggtctgcctgctccccgtggtggcaatcagatttctgagtatgactatttggccaagcgaaagcgacaagatccaaaagcaccggaagcggctcaaggcagaagagcaatggcagcgcaggcagcaagtgttccgccgcggcgtgtctaccagacgctcggcttacgcgttttcacaccagagaggctacgccgacctaatttccagtggtcgatctatcaggaagaaaagatcccctcttgatgccattgttgccgatgggactgctgagtatcgtaggacgggtgactca

SEQ ID NO: 318923 - DNA, 3753 bp, Artificial Sequence
  derived and/or modified sequence
atgtcaacggagcgggattcagagactacctttgatgaggacagtcaaccaaatgacgaggtagtaccttactctgacgacgagacagaggacgagctggatgaccaggggagcgcagtggagcctgagcagaaccgcgtcaaccgggaagcggaggaaaaccgcgagccctttagaaaggagtgtacatggcaagtgaaggcaaatgataggaaatatcacgagcagccccacttcatgaacactaaattcttgtgcattaaagagtctaaatacgctaataatgccatcaaaacatataagtacaacgcatttacatttatccccatgaacctgtttgagcagttcaaacgagccgccaatctgtatttcctcgcactcctgattctgcaggccgttccacagatctctacgttggcctggtacacaactctggtgccactgcttgtggtgctcggagtgacagcgattaaagacctcgttgacgatgttgcccgccacaaaatggacaaggaaattaacaacagaacctgtgaggtcatcaaagacggtaggtttaaagtggctaaatggaaagagattcaggtgggcgacgtgataaggcttaagaagaatgacttcgtgcccgccgatattcttcttctgtcctccagtgaacctaatagtctctgctatgtagaaaccgccgaactggacggagagacaaacctcaaatttaagatgagcttggagatcacggaccaatacctgcagcgagaggataccttggcaacattcgacgggttcatagagtgtgaagagcctaataacaggttggacaagtttacgggtaccttgttttggaggaacacgtcctttcctttggacgcagataaaatcctgctgcgcggatgcgtcatcaggaacactgacttttgtcacggcctggtcattttcgccggagcagatacaaagatcatgaagaacagcggcaagactcggtttaaaaggactaagatcgactacctgatgaactatatggtatacactatctttgtggtgctgatattgctgagtgctggcttggccattgggcatgcttactgggaagcacaggtgggcaacagttcttggtacctttacgacggtgaagacgacaccccatcctataggggattccttatcttctggggatatattatcgtactcaataccatggttcctatttccctctatgtgtccgtagaggtcatcaggcttggtcagagtcatttcatcaactgggacctgcaaatgtactacgccgaaaaggacactccagctaaggccagaaccaccacattgaacgagcagctcggacagattcactatattttctccgacaagactggtacccttacacaaaatatcatgacattcaaaaagtgctgcatcaacgggcagatttacggcgatcaccgagatgcttcccagcacaatcataataagatcgaacaggtcgatttctcatggaacacatatgctgatggtaaacttgctttctacgaccactatctgattgagcagattcagtccgggaaggaaccagaagtcaggcaattcttttttctgttggccgtgtgtcacacagtgatggtggaccggactgatggacagctgaattaccaggccgcctctccagacgagggagccctggtcaacgccgcacgcaactttggttttgcctttctcgctagaacacaaaacacaatcacaatatctgagctggggactgaaagaacgtataatgtgctggccatactcgacttcaattctgatcggaaaaggatgtccatcatcgtaaggaccccagaaggaaacattaaactttactgtaaaggtgctgacactgtaatttacgaacgcctgcaccgaatgaaccccactaagcaggagacacaggatgccctggacatctttgccaacgagacacttcggacattgtgcctttgttacaaggagattgaagagaaagagtttacggagtggaataagaagttcatggctgcttccgtcgcgtctaccaacagagacgaggccttggacaaagtgtatgaggaaatcgagaaggaccttatccttcttggggccacagcaattgaagacaagctgcaggatggagtaccagagacaatctcaaaactggctaaggccgatattaagatatgggtgctcaccggtgataaaaaggagactgctgaaaatatcggctttgcttgcgaattgctgactgaggacactaccatctgttacggggaagacatcaactctctgcttcatgccagaatggagaatcagagaaatcgaggtggcgtttacgctaagtttgcccccccggtgcaggaatccttctttcctcctggaggaaacagagcactgataataacggggagttggcttaacgaaatacttttggagaagaaaactaagaggaacaaaattctcaaattgaaattcccacggacagaagaggagcgaagaatgcgcacccaatccaagagaaggctggaggcaaagaaagagcaaaggcagaaaaattttgttgacctggcttgtgaatgcagcgcagtgatctgttgtagggtgaccccgaagcagaaggccatggtcgtggaccttgttaaacgatataaaaaggcaattaccctggcaattggcgacggagccaatgacgttaatatgatcaaaaccgcacacatcggtgtgggaatcagtgggcaggaagggatgcaagctgtgatgagctctgattacagttttgcacagtttagataccttcagcggctgctcctggtgcatggccgctggtcttacatcaggatgtgcaaatttctgaggtacttcttttataagaacttcgcattcacgctggtacatttttggtactccttttttaacggttattccgctcaaacagcttacgaggactggttcatcaccctttataacgtgctgtacaccagcctgccggttctgctcatggggctcctggatcaggatgtgagcgacaagctgagtttgagattccccggtttgtatatcgttggccagcgagatcttctcttcaattacaaacgatttttcgtttcactcctccatggggtcctcacatccatgattttgttctttatcccactgggggcctatctccaaacggtgggccaggatggggaggctccatcagactaccagagctttgcggtgacaatagcgtccgccttggtgattacagtcaattttcagatcggactggacacatcctattggaccttcgtcaacgccttctctatctttggctcaattgcactttactttggtattatgtttgattttcactcagcaggcatccatgtgttgttccccagcgccttccagttcaccggaactgcttctaatgctcttagacaaccttatatttggctgacaatcattttggctgtggctgtgtgcctgctgccagtcgtcgcaatcaggttcctgagcatgacgatctggccctcagagagcgataagatccaaaagcacagaaagcgcctgaaagcagaagagcagtggcagcgacgccagcaggtgtttagaaggggcgtctccacgaggcggtcagcttacgccttctcccaccagaggggatacgccgatctgatctctagcggtcgctcaatccggaagaagcgaagccctcttgacgctatcgttgccgatgggaccgccgagtatagaaggactggggactct

SEQ ID NO: 318924 - DNA, 3753 bp, Artificial Sequence
  derived and/or modified sequence
atgagcactgaacgagattcagagaccacctttgatgaggattcgcagcccaatgacgaggtggtgccatactccgacgatgagacagaagacgagctggatgaccagggctctgctgtagagccagaacagaatcgtgtgaaccgtgaggcagaggagaacagggaacccttcaggaaggagtgtacctggcaggtgaaggccaacgaccgcaagtatcacgagcagccacatttcatgaacaccaagtttctgtgcataaaagaaagcaagtacgccaataatgctatcaagacctataaatacaatgctttcacctttattccaatgaatctgttcgagcagtttaaacgagccgccaatctgtactttctggctctgcttatcctgcaggccgtgccccagatctccactctagcgtggtacaccacccttgtgccactgctggtggtgctgggtgtgacggccataaaggatctggtggatgacgttgcacgccataaaatggataaggagattaataataggacttgcgaagtcattaaggatggaagattcaaggtggccaaatggaaagaaatccaagtcggggacgtgatacgccttaagaagaatgactttgtgcccgcagacattttactgttaagctctagcgaacctaacagcctgtgctacgttgaaactgcagagctggatggtgaaacaaacctgaaattcaaaatgtctttggaaataaccgaccagtatctgcagagagaagacaccctggccacttttgacgggttcatcgagtgcgaagagcccaataacaggctcgataagttcacaggcacactgttttggaggaacacttctttccctctagacgcagacaaaattctgttgcgcgggtgcgtgatacggaataccgatttctgtcatgggctggtgatctttgctggggctgacaccaagatcatgaagaactcgggcaagacaagattcaaaaggacgaagatcgattacctgatgaattacatggtttatacaatctttgtggtgcttattctgctttcagcagggttggctattgggcatgcctactgggaagcacaagtgggcaactcttcatggtatctgtatgatggcgaagacgatacaccatcatatagagggttcctgatcttttggggctacataattgtgttgaatactatggtacccatttcactctatgtcagtgttgaagttatccggctggggcagagtcatttcatcaactgggacctgcagatgtactatgcagaaaaggacacccctgctaaggcacgaaccacaaccctgaacgagcagctggggcaaattcactatatcttttcggataagaccggcaccctaacacagaacatcatgacatttaagaagtgctgcatcaacggtcaaatctacggagatcatagggatgccagtcagcataaccacaacaagatcgaacaggtagatttttcctggaatacctacgccgatggaaagctggccttctacgaccactaccttatcgaacagatccagtccggcaaggagcctgaggttcgccagtttttctttttgctggcggtgtgccacaccgtcatggttgatagaaccgatggtcaattaaattaccaagccgcatcccctgacgagggggctttagtgaacgcagcacggaacttcggttttgcctttctagctaggacccagaatacgatcacaatctcagaactcggcaccgagaggacatacaacgttcttgcaatcctggatttcaactctgatcgtaagcgaatgagcataatagtgcgcacaccagaagggaatatcaaactgtattgcaagggcgccgacaccgtgatttatgagagactgcatcgcatgaatcccaccaagcaagagacccaggacgctcttgacatcttcgcaaatgaaacactgcgcaccctgtgtctttgttacaaggagatcgaggaaaaagagttcaccgagtggaataaaaagttcatggccgcctctgtggccagtacgaatcgcgatgaagccctggacaaggtttatgaggaaatcgagaaggatctgatcctgctcggagcaaccgccattgaagataagctgcaggacggagtcccagagaccatctctaaattggccaaagccgacattaagatctgggtcctgacaggcgataagaaggaaaccgcagagaatatagggttcgcttgcgagttgctgacagaggataccacaatctgttacggcgaagatataaactccctgttacacgcaagaatggagaatcagagaaatagagggggtgtgtatgccaaattcgcccccccagtgcaagagtcctttttcccgcccggtgggaaccgggctttgataatcacaggaagttggttaaatgagatcctcctggagaaaaagacaaaacgaaacaagatcctgaagctgaagttcccccgtactgaggaggagcggagaatgagaacgcaaagcaagcgtcggctggaggctaagaaggagcagagacagaagaactttgtggatctggcttgtgaatgttcagccgtaatttgctgcagggtgaccccaaaacagaaagcaatggtggtagacctcgtaaagaggtacaagaaagcgatcacactggcaattggggacggcgcaaacgacgtcaacatgattaagaccgcgcatattggagtgggcataagcggccaggagggcatgcaagccgtgatgtccagcgactatagtttcgcacagttccggtaccttcagaggcttctgttagtacatggcaggtggtcttacattcggatgtgcaagttcctacggtacttcttctataagaactttgccttcacccttgtgcatttctggtattcttttttcaacgggtatagtgcacagaccgcgtatgaggactggttcattaccctgtacaacgtcctttatactagccttcccgttctgcttatgggtttgctcgaccaggacgtaagcgataagctgtctctgagattccctggactttacatagtgggtcagcgcgatctgctgttcaactataaacgcttttttgtcagccttctccacggcgtgctgacttccatgatactattctttatacccctgggagcttacctccagactgttgggcaggacggggaagcccctagcgattaccaatcattcgcagttaccatagcatcagctttggtcataaccgtgaatttccaaattggtctggatacgagttattggacttttgtcaatgccttctcaattttcggttccattgccctatacttcggcataatgtttgatttccacagcgcaggaatacatgtactcttcccttccgcctttcaatttaccggtacagctagcaatgctctccgtcagccttacatttggctgactataattctagccgtggcagtgtgtctcctccccgttgtggccattcgattcctttccatgaccatctggccatcggagtcggacaagattcagaagcacaggaagcggctgaaagccgaggaacagtggcagaggcgtcagcaggtttttcggcgcggcgtgagcacccggaggtccgcctatgcattcagccatcagagaggatacgccgatctgataagctctggacgtagcattaggaagaagcgcagtcctttagacgcaatcgtggctgacgggaccgccgagtaccggaggaccggcgattca

SEQ ID NO: 318925 - DNA, 3753 bp, Artificial Sequence
  derived and/or modified sequence
atgagcaccgaacgggattctgagactacgtttgacgaggatagccaacctaacgacgaggtcgtcccctatagcgacgatgaaaccgaggatgaactggatgatcaggggtctgccgttgagccggaacagaaccgggtcaaccgggaggcagaggagaatcgcgaaccttttcggaaggagtgcacatggcaagtaaaggccaatgacaggaagtatcacgagcagccacacttcatgaatactaaattcctgtgcatcaaggaatcaaaatatgccaacaatgcgatcaagacatataagtacaacgccttcaccttcataccaatgaacctgttcgaacagttcaagagggctgcaaatctctattttctggccttgctgattctgcaggccgtgcctcagatctccacactggcatggtacactactctggtgccgcttttggtggtactgggagtgaccgcgatcaaggatcttgtggatgacgttgcaaggcataagatggacaaagagataaacaatagaacttgcgaggtcatcaaagatggacggttcaaggttgcaaaatggaaggagattcaagtgggcgatgtaatcagactgaagaagaatgacttcgtgcctgccgacatcttactactttccagttctgaaccaaactctttgtgttatgttgagaccgccgaactggacggggaaaccaacctgaaattcaagatgtccctggagataacagaccaatatttgcagcgagaagacactttggctactttcgacggtttcatcgaatgtgaggagcccaataatcggctcgacaaattcaccggtaccctgttctggcgcaatacttcattccctctggacgcggacaagatcctgctcagggggtgcgtgatccgaaacactgatttttgtcacgggctggtaatcttcgctggtgccgacaccaagattatgaaaaacagcgggaaaacccgatttaaaagaaccaaaatcgattacctcatgaactacatggtgtataccatcttcgttgttctgattcttctttccgctggcttggcgataggacacgcttattgggaagcccaggtggggaattcctcctggtatttatacgatggggaggatgacacaccgagttacagaggtttccttatcttttggggatacatcatcgtgctcaacaccatggttcctatctccctttacgtgagtgtcgaggtgattcgtctgggacagtctcatttcatcaactgggacttacagatgtactatgctgagaaggatacgccggccaaggcgcgcacaaccaccctgaacgagcagttgggtcagatacattacattttctctgataagacaggaacccttacccagaacataatgacatttaagaaatgttgcatcaatggccagatatacggagaccacagagacgcatctcaacataatcacaacaagatcgagcaggtcgatttttcatggaacacatacgccgatgggaagctcgccttttatgatcactatctcatagaacagatccaatcaggtaaagaaccggaagtcagacagttcttcttcctcctcgccgtgtgtcacacggttatggttgatcggactgatggtcagctgaattatcaagcagcaagcccggatgaaggcgcattggttaatgccgctcggaacttcggctttgccttccttgcccggacccagaatacgatcactatttccgagctgggcaccgagcgtacctacaacgtcctagccatacttgatttcaacagcgaccgtaaacggatgagcataattgtgcgtacccctgaaggcaacatcaaattgtattgcaagggcgccgacacagtgatatatgaaaggcttcaccggatgaacccaaccaaacaggaaacccaggacgccctggatatttttgccaatgagacgttgcgaaccctgtgcctgtgttacaaggaaatcgaagaaaaggagtttaccgaatggaataaaaagttcatggcggcttcagtggcatctaccaatcgggacgaggccttagataaggtctacgaggaaatcgaaaaggacctgattctgctcggcgcaaccgccattgaggataaactgcaggacggtgtgcccgaaaccatctctaagctggccaaagccgatatcaaaatatgggttttaaccggtgacaaaaaagagacagcagaaaacatcggatttgcatgcgagctcttgaccgaagatacgaccatctgttatggggaggacataaatagtctcctgcacgctaggatggagaaccagagaaaccgcggaggtgtgtacgccaagttcgcgcctccagtacaggaatcattcttcccacccgggggcaaccgggcactcattatcactgggtcatggttgaacgagatcctgctggagaaaaaaacaaagaggaacaagatcctgaaactgaaattccccagaacagaggaggaacgccgcatgagaacacaatccaagcggaggctcgaagcgaagaaggaacagcggcagaaaaactttgtggacctggcttgcgaatgctccgcagttatctgctgccgggtgacgcccaagcagaaagctatggtcgttgacctcgttaagcgctataaaaaggccatcacactggcaatcggggatggggctaacgatgtgaatatgatcaagacagcgcacatcggagtgggtatctccggacaggagggaatgcaggcagtaatgagctctgactatagctttgcccagtttagatatctgcaacgtcttctgctggttcacggacggtggtcttatatccgtatgtgcaaattcctgcggtattttttctataaaaactttgcttttactctcgtgcacttttggtactcattctttaatggctattctgcccagacggcctacgaagactggtttattactctgtataatgttttgtacacatcattgcctgtccttctcatgggactgttggaccaggatgtgtccgacaaattgtccctccgcttccccggcttgtatatcgtgggtcaaagagacctcctattcaattacaaacggtttttcgtatctctgctccacggagtcttgacctctatgattctgttttttatcccattgggagcatacctgcagaccgtcgggcaggatggagaagcccccagcgattatcagagctttgctgtgaccatagccagtgcacttgtcataactgtcaatttccagatcggcttagacacctcttactggacattcgtgaacgctttctcaattttcggcagcatcgctttgtattttggaataatgttcgactttcactcagccggcattcacgtcctgttccccagtgcttttcagttcaccggcactgcttctaatgctttaaggcagccctacatctggttgactataatcctagcggtggctgtgtgtctcttgccagtggtagcgattagatttctttcaatgactatttggcccagtgagagcgacaaaatacagaaacaccggaaacgcttaaaagctgaagaacagtggcagaggcgacaacaggtgtttcggcgcggcgtgtctacccgacgcagcgcttacgcctttagccatcagcgggggtacgccgatctgatcagctccggcagatctatcaggaagaagagaagccccctcgacgctattgtggcggatggcactgccgagtatcgtagaactggcgattcg

SEQ ID NO: 318926 - DNA, 3753 bp, Artificial Sequence
  derived and/or modified sequence
atgtcgaccgaacgcgactccgaaaccacctttgacgaagattcacaacctaacgacgaagtggtgccatactccgatgatgaaactgaggatgaacttgatgatcaaggatccgccgtcgaacctgaacagaatcgtgtgaaccgagaggcagaagaaaatagagaaccttttcggaaggaatgcacttggcaagtgaaggcgaatgatcgaaagtatcatgaacaaccacactttatgaataccaaattcctgtgcattaaggagtccaagtacgctaacaacgcgatcaaaacctacaaatacaatgcattcacgttcatccctatgaaccttttcgaacaattcaagagagcggctaacctttactttctggcactgcttattctgcaggcagtgccacaaatttcgactctcgcctggtacaccactctggtgcccctgctcgtggtgctgggtgtgaccgcaatcaaggaccttgtggatgacgtggcgagacacaaaatggataaggagatcaacaaccgcacctgcgaggtgattaaagatggaagatttaaggtcgcaaagtggaaggaaatccaagtgggtgatgtcattagattgaaaaagaacgactttgtgcccgcagatatcctgctcctcagctcgtccgaaccgaactccctttgttacgtggaaactgcagaactggatggggaaaccaatctgaagtttaagatgagcttggaaattacggaccaataccttcagagagaggataccctcgcaacctttgatgggtttattgagtgtgaagagccgaacaatagacttgataagttcactggaaccttgttctggcgcaacacctcatttcctcttgatgcagacaagatccttctgcggggttgcgtgattcgaaatacggacttttgccatggacttgtgatatttgcaggagccgataccaagattatgaagaacagcggtaaaacccgatttaagagaactaagattgattacctgatgaattacatggtatacaccatcttcgtcgtgcttattctcctctccgccgggctcgcaatcggacatgcatactgggaagcacaagtcggcaattcaagctggtacttgtatgatggagaggacgataccccttcataccggggctttctcattttctggggatacattattgtgcttaacactatggtgccaatctcgttgtacgttagcgttgaagtcatccggctcggccagtcgcacttcattaactgggacctgcaaatgtactacgccgaaaaagacaccccagcaaaggcccgcactaccactctgaacgaacaactcggacagatccattacatattctcagataaaactggaaccctcacccagaacatcatgacctttaagaagtgttgtattaacggtcaaatctacggggatcatcgtgatgcgtcccagcataaccacaataagattgaacaagtggactttagctggaacacttacgcagacggcaaacttgcattttacgaccattaccttattgagcaaattcagtcgggaaaggaacccgaagtgcgccaattcttctttcttctggccgtgtgtcataccgtgatggtggatagaaccgacggacagctgaattaccaagccgcctccccggacgagggtgctctggtcaacgccgcacgaaacttcggatttgcatttctcgccagaacccaaaatactataactatttcggaactgggaaccgagagaacttacaacgttctggctattttggatttcaactccgatagaaagaggatgtccataattgtcagaacccctgaagggaacatcaagctgtactgcaaaggggcagatactgtgatttacgagcgccttcatcgcatgaatcctactaagcaggagactcaagacgcacttgatatctttgcaaatgaaaccctcaggaccctttgtctctgctacaaggagatcgaagagaaggagtttaccgaatggaacaagaagtttatggccgcaagcgtggcctcgacgaaccgggacgaggcccttgataaagtgtacgaagaaattgaaaaggatctcattctgcttggtgcaaccgcaattgaagataagctgcaagatggagtgcctgaaactatatcaaaacttgcgaaggccgacataaagatctgggtgctgaccggggataagaaagaaaccgccgagaatattggattcgcatgcgagcttctgacggaggacaccactatttgttacggagaagatatcaactccctgcttcatgccaggatggaaaaccaacgtaatcgaggaggagtgtacgcgaagttcgctcctcccgtgcaagaatcattctttcctcctggaggcaaccgtgcgctgatcataaccggatcctggttgaacgaaatccttctcgagaaaaagactaagcggaacaagatactgaagctgaagtttcctcggacggaggaggaacgcagaatgcggactcagtcaaagcgcagactggaagcaaagaaggagcaaagacagaagaatttcgtcgatcttgcgtgcgaatgttctgcggtgatctgctgtcgagttactcctaagcaaaaggccatggttgtggatctggtgaagcgatataagaaagcgatcacgcttgccatcggcgacggtgcaaacgatgtgaatatgatcaagaccgcccatataggggtgggcatttccggacaagagggaatgcaggcagtcatgtcgtcagattacagctttgcacagttccggtacctccagcgcctgcttcttgtgcatggtcggtggtcttacatccgaatgtgtaagtttcttcggtacttcttttacaagaacttcgcatttacgctcgtccatttctggtacagcttcttcaacggttactcagcacaaacggcctacgaagattggttcattactctgtacaacgtgctttacacctcactgccggtactcctcatgggacttctggatcaggacgtgtcggataagctcagcctcaggttcccaggactgtatatcgtggggcaacgggatctgttgttcaactacaagagatttttcgtttcgctcctgcacggagtgcttacttcgatgatcctctttttcatacctctgggtgcctacctgcagaccgtgggtcaggatggcgaagccccatccgactaccagtcctttgcggtgaccatcgcgtcggcactcgtgattaccgtgaatttccagattgggttggacacttcgtactggacctttgtgaacgccttttccatctttggatccattgcgttgtacttcggaataatgtttgattttcatagcgcaggcattcatgtgctgtttccctcggcattccaattcactggaactgcgagcaatgcactgaggcaaccttatatctggctcactataatccttgcagtggctgtgtgtctccttccggtcgtggccattcggtttctgtccatgacgatttggccctctgaatccgataagattcagaagcaccgaaagcggctgaaagcagaggagcaatggcagaggcggcaacaagtctttcggcgtggcgtctcaaccagaaggtcagcatatgcgttttcgcaccaaaggggatacgccgaccttatctcttcggggcgctcaattaggaagaagcgctcgccattggacgcaatcgttgcagatggaaccgctgagtaccgacggaccggtgattcc

SEQ ID NO: 318927 - DNA, 3753 bp, Artificial Sequence
  derived and/or modified sequence
atgtcaaccgaacgcgatagcgaaactacgtttgacgaggactctcagcccaatgacgaggtggttccctactcagatgacgaaaccgaggacgagctggacgatcaggggagtgccgtagagcccgagcagaatagggtgaaccgggaggccgaggagaatcgagagccatttagaaaagaatgcacttggcaagttaaagcaaatgacaggaagtatcacgagcagcctcactttatgaataccaagtttctctgcatcaaggaatcaaaatatgccaacaacgccatcaagacgtacaaatacaatgccttcacctttatacctatgaacctgttcgagcagtttaaaagggccgctaatctctacttccttgcgctacttatcctacaggcagtgccccagatctccaccctagcctggtataccactctagttccacttctggtggttctcggcgtcacagccatcaaggacctcgtcgatgacgtcgccaggcacaaaatggacaaggaaattaataatcggacgtgcgaagtcataaaagatggaaggtttaaagttgcaaagtggaaggagattcaggtaggggatgtgattcgacttaagaaaaatgactttgtaccggcggatatactcctcctctcatcctccgagcccaactcactatgctatgtcgaaacagctgagctggacggcgaaactaatctgaaatttaagatgtctctcgagataacagaccagtacctacagagggaagacactctggcaacctttgatggttttattgagtgtgaagagcccaataacagattggataaattcaccgggaccttattttggagaaatacaagcttccccttggatgctgacaagatcctgctcagaggatgcgttattcgtaatactgacttctgtcatggactggtgatttttgctggggctgacacaaagataatgaagaactcagggaagaccagatttaaaagaacaaagatcgattatctgatgaattatatggtatatactatattcgttgtgttgatcttgttgtcagcaggcctggccataggacacgcttattgggaagcccaggtcggaaattcatcctggtatctgtacgacggagaggacgatacaccatcatatcgaggttttctgatcttctgggggtacatcattgtgctgaatactatggtgccaatttctctttatgtcagcgtggaggtgatacggctgggccagtcccactttatcaattgggacctgcagatgtactatgctgagaaggacaccccagcaaaagccaggactactacccttaacgagcaacttgggcaaatccattatatattctctgataaaaccggaaccctgacccagaacattatgacatttaagaagtgttgtataaacggtcagatctacggggatcatcgggatgcctcgcagcacaaccataataagatcgaacaggtggatttttcctggaatacttatgcggacggaaagctggccttttatgatcattatctgatcgagcagatccaatccggaaaggagccggaagtgcggcagttcttcttccttcttgccgtgtgtcatacggtgatggtcgaccgaaccgatgggcagctcaattaccaagccgcatctccagacgaaggggccctggttaacgcagcccggaatttcggcttcgcattcctggcccgcacacaaaacacaatcaccatcagcgagctgggaaccgaacgcacgtacaacgtcttggccatccttgactttaactcagacagaaaaagaatgtctattatcgtcagaaccccagaagggaatatcaagttgtattgtaagggcgcagacaccgtcatctacgaaagactccacaggatgaatcctactaagcaggaaactcaggatgccctggatattttcgccaacgaaacactgcgtactctatgcttgtgctataaagagatcgaggagaaagagttcacggagtggaacaagaagttcatggcagctagtgtggcttctaccaatagagatgaggccctcgacaaggtgtatgaagaaatagagaaggacttgatcctcctgggcgcaacagcgatagaggataagctgcaagatggtgttcccgagaccatcagtaagcttgccaaggccgacataaaaatttgggtcctcacgggggacaaaaaggagaccgcggagaatatagggttcgcctgcgaactcttgactgaggacactaccatctgctatggcgaagatatcaattccttacttcacgccagaatggagaatcagaggaacaggggcggtgtgtacgccaagttcgcccctcccgttcaggagagtttctttcccccaggcggaaaccgcgccctcattattactggctcatggctcaacgaaatactccttgagaagaaaacgaagcggaacaaaatactgaagcttaagtttccccgtacagaggaggaacgtcgaatgcgcacccaatccaagcggaggctcgaggccaagaaggagcaaaggcagaaaaacttcgtcgatctggcgtgtgaatgctccgcagtgatctgctgcagggttacaccaaaacagaaggctatggtggtggacctggtgaagcgatacaagaaggcaatcactcttgccatcggggacggcgccaacgatgtgaatatgataaagaccgcgcatatcggagtcggtattagcgggcaagaggggatgcaagctgtcatgtctagtgactacagtttcgctcagtttaggtatctccagaggctgctgctggtgcacggcaggtggagctatattagaatgtgcaagttcctgcgatacttcttctacaagaatttcgccttcacactggttcacttttggtattcattctttaatggttacagtgctcaaaccgcttacgaggactggtttatcactctgtacaacgttttgtacaccagcctgcctgttctgcttatgggcctgctcgatcaggacgtatcagataagctgtctctacgttttcctggcctgtatatcgtgggccagcgggatttacttttcaattataaaagattcttcgtgagcttactccacggggttctgacttccatgattctgttctttatccctctgggagcctaccttcagaccgtaggccaagatggtgaagccccttccgattaccagtcatttgccgttacaatcgcgtcagcgctggtaattaccgtaaattttcagattggcctggatactagttactggaccttcgtaaacgcattctccatttttgggagcatcgccctctatttcggcataatgtttgattttcactcagctggaattcatgtgttgttcccaagcgcttttcagttcacagggactgcctccaacgcactgcgccagccctacatatggttgaccatcatactcgctgttgctgtctgtctgctccccgtggttgccatcaggttcctgagtatgaccatatggccttcggaatccgacaagattcagaagcacaggaagcgactcaaggccgaggaacagtggcagaggaggcagcaggtgtttcgccgaggtgtgagtacacggagaagtgcctatgcattttcccatcaacgaggatatgccgacctgatatcatccggacgcagtattcggaaaaagcggtcgccactggacgcaattgtggccgacgggaccgccgaatacagacggaccggagattca

SEQ ID NO: 318928 - DNA, 3753 bp, Artificial Sequence
  derived and/or modified sequence
atgtccaccgaacgcgattcggaaactacgtttgacgaagattcgcaaccaaatgacgaagtggtgccttattcagatgatgaaactgaggacgaacttgacgatcaagggtccgcagtggagcccgagcagaatcgcgtgaaccgtgaggccgaggagaatcgcgagccatttaggaaagaatgcacttggcaggttaaggcaaatgatcgaaagtaccatgaacaacctcatttcatgaacactaagtttctgtgtattaaggagtccaagtacgccaacaatgccattaagacttacaaatacaacgcatttacctttataccaatgaacttgtttgaacaattcaagcgggctgcaaacctctattttcttgcactcctgattcttcaagccgtgccacagatttcaactttggcttggtacactacccttgtcccacttttggtggtccttggagtgaccgcgataaaagacctggtggacgatgtggcccgtcacaaaatggacaaggagataaacaacaggacttgtgaagtgattaaagatggtagatttaaggtagctaaatggaaagagattcaggtcggcgatgtgatccgccttaagaagaatgactttgtgccggcggatattctcctcctctcatcgtcagaaccaaactcgctctgttacgtcgaaaccgccgaacttgatggagaaaccaatctgaagttcaaaatgagccttgaaatcaccgaccagtacctccaacgagaggacaccctcgcgaccttcgatggctttatcgaatgtgaagagcccaataaccggctggataagttcaccggcactctgttttggcgtaacacttcctttcctctggacgccgacaagattcttttgcgtggatgcgtgattagaaacactgacttttgccatggcctggttatctttgcaggcgccgataccaagatcatgaagaattcgggcaagactagattcaaaaggaccaagatcgactaccttatgaactacatggtgtacactattttcgtagtccttatcctcctgtcagcaggtctggctataggccatgcctactgggaagcacaggtcggaaatagctcatggtacctgtacgatggtgaagatgataccccgtcgtaccgaggttttctgattttctggggctacatcatcgtcctgaacaccatggttcctatttcgctctacgtgtcggtggaagtcattagattggggcaatcacatttcattaactgggacctgcaaatgtactacgcggaaaaggatactcctgccaaggcccgtaccactaccctgaacgagcaactgggacaaatacactacatctttagcgacaagaccggaaccctgacccagaacatcatgacttttaagaagtgttgtatcaacggccagatctatggggatcaccgcgatgccagtcaacataatcataacaagatcgaacaggtggacttctcctggaatacctacgccgatggaaagctggcattttacgatcattaccttattgagcaaattcaatccggaaaggagccagaggtccgccagtttttctttctcctggcagtctgtcatacggtgatggtggataggaccgatggacaactgaattaccaagcagcctcgccagatgaaggagcgttggttaacgccgcaagaaacttcggtttcgcattccttgcacggacccaaaatactattaccatatccgaactcgggactgagcggacctacaatgttcttgccatccttgactttaacagcgatcgcaaacggatgtccattattgtgcgaactccagagggtaacattaaactttactgtaagggcgcggacaccgtgatctacgaaaggctgcatcgtatgaacccaactaaacaagaaacccaggatgctttggacatttttgccaatgaaaccctgaggactctttgtctttgttacaaggaaattgaagagaaagagtttactgagtggaacaagaagtttatggctgcatcagtcgcatcaacgaaccgggacgaggcacttgataaggtctacgaagaaatcgaaaaggatctcattctgcttggagccaccgcaattgaagataagctccaagacggggtcccagaaaccatatctaaactcgcaaaggcagatatcaagatatgggtgcttactggagataagaaggaaactgctgaaaacatcggatttgcatgcgagctgctcaccgaggataccactatttgctacggcgaagatatcaactccctccttcacgcaagaatggagaaccaacggaaccgtgggggagtgtacgctaagttcgcgcccccagtgcaggagagctttttcccaccaggaggcaatagggcactgatcattaccggatcgtggctgaatgagattttgctcgagaaaaagactaaacggaacaagattctcaagttgaagtttccacggaccgaagaggaaagaagaatgcgaacgcagagcaagcggagacttgaagcaaaaaaggagcaacggcaaaagaatttcgtggacctggcatgcgaatgcagcgcagtcatttgttgtcgagtgactccaaagcagaaagccatggtggtggatctcgtcaaaagatataagaaggcgatcacccttgccataggggatggggctaatgatgtgaacatgattaagaccgcgcacatcggtgtgggaatttcgggccaagaaggaatgcaagcagttatgagctctgactactccttcgcacagttcaggtacttgcagagacttctgctcgtccacggccgatggagttacatccgtatgtgtaagttcctcaggtacttcttctacaagaattttgctttcacgcttgtgcacttttggtactccttctttaacggctactcggcacagacggcgtacgaagattggtttatcactctgtataacgtcctttacacttccctgcctgtgctcctcatggggctcctggatcaagacgtgagcgataagctgtccctccggttcccaggactctacatcgtaggacagagagatctcctgtttaactataagagatttttcgtcagccttttgcatggggtcctgacttcgatgattctgtttttcattcctctgggcgcataccttcaaaccgtgggtcaagacggtgaagccccgtcagattatcagtcgttcgcagttaccattgcgagcgcactcgtgataactgtcaacttccaaatcggactcgacactagctactggacttttgtgaatgcattttcgatctttggaagtattgcactctactttggtattatgtttgattttcattcggctggtattcatgtgctttttccttccgcattccaatttaccggtaccgcttcgaacgcactgcgccagccttacatttggttgaccatcatcctcgcagttgcggtctgccttcttccggtggtggcaataagattcctctccatgaccatttggccgtcagagagcgataagatccaaaagcacagaaagagacttaaagcagaggagcagtggcaacggcgccagcaggtctttaggcggggagtgtccacccgcaggagcgcctacgcatttagccaccagcggggatacgccgatctgataagctcaggtaggtcaataagaaagaaacgctctccgcttgacgccattgtggcggatggcaccgctgaatacagaagaactggtgactcg

SEQ ID NO: 318929 - DNA, 3753 bp, Artificial Sequence
  derived and/or modified sequence
atgagcacagagcgcgacagtgaaaccacttttgatgaagattcccagcccaacgacgaggtcgtaccttactctgacgatgagactgaagatgagctggacgatcaaggtagcgcagtggaacctgagcagaaccgcgtgaacagggaagcagaagagaacagagaaccgtttcggaaggagtgcacttggcaggtaaaagcaaacgatagaaaatatcatgagcagcctcatttcatgaacaccaaatttctttgtattaaagaaagcaagtacgccaataacgctatcaagacatataaatacaatgcatttacatttattcctatgaacctcttcgagcagtttaagcgggctgccaatttgtacttccttgcgttactaatattgcaggcggtcccccagattagcactctggcctggtatacgaccctcgtgcctctgttggttgtgctgggagttacagccattaaagatttagtcgatgacgttgccagacacaagatggataaagaaatcaataaccgcacctgtgaggttataaaagacggacggttcaaggtggccaaatggaaggagatccaggttggggacgtcattaggctgaaaaaaaatgattttgtccctgcagacatccttttactctcatctagcgagcccaactctctgtgttatgttgagactgccgagttggatggagaaactaatctcaaatttaagatgtcccttgagataactgaccagtacttgcaaagagaggacacgctggcaaccttcgatgggttcatagagtgcgaagagcccaacaaccgcttggacaagttcaccggcacgctgttttggcgtaacacatctttccctttggacgcagataaaatattactgcgcgggtgcgtcattcggaatacagacttctgccacggcctggtgatattcgccggcgccgataccaaaataatgaagaactctggcaagacccgatttaaacgcaccaaaatcgactatctgatgaattatatggtgtatacgatatttgtggtgttaatactgttgagcgctggtctagcaataggacacgcttattgggaggcccaggtcgggaattccagctggtacctctacgatggcgaggacgacacaccctcttatagaggctttttgatcttctggggctatattattgttctgaataccatggttcctatatctctgtatgtttctgtggaagtcattaggctaggtcagagtcacttcatcaattgggaccttcaaatgtactatgcagaaaaagatacacctgccaaagcacgcacgactactttaaatgaacaattggggcagatccactacattttctccgataagacagggactcttactcagaatatcatgacattcaaaaaatgttgtattaatggccagatttatggagatcatcgcgacgcctcccagcacaatcataacaagatagagcaggtggatttcagctggaatacatacgccgacggaaagctcgccttttatgatcattatctcatagagcagatccagagcgggaaagagcctgaggtccgacagttcttcttccttctggccgtgtgtcacacagtgatggtcgatagaaccgacggtcagctcaactaccaggcagcttccccggacgagggtgccctggtcaatgcagcccgaaattttggctttgcattcctcgcgagaacccagaataccatcaccattagtgaattaggcaccgagcgtacatataatgtgctggcaatcctggatttcaactccgatcggaagcgcatgagcatcattgtgcgaaccccggaaggtaacattaaactgtactgtaaaggtgccgatactgtgatctatgagcgtttgcataggatgaaccccaccaagcaagagactcaggacgccctggatatcttcgctaacgagacgctgaggaccctgtgtctttgctataaggagatcgaggagaaagagttcacagaatggaacaagaaatttatggcagcgagcgtggcgagcacaaacagggatgaagccctggataaagtgtacgaggagatcgagaaggatctcattctgctgggagccacagccattgaggacaagttgcaggacggggtgcccgaaaccataagtaagctcgcaaaggccgacatcaagatctgggtcctaactggtgacaagaaggagaccgctgagaacatcggatttgcatgtgagttgttgaccgaggacaccaccatttgctacggggaggacatcaacagcctcctccacgccagaatggagaaccagaggaacaggggaggagtgtatgccaaatttgccccgccggtgcaggagagctttttccccccggggggcaatcgggcacttattattacaggcagctggttgaacgagatcctactagaaaaaaagaccaaaagaaataaaatacttaaactgaaattcccaaggaccgaggaagaacgccgcatgcggacgcagagcaagcgccgcctggaagccaagaaggaacagcggcagaaaaattttgtggatctggcttgtgagtgcagcgcagtgatatgctgccgagttacacctaaacagaaagccatggtcgtggatcttgtcaagagatacaaaaaggctatcaccctggccattggggatggggccaatgacgtgaacatgatcaaaactgcccacattggggtgggtatctcgggacaggaaggcatgcaggcagtaatgagctccgattacagctttgcacagttccgctatctacagaggttactcctggtgcacggtcggtggagctacatccggatgtgcaagttcctgcggtatttcttctataagaattttgccttcacattggtgcatttctggtactctttttttaatggttattcagcccagaccgcctatgaggactggttcatcacactgtacaacgttctctacacctcactacctgtactgttgatgggactgttagatcaggatgtttctgacaaacttagtctgagatttccagggctttacattgttggtcaaagagatttgctgttcaattacaagcgcttcttcgtctctttgttgcatggagttctgacgtccatgattttgttcttcatcccgctgggggcatacctacaaaccgtcgggcaagacggtgaagcaccttccgactaccagtcctttgccgtgaccattgcgtctgcacttgttatcacagtgaatttccagattggtctggatacttcttattggacattcgtcaacgcattttcaatttttggcagtatcgctctctattttggaatcatgtttgatttccatagcgcgggtatccatgtcctgttcccctctgcgtttcagtttactgggacggccagtaatgcattgaggcagccctatatatggctgacaatcattctcgctgtcgccgtctgcctcctgccagtagtggcaatccgtttcctcagtatgacaatttggccatccgaatccgataagattcagaagcatcggaagaggttgaaggctgaagaacagtggcagcggcgacagcaagttttcaggcggggagtgagtactcgccggagcgcatacgctttctctcatcagagaggatatgcggacctcatcagttctgggagaagcataaggaagaagcgaagccctctggatgccattgttgctgacggcactgctgagtatcgcagaaccggggattca

SEQ ID NO: 318930 - DNA, 3753 bp, Artificial Sequence
  derived and/or modified sequence
atgagtaccgagcgcgactctgagaccaccttcgatgaagactctcagccgaacgacgaagtggtcccctattctgatgatgagacggaagatgaattggacgaccagggcagcgcagtggagcccgagcagaaccgcgtgaacagagaagccgaagaaaaccgggaacccttcagaaaggagtgcacctggcaggttaaggcgaatgataggaagtaccatgaacaaccccactttatgaatactaaatttctgtgcatcaaagagtcaaagtatgcaaataatgccatcaaaacatacaagtataatgcttttactttcattccaatgaatctatttgaacagttcaaacgagccgccaatctatatttcctggctctgctcattctccaagcagttccacagataagcacgctggcttggtacactacccttgtcccccttctggtcgtccttggggtcactgcaattaaagatcttgtggatgatgtagctcggcacaagatggacaaggaaataaacaaccgcacttgtgaggtgataaaagatggaagattcaaagtggctaagtggaaagagattcaggtgggagacgtgatccgcttaaagaagaatgactttgtcccagcagacattcttcttttgtcaagctccgagccgaatagtctttgctatgtggagactgccgagctggatggggagacaaaccttaaatttaagatgagtctggagatcactgatcaatatctgcagcgggaagatacgctggccacattcgacggctttatcgaatgcgaagagcctaataacaggctggataagtttacgggcactctcttctggaggaacacctcgtttcctttggacgccgataagatcctcctgcggggctgtgtgatcagaaacaccgacttctgccacggtctcgtgatcttcgccggcgcagataccaaaataatgaaaaattcaggaaagaccaggttcaaacggacgaaaattgactatctcatgaactatatggtatacaccattttcgtggtgctcatactgctgtccgctggccttgctatcggacacgcatactgggaagcccaggtggggaactcgagttggtatctctacgacggtgaagacgatacaccctcctaccgcgggtttttaatcttctggggatacattatcgtgttgaacactatggttcccatcagtctttatgtatctgtggaagtgatccgccttgggcagtcacactttatcaattgggacctccaaatgtattatgcggagaaggatacccccgccaaggcaagaaccacaacattgaatgaacaacttggccaaatccattacatcttttctgacaaaacgggaacactgacacaaaatatcatgacatttaagaagtgctgcatcaacggacagatttacggagatcatagagacgctagccagcataaccataacaaaattgagcaggtggacttctcgtggaatacttatgcagatgggaaacttgctttctatgaccattatctcatagaacaaattcaaagtggcaaggagcccgaggttagacagttctttttcctgttagccgtgtgccacacagttatggtcgaccggaccgacgggcaactgaattaccaagccgctagccccgatgagggggccttagtcaacgcggcacgcaatttcggcttcgcgttcctggcccgcacacaaaatactatcacaatctccgagctcggcacggaaaggacgtacaacgtgttggctatccttgacttcaactccgatagaaagcgaatgagcattatagtcaggacccccgaggggaatatcaaattgtactgcaagggcgccgatacggtgatctacgagcggctacataggatgaacccaactaagcaggagacgcaggacgcattggacattttcgccaatgaaacactgcgcacgttgtgcctttgctacaaggagattgaggaaaaggaatttaccgagtggaataaaaagtttatggccgcatcagtggcttcaacgaaccgcgacgaggccctggacaaagtatatgaggagattgagaaagatctgatcttgctaggcgccacagccatagaagacaaactgcaggacggcgttcccgaaacaatttctaaactcgctaaagctgacatcaagatatgggtgttaacaggggataagaaagagacagctgaaaacattggattcgcatgtgaactgcttaccgaggacacaactatctgctacggggaagacatcaattcactcctccatgccaggatggaaaatcagcgcaatagaggcggcgtctacgctaagtttgctccccctgtgcaggagtcttttttcccacctggggggaatagggctctcattattactggaagttggcttaacgaaattcttttggaaaaaaaaactaaacgtaataagattcttaaattgaagttcccacgcacagaggaagagcgcaggatgcgaactcagagtaagcgccgtctagaagcaaaaaaagagcagaggcagaaaaacttcgtggacctcgcctgcgagtgctcagcggttatttgctgtcgggtcacgcctaaacaaaaggctatggtggtggatttggtgaaacgatacaaaaaagcaattaccttggccattggggatggcgctaatgacgttaatatgatcaagactgcccatataggtgtggggatttctggccaggagggtatgcaggctgttatgtcttcagactactcgtttgcacagtttagatacctccaaagattgttactggtgcacggacgctggagttatattaggatgtgcaagttccttcggtactttttctataagaatttcgcatttaccctggttcacttctggtatagtttcttcaacgggtacagtgcccaaaccgcttacgaggactggtttatcaccctctataacgtgctttataccagcttgccagtcctgctgatgggcctgctggaccaggacgtgagcgataaactctctctgcggtttccgggactctatattgtcggacagcgcgatctgcttttcaattataagagattttttgtgagccttctgcacggtgtgttaacctctatgattctgttctttatccccctcggggcctacctgcaaactgtcgggcaagacggggaggccccttctgactatcagtcatttgcggtgaccattgcctcagccttggtcatcacagtgaactttcagattggtctcgacaccagctattggaccttcgtgaatgccttctcaattttcggctcaatcgctctgtatttcggaataatgttcgattttcacagcgctgggatacacgttctgttcccctctgcttttcaatttacaggaaccgctagtaatgccctgaggcaaccatacatatggctcacaatcatcttggccgtcgccgtgtgtttgctgccagtggtcgctattagatttctgtctatgacaatctggccatctgaaagcgataaaattcagaagcatagaaagcgattgaaggccgaagagcagtggcaacggcgtcaacaggtcttccgccgcggtgttagcacacggcgatccgcctatgccttctcacatcagaggggatacgctgatctaatttcctccggcaggtccatccgcaaaaagcgttctcccctcgacgccatcgtcgcagacggcaccgcagaataccgacgtacaggcgattcg

SEQ ID NO: 318931 - DNA, 3753 bp, Artificial Sequence
  derived and/or modified sequence
atgagcactgaacgcgattcagagaccaccttcgacgaagattcacagcctaacgatgaggtggtgccgtacagtgatgacgagacagaagatgagcttgacgaccagggcagtgcggtcgagcctgaacaaaaccgcgtgaaccgggaggcagaggagaatcgagaaccatttaggaaggagtgtacttggcaggtaaaggctaatgaccgaaagtatcacgagcagccacacttcatgaacaccaagtttttgtgtattaaggaatctaaatacgccaacaatgccattaagacttacaagtacaatgccttcacgttcatccccatgaacctgttcgaacaattcaaacgcgccgcgaacctctacttcctcgctctgctcattcttcaagcagtacctcagatatcaaccctggcctggtatacgactctggtgccactcctggtggtgctcggggtgaccgccatcaaggacctcgtcgacgacgttgcccgccacaagatggacaaagaaattaataatcggacatgcgaagttataaaggacggacgttttaaggtagctaagtggaaagaaattcaagtgggcgatgtcattcggctgaagaagaatgatttcgtccctgctgatattttacttctgagctcatctgaaccgaattcactttgctacgtcgagactgctgagctcgacggtgagactaatctgaagtttaagatgtctttggagataacggatcaatacctccagcgcgaggacacgctggcaacctttgacgggttcatcgagtgtgaagaacccaacaaccgtctcgataaattcaccgggacccttttctggcgcaacacatctttccctcttgacgccgataagatactccttcgagggtgtgttatccgtaataccgacttttgtcacggtcttgtgatctttgccggggccgacactaaaatcatgaagaacagcggtaagactaggtttaaaagaacaaaaattgactatttaatgaattatatggtgtatacaatctttgttgtgttgatattgttgagcgcagggttagccatcgggcatgcatactgggaagcacaggtgggcaactcctcttggtacctgtatgacggagaagacgatactcctagctatcgtggttttttgatcttctgggggtacatcatcgtgctcaacactatggttccaatttccctgtacgtgtccgttgaagttattaggctggggcaatcccacttcattaactgggatctacaaatgtactacgccgagaaagatactcccgctaaggcccgcacaacgaccttgaacgagcaactgggacagatacattatatttttagcgacaagacaggaaccctgacacagaacattatgacctttaaaaagtgttgtattaacggacagatttatggcgatcaccgggacgcaagccagcacaaccacaataaaatcgagcaggtggatttctcctggaatacttatgctgacggcaagctcgctttttatgatcactacctaatcgaacagatccaaagcggaaaggagcccgaggtccgccagtttttcttcctactcgctgtgtgtcacacagtcatggttgatagaacagacggccagcttaactaccaagctgcttctcctgacgagggtgctctggttaatgcagccaggaactttgggtttgccttcctagctagaactcaaaataccatcacaattagtgaattggggaccgagagaacttacaacgtgcttgccattcttgacttcaatagcgatcggaagcggatgtctattatagtgagaacacctgagggcaatatcaagttgtattgtaagggtgctgacactgtaatttatgagaggctgcaccgaatgaaccctacgaagcaggaaacccaagatgctctggatattttcgcgaatgaaacccttcgcacactctgcctctgttacaaggagatagaagagaaggagtttacagagtggaacaagaagtttatggctgcttcggtggcctccacaaaccgggacgaggccctggacaaggtttacgaggagatcgagaaggatttgatcctgctgggagctactgcgattgaggacaagctgcaagacggggtccccgaaacaatctcgaagctagcgaaagcagacatcaagatttgggtgctgactggagacaaaaaggagactgcagagaacatcggcttcgcgtgcgaactgcttacagaggatactaccatctgctacggtgaagatattaactccctgctccatgcccgcatggagaatcaaagaaaccggggaggagtgtacgccaaatttgctcctccagtgcaggagtccttcttccctccaggcggcaatagggctctgattatcaccggaagctggttgaacgagattctgctagagaaaaaaaccaagagaaataaaatcttgaaattgaaatttcctagaaccgaggaggaaaggagaatgcggacacagagcaagagaaggctggaggccaagaaggaacaacgacagaagaactttgtggatctggcctgcgaatgcagcgcggtgatctgttgtcgcgtaacaccaaaacaaaaagcgatggtggtggatctggtcaagagatacaaaaaggcaattaccctcgccataggggatggcgcaaatgatgtcaatatgataaaaactgcccacattggtgtgggcattagcggtcaggagggtatgcaggcggtcatgtcttcagactattcttttgcacaattccgatacctccagcggctgcttttggtgcacggcagatggagttacattcggatgtgcaaatttctacgatactttttttacaagaacttcgcattcactctagtgcatttctggtattccttcttcaacggatattctgctcagactgcatacgaggactggttcattacgctttacaacgtcctttacactagccttccggttcttttgatgggactcctcgatcaagatgtgtccgataagttatccctgcggttccccggattatatatagtgggtcagagagatcttttgttcaattacaagagatttttcgtgtctctactacacggggtcctgactagcatgattctctttttcattccacttggcgcctatctgcagaccgtcggccaggacggggaggccccgtctgattaccagtccttcgccgtcactatcgccagtgctctggtgattactgtcaatttccagattggcctggacactagttactggacgtttgtgaatgcgtttagcatctttggctcgattgcattgtactttggtatcatgttcgacttccattcagcaggcatacatgttcttttcccatccgccttccaatttacgggtacagcctccaacgcactgcggcaaccatacatctggttgactattattcttgccgtagccgtttgcttgctgcctgttgtggcaattagatttctcagcatgacaatatggccgagcgagagtgataaaatacagaaacatcgaaagaggttgaaggctgaagaacagtggcagcgaagacaacaggtgttccgcagaggtgtgtccacaagacgttccgcatacgctttctcacaccaacgaggctatgcggatctgattagttctggccgctccattaggaagaaaagaagtcccctggacgcaatcgtggctgacggaacggctgaatatcggaggaccggggacagc

SEQ ID NO: 318932 - DNA, 3753 bp, Artificial Sequence
  derived and/or modified sequence
atgagcaccgagcgtgacagcgagacgacatttgacgaagatagccagcctaatgatgaggttgtcccatacagtgatgatgagacagaggatgaactagacgaccaaggaagcgcagttgaaccagaacagaacagggtcaatagggaggcggaggaaaatagggagccctttagaaaagaatgcacttggcaggtgaaggcgaatgacagaaaataccacgagcagccccattttatgaataccaaatttttgtgcatcaaggagagcaaatatgccaacaatgcaatcaagacttacaaatataatgcttttactttcatacctatgaatcttttcgaacagtttaagcgcgctgcaaacctctattttctcgctcttctgatcttgcaggctgtgccgcaaattagcacactcgcctggtataccaccctggtccccctcctcgtggtgcttggtgtgacagcgatcaaggatctggtcgatgatgtggccaggcacaagatggacaaggagatcaataaccgtacttgtgaggtgataaaagacggacggtttaaagtggccaagtggaaggagatacaagtgggagacgtgattcggctcaagaagaacgattttgtgccggccgacatcttgctgcttagctccagcgagcctaactctctctgttacgtggagacagccgagctcgatggcgagaccaaccttaagtttaaaatgtcccttgaaatcactgaccagtatctgcagcgggaagatacactcgctacatttgatggctttattgaatgtgaggagccgaacaaccgtctggacaaattcactggtaccctcttttggcggaatacaagtttccctttggatgccgataagatcctcctgagaggctgcgtgattcggaacacagatttttgccacggcctcgtgatcttcgccggcgccgatacaaaaatcatgaagaactcaggcaaaacaagattcaagcgtacgaagatcgactacctgatgaattacatggtctataccatttttgttgtcctgatcctgctttcagcgggactggccattgggcatgcttattgggaggcccaggttggcaactccagctggtatctttacgacggcgaagacgatacaccatcataccgtgggtttcttatcttttggggctatatcatagtactaaacaccatggttcctatatcactgtatgtaagcgtcgaggtgatccgcctgggccaatcacactttattaactgggatctgcagatgtattacgccgagaaggacactcctgccaaagcacgcactacaaccctcaatgagcaactgggccagattcattacatcttttccgataagaccggtaccttgacacagaatatcatgacctttaaaaagtgctgcataaatggtcaaatatacggcgaccaccgcgatgcgtcccagcataaccacaacaagattgagcaggtcgatttcagttggaacacatacgccgacggaaagctcgcattttacgaccattatctcattgagcagattcagtcgggtaaggaacctgaggtacgccaattctttttcctcctggcagtatgtcacacagtgatggtggatcggacagatggacagctgaattaccaggctgctagccccgatgagggcgcccttgtgaatgccgcccggaacttcggctttgcatttctcgcccgtactcaaaatactatcactattagtgagcttggcaccgaaaggacttataatgttctggcgattcttgactttaactcagataggaaaagaatgtctatcatcgtccgtactccagagggcaatattaaactctattgtaagggtgctgacaccgtgatctacgaaaggttgcacagaatgaacccaacaaaacaggaaacccaagatgccctggatatatttgctaacgagaccttgcgtactctgtgtttatgctataaagaaattgaggagaaggagttcaccgaatggaataaaaagtttatggccgctagcgtggcaagcacaaatcgggatgaagcacttgataaagtgtacgaggagatcgaaaaggatctgattttactcggcgcgacagctatcgaagacaaactgcaggacggggtgccagagaccatttcaaaactagccaaagcggacattaagatttgggtgctgactggcgataagaaggagaccgccgaaaacatcggctttgcatgtgagctacttacagaagacacgactatctgttacggcgaagatatcaactccttgctgcatgctcgtatggagaatcagaggaatcgaggaggagtttatgctaaattcgccccccccgttcaggagagcttttttcctccgggtggcaacagggctcttattattacaggctcgtggctgaatgaaattctgctcgagaagaaaaccaagcgcaataaaatactgaaactgaaattcccaaggacagaagaagagcggagaatgcgaactcagagcaagcgtcgtctggaggcaaagaaagagcagagacaaaagaacttcgtggatctcgcgtgtgaatgttcagccgtgatctgttgtcgcgttacccccaagcagaaagccatggtggtggacctggtgaaacggtataaaaaggcgattacactagccatcggggatggcgccaatgacgtcaatatgatcaagaccgcccacataggggtgggcatttctggacaggagggaatgcaggcggtgatgtcatctgactacagctttgcccagttcaggtacttgcagcggctcctgcttgtccacggaagatggtcctacatccggatgtgcaaatttctgagatatttcttttacaaaaattttgcatttactttagtgcacttttggtacagctttttcaacggttactccgcgcagacagcctacgaggattggttcatcaccctctataacgtgctttacacatcccttcccgtgctcttaatgggcttactggaccaagatgtgagcgataagctaagtcttcggttccccgggctgtatattgtgggccaacgcgaccttctgttcaactataaacgtttcttcgtcagtttgctgcacggtgtcctcacatctatgattctcttcttcatccctctcggggcttacctgcagaccgttggacaggacggcgaggctccgagtgactatcagagcttcgccgtgaccattgcttctgcactggtcatcactgtcaattttcagatcgggctggatacatcttattggaccttcgtaaacgctttcagtatattcggatcaatcgccctctatttcggcatcatgttcgattttcattcagctgggattcatgtacttttccctagtgcattccagtttactgggacagcctctaacgccctacgtcagccatacatttggctcacgatcatcctggccgtcgccgtctgcttgcttcccgttgtggccatacggttcttgtccatgaccatctggccttccgagtcagataaaatccagaagcaccgcaaacggctgaaggcggaagagcagtggcaacggaggcagcaggtgttcaggcggggcgtgtcgacgagacgaagcgcatatgctttctctcatcagagaggctacgccgacttaatcagttctggacgctctattaggaaaaaacgcagcccactggatgcaatcgtggccgatggcacagctgaataccggcggacaggcgactca

SEQ ID NO: 318933 - DNA, 3753 bp, Artificial Sequence
  derived and/or modified sequence
atgtccactgaacgcgattctgaaactacttttgatgaggacagtcagccaaacgacgaagttgtcccatattctgatgatgaaactgaggatgaactggatgatcagggaagtgccgtggaaccagagcagaaccgggtgaacagagaagccgaagaaaatagagaaccattcagaaaagaatgcacatggcaggttaaggctaatgatcggaaatatcatgaacagccccacttcatgaatacaaagttcctgtgtataaaagaatcaaaatacgcaaacaacgcgattaaaacttacaaatataatgccttcactttcatcccaatgaatcttttcgaacagttcaaacgcgctgccaatctttatttccttgcactcctcatccttcaggccgtccctcagatttcaactctcgcgtggtatacaacactagtgccactcttagtagtgcttggggttacagccatcaaagatctggttgatgatgttgctaggcacaaaatggataaagaaataaataatagaacttgtgaagtcataaaggatgggcggtttaaagtcgctaaatggaaagaaatccaggttggggatgtcatccggctgaaaaaaaacgatttcgtcccagcagatatccttcttctctcttcctccgaacccaattccctctgctacgtagaaacagctgaacttgatggggagacgaaccttaagttcaaaatgtccctcgaaattacagatcagtatctgcagcgagaagatacgcttgctactttcgatggattcatagaatgcgaagaacccaataaccgcctggacaaatttacaggaacactcttctggagaaacacttcatttccactagatgctgataaaatacttctcagagggtgcgttatcagaaacacagatttttgtcatggactcgtgatattcgccggagctgatactaagataatgaaaaactcaggaaaaacaagattcaagcggactaaaatcgactatctgatgaattatatggtgtatacaattttcgtggttcttatactgctctctgcaggacttgccataggacacgcctactgggaagcccaagtagggaactcaagttggtatctatacgatggggaagatgatactccttcatatcgggggttcctaatcttctgggggtatattatagttctcaacactatggtgcccatcagtctgtacgtgtcggtggaagtcatccgactggggcagtcccacttcatcaactgggacttacagatgtattatgctgagaaggacacacccgctaaagcccgtacaactacgctcaatgaacagctaggacagatccattatattttctctgacaaaacaggaacattaacacagaacatcatgacgttcaaaaaatgctgtattaacgggcagatatacggagaccatcgcgatgcttcacagcataatcacaacaaaatagaacaagtcgatttttcttggaatacttacgctgatggaaaactggccttctacgatcattatcttatagaacagatccagtcagggaaagaacccgaagtgaggcagttcttctttctcctagcagtgtgccatactgttatggttgatagaacagatgggcagctcaactaccaggctgcctcacccgatgaaggagctttagtcaatgcagctcggaattttgggttcgctttcctcgctagaactcagaacacaatcacaatatcggaacttgggacagaacgtacatataacgtcttggctatcctagattttaatagtgatcggaagcggatgagtattatcgtgagaacacccgaaggaaacataaaactttattgcaaaggagcagatacagtgatctatgaaaggctgcaccgaatgaaccccactaaacaggagactcaggacgccctggatatattcgctaacgaaacacttcgcacattatgcctatgctataaagaaatagaagaaaaagaatttactgaatggaacaaaaaattcatggccgctagtgtggcttcaactaaccgcgacgaagcattagataaagtgtacgaagagattgaaaaagatctaatcctgcttggggccacagcgatagaagataaactccaggacggggttccagaaacaatctccaagctcgcaaaagcagatatcaagatctgggtgctcacaggagataagaaagaaactgctgaaaacatcggatttgcttgtgaattattaacagaagatactacaatatgttatggggaagatataaacagtctcctccacgcacgcatggaaaatcagaggaacagggggggggtgtacgctaaattcgccccacccgtacaggagtcgtttttcccccctggaggaaatcgcgcactcataataactgggagttggcttaacgagattctcctggaaaaaaaaactaaacggaacaaaattctgaaactcaaattcccaaggactgaggaggaaagaagaatgaggacacagtcaaaaaggagactggaagctaagaaagagcagaggcagaaaaactttgtggatctggcttgcgaatgcagtgctgttatttgctgtagggtaacgcctaagcagaaagccatggttgtggatctggttaagcgatataaaaaagcaatcacactggcaataggagacggggccaatgatgtgaacatgattaaaacagcacatataggggtggggatctcaggacaggaaggaatgcaggctgtcatgtcttccgattactccttcgctcagttcagatatctgcagcgacttctactcgttcacgggcggtggtcctatatacggatgtgtaaatttttgaggtatttcttctataaaaacttcgcttttacacttgttcatttctggtattctttcttcaacggatattcagcccagacagcttatgaagattggtttattacactatataacgtcctgtacacttccctaccagttctcctaatgggactcctagatcaggatgtatccgacaaattgagtctcaggtttcccgggctctatattgtgggacagagagatctcttattcaattataaaaggttctttgtctctcttctgcatggggtgctgacttctatgatcctcttctttattcctctaggggcctacctccaaactgtgggacaggatggagaagctccctcagattatcagtcattcgcagttacaatagcctctgccctagtcataacagtcaattttcagatagggctggatacaagttattggacttttgtaaatgctttttccatcttcggatctatcgcactgtattttgggataatgtttgatttccatagtgccgggatacacgtgctcttccccagtgccttccagttcacagggacagcgtctaacgcattgagacagccctatatctggctaacaatcatactcgctgtggcagtgtgcctcctccccgtggtagccattcgctttctgtcaatgactatatggccttctgagtccgataaaatccaaaagcatcgaaaacggttgaaagccgaagagcagtggcagagacggcagcaggtgtttaggcgcggggtatctactagacgctctgcatatgccttctctcaccagcgagggtacgctgatctaatttcctcaggaaggtcgatccgcaagaagcggtctcctttagatgcaatagtcgcagatggaactgccgagtatcggcggacaggggactct

SEQ ID NO: 318934 - DNA, 3753 bp, Artificial Sequence
  derived and/or modified sequence
atgagcaccgaacgcgattccgaaactacgtttgacgaggacagccaacctaatgatgaagtcgtgccgtactcagacgacgagactgaagatgaactcgacgatcagggatccgccgtcgagcccgaacagaaccgtgtgaacagagaggcggaagaaaaccgtgagccgttccgcaaggaatgcacctggcaggtgaaggccaatgaccggaagtaccacgagcaaccccacttcatgaatactaagtttctctgcatcaaggagagcaagtacgccaacaacgccatcaagacctacaaatacaacgccttcaccttcatccccatgaacttgttcgaacagttcaaaagggcggccaacctctacttcctggccctgctcattctccaggcggtgccacaaattagcactctcgcttggtataccactctcgtgccactcctggttgtcctgggcgtgaccgccatcaaagacctggtggacgacgtggcgcggcataagatggacaaggagatcaataaccgaacttgcgaagtgatcaaggatgggagattcaaggtggcaaaatggaaggaaatccaggtgggagatgtgatccggctgaagaagaatgatttcgtcccagcggatatactgctcctgagctcctccgaaccgaactccctgtgctacgtggaaaccgcggagctggacggcgagacgaacctgaagttcaagatgtcgctggagattaccgatcagtacctccagagggaggacactctggctacctttgacggtttcatcgagtgcgaggagccaaataacaggctggataagtttactggaactctcttctggcgcaatacttcctttccattggacgcggacaagatcctcctccggggatgcgtcatccggaacaccgacttttgtcatggtttggtcatcttcgctggcgctgataccaagatcatgaaaaactctggcaagacccggtttaagcgcaccaaaattgactacctcatgaactacatggtgtacactatcttcgtcgtcctcatcctgctgtccgctggactcgccatcggacatgcatactgggaggcccaagtgggaaactccagctggtacctgtacgatggcgaagatgacaccccttcgtaccggggattcctgatcttctggggatacatcatcgtcctgaacaccatggtcccgatctcgttgtatgtctctgtggaggtgattcggctgggacaatcccatttcatcaattgggacctgcagatgtactacgccgaaaaggacaccccggcaaaggcaaggacgaccacgcttaacgaacagttgggacagattcattacatcttcagcgataaaaccggcaccctcactcagaacattatgaccttcaagaagtgctgcattaatggacagatctacggagatcaccgggatgcctctcagcacaatcacaataagatcgagcaagttgacttctcctggaacacgtacgctgatggaaagctggctttctacgatcattacctgatcgaacagatccagagcgggaaggaaccggaggtccgccagttctttttcctgctcgccgtgtgccacactgtcatggtggatcgcactgatggtcagctcaactaccaagccgccagcccagatgagggagccctggtgaacgccgcacggaatttcgggttcgcctttctggcacgcactcagaacaccatcactatctcggaactcggaaccgagcggacctataacgtgctggcaatcctcgacttcaatagcgaccgcaaaagaatgtccatcatcgtgaggaccccggaaggtaacattaagctgtactgcaagggagccgatactgtgatctacgaacgcctgcaccggatgaatcctactaagcaggaaacccaagacgccctcgatatcttcgcgaacgaaaccctgcgtaccctgtgtctctgctacaaggagatcgaagaaaaggaattcaccgagtggaataagaagtttatggcggcctccgtggcctcaaccaacagggacgaggccctggacaaagtgtacgaagaaatcgagaaggatctcatcctgctcggagccactgccatcgaagataaactgcaggatggagtgccggaaaccatcagtaaattggctaaggccgacatcaaaatctgggtcctgactggtgataagaaggaaactgcggaaaacatcggatttgcttgtgagctcctcactgaagatactaccatctgttacggggaggacatcaattccctccttcacgcccggatggagaatcagagaaaccggggaggagtctacgctaagttcgccccgccagtccaagagagcttcttccctccaggtggaaatcgcgcgctcatcattaccgggtcgtggctgaacgaaatcctgctcgagaagaaaaccaagcggaataagatcctcaaattgaagttccctcgcactgaggaggagcgtcgcatgaggacgcaaagcaagcggcgcctcgaagctaagaaagaacaacgccaaaagaactttgtcgacctggcgtgcgagtgctcagcggtgatctgctgccgggtcactccaaagcaaaaggctatggtcgtggacctggtgaaacgctacaagaaggctatcaccctcgccatcggggacggagcaaatgatgtgaacatgatcaaaactgctcacattggagtggggatctccggacaggagggaatgcaggccgtgatgtccagtgactacagcttcgcacagtttcggtacctgcagcggctgctcctggtgcacggacgctggagctacatcagaatgtgcaagttcctgcgctactttttctacaagaactttgcattcaccctggtccatttttggtactcattcttcaacgggtactcggctcaaactgcctacgaggactggttcattacgttgtataatgtcttgtacacctcgctcccggtgctccttatgggactcctggaccaagacgtgtcggacaaactgtccctgagattccctgggctgtacattgtgggacaacgggacctgcttttcaactacaaacgcttctttgtgtcgctgctgcatggagtgcttacttccatgatcttgttctttatcccactcggagcatacctgcagactgtgggccaagacggtgaagcgccatccgactaccagtcgttcgccgtgactatcgcgtcggcgctggtgatcactgtgaactttcaaattggcctggatacctcgtactggaccttcgtgaacgccttctccatctttggctcgatcgcactctactttggcattatgtttgattttcactccgccggaatacacgtcctgttcccaagcgccttccaattcacgggaaccgcctcgaatgcgttgcggcagccgtacatctggctgactatcattctggccgtggccgtttgcctgctcccggtcgtcgcgatacggtttctgagcatgaccatctggccatcagagtcagacaagatacagaagcacagaaagaggctcaaggcggaagagcaatggcagaggagacagcaggtgttccggcggggagtgtcaacgcgccggtcggcttacgccttctctcaccagcggggctacgccgacttgatctcgagcggccggtccatccgaaagaagagatcaccgctcgatgcaatcgtcgcggatggaacggcggaatatcgccgcactggggactcg

SEQ ID NO: 318935 - DNA, 3753 bp, Artificial Sequence
  derived and/or modified sequence
atgtctacagaacgggactcggaaacaacgtttgacgaagactcccaaccaaatgacgaggttgtgccttatagcgacgatgagactgaggacgagcttgacgatcagggtagcgccgtagaaccagaacagaatagggtcaatcgcgaggcagaagagaatcgggagccattccggaaagaatgcacatggcaggtgaaagccaacgatcgaaagtatcatgagcaaccccactttatgaacacaaagtttctttgtataaaggaaagcaaatacgcaaataatgccatcaaaacctacaagtataatgcctttacattcataccgatgaacctgtttgaacaattcaaacgcgctgccaacctttacttcctagctttgttgattttgcaggccgtgccgcagatcagtacattagcatggtacaccacacttgtgccacttctggtcgtgttaggggtcaccgcgattaaagacctcgtggacgatgtggcacgccataaaatggataaagaaatcaacaatcggacgtgtgaggtgatcaaggatgggagattcaaggtcgctaagtggaaggagatccaggtgggcgacgtaatacgcctgaaaaagaacgactttgtgccagcagatattctgctcctgtctagttccgaaccaaacagcctgtgttacgtagaaacagctgagttggatggggaaactaatttgaagttcaaaatgtcccttgaaatcactgatcagtatctgcagcgggaggacacacttgcaactttcgatggttttatcgagtgtgaagagccaaacaataggctggacaagttcaccggaacgttgttctggaggaatacttcttttccgctggacgccgacaaaattctgctccgaggttgtgtcatccgcaacactgatttttgtcacggattggtcatcttcgctggtgctgacacaaagatcatgaaaaattctggtaagacaagatttaagagaacaaagattgactacttgatgaactacatggtgtatactatttttgtagtactcatactgctctcagctggactagccatcggtcatgcctattgggaggcgcaggtgggcaactcctcttggtacttgtatgatggcgaggacgacacgccctcctacaggggcttcctaatcttctgggggtatattatagtcttaaacacaatggttccaatcagcctgtacgtgagcgtagaggtgatcagactggggcagagccacttcatcaattgggacttacagatgtactatgctgaaaaggacacgccggctaaggcccgcaccacgaccctgaacgaacaattaggccagattcactacatcttctctgataaaactggcaccttaacacagaatatcatgacattcaagaagtgctgcataaacggacagatctacggcgaccacagggacgcttcgcaacacaatcacaataagattgaacaggtggatttttcctggaacacttatgctgatggcaagctggccttctacgatcactacctgattgaacagatccagtcaggcaaggaaccagaggtcaggcaattcttcttcctgctggctgtgtgtcatacagtgatggtggaccgcacggatggtcagctcaattaccaggccgcctctccagacgaaggtgcactggtgaacgccgccaggaatttcggttttgcctttctggccagaacgcagaataccattaccatctctgagctgggcacggaacggacttacaatgtgctagctatcctggattttaactcagaccgtaaacgcatgtctattatcgttcgaacgcccgaaggtaacattaagctgtactgtaagggcgccgacaccgtgatatatgaacgcctgcataggatgaaccccaccaagcaggagacccaagacgctctggatatattcgctaatgagactctgcggacactgtgcctgtgttacaaggagatcgaagaaaaagaatttaccgaatggaacaaaaaatttatggcagcttctgttgcctcaacaaatagagacgaagccctggataaggtttacgaagaaatcgagaaagatctcatacttttaggtgcaactgcgatcgaggacaaactccaggatggcgtgcctgaaactatatctaagctggccaaagcggatatcaagatttgggtgctgacaggagataagaaagagacagcggagaacattggcttcgcatgtgaactgctcacagaagataccacaatctgctatggcgaggatataaattcacttcttcacgcccgcatggaaaaccagagaaacaggggaggcgtttacgctaagttcgccccaccggtgcaggaatccttcttcccacctggcggtaacagggccttaattattaccggttcgtggcttaacgaaatactcttagaaaagaaaacaaagcggaacaaaatcctgaagctaaagtttcccagaactgaagaggaacgccgaatgcggacgcagtccaagagaaggttggaggctaaaaaagaacagcgccagaagaactttgttgatctggcatgcgaatgctctgctgtcatctgctgccgggtgacgccgaaacaaaaagctatggtggtggacctggtcaagcgatataagaaagctatcaccctggcgattggcgatggggcaaatgacgtgaacatgataaaaaccgcacatatcggagttggcatatccgggcaggaaggcatgcaggccgttatgagctccgactacagttttgcacagttccggtatcttcagaggctgctgcttgtgcacgggcggtggagctatatccgcatgtgtaaattcctaaggtacttcttctacaagaatttcgcctttacactcgtgcatttctggtattccttctttaatggatacagtgcacagaccgcttatgaggattggttcataacactgtataatgtgctgtatacctccctgccggtcctgctcatgggattactagatcaagacgtgtctgataagctgtccttacgtttccctggcctttatattgtaggccaaagggatttattgtttaactacaagcgttttttcgtgagtctgctgcatggagtactgacctcaatgatcctgttctttatccccttgggagcgtatttacagaccgtgggccaggacggcgaagccccttcggactatcagtccttcgcagttacgatagcctctgctctcgtgatcaccgtgaactttcagataggattggatacaagctactggacgtttgtgaatgcattcagcattttcggatccatagccctctacttcgggatcatgtttgactttcattcagccggaatccacgtcttgttcccaagtgccttccagttcacagggaccgcctctaatgccctgagacaaccttacatttggctgacaatcatcctggccgtcgctgtttgcctactccccgtagttgccattaggtttctgtctatgacaatttggccttctgaaagcgacaagattcagaaacacagaaagcgcctaaaggcagaagaacaatggcaacgccgtcaacaggtgtttcggcggggcgttagcacaaggagatctgcgtatgcctttagccaccagagaggatacgccgatcttatctccagcggcaggagtatccgcaaaaagaggtcccctttggatgcaatcgtggccgacggaacagctgagtaccgccgaaccggcgattcc

SEQ ID NO: 318936 - DNA, 3753 bp, Artificial Sequence
  derived and/or modified sequence
atgagcaccgagcgggacagtgaaacaacattcgacgaggattctcagccgaacgacgaagtcgttccgtatagcgatgatgagaccgaggatgagttggatgaccaggggagtgccgtcgagccggaacagaatcgcgtcaatcgcgaggcagaggaaaacagggagccgtttcgaaaggagtgtacctggcaggtgaaagctaacgacagaaagtatcacgaacaaccgcactttatgaataccaagttcctgtgtatcaaggaaagcaaatacgccaacaatgcgattaagacctacaaatataacgctttcaccttcatcccaatgaatttgtttgagcagttcaaacgtgccgcgaatctctacttcctagccctcctcatactccaagcagtgcctcaaattagtactcttgcttggtatacaaccttggtgcccctcctagtagtcctgggcgtcactgctatcaaagatctcgtcgacgacgttgcccgccacaagatggacaaagaaattaacaatagaacatgcgaggtcatcaaggacgggagatttaaggtggccaaatggaaagaaatccaggtgggagacgtgatacggttgaagaagaatgactttgtaccagccgacatactcctacttagttcctctgaacctaacagcctgtgctacgtggagacagccgagctcgacggtgaaacgaatctgaagttcaagatgtccctcgagatcaccgaccagtacctacagagggaggatactctggctacgtttgacgggtttattgagtgtgaggagccaaataacaggctggacaaattcactggaaccctgttctggcgaaatacttccttcccactggatgctgacaagatcctgcttagggggtgcgtgatcaggaataccgatttctgtcatgggctggtgatcttcgctggggccgatactaaaattatgaagaacagtggcaagaccaggttcaagcgtacaaaaatcgactacctgatgaactatatggtgtacacgatctttgtcgtcctgattctgctcagtgcgggtttggccattggacatgcgtattgggaagcccaggttggaaactcctcatggtatctgtacgatggcgaagatgatacccccagttatcgaggatttcttatcttttggggatatattatagtgctaaacactatggtacctattagtctctacgtgagtgtggaggtgatcaggctgggccaatctcatttcattaactgggaccttcagatgtattatgcggagaaggatacacccgctaaggcacgaaccaccaccctcaacgaacagctaggccagatccattacatattcagtgacaagacgggcacccttacccagaatatcatgaccttcaagaagtgttgtatcaacggccagatatatggtgatcacagggatgcttcccagcacaaccataacaaaattgaacaggtggatttcagctggaacacatatgccgacggtaagttggccttctacgatcactatctcatagagcagatccagagtggaaaagagccagaagtgaggcagttcttcttcttgctggcggtgtgccacaccgtgatggtagataggaccgacggccagctcaattatcaggctgcttcgcccgatgagggggccctggttaacgccgccaggaactttggtttcgcattcctagctagaacccagaatacgataacaatctcggaactcggcactgagcgcacatacaatgttctcgccattctggatttcaacagcgatcgtaagaggatgagcataatcgtgcgtacccctgagggtaacataaaattgtattgcaaaggtgccgataccgttatttatgaacgtctacacagaatgaatccgacgaaacaggaaactcaagatgctctggacatctttgcaaacgaaactctgaggaccctgtgtctatgttataaggaaattgaggagaaggagtttacagagtggaacaagaaatttatggctgcatctgtggcctccaccaatagggacgaggccctggacaaagtttacgaagagatcgagaaggatctcatactcctgggcgccaccgccatcgaagataagctacaagatggtgtgcccgagaccattagcaagctggctaaggccgatattaagatctgggtcctcacaggggacaaaaaggagacagcagagaatattgggttcgcttgcgagctcctaaccgaggatacaaccatctgctatggagaagacatcaatagtctcctccatgctagaatggagaatcagaggaaccgaggtggagtatatgccaaattcgcccctcccgtgcaggagtcgttctttcctcccggcgggaatagggctctaatcatcaccgggtcatggctgaacgagatcctcttggagaagaagacaaagagaaacaagattctgaagctcaagtttcccaggaccgaagaagagcgcagaatgcggacacagtcaaaacggcgtcttgaagctaaaaaagagcagcgccagaaaaactttgttgatctggcatgtgaatgcagcgcggtgatctgttgccgcgtgacgccaaagcaaaaggcgatggttgtcgacctggttaagcgttacaagaaagctatcacactggccatcggggatggagctaatgatgttaatatgatcaaaaccgctcatatcggcgtggggatcagtggacaggaggggatgcaagccgtaatgagttctgactactccttcgcccagttccgctatctccagaggctcctgctcgtccacggccgttggtcttatataaggatgtgtaaattcctgaggtactttttctataaaaattttgctttcacgctcgttcacttctggtattcgttctttaatgggtactctgcccagactgcctatgaggactggttcatcaccctctataacgtcctctacacctcattgccggtgctcctaatgggcttgttggatcaggatgtctcagataagctaagtctgaggtttcccggcctgtatattgtcgggcagcgagacctactgttcaactacaaaaggttctttgtcagcctgcttcacggagtgttaacttccatgatactcttcttcatccctctgggagcttacttacagaccgtgggtcaagacggagaggcaccgagcgactatcaaagcttcgccgtcacaatcgccagcgccttagtgatcaccgtgaatttccagattggactagatacttcctactggaccttcgttaacgccttttccatttttggaagcatagctctctacttcggcattatgttcgacttccactccgccggaatccacgttctgttcccgtcagcctttcaattcacaggcacggcgtcgaatgctcttagacagccatacatttggctgaccattatcttagccgtggcagtgtgtcttctcccagtagtggccatccgtttcctcagtatgaccatttggccttccgagtcagacaagatacagaagcacaggaagcggctgaaggccgaggagcagtggcagcgccgccagcaggtttttcggcggggggtatcaactaggcggtctgcctatgctttctctcatcagcgtgggtatgccgaccttatatcaagtggaagatccatacggaaaaaacgtagccctctcgacgcaatcgtggcagacggcacggccgaataccgacgcaccggggattcg

SEQ ID NO: 318937 - DNA, 3753 bp, Artificial Sequence
  derived and/or modified sequence
atgtctaccgaacgagactcagaaacgacttttgacgaagacagccaacctaatgacgaggttgtgccttacagtgatgatgagacggaggacgagctggacgaccagggttcagcggtcgagccggagcagaatcgggtgaacagggaagccgaagagaacagagagccgtttaggaaagagtgtacctggcaagtgaaggccaatgatcggaaatatcacgagcagccccacttcatgaacacaaagtttctatgcatcaaagagagcaaatatgcaaacaatgcgatcaagacttataagtataatgccttcaccttcatccccatgaatttgttcgaacagttcaagcgtgccgcgaacctctactttctggcacttctgattttgcaagccgtgccccagatatcaaccttggcctggtatacaaccctcgttcccctgctcgtagtgctgggagttaccgctatcaaagatctggtagatgacgtcgcacggcataaaatggataaggagattaataaccgaacttgtgaagtgattaaggatggaaggtttaaagttgcaaagtggaaagagatccaagtaggtgacgtgataagactaaaaaaaaatgactttgtccccgcggacattctcctcctgagcagctccgaaccaaattctctgtgttacgtggaaaccgctgagttggacggggagactaatctgaagtttaaaatgtcccttgagatcacggaccagtatcttcagagggaggatacattggcaaccttcgatgggttcatcgagtgtgaggagcccaacaaccgactcgataaatttaccggaacactgttttggcgtaatacgtcctttcctctcgatgctgacaagatcctgctaagaggctgcgtcatccggaatacagatttctgtcacggattggtcatctttgccggggccgatactaaaattatgaaaaactctggcaaaacacggtttaaaagaactaaaattgactatctgatgaattatatggtctacactattttcgtggtcctgatactattgagcgcgggcctggccatagggcacgcgtattgggaagctcaagtgggcaattcctcttggtacttgtatgacggtgaggacgacactccttcataccgagggtttcttattttctggggatacattatagtgcttaacactatggtccccatttctctgtatgtctctgtggaagtgataaggctgggtcagtctcatttcataaattgggacctacagatgtactatgccgaaaaggacacacctgcaaaagctagaaccacaacacttaacgaacaattagggcagattcattatatcttctcggataaaacagggaccctgacccagaacatcatgacctttaagaaatgttgcattaatggacaaatttacggtgaccacagagatgctagccagcacaaccacaacaaaatcgaacaagtcgacttctcgtggaacacatatgctgacggcaagctggcgttttacgatcattacctgatcgagcaaattcagagtggtaaagagcccgaggtcaggcaatttttttttttgctggcagtctgtcatacagttatggtagacagaaccgacgggcagttgaattatcaagctgcctctccagacgaaggggctcttgtgaacgccgcccgaaatttcgggtttgcctttctagcaaggactcagaataccatcactatttctgaactcggaaccgagcggacatacaacgtgttagctatactggacttcaatagcgacaggaaacgtatgtcaatcattgtgaggaccccagaaggaaacatcaagttgtactgtaaaggagctgataccgtgatttatgaaagactccatcggatgaaccccacaaagcaggaaactcaggatgccttggatatcttcgctaatgagacattgcgcaccctgtgtttgtgctacaaagagatcgaagaaaaagagttcacggaatggaataaaaagtttatggctgccagtgtggcaagcactaatagggatgaggcgctagacaaggtatatgaggaaatcgagaaggatctgatactactgggagctacagctatagaagataagctgcaggacggagtgcccgagacaatcagcaagttagccaaggccgacatcaagatctgggtcttaaccggggataaaaaagaaacagctgaaaacataggcttcgcatgcgaactgctcacggaggatactacaatctgttacggcgaagacataaacagtttacttcatgcgcggatggagaatcagcggaaccgaggtggagtgtatgcaaagtttgccccccctgtacaggagtcattttttcccccgggaggcaatcgggccctgatcatcactggatcctggctaaacgaaattctgctcgagaaaaagacaaagcgcaacaaaatcctgaaactcaagtttcctagaacagaggaggaacgcaggatgcggactcaaagcaagaggaggcttgaggccaaaaaggaacagcgccagaaaaactttgtggacctggcatgcgaatgcagtgctgtgatatgttgcagggtcacaccaaagcagaaggctatggtggttgacctggtcaagaggtacaaaaaagcaattactctagcaataggggacggtgctaacgatgttaatatgataaagactgcccacatcggcgtgggaattagcgggcaggagggaatgcaggccgtgatgtctagtgattacagttttgctcagtttcgctatttgcaaaggttattactggtccacggaaggtggtcttacattaggatgtgtaagttcctgaggtactttttttataagaactttgccttcacactagttcatttttggtacagcttttttaacggctatagcgcacagacggcctacgaggactggttcataactctgtataacgtattatacacatccttgccagttttgctgatggggctcctggatcaggacgtctcagacaagctgtctctaaggttcccagggctgtatatcgtgggccagcgggatcttctgtttaattataaacggttcttcgtcagtcttttgcatggcgtgctaacctcaatgattctgttctttattccgttgggcgcttacctccagactgttgggcaggacggggaggctcccagcgactaccagagctttgcagtgaccattgcctccgccttggttataacggttaactttcagatcgggctggacacgtcctactggaccttcgttaatgccttctccattttcggttctattgcactgtactttggcataatgtttgatttccacagtgcaggtatccacgtcctttttccttcagcctttcaatttacaggcacagcctccaacgccctacggcagccatatatttggttaactatcattcttgccgtggcagtctgcctgctccccgtcgtcgctattagatttctcagcatgaccatatggccaagtgaatccgacaaaattcagaaacatagaaagagacttaaggctgaggagcagtggcagaggcgacagcaggtgttccggcgcggagtgtccacccggaggtccgcttacgcctttagtcatcagcggggctacgccgacctcattagctccggccggagcatcagaaagaaacgctctcccctggacgcaattgtcgccgacgggactgccgaatatcggcggacgggtgacagc

SEQ ID NO: 318938 - DNA, 3753 bp, Artificial Sequence
  derived and/or modified sequence
atgagcaccgaacgagactcagagacgacctttgatgaggacagccaacctaatgatgaggtggtgccgtactcagatgatgaaaccgaagatgagctggatgatcaaggaagcgccgtggaacccgaacagaacagggtgaacagggaagcagaggaaaacagagaaccgtttaggaaagagtgtacctggcaggtgaaagcaaatgataggaagtaccatgagcaaccacacttcatgaacaccaaattcctctgcattaaggagagcaagtacgcaaataacgctatcaagacttacaagtacaatgctttcaccttcatccctatgaacctgttcgagcagtttaaacgagcggcaaatctgtacttcctcgcgctgctgatactccaggcggtgcctcagatcagcacgctggcttggtacactactttggtgccgctgctcgtggtcctcggagtcactgccattaaggaccttgtcgacgatgtggcccggcataagatggacaaggagattaacaatcggacttgtgaagtgatcaaggacggacggtttaaggtggccaagtggaaggaaatccaggtcggggacgtgattcgcctcaagaagaacgattttgtgccggcggacatcctgctgttgagctcctcggaaccaaactcactctgttacgtggagactgccgaacttgacggcgaaaccaacctgaaattcaagatgtcccttgaaatcactgaccaatacctgcagcgagaagataccctcgctaccttcgacggattcatcgaatgtgaggaaccgaataacaggttggataagttcactggcacccttttctggagaaatacgagcttccctctggacgccgataagatccttctcagaggctgcgttatccgcaatactgatttctgccacggcctcgtgatcttcgccggggcggataccaagattatgaagaactccggaaaaactagattcaagcgcactaagatcgattacctcatgaactacatggtctacacgatctttgtggtcctgatcctgctctcagcgggtctggctatcggccacgcatactgggaggcccaagtgggaaactcctcctggtacctgtacgacggggaagatgacactcccagctatcgggggtttctgatcttctggggatacatcatagtcctgaatactatggtgccgatcagcctctacgtgagcgtcgaggttattcgccttggccaatcccacttcatcaattgggatctgcagatgtactacgctgagaaagacactccagcgaaggctcggaccaccactctgaatgagcagctcggacaaatccattacatcttttcggataagaccgggaccctgacgcagaatatcatgactttcaagaagtgctgcattaacggccagatctatggcgaccaccgcgacgcatcacagcacaaccacaacaaaatagagcaggtcgattttagctggaatacttatgctgacggaaagctggccttctacgaccactacctgatcgaacaaatacagagcggaaaagaacctgaagtgagacagttcttcttcctgctggcggtgtgccatactgtgatggtcgatcgcactgacggacagctgaattaccaagctgcatccccagacgagggcgccttggtcaacgctgcgcggaacttcggattcgccttcctggcgagaacccagaacaccatcaccatctcagagctgggaacggagcggacttacaacgtgctggcaatcctcgacttcaactccgacagaaaaagaatgtccatcattgtccggactccagaaggaaatatcaagctgtactgcaagggagcggacactgtcatttacgagcgcctgcaccgcatgaatccaacgaaacaggaaacccaggacgccttggacatcttcgctaacgaaaccctgcgcaccctctgcctttgttacaaggaaattgaggagaaagagttcacggaatggaacaagaaattcatggcggcttcggtggcctccactaatcgcgacgaggcgttggacaaggtgtacgaagaaatcgaaaaagacctgatcctgttgggagcgactgcgattgaagataaactgcaagatggggtcccagaaaccatctcaaaacttgcgaaggccgacatcaagatctgggtgctgaccggtgacaaaaaggaaaccgctgaaaacatcggctttgcgtgcgaactgcttactgaagatactacgatctgctacggggaggacatcaactcgctgctgcatgcaagaatggagaatcagcggaacaggggcggagtctacgcgaagttcgcgccgccggtgcaagaatcgtttttcccgccaggcggaaaccgggcgctcatcattaccggctcgtggctcaatgagatcctcctcgaaaagaaaaccaagcggaacaagatcctgaagctgaagttcccgcggacggaggaggaacgccggatgcgcacccagtcaaagcgccggctggaagccaaaaaagagcaacgccaaaagaacttcgtcgatctggcttgcgaatgttcggcggtgatctgttgccgagtgactccgaaacagaaggcgatggtggtggacctcgtcaagcggtacaagaaagcaatcacgttggccattggtgacggcgccaacgacgtgaacatgattaagaccgcacacatcggagtggggatctcgggacaggaggggatgcaggccgtcatgtccagcgactactcgttcgcacagtttcggtacctccagagactgctgcttgttcatgggcgctggtcctacattcggatgtgtaaattcttgaggtactttttctacaagaacttcgctttcactctcgtccacttctggtactcatttttcaatggatacagcgcccaaaccgcgtatgaggactggtttatcaccctgtataacgtgctctacacctctctgccagtcctcctgatgggacttctggatcaggatgtgagcgacaagctgtcgctgagattccctgggctgtatatcgtgggacaaagggacctgctgttcaattacaagaggttcttcgtgtcgcttctgcatggagtcctcacctccatgattctcttcttcatcccgcttggagcatatctgcagaccgtgggtcaagacggggaagcgcccagcgactaccagtcgtttgcagtgactattgcctcagccctggtgatcaccgttaactttcagatcggcctcgacacctcatactggacgttcgtcaacgcgttctccatctttggatcaatcgccctgtatttcggcatcatgtttgacttccactcggcgggaatccatgtcctcttcccttcggcattccagttcaccggcaccgcgtcgaacgcactgagacagccctacatctggcttactatcatcctcgccgtggccgtgtgcctgctcccggtggtggcgataagatttttgtcgatgaccatctggccttcagagtccgacaaaatccagaagcacagaaaacggctcaaagccgaggaacaatggcagcgccgccagcaggtgttcagaagaggtgtctcgactagaaggtcggcctacgccttctcccaccaacgaggatacgcggacctgatctccagcggacggagcatcaggaagaagcgcagcccgctcgatgctatcgtcgcagatggaactgccgagtacagaagaactggagactcc

SEQ ID NO: 318939 - DNA, 3753 bp, Artificial Sequence
  derived and/or modified sequence
atgtcaaccgaaagggattcggaaaccacctttgatgaagatagtcaaccaaatgacgaggtggtaccctattcagacgacgaaactgaggatgagcttgatgatcaaggatccgccgtggaacctgagcaaaatcgcgtcaaccgagaagcagaagaaaaccgcgaaccatttcgtaaggagtgtacttggcaagtcaaagcaaacgatagaaaataccacgagcagcctcactttatgaataccaaatttctctgtattaaggaatctaaatacgcaaataacgctattaagacgtacaagtacaacgccttcactttcattccgatgaacctctttgaacagtttaaacgcgccgcgaacctgtactttctggcgctcctgatactgcaagccgtcccacaaatttccacgctggcatggtacactaccctggtgccacttctggtggttctgggggtcactgccattaaggacctcgtggatgatgtggcacggcataagatggacaaggagataaacaatcgcacctgtgaggtgattaaagacggtcgattcaaagttgcaaagtggaaagagatccaggtgggcgacgttattagactcaagaagaacgatttcgtccccgcagacattctgctcctgtcctcctcggagcctaactcactctgctacgtggaaaccgcagagctcgacggagaaactaatctcaagtttaagatgtcacttgaaatcactgatcaataccttcaacgtgaagatacgctcgcaacctttgacggattcattgaatgtgaagaacctaacaaccggctggacaaattcaccggaactctcttttggcgcaacacttctttcccactggatgccgataagatcctcctgagaggttgtgtgattagaaatactgatttttgtcacgggcttgtgattttcgcaggcgcagatactaagatcatgaaaaactcgggcaagactcgattcaagcgtaccaagatcgactacctgatgaattacatggtctacaccatctttgtggtcctgatacttctttcggcgggtctggcaattggccatgcatattgggaagcccaggtcggaaattcgtcgtggtacctgtacgatggggaggatgacaccccttcatatagaggattcctcattttctgggggtacataattgtgctgaataccatggtccccattagcctctatgtcagcgtcgaagtgatacggttgggccaatcgcatttcatcaactgggaccttcagatgtactacgccgaaaaggacaccccagccaaggcacgtaccactaccctgaatgaacagcttggtcagatccattacatctttagcgataagactgggactttgacccaaaacatcatgacgttcaaaaagtgctgcataaacggacagatttacggcgatcatagggatgctagccagcacaatcataacaagattgagcaagttgacttctcgtggaatacctacgctgacggaaagctcgctttttacgatcattacttgattgaacagattcagtccggcaaagaacctgaagtgcgacagttcttctttcttcttgcggtctgtcatactgtgatggtggatcgaacggatggacaacttaactaccaggccgcgtctcccgacgaaggagcgttggtcaacgcagcgcgaaactttgggtttgcattccttgcacgtacgcaaaatacgattactatctcggagctgggaactgaacgcacttacaatgtgttggcaattcttgatttcaacagcgaccgaaagaggatgtccatcatagtgcggacccctgagggaaacattaaactctattgtaagggcgccgatactgtgatttacgaacgtctgcacaggatgaaccccaccaagcaggagactcaagacgcacttgacatatttgcaaacgaaacccttcgtacgctttgcctttgctacaaagaaatcgaagaaaaggaattcaccgagtggaacaagaagtttatggcggcatcggtggcctccaccaaccgcgatgaggcccttgataaggtctatgaggaaattgaaaaggatttgattcttctgggtgccacggcaatcgaggataagctgcaggatggagtgcccgaaactattagcaagctcgcaaaagcagacatcaagatctgggtgctcactggggacaaaaaggagactgcagaaaacatcggttttgcatgcgaactgctgactgaagataccacgatctgctacggtgaagatatcaactccctgctgcatgcaaggatggaaaaccaaagaaaccgcggcggagtctacgcaaagtttgcccctcctgtccaagagtcgttttttccaccggggggcaacagagcactgataatcactggaagctggctgaacgagatcctcctggagaaaaagaccaagcggaacaagattctgaaacttaagttcccacgtactgaagaagaacgtagaatgcgaacgcagtccaagagacgcctggaagcaaagaaggagcaacgccagaagaattttgtggacctcgcctgtgagtgttcagctgtcatttgttgccgagtgactcccaagcaaaaggccatggtggtcgacctggtcaagcgttacaagaaggccatcactcttgcaataggcgatggtgctaatgatgtgaacatgatcaagaccgctcatatcggcgtggggatttccggtcaagagggaatgcaggccgtgatgtccagcgattactcctttgcacaattccggtaccttcagcgactgcttctcgtgcatggtcgctggagctacatcagaatgtgtaagtttctgaggtacttcttttacaagaatttcgcttttactctggtgcacttttggtactccttctttaacggatactccgcgcagactgcgtacgaggactggttcataaccctctacaatgtattgtacactagcctgcctgtccttctcatggggttgcttgatcaagacgtgtcagacaaactctctctcagatttccaggattgtacattgtgggccagcgggatctgcttttcaattacaaacgattcttcgtgagcctgctgcatggagtgttgacttcgatgatccttttctttatcccactgggtgcataccttcaaaccgtcggtcaggacggagaggcgccatcggattaccagagctttgcagtcacgattgcatccgcgctcgtgattaccgtgaattttcaaattggactcgatacgtcctactggactttcgttaacgcctttagtatattcggatcgatcgccctgtacttcggtattatgtttgactttcacagcgcaggaattcatgtgctgtttccttccgcatttcaattcacgggaaccgcctccaacgcactcagacaaccttacatttggctgaccattattctggccgtggcggtgtgtcttttgccagtcgtagctataagatttctgtcaatgactatttggccatcggagtccgataagattcaaaaacatcgtaagagacttaaggcagaggaacagtggcaacgcagacagcaggtctttcgtcggggtgtgtccacccgccggagtgcctacgcattttcacatcaaaggggctacgcagatctcataagctcgggtcgctccattagaaagaagaggtcgccactggatgcgattgtggcggatggaaccgccgaatatagacgcactggtgattcc

SEQ ID NO: 318940 - DNA, 3753 bp, Artificial Sequence
  derived and/or modified sequence
atgagtaccgaacgcgacagcgagacgacctttgatgaggactcgcaacctaacgacgaggtcgtaccatattccgacgatgaaacagaggatgaactggatgaccaggggtctgcagtcgaacctgagcagaacagggtgaatagagaggccgaagaaaaccgcgaaccatttagaaaggagtgtacctggcaggtgaaagccaatgataggaaatatcatgaacagcctcactttatgaatacaaaatttctgtgcattaaagagtcaaaatatgcgaacaatgcgattaagacatacaagtacaacgctttcacgtttattcctatgaacttgttcgagcagttcaaacgcgccgccaacctttattttctagccctgctcatactccaggccgtgcctcagatctccacactcgcatggtacactactctcgtcccacttttggtggtgctaggcgttacagctattaaagacctcgtggatgatgttgccaggcataaaatggacaaggagatcaataatcggacctgtgaggtcatcaaggatggcagattcaaggtagctaaatggaaggaaatacaggtcggagacgttatccggctgaaaaaaaatgactttgtgcctgccgacatcttgctcctgtcatccagtgagcctaatagtttgtgttatgtggagactgccgagctcgacggcgagactaatctgaagttcaaaatgagtttggagataaccgatcagtacttgcaaagagaggatacgctggcaaccttcgacggatttatcgagtgtgaggagcccaacaaccggttggacaagtttactggtacccttttctggaggaacacatctttccccctcgacgctgataagattttgctgcgcggatgcgttatccggaacactgacttttgtcacggcttagtcatattcgccggcgcggacaccaagattatgaagaattcaggaaagactcggttcaaacgcaccaagatagattatctgatgaattacatggtgtatacgatctttgtagtcctaatcctgttgtcagctggcctggcaatcggacatgcatattgggaggcccaggttggaaacagctcatggtacctctatgacggcgaggatgacaccccttcttaccgcggcttcctgatcttctggggctacatcatagtactgaacactatggtacctatcagcctttacgttagtgtcgaagtcatacgattgggccagagccactttatcaactgggaccttcagatgtactatgccgagaaggatacgcccgcaaaggctcgcaccactaccctgaatgagcagctgggacagattcactacatcttctcagataagaccgggactctcacccagaatattatgacattcaaaaagtgctgcattaatggacaaatctacggggaccaccgcgatgcaagtcagcacaaccacaataaaattgagcaggtggacttctcctggaacacatacgcggatggaaaattagcgttctatgaccactacttgattgagcagattcagagcggcaaggaacctgaggtcaggcagtttttcttcctcctagccgtttgccatacagtgatggtggatcggacggacggtcagctgaactaccaggctgcgtctccggacgagggtgccctggtaaatgctgcccgaaattttggatttgcatttttggccaggactcagaataccataactatctccgagttaggaactgagaggacctacaatgtgttagccattctggatttcaattcggataggaagcgaatgtctattatcgtacgcactccggagggaaacattaaactgtactgcaagggggcagacaccgtgatctatgagcggctgcaccgtatgaatcctaccaagcaagagactcaggacgctctggacatctttgccaatgagacactccgcacgctgtgtttatgctacaaggagatcgaggaaaaggagttcactgaatggaataagaagtttatggcagcctccgtggcctcaaccaacagggatgaggccctcgataaggtatatgaggaaatcgaaaaggacctgattctgctgggggctactgccatagaagataagctgcaggacggagtgcctgagacaatcagtaagctggccaaagcggacatcaaaatctgggtgctgactggcgacaaaaaggagaccgccgagaatatcggcttcgcttgcgagttgctgactgaggacactacaatctgttatggtgaggacattaatagcctactacacgctagaatggaaaatcagcggaaccgaggtggcgtgtatgctaaattcgcccctcccgtgcaggaaagtttttttccccctgggggcaatcgtgcactgatcatcaccgggagctggctgaatgaaatcctcctggagaagaaaactaagaggaataaaattctcaagttgaagtttccacggaccgaggaagaacgccgcatgcgcacacagtctaagagaagactggaagccaaaaaagaacaacggcagaagaactttgtggacctggcctgtgagtgtagtgctgtgatctgctgccgtgtgacccccaagcagaaggcgatggtcgtggatctcgtcaaaaggtataagaaagccattacactggccattggagatggggccaacgatgtgaatatgatcaagacagcgcatatcggggtgggtataagtggacaggaaggtatgcaggccgtcatgtcctcagattattcattcgcccaatttaggtatctgcagaggctgttgcttgtgcacggaagatggtcctacattagaatgtgcaagtttctgcgttacttcttttacaaaaactttgcattcaccctggtgcacttctggtacagcttttttaacggttacagcgcgcaaactgcctatgaggattggttcatcacactatacaacgtgttatatacctccttacctgtccttttgatgggcttgttagatcaggacgtgtccgacaaactgtcattaagattccctggcctatacatcgttggccagagagatctcttattcaattataagcgatttttcgtgtccctccttcacggagtgctgacatctatgattctcttttttataccactgggtgcctacctgcagaccgttggacaagacggcgaggccccttctgattatcagtcctttgctgtgacgattgcatccgcacttgtgataaccgtgaactttcagatcggcctggacacctcatactggactttcgtaaacgcattttccatatttgggagcatagcgctgtattttggaataatgtttgattttcactctgctggcattcatgtgcttttcccttcagcctttcagtttactggaaccgcttcaaatgcgctccggcagccatatatttggctgacaataatccttgctgtcgcagtctgtcttctcccagtggtggcgattcgatttctgagcatgaccatttggccctctgagtcagataaaattcaaaaacaccggaaacgtctaaaagccgaggaacagtggcagcggagacagcaagttttcaggaggggcgtgagtaccaggaggagcgcctacgctttctctcaccaacgcgggtacgccgatttaatcagttctggtagaagcatacgtaagaaaaggtcaccactggacgcgatcgttgctgatgggaccgccgagtatcgtagaaccggcgactca

SEQ ID NO: 318941 - DNA, 3753 bp, Artificial Sequence
  derived and/or modified sequence
atgtcgacggaacgcgactccgaaactacctttgacgaagatagccagccgaatgacgaagtggtgccctacagcgacgatgaaactgaggatgagcttgacgaccaaggatccgccgtcgaacctgagcaaaacagggtgaatagagaagcagaagaaaatcgagagccattcagaaaggaatgtacctggcaagtgaaggcgaacgataggaagtaccacgagcaaccacactttatgaacacgaagtttctctgcattaaggagagcaaatacgccaacaacgcaatcaagacctacaagtacaacgcttttacgtttatacctatgaacctgtttgaacagtttaagcgagccgcaaatctctactttttggcactcctgatacttcaggccgtcccgcaaattagcaccctggcatggtacactaccctcgtccccctgttggtcgttcttggagtgactgcaatcaaggatttggtggacgatgtggcacgccacaaaatggataaggaaatcaataatcggacgtgtgaagtgattaaggacgggcgttttaaggtggcaaagtggaaggagatacaagttggagatgtcattagacttaagaaaaacgatttcgtgccagcagacattctgcttctttcttccagcgaaccaaactccctgtgctacgtcgaaaccgccgaactcgatggtgagactaacctgaagttcaaaatgtcactggaaatcaccgatcaatatctgcaaagggaagatacccttgctacttttgacggctttatcgaatgtgaagaacctaataacagacttgacaaattcactggtaccctcttctggcgtaatacctccttccctctggatgcagacaagattcttcttcggggatgcgtcattcgcaataccgatttttgtcatggacttgtgatttttgccggagccgacaccaagattatgaagaactccggaaagaccagattcaagcgaactaagattgattacctcatgaattacatggtgtacacgatttttgtggtcctgattctcctgtcggcaggactggcaatcggccacgcatattgggaagcgcaggtgggaaacagctcatggtacttgtacgacggcgaggatgatacgccttcatacagaggatttctcattttctggggctacataatcgtgctgaatacgatggtcccaatttcgctttacgtctcagtggaagtgattaggcttggccaatcgcactttatcaactgggacctccaaatgtactacgcggagaaggatacccccgcgaaagccaggaccaccactctgaacgagcaactgggacagatacattacatcttttcagataaaactggaactctgacccagaatatcatgaccttcaagaagtgttgtataaacggccagatttacggtgatcatagagatgcatcacaacacaaccataacaaaattgagcaggtcgatttctcctggaacacgtatgcagatgggaagctggccttctacgatcattacttgattgagcagatacaaagcggaaaggagcctgaggtcaggcagtttttctttctgctggctgtgtgccataccgtgatggtggataggacggacggtcaacttaactaccaggccgcaagcccagatgagggagcacttgtgaacgccgccagaaatttcggttttgcgttcttggccaggactcaaaacacgatcactatctctgaactggggaccgagaggacttacaatgtcctcgccattctggacttcaacagcgatcgcaaacggatgtccattatagtcaggacgccagaaggtaacattaaactttactgtaagggagcagatactgtcatttatgaaagactgcatcggatgaatccaacgaagcaggagactcaggacgcacttgacatttttgcgaatgagactctgcggactctgtgtctctgttacaaggaaatcgaggaaaaggaattcactgaatggaataagaagtttatggcagcgtctgtggcgagcacgaacagagatgaagcgcttgataaggtgtatgaagaaatcgaaaaggatttgatcctgctgggagcgaccgcgatcgaagataaactccaagatggtgtgcctgagactatctcaaaactggcaaaagcggacataaagatttgggttctgaccggtgataagaaagaaactgctgaaaacatcggatttgcttgcgaactgctcaccgaggataccactatttgttatggtgaggatatcaactcgctgctgcacgcccgcatggaaaatcaacgtaataggggtggggtgtacgctaagttcgcacctccggtgcaggaatcgttttttccccccggaggcaatcgggcactcatcattaccggatcctggctcaacgagatcttgctggagaaaaagactaagcggaacaaaatcctcaaactgaaattccctagaactgaagaggagcgtagaatgaggacccagagcaagcgccggctggaagcaaagaaggaacagcgccaaaagaattttgtggatcttgcgtgtgaatgctctgcagtcatttgttgcagggtcaccccgaaacagaaggcaatggtcgtggatctggtgaagcggtacaaaaaggcaataactctcgcaattggtgacggtgccaacgacgtcaacatgattaagactgctcatatcggtgtggggatctcggggcaggaagggatgcaagccgtgatgtcgtcggactactcattcgcacaattcaggtacctccaaaggctgcttctggtgcatggccgctggtcctacattcgcatgtgcaagttcctgaggtactttttctataagaattttgcatttactttggtgcatttctggtactcgttctttaacgggtactcggcacaaacggcatacgaggattggtttatcaccctttacaacgtgctttacacctccctccccgtcctcctgatggggcttctggaccaggatgtctccgacaaacttagcctcaggttccctggactttacattgtgggtcaaagagacttgcttttcaactacaaaagatttttcgtctccctcctccacggtgtgctcacctcgatgatcctcttctttatacctcttggcgcttaccttcaaactgttggtcaggatggtgaagcaccaagcgactaccaatcctttgccgtgaccatcgcgtcagcactggttatcaccgtgaacttccagattggactggacacttcctactggacctttgtcaacgcatttagcattttcggatcgatcgccctgtactttggcatcatgtttgattttcactcggcgggcattcatgtgctttttccatcggcttttcagtttacgggtactgcctcaaatgcgcttagacagccatacatttggcttacgatcattttggcagtggccgtgtgtctccttcctgtggtggcaattcgatttctttcgatgaccatttggccttcagaatccgataagatccaaaagcaccgaaagcgtctgaaagcggaagaacagtggcaacgacggcagcaagtgtttagacgcggtgtgtccacgaggagatccgcttacgcattttcgcatcagagaggttatgccgatctgataagctccggtcgttccattcggaagaaaagatctcctttggacgcgattgtggcagacggcaccgcagaatacagaaggaccggagatagc

SEQ ID NO: 318942 - DNA, 3753 bp, Artificial Sequence
  derived and/or modified sequence
atgtcaacagaaagagattcagagacaaccttcgatgaagacagccaacccaatgatgaggtggtaccatattctgacgatgaaacagaagatgagttggacgaccagggaagcgctgttgagccggaacagaacagagtcaatcgggaggcagaagaaaatcgcgaaccgtttcgcaaagagtgtacatggcaggtgaaagccaacgatagaaagtaccatgagcaaccgcatttcatgaatacaaagtttttatgtataaaggaaagcaagtatgctaataatgccatcaagacatataagtacaacgcgtttactttcatacctatgaatctgtttgagcaatttaaacgcgcagcaaacctttattttcttgcattgttaatcctccaagctgtgccgcaaatatccacgctggcttggtacactacgctggtaccgctccttgttgtgctgggcgttacagcgattaaggatttggtagatgatgtcgctcggcataagatggataaagagataaacaaccgcacgtgtgaagttattaaggatggacggtttaaggttgcaaagtggaaggaaattcaagttggagatgttattcggttaaaaaaaaatgacttcgtacctgcggatattttgcttttgtcctcttctgaaccgaactctctatgctatgtagaaactgcagagcttgatggggaaacgaatcttaaatttaaaatgtctttggaaattacagatcagtatctgcaacgtgaggatacacttgcaaccttcgatggtttcattgagtgcgaggaacctaacaataggctggataaatttacgggtacccttttttggcgtaatacatcattcccactagacgcagacaagatcctacttcggggctgcgtcattagaaacacagatttttgccatggcttggttatctttgcgggagcagatacgaagattatgaagaattcaggaaaaacaagatttaaacggacaaagattgattacttgatgaattatatggtatacactatttttgtagttcttatcctccttagcgcaggcctggctattggccatgcctattgggaagctcaggttggaaactcctcatggtatctctatgatggagaggatgatacaccgagttatcgtgggttcctgatcttttgggggtacattatcgttctgaacacgatggtcccaatttcactgtatgtatccgtggaagtaattcgattgggtcaatcccacttcattaattgggacttacaaatgtactacgctgagaaagacactccggctaaagctaggacaactacgcttaacgagcaactaggccagatacattatattttcagcgacaaaactggcacacttacacagaatattatgacctttaaaaaatgctgcataaacggccagatctacggggatcatagggatgcatcacaacataaccacaataaaattgagcaagtcgatttctcgtggaatacttatgctgatggcaaattagctttttatgatcattacctgattgaacagatacagagcggaaaagaaccagaggtgagacaatttttctttctgctggcagtttgtcatacagtgatggtagatcgaacagacggccaattgaattatcaagccgcgtcaccagatgaaggtgcgttagtgaatgcagctagaaactttggatttgctttcttagcgcgcacacagaatacaataacaatatctgaacttggaactgaacgaacctacaatgtacttgctatcttagatttcaattctgatagaaagcgcatgagtattatcgttaggacaccggaaggtaatattaaactttattgtaaaggcgctgacaccgttatctatgaacgtcttcaccgaatgaatccgacgaaacaggaaacgcaggacgccctcgatatattcgcgaatgagacactccgcactctgtgcttatgttataaagaaatagaggaaaaagaatttacagaatggaataaaaaatttatggctgccagtgtagcttccacgaatcgggatgaggcattagacaaagtctatgaagaaattgaaaaagatttgattttactgggcgcaacagccattgaagataagttgcaagatggtgtgcctgaaacaatctctaaattggcaaaagcggatataaaaatatgggttcttactggcgataagaaggaaactgctgaaaatattggcttcgcttgcgagttactgacagaagatacgacgatctgctatggagaagatatcaacagcttgttacacgcaaggatggaaaatcaacgcaaccggggcggagtgtacgctaaattcgcacctccagtgcaggaatctttcttcccccccggcggcaatcgtgccttaataataacaggatcctggctgaacgaaatccttttagaaaaaaaaacgaaacgtaacaagatattaaaacttaagtttccgcgaacagaagaagagcggcgaatgcgcacacagtcaaaacgacggttagaagctaagaaagaacagcgccaaaaaaatttcgttgacctggcgtgcgagtgctccgcggtgatttgctgccgcgtcaccccgaaacagaaagcgatggtggttgacttagtgaaaagatataaaaaggctatcacgcttgctatcggagatggcgcaaacgacgtgaacatgattaagaccgctcatatcggcgtgggcataagcggccaagaaggaatgcaagccgtgatgagcagcgattattctttcgcacagtttagatatttgcaaagattgttgctggtccatggccgatggtcatatattcgtatgtgcaagtttttacggtattttttttacaaaaactttgcatttacactggtacatttttggtactctttttttaatggatactcagctcaaacagcgtatgaagactggtttattacgttatataacgttttatatacttctcttccagtactgctgatgggcctgttagatcaagatgtatctgataaattgagcctgcgttttccgggcctgtatatcgttggccagagggacctgctgtttaattataaacgttttttcgtatcgctgttacatggcgtgttaacatcaatgattttattttttatcccgctgggcgcgtatttacaaacggtcggtcaagatggtgaagctcctagcgattatcagtcgttcgcagtgacgatagcgagcgccctggttattacagttaacttccaaattggattggatacgagctactggacatttgtcaatgcctttagcatctttggatctatcgctttgtattttggcatcatgtttgacttccattcagcaggcatacatgtactgttcccgagcgcttttcaatttacaggaacggcatccaacgcgcttcgacagccgtacatttggcttacaatcattcttgccgtggcagtgtgtctgcttcccgtggtggctattcgtttcctgagtatgacgatatggccgagcgaatcagacaaaatccagaagcatcgtaaacgactgaaagctgaggagcaatggcaacggcgccaacaagtttttcgaaggggcgtctctacaagacgcagtgcttacgctttttcacatcaacgaggctatgctgatctgatttcgtctggaagaagtattagaaaaaaaaggagcccgctcgatgctattgtagccgatggtactgctgaatataggcgcactggcgattcg

SEQ ID NO: 318943 - DNA, 3753 bp, Artificial Sequence
  derived and/or modified sequence
atgagtactgagagggatagtgaaacaacctttgatgaggattcccagcccaacgatgaggtggtgccatacagtgacgacgagaccgaagatgagttagatgaccaggggtccgcagtggagcccgagcagaaccgggtcaatagagaagcagaggagaaccgcgagccattcagaaaggaatgcacctggcaagttaaagccaatgaccggaagtaccacgagcagccacattttatgaacaccaaattcctttgtatcaaggagtccaaatatgccaataacgcaattaaaacctataaatataatgctttcacatttatacccatgaacctgttcgagcagttcaagcgagccgctaacctttacttcctcgcactgttgattctgcaggccgtcccccagatctccaccctagcctggtatactaccctggtgcctctcctcgttgtgctgggggttacagcaattaaggacctggttgatgacgttgctcgccacaagatggacaaggagatcaacaatagaacctgcgaggtcatcaaagatggccgttttaaggtggcaaaatggaaagaaatccaggtgggcgacgtgatcaggctgaagaaaaacgattttgtgcccgctgacatcttgctattatccagttctgaaccaaactccctgtgttatgttgagaccgcagagctcgatggggagactaatcttaaatttaaaatgtccttggagatcacagaccagtatctgcagcgggaagatactctcgccacatttgacggctttattgaatgcgaggaacctaacaaccgcctcgacaagttcaccgggactttgttttggcgaaacacaagtttcccactagacgctgataagatcctgctgcgtggatgtgtgataagaaacaccgacttttgccacggattggtgatcttcgctggagccgacacaaaaatcatgaagaattccggcaaaaccaggttcaaaagaactaaaattgattatctgatgaactatatggtctatacaatcttcgtggtcctgattctgctgtccgccggcctggccatcggacacgcctattgggaagctcaggtcggcaatagtagttggtatctgtacgatggggaggacgacaccccttcttatcgggggttcctcattttttgggggtatattatcgttctcaataccatggtccccatctccttatacgttagcgtggaggtgatccggctcgggcagtcccatttcattaactgggacttgcagatgtattatgctgagaaagacactccagctaaagctagaaccaccaccttgaatgaacaactaggccagatccattacatcttttccgataaaactggcacattaacccagaatattatgacattcaagaaatgctgtattaacgggcaaatctatggcgaccatcgggatgcttctcagcataaccataacaagatagagcaagtagatttcagttggaacacctacgctgatggcaaattggccttctacgaccactacctgatcgaacaaatacagtccggcaaggaacctgaggttaggcaattcttcttcctgctggccgtatgccataccgtgatggtggaccgcaccgatggacagttaaactaccaggccgcaagcccagacgaaggggctttagtgaatgctgcaagaaattttggctttgccttcttagccagaacacagaataccatcaccattagcgagctgggcaccgagcggacctataacgtcctagccatcctggattttaactcagaccgcaaacgaatgtccataatcgttaggacccctgaagggaacatcaagctgtactgcaagggagctgacaccgtcatttacgagaggctgcatcgcatgaaccccaccaaacaggagacacaggacgccctggacatcttcgccaatgagaccctaaggaccctttgcctgtgctacaaagagattgaagaaaaagaatttaccgagtggaacaagaagtttatggctgcttccgtagcatccactaacagagatgaggcactggataaagtctatgaagagattgagaaggacctgattctcttaggcgccacagctatagaggataaactccaagatggcgtgccagagaccatttctaagcttgcaaaggccgacattaaaatatgggtgctgactggcgataagaaggagacagctgagaatataggcttcgcctgcgagttgttgacagaggacactaccatatgctatggggaggatataaactccttgctgcacgcacggatggagaaccagcgtaaccgaggcggagtgtacgctaaattcgctccccccgtacaggagtcattcttcccccctggcgggaaccgggcactgatcattacaggctcctggttaaatgaaattctcctagagaaaaagactaagaggaacaaaatcctgaaactgaagttcccaagaaccgaagaggagagaagaatgaggactcagagcaagcgccggctggaggccaaaaaggaacagcggcagaagaacttcgtagacctggcctgtgaatgttccgctgtgatctgctgtcgggtgacacctaagcagaaggctatggttgttgatctagttaaacggtataaaaaggctatcacattggccataggagatggagccaatgacgtgaacatgatcaaaaccgctcacatcggagtcggcatctctggacaggagggtatgcaggctgtcatgtcaagtgattattcctttgctcagttcaggtacctgcagcgcttactgctagttcacggtaggtggagttacattcgcatgtgcaaatttcttcggtacttcttttacaagaattttgccttcactctcgtgcatttctggtatagttttttcaatgggtacagtgcccaaacagcttacgaggactggttcataacactttacaacgtgctgtatacctctctgccagttttattaatggggctgctagaccaagatgtgtctgacaaactgtccttgaggttccccggcctttacattgtgggccagagggacctgctgttcaactataagagattttttgtaagccttttacatggagtcctgaccagcatgattctatttttcattcctctaggggcttacctgcagactgttggtcaagatggagaggctccctctgattaccagtcttttgcagtgactatagccagcgcactggtgatcactgtcaattttcagatcggactcgacaccagctattggactttcgtgaacgccttttccatcttcgggtctattgccctatacttcggcatcatgttcgactttcactccgccggtattcacgtgctgtttcccagtgcattccagtttacaggcactgcatctaacgccctccgccagccctacatctggcttacaataatcctcgctgtagctgtgtgtctgctgcctgtagtcgccatccgcttcctgtccatgactatttggccttccgaatctgacaagatacaaaagcaccggaaaagactcaaagcagaagaacagtggcaacgacgtcagcaggtgttcagacggggcgtttccacccgacgctccgcctatgccttcagtcatcaaaggggctacgctgacctaattagttcaggtaggagtatccgcaagaagaggagcccattagatgccattgtcgccgacggcaccgccgagtacaggcgcactggtgattct

SEQ ID NO: 318944 - DNA, 3753 bp, Artificial Sequence
  derived and/or modified sequence
atgagcactgagcgcgacagcgagactacttttgatgaggattcccagccgaatgacgaagtcgtcccttattcagatgacgagactgaagatgagcttgacgaccaaggaagcgccgtggaacctgaacagaatagggtcaaccgcgaggcggaagaaaatagagagccattccgcaaggagtgtacttggcaagtgaaggccaacgataggaaataccatgaacagccgcatttcatgaatacgaagttcctctgcataaaagaatcgaagtacgccaacaacgcgattaagacctacaaatacaacgctttcacctttattccaatgaatctgtttgagcagtttaagagagcagcaaatttgtactttcttgccctccttatcctccaagcagtcccgcaaatctcaaccctggcctggtacaccactcttgtccccctgctggtggtgctcggagtgacggcgattaaagacctggtggacgacgtcgcccgacacaagatggacaaagagataaacaacagaacttgtgaagttatcaaagacggtagatttaaggtggcaaaatggaaggaaatccaagtcggtgacgttattcggctgaagaagaacgatttcgtgcccgccgatatactccttctcagctcgtcagaacctaacagcctgtgttacgtggaaaccgctgagcttgatggggagactaaccttaagtttaagatgagccttgaaattaccgaccagtacctgcagcgtgaggacaccctggcgacctttgatggattcatcgagtgtgaagaacctaataaccggcttgacaagttcaccgggacccttttctggcggaatacttcgtttccacttgatgcagacaagatcctgcttagaggatgtgtgatccggaacaccgacttctgtcacggactcgtgattttcgcaggagcagataccaaaatcatgaagaatagcggtaaaactagattcaagcggaccaagattgattacctgatgaattacatggtgtacactattttcgtcgtgctgattcttctgtcggctggattggcgatcggacacgcctattgggaagcacaagtcgggaacagctcatggtacctctatgatggagaagatgatacccctagctacagaggatttttgattttctgggggtacataatagtgctgaataccatggtgccaattagcctgtacgtatccgtggaagtgataaggcttggccaatcgcactttatcaactgggatctccagatgtactacgcagagaaggacactcccgcaaaggcaagaaccactacgcttaatgaacagctcggtcaaattcattacatctttagcgataaaactggtaccttgactcaaaacataatgactttcaaaaagtgttgcatcaacggacagatttacggtgaccaccgggatgcgtcgcaacacaatcataacaagattgagcaggttgatttctcatggaatacctacgcggatggcaaattggccttttacgatcactacctcattgagcaaattcaaagcggcaaggaacctgaagtgcggcagtttttctttctccttgcagtgtgtcacaccgtgatggtggatcggactgatggacaactgaactaccaagcagccagcccagatgaaggtgccctggtcaatgccgcgagaaatttcggatttgcattcttggcacgaactcaaaacaccatcaccatatcagaactgggtaccgagaggacgtacaatgtcctggcaatactggacttcaattcggatcgcaaaaggatgtcgatcatagtcagaacccctgaagggaacatcaagctctactgtaagggagcagacactgtgatttacgaaaggttgcacagaatgaatcccaccaagcaggaaactcaagatgctctggatatctttgcaaacgaaaccttgcggactctttgtttgtgttataaggaaatcgaagaaaaggagtttactgagtggaacaaaaagtttatggcggcctccgtggcctcgaccaaccgcgatgaagcactggataaggtctacgaggaaatcgagaaggatctcatccttctgggcgcaaccgcgattgaagataagttgcaagatggagtgccggaaaccatctccaagctcgccaaggccgatatcaagatctgggtgctgaccggagacaagaaggagactgcggaaaacattggatttgcttgcgaactgctgactgaggacactacgatttgttatggagaggacataaactcccttcttcatgcacggatggaaaatcagagaaatcgaggtggagtgtacgcaaagtttgcgccccccgtccaagagagcttctttccacctggagggaaccgcgcgctgatcataaccggctcgtggctgaacgaaatacttcttgaaaagaaaacgaagcgaaataagattctgaaactgaagtttccacgaactgaggaagagcggaggatgaggacccagtccaagcgtcgtctggaagcgaagaaggaacaacgccaaaagaactttgttgatctggcatgtgaatgctcagcagtcatttgttgtcgcgttactccaaagcagaaggcaatggtggtcgatctggttaaacgctacaagaaggcaattacgcttgccattggggatggcgccaatgatgtcaacatgattaagaccgcacacattggtgtgggaatctcgggccaggagggtatgcaggcggtcatgtcatcggactactcgttcgcgcagtttagatacctgcaaagactgttgcttgtgcatggcagatggagctacattaggatgtgcaagtttctgcgatactttttctacaagaattttgccttcaccctggtccatttctggtattctttctttaacgggtattccgcccagacggcatacgaagattggttcataactctttacaacgtgctgtacacctcacttccagtgctgctcatgggactgctcgatcaagacgtttccgataagctgagccttagatttccaggcctgtacatagtcggtcagcgcgaccttttgtttaactacaaacgatttttcgtcagcctgcttcatggagtgttgacttcgatgattctgtttttcattcctctcggtgcctacttgcagaccgtgggtcaagatggagaagcaccttctgactaccagagctttgccgttactattgcatcagcactggtcattaccgtgaacttccagattggattggatacttcttattggactttcgtcaacgcatttagtatctttgggtcgattgctctttactttggaattatgtttgactttcacagcgccggtattcatgttctctttccttcagcttttcagttcactggcactgcatcaaacgcgcttcggcagccttacatttggcttaccatcattttggctgtggcagtctgcctcctgcctgtggtggctattcgctttctgtcgatgaccatctggccctccgaaagtgataagattcaaaaacatcggaaacgtttgaaggccgaagagcaatggcagaggcggcaacaagtatttagaagaggagtctctactagacggtccgcttacgcattctcccaccaacggggctacgccgatctgatctcatcaggccgatccattcggaaaaaacgctcacccttggatgccatcgtggctgatgggactgcagaataccgtcggacgggtgattct

SEQ ID NO: 318945 - DNA, 3753 bp, Artificial Sequence
  derived and/or modified sequence
atgtcaaccgaaagggatagtgaaactactttcgacgaggactcccaaccgaatgatgaggtggtgccctacagtgacgacgaaacagaggatgagttagacgaccaggggtccgccgttgaaccagaacagaaccgcgtgaaccgcgaggcagaggagaatcgcgaaccattccggaaggaatgcacgtggcaggtgaaggccaacgataggaagtaccatgaacagccccactttatgaacaccaaattcttgtgcataaaagagtctaagtatgccaataatgctatcaagacatataagtataacgcctttacatttatccctatgaacctatttgaacaattcaaaagggccgccaatctgtactttctcgccctcctgatactgcaggccgtgccccagatttcgaccctcgcctggtacactaccctggttcccctgctcgttgtgctgggagtcacagcgattaaggatctggtcgacgatgttgcacggcataagatggacaaagagattaacaatcggacctgcgaagtgatcaaagacggacgatttaaggtcgctaagtggaaggagatccaggtcggcgacgtgatcaggctgaaaaagaatgacttcgtgccagcggatattctgttactttcatcttcagaacccaacagcttgtgttacgtcgaaacagcagagctggacggcgaaactaacctcaagtttaagatgagcctagaaatcaccgaccaatacttacagagggaagataccttggccacctttgatgggttcatagaatgtgaagagcctaacaaccgcctggataagttcacaggtacgctgttttggaggaacacttctttccctctggacgccgacaagatcctactgcgaggctgcgtcattagaaataccgacttctgccacggactcgtgatctttgctggcgccgatactaagatcatgaagaactccgggaaaacccgcttcaagcgcactaagattgactatctcatgaattatatggtgtacacaatctttgtggttttgatcctgttgagcgcgggcctggcaataggacatgcatattgggaagctcaggtcggaaactcgtcatggtatctgtatgatggggaagacgacaccccatcctacagaggttttctgattttctggggatatattattgttctgaacaccatggtccctatttcactctacgtctcagtcgaggttattaggctcgggcaaagccacttcattaattgggacctgcagatgtactatgccgaaaaagatactccagccaaggcccgtacgaccactctaaacgaacagttaggccagatccattacattttcagtgacaagacagggacgctgacccagaatataatgacttttaagaagtgttgtatcaacggccaaatttatggggatcacagagatgcatcgcagcacaaccacaacaagattgaacaggttgactttagctggaatacctacgcagacggcaaattagccttctacgatcattacctgatcgaacagatccagtcagggaaagagcctgaggtcagacaattctttttcctcctggccgtgtgtcacactgtcatggttgatcggactgacggccagcttaattatcaggctgcatctccggatgagggagccctcgtaaacgccgctcgcaattttggctttgcatttctcgccagaactcaaaacaccataacaattagtgagctgggcaccgaacgtacctacaacgttctggccatccttgactttaactccgacagaaaaagaatgagcatcattgtgagaactcctgagggaaacatcaaattatactgtaagggcgccgatactgtgatctatgagcggctgcataggatgaaccctaccaaacaagagactcaggatgctctggacattttcgcgaacgaaaccctgagaaccttatgtctgtgttataaagaaatcgaggaaaaagaattcacggagtggaacaaaaaatttatggcggcatcggtggcaagcacaaacagagacgaggccctggacaaggtctacgaagagatcgagaaggacctgatcttgctgggtgccacagcaatcgaggacaagctccaggatggggtcccggagacgatttccaaactcgccaaggccgatattaaaatctgggtgctgaccggcgataagaaagagacagccgagaacatcgggtttgcatgtgaactgctgaccgaggacacaactatctgctatggagaagacattaattccctcctgcacgcgagaatggaaaaccagcggaatcgaggcggagtgtatgcaaagttcgccccacctgtgcaggagagcttttttccacctgggggcaatagagccttaatcataacgggcagttggctaaatgagattctacttgaaaaaaagaccaagaggaataagatactgaagctgaagttccctcgcacagaggaggaaaggcggatgcggacacaaagtaagaggagactcgaagccaagaaggagcagcgtcaaaaaaacttcgtcgacctcgcatgtgagtgcagcgccgtgatctgttgtcgcgtgacacccaagcagaaggccatggtggtggacctcgtgaagagatacaaaaaagccatcactctggccattggggatggtgccaatgatgtgaacatgatcaagacagcgcacatcggcgtcgggatctcaggccaggaaggaatgcaggccgtgatgagctctgactattctttcgctcagttccggtatctgcagcgtttactcttggtgcatggccgctggagttacattcgtatgtgtaagtttttacggtactttttctataagaattttgcatttacattggtgcacttttggtacagctttttcaatggctactctgctcaaaccgcatacgaggactggttcataaccctttataatgttctctatacaagcctgcccgtcttactgatgggccttttggaccaggacgttagtgataagttgagtttaaggttccccgggctatacatcgtgggccaacgggatctgctgttcaactataagcgcttctttgtgtctctgttacacggggtgctaacatctatgatcttgttcttcatcccactgggcgcatatctccagacagttggccaggacggagaggctccctctgattatcagtcgtttgccgtgacaatcgccagcgccctggttatcacggtcaatttccagattggcctggacacatcgtattggaccttcgtcaacgcctttagcatcttcggatccatagcactttattttggcattatgttcgacttccactcggcaggcatccatgtcttgtttccctcggctttccagtttacagggaccgcttccaatgcattgcgacagccttacatttggctaaccattatcctggccgtggccgtctgcctgctgccggtggttgccattaggttcttatctatgacaatctggccatcagaatccgataaaatccagaagcacaggaagcggctgaaagcggaggagcagtggcaacggcggcagcaggtctttcggaggggagtgtcaacgagaaggtctgcatacgccttcagccatcagcgagggtatgccgacctgataagttcaggcaggtccatacggaagaaaagatcacctctggacgctatagtcgcagacggaacagctgagtataggaggactggggatagt

SEQ ID NO: 318946 - DNA, 3753 bp, Artificial Sequence
  derived and/or modified sequence
atgtcgactgagcgcgacagcgagacgactttcgatgaggactcacagcccaatgacgaggttgtcccctacagtgacgacgagaccgaggatgaactggatgatcaggggagcgccgtggaacctgaacagaatcgggtgaaccgtgaggcagaggagaatcgggagcccttccgcaaggagtgcacatggcaggtgaaagcgaacgacaggaagtaccacgagcagccccattttatgaacaccaagtttctgtgcatcaaggagtcgaaatacgctaacaacgccattaagacgtataaatacaacgcattcacatttatccctatgaacctgtttgaacagttcaagagagcagccaacctgtatttcctggctctgctgattctgcaggcagtcccccagatcagtacccttgcatggtacactacattggtcccgcttctcgtagtgctaggggtgactgcaataaaggatctcgtggacgacgtcgctagacataagatggacaaagagatcaataaccgcacctgcgaggtgattaaggatggccgcttcaaggtggcaaaatggaaggaaattcaggtgggcgatgtgattcgcctgaagaaaaacgattttgttcccgccgacatcctgctcttatctagttccgaacccaattctttgtgttacgtggagaccgccgagctcgatggggagactaatttgaagttcaagatgtcgctagagattactgaccagtatctgcagcgagaggatacactcgctaccttcgacgggttcattgagtgtgaagaaccaaacaatcgcctcgataagtttaccggaaccctattttggaggaatacttctttccccctggatgccgacaagatcctgctacggggatgtgtgattaggaacacagatttttgtcacggtctggtgatttttgccggagcagacacaaagattatgaagaatagcgggaagactcggttcaagagaaccaaaatcgactacctaatgaactacatggtgtataccatctttgtagtgttgatcctcctctccgccggtctggctatcggccacgcttattgggaggcacaggttggaaattcctcctggtatctgtacgatggcgaggatgacactccatcatacaggggatttcttattttctggggttacatcattgtcctaaacaccatggtgccaatttctttgtatgttagtgtggaagtgatccgtctcggtcagtcccacttcattaactgggatctccagatgtattacgccgagaaagacactcctgcaaaagccaggacaactaccctcaatgaacagttaggacagatccattatattttctctgacaagacaggtaccctgacacagaacatcatgactttcaagaaatgctgtatcaatggtcaaatatacggtgatcaccgggacgccagccagcacaaccataacaaaatagagcaggtcgacttctcatggaacacatacgctgatggtaagctcgccttttatgatcactatctgatcgagcaaatccagtccggaaaagagcccgaggtcaggcagttctttttcctgttggcagtgtgccacaccgttatggtggatcgtaccgacggccagctgaattatcaggctgctagtccggatgaaggggccctagtgaatgcggcaagaaacttcggattcgcgtttttagccagaacacagaatacaatcacaatttccgagctcggcacagagagaacctacaacgttctggctatcctggatttcaattccgaccgcaagagaatgagcataatcgtcagaacccctgagggaaatatcaaactctattgtaagggcgcagacaccgtcatctacgaacgactgcaccggatgaacccaacaaaacaagagacccaggatgccctcgacatatttgctaatgaaacactgagaacgctttgcctgtgctacaaagaaatagaggagaaagagttcacagagtggaacaaaaagtttatggccgctagtgtggctagcacaaatcgcgacgaagccctggataaggtctatgaggagatcgagaaagacctcattctcttgggggctaccgccatcgaagacaagttgcaggacggggtgcctgagactatttccaagctcgcaaaggccgacatcaaaatctgggtgctaacaggggacaagaaggaaactgcagaaaacatcggctttgcatgcgagcttttaactgaagacacaaccatctgctatggagaggatatcaactctctgctgcacgctcggatggaaaaccagaggaatcgcggcggcgtgtacgctaagtttgctccccctgtgcaagagtctttcttcccacctggggggaatagggccctcataatcaccgggagctggctgaatgagattttgctggagaagaagaccaaacgaaacaagattttaaaattgaaatttccccgaacggaagaagaacgacgcatgaggacccaatccaaaagacggttagaggcgaagaaagagcagcggcagaagaacttcgtggacttagcttgtgaatgctccgctgtgatatgctgtagggtgaccccaaagcaaaaggccatggtggtggacctggtgaaaagatacaagaaggcaattactctcgccattggtgatggcgccaacgacgtgaacatgattaagacagcccatatcggagtgggaatatcaggccaggaaggcatgcaggccgttatgagtagtgactacagtttcgcacagtttagatacctgcagcgcctgctgctggttcatggccggtggtcatacatcagaatgtgtaaattcctgaggtactttttctacaaaaatttcgcattcacactggttcacttttggtactcgttcttcaacggatacagtgcccagacggcctatgaggactggttcatcaccctgtataacgttctctatacatcactcccagttctgcttatgggcctgttggaccaggatgtgtctgacaagctgagcctgcgcttccccggactctatatcgtgggccagcgcgacttgttgtttaattacaaaaggttctttgtttccctcctgcatggcgtcttgactagtatgatcctattcttcatcccgctcggcgcttacttgcaaacggttggacaagatggggaggccccttccgactatcagtcattcgccgtgacgattgccagtgctctagtgatcaccgttaacttccagatcggactcgacacctcctactggacttttgtaaatgctttctctatctttggttctatcgcattgtacttcggcattatgtttgatttccattccgcagggatccatgtcctattccctagcgcttttcaatttacagggactgcatccaacgccctgcgacaaccctacatctggctcactattatcttagctgtggcggtttgcctcctccccgttgttgcaatccggttcctgtctatgacgatctggcccagcgagtcggacaaaattcaaaagcataggaaaagactgaaggcagaagaacagtggcaacgcagacagcaggtgttcaggaggggagtcagtactagacggtctgcttacgctttctcacatcagagaggttatgcggatctgatctcaagcggacgcagtattcggaagaagagatctccccttgacgctatagtcgcggatggcaccgcggagtataggaggacaggagactct

SEQ ID NO: 318947 - DNA, 3753 bp, Artificial Sequence
  derived and/or modified sequence
atgtccactgagcgtgattccgagacgaccttcgacgaggacagccaaccgaacgatgaggtcgtgccgtactccgatgatgagactgaggacgagctcgacgaccaaggatccgcagttgaaccggaacagaaccgcgtaaatagggaggctgaggagaatagggaaccatttcgtaaggagtgcacctggcaagtaaaggccaacgatcgaaagtatcacgagcagccccactttatgaacacaaaatttctgtgcatcaaggagagcaaatacgctaacaacgcgattaaaacctataagtataacgcgtttactttcatccccatgaacctgttcgagcagtttaaacgcgcagccaacctgtattttctggcattgctgatactgcaggccgtgccacagatctcgacgctggcctggtacactacacttgtgccactcctcgttgtcttgggagtgacggcaatcaaggatcttgtggacgacgtggcgaggcataagatggacaaagagatcaacaatagaacttgcgaagtcataaaagacgggcggttcaaggtggcgaagtggaaggaaatacaggtgggtgacgttattcgtctgaagaagaatgatttcgtaccggccgacatcctgctgttgtcttcatcggagccaaattctttgtgctacgttgagaccgccgagcttgatggcgagacaaacctgaagttcaagatgtccttggagattactgaccagtatctgcagcgcgaggacacgctggcaaccttcgatggattcatcgagtgtgaggaacccaacaaccgtcttgataagttcaccggaacactgttctggaggaacactagttttccactcgacgcagacaagatattactccggggatgcgtgatcaggaatactgacttctgccacggcttggtcattttcgccggagctgacaccaagatcatgaaaaacagcggcaaaacccgcttcaagcgaaccaagatcgattatcttatgaactatatggtgtacacgatttttgttgtgctgatactgctcagcgcaggcttggctatcggtcacgcgtactgggaagctcaggtcggtaattcgtcttggtacctatatgatggagaagacgatacaccatcataccggggatttttgattttctggggctatattatcgtgctgaacaccatggtgccaatctccctgtatgtgagcgttgaggtcatcagacttggccagtcgcactttataaactgggacctgcagatgtactacgcggagaaggacaccccagccaaggcgaggacaactactctgaacgagcagctcggccaaatacactacatcttctccgacaagacggggacgcttacccagaacattatgacctttaagaagtgctgtattaatggacagatttacggagatcaccgcgacgcctcccaacacaatcacaacaaaatcgagcaagtcgacttctcgtggaatacatatgcggacgggaagctcgccttctacgatcattacctgattgaacagatacaatcgggcaaggaaccggaggtccgccagttcttcttcctgttagcagtgtgccataccgtgatggtagatcgaaccgacggccaacttaactatcaagcggctagcccagatgagggagctctagtaaatgctgcccgaaacttcggcttcgccttcttggctaggacccagaatacgatcacgattagtgagctgggcaccgagcggacctacaacgtattggcaatcctggatttcaatagtgaccgcaagcgaatgtcgatcatcgtgcgcacccctgagggaaacatcaagttgtactgcaaaggagccgatactgtaatttacgagagactgcaccgcatgaacccgacaaagcaagagacccaggacgcactcgatatcttcgccaatgaaactttgcgaacgctctgcctgtgctataaagagatcgaggaaaaagagttcacagagtggaataagaagttcatggctgcctctgtggcgtctacgaacagagatgaggctctcgataaagtttacgaggagattgagaaggatctgatactgctgggcgcgacggcgatcgaggacaagctccaggacggcgttcccgagacgattagcaaattggcgaaagccgatatcaagatctgggtacttactggagataagaaagagaccgccgagaacatagggttcgcctgcgagctgcttacggaggacacgacgatatgttacggagaggatatcaactctctgctacacgccaggatggaaaaccagcgaaaccgcggcggcgtgtacgccaagtttgctcccccagtgcaggagtccttcttcccaccaggaggcaatcgtgctctgattataactggatcctggctcaatgaaatcctactcgagaagaagactaagcgcaacaaaattttgaaactcaagttcccccgaaccgaagaagagcgtcgcatgagaacacagtcaaagaggcggctggaggccaagaaggagcagcgtcaaaagaacttcgtcgatctcgcatgcgaatgcagtgccgttatctgctgccgtgtcacgcccaagcagaaggccatggtggtggacttagttaagcgatataagaaggccattaccctcgcaatcggtgacggcgcgaacgatgtgaatatgatcaagacggcccatatcggtgtgggaatctccggccaggaaggtatgcaagcagtcatgtcaagcgattattcgttcgctcagtttcgctacctccaacggctgctcctggtccatggcagatggtcctatatccgtatgtgcaagtttcttagatatttcttctacaaaaatttcgcctttaccttggtgcatttttggtactcctttttcaacggatacagcgctcaaaccgcctacgaagattggttcattactctgtataacgtgctttatactagtttgcccgttttgttgatgggactattggaccaagacgtgagcgataaactctccttaagatttccaggtttatacatcgtcggccagcgagacctcctgtttaattacaagagattttttgtcagcctgttacacggtgtgctcacgtctatgatcctattcttcattccgttgggcgcatatctgcagacggttggccaggatggtgaggctccatcagattaccagtccttcgcagttaccatcgcgagcgcccttgtgataaccgtcaattttcagataggcctcgacacgtcgtactggaccttcgtcaatgccttctcaatcttcggcagtatcgccctttacttcggcatcatgttcgatttccattcagctggaatccacgtgttgtttccgtcggctttccagttcaccgggacagcctctaatgcgctgaggcagccatatatctggctcaccattatcctcgccgtggcggtgtgcctgctccccgtggtcgcaattcgtttcctcagcatgacgatatggcccagcgaatccgataagattcagaaacaccgcaagcgactcaaagccgaggagcaatggcagcgccgacagcaggtgtttcgacgcggagtctcaaccagaaggtctgcctacgccttctcgcatcagagaggctacgccgacctgattagttcgggaaggtctattcggaaaaagcgtagccccctggatgctatcgtggcggatggcacggccgagtaccgtcgaacaggcgattcg

SEQ ID NO: 318948 - DNA, 3753 bp, Artificial Sequence
  derived and/or modified sequence
atgtctaccgaacgtgattcagaaacaacatttgacgaggattcccaaccaaatgacgaggtggtgccgtactcagacgatgagactgaagacgagttggacgaccagggtagcgcggttgagcctgaacagaatcgcgtaaaccgggaggccgaggagaatcgcgagccatttcgtaaggagtgtacctggcaggttaaagctaatgaccgcaagtatcatgaacagccccatttcatgaacacgaagtttctgtgcattaaggagtcaaagtatgccaacaacgccatcaagacctataaatataacgcattcacatttatcccaatgaacctgttcgagcagtttaagagggctgctaacctctattttttggccctgctcattctccaggccgtgccccagattagcacgctggcttggtacacaactttagttccgttgctagtggtccttggtgtgaccgccatcaaagatttggtcgacgatgtggcacgtcacaaaatggataaggaaatcaataaccgaacatgtgaagtcatcaaggatggacggttcaaggtggctaagtggaaagagatccaggtaggtgacgtgatccgcctaaagaaaaatgactttgtacctgccgacatcctcctactgtcttcatccgagcccaattcactgtgctatgtcgaaaccgctgaactcgacggcgaaactaacttaaagtttaaaatgtccttggaaattacggaccaatacctgcagcgggaggacaccctggcaacatttgatggattcatcgaatgtgaagaaccaaacaatcgcttggacaaatttactggtaccttattttggcggaatacaagctttccgctagatgctgataaaatcctgcttagaggatgcgtaatcaggaacaccgacttctgccacggacttgtgattttcgcaggtgcagatacaaagatcatgaaaaattcaggcaaaaccagatttaaacggactaagattgactatcttatgaactatatggtgtacactatcttcgtggtcttgattttattgtccgccgggcttgccattggccacgcctactgggaggcacaggtcggcaatagcagctggtatttgtatgacggtgaagatgacacaccctcttatcgcggatttctgatcttttggggctatattattgtgcttaacaccatggtgcccatcagtctgtacgtatccgttgaagtgattcggttaggtcagtcccacttcatcaactgggatcttcagatgtactatgccgaaaaagatacccctgctaaagcgcggacaaccactctaaatgagcagctgggtcaaattcactatatcttctcagataaaaccggcacactgactcagaacattatgacattcaagaagtgttgcataaatggacaaatatacggcgaccatcgagacgcttcccaacacaatcacaacaagattgaacaggtagacttctcctggaatacatacgccgacggcaaactcgcattctacgaccactatttgattgaacaaattcagtcagggaaggaaccggaggttaggcagtttttctttctccttgcggtgtgtcatactgtgatggttgaccgcaccgatggacagctcaattaccaggctgcctcacccgatgagggagctctcgttaatgccgcccggaatttcgggtttgcctttctggccaggactcaaaacactattactatttccgagttagggacagagcgtacctataacgtgctggcaatccttgacttcaactctgataggaagcggatgtcaatcatagtccgcacccccgaaggaaacatcaaattatattgtaagggggctgataccgtaatatacgaacgcctgcaccggatgaaccccaccaaacaggagacgcaggatgcactcgatatctttgctaacgaaacacttcggacactatgcctctgctacaaggaaattgaggagaaagaatttactgaatggaataagaagtttatggccgcttccgtagccagcaccaaccgagatgaggccctggacaaggtgtatgaagagatcgagaaggatttgattctgctaggcgcaaccgctatcgaggacaaactacaggatggggtcccagaaactatatcaaagctagcaaaggccgacatcaagatctgggttttgaccggtgataagaaagagaccgcagaaaacatcgggtttgcgtgcgaattactgaccgaggacacaaccatctgctacggcgaagacataaactccctgttgcatgcccgaatggagaaccaaaggaaccggggtggagtgtacgcgaagtttgcaccgcctgtccaggaaagtttcttcccccccggtgggaacagggctctgatcataacagggagctggctgaatgagatcctattggaaaagaaaaccaaacgcaacaagatccttaagctgaaatttccgagaacagaggaggagcggcgaatgagaactcagtccaaaaggcggctggaagcgaagaaggagcagcgccagaaaaacttcgtggacctggcatgcgaatgcagtgctgtgatctgttgccgagtgaccccgaaacagaaagctatggtggtggacttagtgaaaagatataagaaggccatcactctggctattggagatggcgcaaacgacgttaacatgattaagacggcacacatcggagtgggcatctctggccaggaaggcatgcaggcggtgatgtcaagcgattattcgttcgcccagttccgatacttacaaaggcttctgctcgtgcacggcagatggtcgtacattcgcatgtgtaagtttctgcgttactttttctataagaacttcgctttcacacttgtccacttttggtattccttttttaatggctattctgcccagacagcatatgaggactggtttataacactatataacgtgctgtatacatctttacctgtcctattgatgggactgctggatcaggacgttagtgataagctgtcgttacggttcccaggactctacatcgtgggccagagagatctgttgtttaattacaagagattttttgtgtccctgctgcacggagttctgacgtctatgatattgttctttattccgctcggcgcatacctgcagaccgtgggacaggatggggaggctcctagcgactaccagtcattcgcagttacaattgcaagtgctctcgtgattacagttaactttcagataggccttgatactagctactggacctttgttaatgccttcagtatcttcgggagcatcgccctttatttcggcataatgtttgacttccactctgcgggcatccatgtgcttttcccctctgcctttcagttcacggggaccgcgtctaatgcgttgcggcaaccatatatatggctgaccatcattctggcggtggccgtatgcctgctgcccgtggtcgccatcaggttcttgagtatgacaatatggccatctgagagtgacaaaatccagaagcatagaaaaagactaaaggccgaggagcagtggcagcggcgccagcaggtgttccggcgaggcgtgagcaccaggcggagtgcatacgccttttcacaccagaggggatacgccgatctcatatctagcggtcgaagtattaggaagaagcggtcacctctggatgccatcgtggccgatgggacagctgagtaccgacggacaggagattct

SEQ ID NO: 318949 - DNA, 3753 bp, Artificial Sequence
  derived and/or modified sequence
atgtcaaccgagcgggatagcgagacaaccttcgatgaggattctcagcctaatgatgaggtggttccgtattccgatgacgaaacagaggatgaactagacgaccagggatcagccgtggagcccgagcaaaacagagtgaaccgcgaagcggaagagaaccgggagccgtttcgaaaggagtgtacatggcaggtcaaagctaacgatagaaaataccatgagcagccccactttatgaataccaagttcctgtgtatcaaggagtcaaagtacgccaacaatgcaattaagacttataagtataacgcattcaccttcattccgatgaatctgttcgaacaattcaagagggctgccaacctctactttctcgcgctgctgattctgcaagctgtcccccagattagtacactcgcctggtataccacattagtacctctgctcgtggtcctgggcgtgacagcaatcaaagacttggttgacgacgtggcaaggcacaaaatggataaggagataaacaaccgcacctgcgaggtgatcaaggacggaaggtttaaagttgctaagtggaaagaaattcaggtgggcgacgttattagactgaagaagaacgatttcgtgccagccgatatcctgcttttgagcagcagcgaacctaacagtctgtgttacgtggagacagcggagctggacggcgagacaaatttgaagtttaagatgtctctcgagatcaccgaccagtacctccagagggaggacactctggctacgtttgacggtttcattgagtgcgaagaaccgaataaccgcttggacaaattcactggcacactcttttggaggaacacatctttcccactggacgctgacaagattctgttacgtggctgtgtaatcaggaataccgatttctgtcacggcctggtaatcttcgccggtgcagacaccaagattatgaaaaactctggaaaaacgcgattcaaacgcacaaaaatcgactacttaatgaattatatggtctacaccattttcgtcgtgttaatacttctgagtgccggcctggcgataggccatgcttactgggaggctcaggttggtaattcctcttggtatttatatgacggcgaggacgacactcccagctatagggggtttctgatcttttgggggtatatcattgtgttgaatacaatggttcccatttcactgtatgtgtctgtcgaggtgattcgactcgggcagtcacatttcataaattgggacctacaaatgtattacgctgaaaaagacactcccgcaaaggctcggactaccaccctgaatgagcagttgggacaaatccattacatcttctccgacaagaccggcaccctgactcaaaacatcatgacatttaagaaatgctgcattaacggtcaaatctacggggatcaccgcgacgcttctcagcacaatcataataagatcgagcaggtggacttcagttggaatacgtacgccgatggcaagctggcattctacgatcactatctcatcgaacaaatacaatcagggaaagagccagaggtccgccagtttttctttctgcttgctgtgtgtcacaccgtgatggtggaccggacggacggtcagctcaactaccaggctgcatcgccagacgaaggggcgctggtgaacgcagctagaaacttcggctttgcattcctggcccgtacccagaacaccattaccattagcgaactgggaaccgaacgtacttataacgtactggctatcttggactttaacagcgaccgaaagcgaatgagcatcatcgtgagaactcccgaaggcaatataaagctgtattgcaagggcgctgataccgtgatttacgagaggttgcatcgcatgaaccccaccaaacaggagactcaggacgccctggatatttttgcgaacgagacactgcgcaccctctgcctgtgctacaaggaaatcgaggagaaagaatttaccgagtggaataagaaattcatggcggcaagtgttgcttcaactaatagagatgaagccctggacaaggtatatgaggaaattgagaaagacttgattttgcttggagcgaccgctattgaagataaacttcaggacggcgtgccagagacaatttccaagctggccaaggccgatattaagatttgggtgttaacaggcgacaagaaggagaccgcagagaatattggattcgcatgcgagttgctgactgaggataccaccatctgttatggtgaagacattaactctctgttacatgcacgtatggaaaaccagcggaaccgcggcggcgtgtatgcaaaattcgccccacctgtgcaggagtctttcttcccacctgggggcaatcgggctctgattattactggttcctggctgaatgaaatcctgcttgagaaaaagaccaagcgcaacaagatcctcaaattgaagtttccacggactgaagaagaacgtaggatgcgtacccagtccaaaagacgactggaggccaagaaggaacagcgccagaaaaacttcgtggatcttgcatgtgagtgctctgcggtgatttgctgccgcgtaactccaaaacagaaggcaatggtagtagatctggtaaagaggtacaagaaggcaattacgctggccatcggtgatggagctaatgatgttaatatgattaagaccgcccacatcggtgtcggtatctccgggcaagagggaatgcaagcggtgatgtcgagtgattattcattcgcacagttccgctacctgcagaggctactgctcgttcacggacgttggtcgtatattcgcatgtgcaagttcctacgctactttttttataagaacttcgctttcacactggtgcacttctggtactcatttttcaatggttactctgctcagacagcatacgaggactggtttatcacactgtacaacgttctttatacatctctcccagttcttctgatgggcctgctagatcaggacgtttccgataagctgagcctgcgttttccggggctctatatagtgggccagagggatctgctttttaattacaagcgtttctttgtctcactgctgcatggagtgctcacttccatgattctgtttttcatccctctgggggcttacctgcagacggtcggtcaagatggcgaggctccatccgactatcagtccttcgctgttacaattgcgagtgccctggtgatcacagtcaatttccagatcggcctggacacctcttattggacattcgtgaacgccttttccattttcggctcaatcgctttgtactttggtattatgtttgatttccattccgctggaatccatgtgttgtttccctcagccttccagttcacagggaccgctagcaatgccttgcgacagccttacatctggttgaccattatactggcagtcgccgtgtgtctgctgcccgtggtcgctattaggttcctgtccatgacaatctggccttccgagtcagacaaaatccaaaagcacagaaaacggcttaaggccgaggaacaatggcagaggagacaacaggtgttccgaaggggtgtgagcaccaggcgctccgcttatgcgttctctcaccagcgaggctacgcagatcttatctcgagtgggcgtagcatccggaaaaaacggtccccactggacgccattgtggcggacggaactgcagagtaccgtagaactggggacagc

SEQ ID NO: 318950 - DNA, 3753 bp, Artificial Sequence
  derived and/or modified sequence
atgtccactgaaagagactcggagacgaccttcgatgaagattcgcaaccaaacgacgaggtggtcccctactccgacgacgaaaccgaggacgagctcgatgatcagggatccgccgtggaacctgaacagaacagagtgaaccgggaagcggaagaaaaccgcgaacctttcagaaaggaatgcacctggcaagtgaaggccaatgacaggaaataccatgagcagcctcacttcatgaacaccaaatttctgtgcatcaaggaatcgaagtatgctaacaatgccattaagacctacaaatacaacgccttcacctttatcccgatgaacctgtttgaacagttcaagcgcgccgccaatctctacttcctcgccctgttgatcttgcaggccgtgccgcagatctcaaccctggcttggtacactaccctggtcccactgttggtcgtcctcggagttacggccatcaaagatctggtggacgatgttgccagacataagatggataaggaaatcaacaatcggacttgcgaggtcatcaaggatggcaggttcaaagtggcgaaatggaaagaaatccaagtcggagatgtcatccgcctgaagaaaaacgattttgtcccggccgacatacttctgctgtcctccagtgaacctaacagcctgtgctacgtggagactgccgagctcgatggtgaaaccaacttgaagtttaagatgagcctggaaatcactgatcaatatctccaaagagaggacaccctcgctaccttcgatggattcatcgaatgcgaggaacctaacaaccggctggacaaattcacggggactctgttctggagaaacacttccttcccgttggatgcagacaagattctcttgcgcgggtgcgtgatccgcaacaccgatttctgccacggacttgtgattttcgccggggctgataccaagatcatgaagaattcgggcaagaccagattcaaaaggaccaaaatcgactacctgatgaattacatggtgtacacgatcttcgtggttctgatcctcctgtccgcgggcctcgccattggacacgcctactgggaagcccaggtgggaaattccagctggtacctttacgacggggaggatgatactccgtcataccgtggatttctcatcttttggggttacatcatcgtgttgaacaccatggtgccaatctcgctgtacgtctccgtggaagtgatcagactcgggcaatctcacttcataaactgggatttgcaaatgtactatgccgagaaggacaccccggccaaggctcgtaccaccaccctgaatgaacagttgggccagatccactacatcttcagcgataagaccggcactctgactcagaatatcatgacctttaagaagtgttgtatcaacggccagatttacggagatcatcgcgatgccagccagcataaccataacaagatcgagcaggtcgatttttcctggaacacctatgctgacggaaagctggcattctacgaccattatctgatcgaacagatccaatccggaaaagaaccggaagtgcgccagttcttcttcttgctcgccgtgtgtcacactgtgatggtggaccgaaccgatgggcagttgaattaccaggcagcctcgccagacgagggcgccctggtcaacgcggcccgcaacttcggatttgcgtttctggcacggacgcagaacaccatcactatctctgaattgggaactgagcgcacgtacaatgttctggccatcctcgactttaacagtgaccggaagaggatgagcattatcgtgcggaccccggaaggtaacattaagctctactgcaaaggagctgataccgtgatttacgaacgactccaccgcatgaaccccaccaagcaagaaactcaagacgccctggacatcttcgcgaacgaaactctgagaactctctgtctgtgctacaaggagatcgaggaaaaggagtttactgaatggaataagaagttcatggcggcctccgtggcatccactaatcgcgatgaagcgctcgataaagtgtacgaagaaattgaaaaggacctgatcctgctcggggcaaccgccattgaggacaagctgcaggacggggtgccagaaaccatctcaaagctggcaaaggcggacatcaaaatctgggtcctgactggagataagaaggagactgcggagaacatcgggtttgcctgcgaactgctgaccgaggacaccaccatctgttacggagaggacataaacagcctcctgcatgcccgcatggagaaccagcggaatcggggcggagtttacgcgaaattcgcaccgccagtgcaggaatccttcttccctccgggcggtaatagggctctcatcatcactggtagctggttgaacgaaatcctgctcgaaaagaaaacgaaacgcaataagatcctcaagttgaagttcccgcgcactgaagaagaacggaggatgcggacccagtccaagcggcggttggaagccaagaaagagcaaagacagaagaattttgtcgacctggcgtgcgagtgctcggccgtgatctgctgtcgcgtgacccctaaacaaaaagccatggttgtggatctcgtgaagcgctacaagaaggcaattactctggcgatcggcgatggagctaacgacgtcaacatgatcaagaccgcgcacattggtgtcggaatttcgggtcaagagggaatgcaggcggtcatgtcgtccgactactcgttcgcccagttccgctacctgcaacgccttctgctcgtgcacggaagatggtcatacatccgcatgtgcaagtttcttagatacttcttctacaaaaactttgccttcaccctcgtccacttttggtacagctttttcaacggttacagcgcgcagaccgcctacgaggactggttcatcactctctacaatgtcttgtacacgagccttcctgtcctgctgatgggactgctggaccaggatgtgagcgacaaattgtcgctgaggtttccaggtctgtacatcgtcggacagcgcgacctcctgttcaactacaagaggttcttcgtctcactgctgcatggcgtgctcacttccatgatcctctttttcatccctctcggagcttacttgcaaacggtcggacaagacggagaggccccatccgattaccagtcatttgccgtgactatcgcatcggccttggtgattactgtgaacttccagatcggccttgatacgtcgtactggacctttgtgaacgcattcagcattttcggctcgatcgcgctgtacttcggtatcatgttcgatttccatagcgctgggattcatgtgctcttcccgtcggcattccagttcaccggaaccgcctcgaatgctcttcgacaaccatacatctggctgactattatcctcgccgtggccgtgtgcctcctcccggtggttgcgatccgcttcttgtcgatgactatctggccgtcggagtcggacaagatccagaagcatcggaagcgcctcaaagctgaagaacaatggcaacgtcggcaacaagttttccgcagaggagtgagcactcgccgcagcgcgtacgcattctcgcaccagcgcggatacgccgacctgatctcctcaggacgctccattcgcaaaaagcgttccccgctcgatgcgatcgtcgccgatggaacggctgaataccgccggaccggtgactcg

SEQ ID NO: 318951 - DNA, 3753 bp, Artificial Sequence
  derived and/or modified sequence
atgtcaacggagagggattcagaaaccactttcgatgaggatagccagccgaacgacgaagtggtgccttactccgacgatgaaaccgaagatgaacttgacgatcaaggatcggctgtggaacctgagcagaaccgcgtcaaccgggaggctgaagaaaacagagagccttttagaaaggaatgtacgtggcaggtcaaggctaacgaccgcaagtaccacgaacagcctcatttcatgaacaccaaattcctgtgcattaaagaatccaagtacgcgaacaacgcaatcaaaacctacaagtacaacgccttcaccttcatcccaatgaacctttttgaacaattcaagagggccgccaacttgtacttcctcgcgctgttgatcctgcaggccgttccgcaaatctcgactctggcctggtacaccaccctcgtgccgctgctcgtggtgctgggcgtcaccgccatcaaggacctcgtcgacgatgtggcccgccataagatggataaagaaatcaacaaccgcacctgcgaggtgatcaaggacggacggtttaaggtggccaagtggaaagaaatccaagtgggagatgtcattagactgaagaagaacgatttcgtcccggcagacatcctgctgctgtcatcgtctgaaccgaactccctgtgttacgtcgagactgcggagctggacggagaaaccaacctcaagttcaagatgtctcttgaaatcactgaccaatatctccagcgcgaagatacgcttgctactttcgacggctttattgaatgcgaagaaccgaacaaccggctcgataagttcaccgggaccctcttttggcgcaacacttcttttccactcgatgccgacaaaattcttttgcggggatgcgtgataagaaacactgatttctgccacggactggtgattttcgcaggagctgatactaaaatcatgaagaatagcggaaaaactaggttcaagcgcaccaagatcgattaccttatgaactacatggtgtacactatcttcgtggtgctgatcctgctgtcggcagggttggcaatcggacacgcatactgggaggctcaggtgggaaacagctcgtggtacctgtacgatggcgaagatgacactccgtcataccgggggtttctgatcttttggggctacattatcgtgctcaacaccatggtcccgatctcgctctacgtgagcgtggaagtgatcaggttgggacagtcgcactttatcaattgggaccttcaaatgtactacgccgaaaaggacacccctgccaaagccagaaccaccaccctcaacgagcagctcggtcagattcattacatcttcagcgacaagaccggcactctgacccagaacatcatgactttcaaaaagtgctgcattaatggccaaatctacggtgatcatcgcgacgcgtcacagcataaccataacaagatcgaacaagtggacttctcctggaacacctacgccgacgggaagttggccttctatgatcactacctgatcgaacaaatccagtcgggaaaggaacctgaggtgagacaattcttcttccttctcgcggtgtgccataccgtcatggtggaccgtaccgacggtcagctcaactaccaggctgcgtcgcccgacgaaggtgccctggtcaatgccgcacgcaacttcggattcgcattcctggccagaacccaaaacactattacgatatcagagctgggcaccgagagaacgtacaatgtcctcgctatcctcgatttcaactccgaccggaagcgcatgtccatcatcgtgcgcaccccggaagggaacattaagctgtactgtaagggcgccgacaccgtcatctacgaacggctgcaccggatgaatccaactaagcaggagactcaggacgccctcgacatcttcgcgaacgagactctgaggaccctgtgcctgtgttacaaggagatcgaagaaaaagagttcaccgagtggaataagaagttcatggccgcgtcggtcgcgagcaccaatcgggatgaggcgctggataaggtgtacgaggaaatagagaaagatctgatcctcctgggcgcgactgcgatcgaggacaagctgcaggacggggtccccgagactatctccaaactggccaaggccgacatcaagatctgggtgctgacgggagataagaaggagacggcggagaatatcggatttgcctgcgagctcctgactgaggataccaccatctgctacggtgaggacataaactccctcctgcacgcccgcatggagaatcaacggaatcggggaggggtgtacgcaaaattcgcgccaccggtgcaggagagcttctttccgccaggaggtaaccgagcccttatcatcaccggatcctggctgaacgaaattctcctcgagaaaaagacgaagcgcaataagatccttaaactcaagttccctcggactgaagaggagaggcgcatgcggacccagtcaaaacgccgcttggaggccaagaaagagcaaagacagaagaatttcgtggacctggcatgtgaatgctccgctgtgatctgttgccgggtgactccgaagcagaaggcaatggtggtggatcttgtgaagaggtacaaaaaggcaattacgctggcaatcggcgatggagcgaacgatgtgaacatgatcaagaccgcacacatcggagtgggcatcagcgggcaagagggaatgcaggccgtcatgtccagcgactactctttcgcccagttcagatacctgcaacgtctgctgctggtccacgggcgctggagctacattcgcatgtgcaagttcctccggtacttcttctacaagaatttcgcattcactctggtgcacttctggtactcctttttcaacggctattcggcgcagaccgcctacgaggactggttcattaccctctacaatgtgctgtatacctccctgccggtgctcttgatgggactcctggaccaggacgtgtcagacaagctctcactgcggtttccaggtctgtacatcgtcggccaacgggatctgctcttcaactacaaaagatttttcgtgtcactgctgcacggagtgctgacttcgatgatcctgtttttcattccactgggtgcatacctgcaaaccgtgggccaggacggagaagccccgtcagactaccagagctttgctgtcactattgcaagcgcgctggtgatcacggtgaacttccaaatcggactcgacacgtcatactggactttcgtgaatgcattctcgatatttggtagcattgcgctgtatttcggtatcatgttcgatttccactcggccggaatccacgtgctgttcccgtcagctttccaattcaccggcactgcatcgaacgcgctgagacagccatacatctggctcaccatcatcttggcagtggcggtgtgcttgctccccgtggtcgcgattcgcttcctgtcgatgaccatttggccctcggagtcggataagatacaaaaacaccgcaagcggctcaaagccgaagaacagtggcagcgcaggcagcaggtgtttagaagaggcgtgtcaactaggagatcagcctacgcattctctcaccaacgggggtacgctgacctgatctcaagcggccgctccatccgtaaaaagaggtcccctctggatgcaattgtggccgacgggactgccgaataccgccggacgggggacagc

SEQ ID NO: 318952 - DNA, 3753 bp, Artificial Sequence
  derived and/or modified sequence
atgtctactgagagagactctgagacaacctttgacgaagactctcaacccaacgatgaggtggtcccctacagtgacgacgaaactgaggacgaactagatgaccaagggtccgccgtcgagcctgagcaaaaccgcgtgaacagggaagcggaggagaatagagagcctttcaggaaagaatgcacctggcaggtcaaggccaacgaccgcaagtatcatgagcagcctcatttcatgaataccaaatttttatgcattaaagaatccaagtacgctaacaacgctataaagacctacaaatacaacgcattcacatttatccctatgaacctttttgagcaattcaaaagagctgcaaatctttatttcctcgcactcctgattttgcaagcggtgccacagatctcgacacttgcttggtatactactctggtccctctgctcgttgtgctgggcgtgaccgcaatcaaagaccttgttgacgacgtggcaagacacaagatggacaaagaaatcaacaacagaacatgtgaggttattaaggatgggcgctttaaagttgctaagtggaaagagatccaggtcggggacgtgataaggttgaagaagaacgactttgtccctgcagatatcctccttctttctagttcagaacccaacagcctttgctatgtggaaacagcagagcttgacggggagacaaacctcaaattcaaaatgtccctggagattacagatcaatacctgcagagggaggataccctcgcaactttcgacggatttatagaatgtgaggagcccaataacaggcttgataagttcactggcactctcttctggcggaacacaagcttccccttggatgcagataagatacttctgaggggctgtgtaattagaaacaccgatttttgtcatggactcgtgatcttcgccggagctgacaccaaaatcatgaaaaacagcggcaagacccgctttaaaaggaccaaaatcgattaccttatgaactacatggtgtacacaatctttgtggtgctcatcctgcttagcgcgggcctggccatcggtcacgcatattgggaagctcaggttggtaatagcagctggtacctgtacgatggagaggatgacacaccgtcttaccggggtttcctcattttttgggggtatatcatcgtacttaacacaatggtgcctatcagcctgtatgttagcgtggaggtcatccgccttgggcagtcacatttcatcaactgggatcttcagatgtactacgccgagaaagatacaccggcgaaggcacggactaccacactgaacgagcagctgggccaaattcactatatattttctgacaagacaggcaccttaacacagaacatcatgacttttaagaaatgttgcatcaatgggcaaatctacggagaccacagggatgcaagccagcacaaccacaacaagatcgaacaggtggatttcagctggaacacttatgccgacggcaagctggccttctatgatcactatctgatcgagcaaattcaatctgggaaagagccagaagtcaggcaatttttcttccttctggctgtgtgccacaccgtgatggtggatcgcacagacggccaactgaattaccaggctgctagccccgacgaaggcgcgcttgttaacgcagcaagaaactttggcttcgcctttttggcaagaacacaaaacaccatcactatcagcgaattagggacggaaagaacatataacgtactggccatcctagattttaacagtgaccgcaagcggatgagcatcattgtgcgtacacccgaaggtaacataaagttgtattgtaagggtgctgatacagtcatttatgaaaggctgcaccgcatgaacccaaccaaacaggagactcaggatgcccttgacatctttgctaacgaaaccttaagaaccctgtgcctgtgctacaaggaaattgaggagaaggagttcaccgaatggaataagaaattcatggctgccagcgttgctagtaccaacagggatgaagcgctcgacaaagtgtacgaggaaattgaaaaagacttaatccttctgggcgccactgcaatagaggacaaactgcaggatggcgtaccagaaacaatcagcaaactagcgaaggctgatattaaaatctgggtcttgactggtgacaaaaaggagacagctgagaatatcggattcgcatgtgaattgctcaccgaagatactacaatctgctacggggaagatattaactctctgctgcacgcaagaatggaaaaccaaagaaaccggggcggagtctacgccaagtttgcgccacctgtccaggagtctttttttcctccaggcggcaatagggctctgattataaccggctcttggctcaacgagattctgcttgagaagaaaacgaaaagaaacaaaattttaaaactgaagttcccgcgtaccgaggaggagaggcggatgcggactcagtcaaagcggaggcttgaggcgaagaaagagcaaagacaaaagaattttgtcgacctggcgtgcgaatgcagcgcagttatctgctgcagggttacccccaaacagaaagccatggtcgtcgacttagtcaaacgttacaagaaagccatcactctcgcgatcggcgatggtgcgaatgatgtgaacatgatcaagaccgctcatatcggcgtggggattagcggccaggagggtatgcaagcggtgatgtcatcagattattctttcgcccagtttaggtaccttcaacggttactgctcgtgcacggacgctggtcatacatccggatgtgcaaatttcttcgctactttttttacaaaaatttcgctttcactctggtgcatttctggtacagcttctttaacggctactctgcccaaacagcctacgaagattggtttatcacactgtataacgtgctgtatacaagcctgcctgttctgctgatgggcttgctggaccaggacgtgagcgataaactgagcctgagatttccaggactgtacatcgtgggtcaacgtgaccttctgttcaactacaagaggttctttgtgagtctgctgcatggggtgttgaccagtatgatattgttctttatcccgcttggtgcatacctgcagacagttggccaggatggcgaggctcctagcgattaccagagttttgctgttaccattgcctctgctctagtcatcactgtgaacttccaaatcgggctcgacaccagctactggacattcgtgaacgcttttagtatttttgggtctattgccctgtacttcggaatcatgtttgatttccactctgctggtatacacgtgctgttcccttctgcatttcagttcaccggcactgcaagtaatgctctgcggcagccgtatatctggctgacaataattctggccgtggcagtatgtctcctgcctgtggtagcgattagatttttgagcatgaccatatggccatccgaaagcgacaagatccaaaagcatcgcaagaggttgaaggcagaagaacagtggcagagacgccaacaagttttcaggcggggagtgagcacacgccgtagcgcctacgcctttagccatcagcgaggctacgcagatctgatcagtagcggaagatcgattagaaagaaaaggtcaccgctggacgctattgtcgctgacggcaccgctgaataccgccgtaccggcgactcc

SEQ ID NO: 318953 - DNA, 3753 bp, Artificial Sequence
  derived and/or modified sequence
atgtccacagagcgcgatagtgaaacaacctttgatgaggattctcagcctaatgatgaagtggtgccatactcagacgacgagacggaggacgagctggacgatcagggttccgcagtggaaccggaacagaatagggtaaatcgcgaggccgaagagaatcgcgaaccatttcgcaaagagtgcacatggcaagttaaagctaatgacaggaagtaccatgagcagccccatttcatgaacacaaagttcctgtgtataaaggaatctaaatatgcaaataatgctatcaaaacttataagtataatgcttttactttcatcccaatgaaccttttcgaacagtttaaacgggccgcaaacctgtattttttagcactcctcatactgcaggctgtgccgcaaatctcaaccctcgcctggtatactacactggtacccctcctggtggtcctcggcgtaaccgccatcaaggatctagtcgatgatgtggcaagacacaaaatggataaagagatcaataacagaacctgcgaagtgatcaaggatggaagatttaaggtggctaagtggaaagagatccaggtcggcgatgtgattagactaaaaaaaaacgattttgtgccagcagatatcttgctgctctcttcctctgaacctaattccctatgctatgtggagaccgccgaactggatggggagaccaacctcaaatttaagatgagcctggaaataacagatcagtatctccagagggaggataccctcgccacattcgacggcttcatcgaatgcgaggagcctaacaatcgcctcgacaaattcactggcacgctgttctggcggaatacctctttccccttggatgccgataagattctgctgagagggtgtgtcatcagaaacacagacttttgccacgggttggtaatattcgcgggcgctgatacgaagatcatgaagaatagtgggaagactaggttcaagcggactaagatcgattacttaatgaattacatggtctacaccatttttgtggtgctaatactgttatcggctggacttgccatcggtcacgcctactgggaggcccaggtgggaaatagctcatggtatctgtacgatggggaagacgacacgccctcttaccgcggttttcttatcttttgggggtatattattgtgctcaacaccatggtccccatctccctctacgtgagtgtcgaggtgatcagattgggacagtcacacttcataaactgggatctgcagatgtactacgctgaaaaggacactcctgccaaggcaagaacaacaacattgaatgaacaattgggacagatacactacatattcagcgataagactggcacactgacacagaatattatgacctttaagaagtgctgcataaatggacagatctatggcgaccacagggacgcgagccagcacaaccataacaagatcgaacaggtcgacttttcgtggaatacctatgccgatggcaagcttgcattttatgaccactatctgatcgaacagattcaatcagggaaagaaccagaggtgcgacagttcttctttctattggccgtctgtcatacagtgatggtggataggacagatggtcaactgaactaccaggcagcctcccctgacgagggggccctggtcaatgcggccaggaacttcggatttgcctttctcgccagaacccagaatacgatcaccatttccgagttgggcacagagagaacgtacaatgtcctcgccattctggattttaactccgatcgcaagcgcatgagcattatcgtacggacacccgaggggaatataaaactctactgcaagggcgcagacaccgttatttatgagaggttgcaccgcatgaatcccactaaacaggagacccaagacgcactggatatattcgctaatgagacacttcggacgctgtgtttatgctataaagagattgaagaaaaggaattcacggagtggaacaagaaattcatggccgctagcgtggcatctaccaaccgggatgaggcccttgataaggtgtatgaagaaatcgaaaaggatctgatcctgctcggggccacagcaattgaagacaaactgcaggacggcgtgccggaaaccatttcgaagctggccaaggccgacatcaaaatatgggttctgacgggggacaaaaaggaaacggcagagaatataggattcgcatgcgaactgctgactgaagacaccaccatatgctatggcgaagacattaacagcctcctacacgccagaatggaaaatcagcgtaaccgggggggcgtgtacgctaaatttgcaccccccgtgcaggagtccttcttcccaccaggagggaatcgggcactgatcatcaccggcagttggctcaatgaaattctcctcgagaagaaaaccaagagaaacaagattctgaaattaaaatttcctaggacagaggaagagagacgtatgcggactcagagtaaaaggaggctagaagcaaagaaggaacagagacagaagaattttgtggacctggcctgtgaatgcagcgccgtgatctgctgcagggtcacaccaaagcagaaagcgatggtggtcgacttagttaaacgatacaagaaagccatcaccctggcaatcggggacggtgccaatgatgtgaatatgataaagacagctcacatcggagttggcatatctgggcaagagggcatgcaggctgtgatgagcagcgattattcattcgcgcagttccgatatttgcagcggcttttactcgtgcacggacggtggtcttatatcaggatgtgtaagtttttgaggtatttcttttacaagaattttgcgtttacgctagtccacttctggtactctttcttcaatggctacagtgcacagacggcctatgaagactggttcattactctctataatgtgttatatacctctctacccgtcctgctgatggggctgctggatcaggatgtctctgacaagttatcgttacgttttccaggcttgtacatcgtgggccagagggacctgctgtttaactataaacggttcttcgtgtctctccttcacggcgtacttacctcaatgattctcttcttcattcctctgggcgcctatttacagacagtcggtcaagacggcgaagccccaagtgattaccagtcctttgccgtcaccatcgcgagcgctctggtcataactgttaacttccagattggcttggatacgtcttattggaccttcgtcaacgcctttagcatctttggtagcatagcactctacttcggtatcatgttcgactttcactctgcaggaatccatgtactctttccgagtgcatttcagtttactggaactgcatcgaacgctctgcgacaaccttacatctggctcaccatcattctcgctgttgcggtgtgcttactcccggtggtggcgatcaggttcctctccatgaccatctggccctccgagtcagacaaaatccagaagcaccggaaaagattgaaggctgaggagcagtggcagcgtaggcagcaggtgtttcggagaggcgtatcgacacgtcggtcggcctatgcgttttcccaccaacggggatatgcagacttgattagtagcgggcgctccattcgcaagaaacgctctccactcgacgctatcgtcgccgacggtactgccgaatacagacgcacaggcgactct

SEQ ID NO: 318954 - DNA, 3753 bp, Artificial Sequence
  derived and/or modified sequence
atgtctaccgaacgggatagcgaaactaccttcgacgaggattcccaaccaaacgacgaggtggtgccgtactccgatgacgagactgaggacgagctcgacgaccaaggatcagccgtggaaccagaacagaacagagttaaccgagaagctgaagagaatcgggaaccgtttaggaaggaatgcacttggcaagtcaaagccaatgatcgcaaataccatgaacagccccacttcatgaacactaagtttttgtgcatcaaagaaagcaagtacgctaacaatgctatcaagacgtacaagtacaacgcgttcaccttcatcccgatgaacctgtttgagcagttcaagagagccgccaatctttacttcctcgccctcctgatactgcaggcggtgccacaaatctccactctggcctggtacactactttggtgccgctcctggttgtcctgggcgtcacggctatcaaagaccttgtcgacgatgtggctagacacaagatggataaggagattaacaaccgcacgtgtgaagtgatcaaggacggccggttcaaagttgcgaagtggaaagaaattcaggttggagacgtgatccgcctcaagaagaacgacttcgtgccagctgacattctcctgctgagctcaagcgaacctaattccctctgctatgtggaaaccgccgaactggacggcgagacgaacctcaagttcaagatgtcccttgagattaccgaccagtacctgcagcgcgaggatactttggcaacttttgacggtttcatcgaatgcgaagaacccaacaacagactggacaagtttaccgggacgctcttttggagaaatacctctttcccgctggacgcagacaaaatcctgctccgcggatgtgtgatcagaaacacggacttctgccacggccttgttatcttcgctggagccgacaccaagattatgaagaattcaggaaagacgcgctttaaacgcacgaagatcgactacttgatgaattacatggtgtacactattttcgtggtgctcatcctgctgtctgcgggacttgccatcggccacgcgtactgggaagcccaagtgggcaattcgagctggtacctctacgatggggaagatgataccccatcataccgcgggttcctcattttctggggatacatcatcgtgcttaacaccatggtccccatctccctgtacgtgagcgtggaggtcatcaggctcggtcagtcgcacttcatcaactgggatttgcaaatgtactacgcggagaaagacaccccggccaaggcgagaactaccaccttgaatgagcagctcggacaaatccattacatcttcagcgataaaactggcactctcactcaaaacatcatgacttttaagaagtgctgcatcaatggacaaatctacggcgaccaccgtgacgcttcgcaacacaatcacaacaagatcgagcaagtggatttctcatggaacacctacgcagatggaaagctggctttctatgaccactacctgattgaacaaatccagagcgggaaagaaccggaagttcgccaattcttcttcctgctcgcagtgtgccataccgtgatggtggatcggactgacggccaactcaactaccaggctgcgtcaccagatgaaggtgcattggtgaatgcagcgcgcaatttcggcttcgccttcctggcgagaacccagaataccatcaccatttccgaacttggaaccgaacggacttacaacgtgctggcgatcctggactttaactccgatcgcaaacggatgtccataatcgtgagaaccccggaagggaatatcaagctgtactgcaaaggagcagatacggtcatctatgaacggctgcacaggatgaacccgaccaagcaagagactcaggatgcactggacattttcgccaatgagacgctcagaaccctctgtctgtgttacaaagagatcgaggaaaaggaattcacggaatggaacaagaagtttatggcggcttcggtcgcctccaccaatcgggacgaagcactggacaaagtgtatgaggaaatcgagaaggacctgatcctgctgggagcgacggccatcgaagataaactgcaagacggcgtgccagaaactatctccaaactggccaaggcagacatcaaaatctgggtcctcactggagataagaaagaaactgctgagaatatcggattcgcatgcgagctgctcactgaagataccactatctgctacggagaggatatcaacagcctcctgcacgccaggatggagaaccagcgcaacagaggcggcgtgtatgccaagttcgctccgccggtgcaagaatcattcttccctcctggtggcaatagagcactgattatcactggctcgtggctcaacgagatcctgctcgagaagaaaaccaaaagaaacaagatcctgaagttgaagtttccgcgcaccgaggaagaaaggcgcatgcgcactcaatccaaaagaaggctggaagccaagaaagaacaacgacaaaagaacttcgtggatctggcttgcgagtgttccgctgtgatctgctgccgggtgacgccgaagcagaaggcaatggtagtggatctcgttaagagatataagaaagcaatcactctggcaattggagacggagcaaacgatgtcaacatgatcaagaccgcccatatcggagtgggaatcagcggacaagaagggatgcaggctgtcatgagctccgactactcctttgcgcagttcagatatttgcagagactcctcctcgtgcacggaaggtggtcgtacattcgcatgtgcaagtttctcagatacttcttctacaagaatttcgcgtttaccctggtgcatttctggtactcctttttcaatggttactctgcccaaactgcctacgaggactggtttatcactctgtacaacgtcctgtacacctctttgcctgtgctgctgatgggactcctggaccaggacgtgtctgataaactctccctgagatttccgggactgtacatcgtggggcaacgggacctgctgttcaattacaaacgcttcttcgtgtcgcttctgcatggcgtgctgacctcgatgatcctcttcttcatcccgctgggggcctacctgcagactgtggggcaggatggtgaggctccgtcagactaccagtccttcgcagtgaccatcgcctcggcgctcgtcatcactgtgaatttccaaatcggactcgatacttcctattggaccttcgtgaacgccttctccatctttggatcgatcgcgctctactttggaatcatgttcgatttccacagcgccggaatccatgtgctcttcccttcagcctttcagtttaccggtactgcctccaacgctctccgccagccgtacatctggctgaccatcatcctggccgtcgccgtgtgtctgcttccggtggtggccatccgattcctgtcaatgactatctggccatcggaatccgacaagatccagaaacacagaaagagactcaaggctgaggaacagtggcagaggagacagcaggtctttcgtcggggagtctccacgcggcgctcggcgtacgccttctcacaccagcgcggctacgcagacctgatctcgtcgggacggagcatccgcaagaagagatcgccactcgatgccatcgtcgcagatggaaccgccgaataccggcgcactggagacagc

SEQ ID NO: 318955 - DNA, 3753 bp, Artificial Sequence
  derived and/or modified sequence
atgagcactgaaagggatagtgagacaacgttcgatgaggattctcagccgaacgatgaggtggtaccctattctgatgatgagacagaagatgagttggacgatcaggggtcggctgtggagcctgaacagaaccgggtgaaccgtgaagctgaggagaatcgagaacctttcaggaaggaatgtacttggcaggtcaaagcaaatgacaggaagtaccacgagcaaccccacttcatgaataccaaatttctatgcattaaagagtcaaagtacgccaacaacgcgattaaaacgtataagtacaacgcctttacattcataccgatgaacctgtttgagcagttcaagagagccgcgaatctttatttcctggctttgcttatactgcaggccgtgccccagatcagcacactcgcctggtacaccaccttggtcccactcctcgttgttctgggagtgacagccattaaggacttagtggacgatgtcgcaaggcataaaatggataaggaaatcaacaaccgcacatgtgaggtgatcaaagacggcaggttcaaggtggctaagtggaaagagatccaggtgggggatgttattaggctgaagaagaatgactttgtgcctgctgatattttgctgctttcctcttcggagccaaactctctctgttatgttgagaccgccgaattggatggagagaccaacctgaagttcaagatgtccttggaaattactgaccaatacctccagcgcgaggacacattggcaacctttgatggctttatcgagtgcgaggagccaaataataggcttgataagtttacaggcacgttgttttggcgaaacacatcatttccgctggacgccgacaagatcttgctacgtgggtgcgtgatccggaacactgatttctgtcacggacttgtcatattcgccggtgcggacacaaagatcatgaaaaatagcgggaagacgaggttcaagcgcactaagatcgattatctaatgaattacatggtctacacaatcttcgtggtacttattctgctttcggcaggtttggcgattggccatgcttattgggaagcccaggttggcaattccagctggtacttgtatgacggagaggacgacactccttcatacagaggatttcttatcttctggggctacatcatcgtcttaaataccatggtacccatcagtctttatgtgtcagtggaagttataagactggggcagtctcatttcatcaattgggatcttcaaatgtattacgccgaaaaagacacccctgcaaaagcacgtaccaccacactgaacgaacagctggggcaaatccattacatattctccgataagacgggcactttaacccagaatatcatgacttttaaaaaatgctgcatcaacggccaaatctacggtgaccaccgcgacgcctctcagcataatcacaacaagatcgaacaggtggatttttcctggaatacgtacgcggatggcaaattagctttctacgatcactatctgatcgagcaaatccaaagcggtaaagagcccgaggtacgccagttcttctttctcctggccgtgtgccataccgtgatggtggaccgtaccgacggccaactcaactatcaggccgctagtcccgacgagggggccctggtgaacgctgccaggaatttcgggttcgcattcctggctcggacgcagaacacgatcacaatctccgaacttgggactgaacggacttacaatgtgctggccatcctggattttaattcagaccgtaagaggatgagcattattgtcaggacacccgagggcaacatcaagctgtattgtaagggcgccgatacagtgatctacgaacggctgcaccggatgaacccaacaaagcaggagacacaagatgcattggacatttttgctaacgaaacactgcggacactgtgtctgtgctataaggaaattgaggagaaggagttcacagagtggaacaaaaaatttatggcggcgagtgtcgccagcacgaatcgggacgaagccctggacaaggtgtatgaagagatcgaaaaggacctgatcttgctgggcgctacagccattgaggacaagctgcaggacggagtccccgaaactataagcaaactggcgaaagcagacattaagatctgggtgctgactggggacaagaaagagacagctgagaatatagggtttgcctgtgaactgctcactgaagacacgactatttgctacggcgaggatatcaactctctactgcacgccagaatggagaatcagagaaatcgtggcggcgtgtacgcaaaattcgctccgcccgttcaggagagcttcttcccacccggaggcaatagggcactgataatcaccggaagttggctcaatgaaattttgttagaaaaaaagacaaaaaggaataaaattttgaagctaaaatttccccgtactgaagaagagaggagaatgagaacccagagtaagcgacgcctggaagctaagaaagaacagcggcagaaaaactttgtagacttagcctgtgagtgttccgcggttatttgttgccgggtgacgccgaagcagaaggctatggtggttgatctggtaaagaggtataagaaggccattacattggccatcggcgacggggctaatgacgtgaacatgattaagaccgcccacatcggggtcggcataagcggacaagaaggaatgcaggcagtgatgagcagtgactatagcttcgctcagttccgctatctgcaacgtctactccttgttcacggacgttggagctatattagaatgtgtaagtttctcagatattttttctacaagaactttgcatttaccctcgtccatttttggtacagcttctttaatggctattccgcacaaaccgcgtacgaggactggtttattaccctctacaacgttctctacacatctcttccagtcctgttgatgggcctgctggatcaggatgtgagcgataagctctcccttcggtttccaggtctttatatcgttggacaaagggatctgcttttcaattataaaagatttttcgtcagcctgttgcacggtgtgctgacctccatgattctgttctttatcccacttggcgcatatctgcagactgtcggccaagatggagaagctccgtccgattaccagagcttcgcggtgaccattgcatccgcgctggtgataaccgtgaactttcagatagggctggacacaagctactggactttcgttaatgccttttccatcttcggcagtattgctctttactttgggattatgttcgacttccacagtgccggaatccacgttctcttcccaagcgcttttcaatttactggtaccgcaagtaatgcactgcggcaaccctacatatggttgactatcatccttgctgtcgcagtatgcctcctgccagtcgtggcaattcgttttctgtctatgacaatctggccatccgaatccgataagattcagaaacaccgcaaaagactgaaagccgaagagcaatggcagagacgtcagcaggtgttcaggcgaggagttagtacaaggcgctcggcgtatgcgttctcgcaccagagaggctacgcagatctgatttcctccggccggtccatcaggaaaaagcgatctcctcttgacgccatcgtggcggacggcacagctgagtacaggaggaccggtgactcc

SEQ ID NO: 318956 - DNA, 3753 bp, Artificial Sequence
  derived and/or modified sequence
atgtccaccgaacgggattccgaaaccacctttgacgaagattcccagcctaatgatgaggtggtcccgtactccgacgacgagactgaggacgaactggatgatcaaggaagcgccgtcgagccagaacaaaatagagttaatagagaagccgaggagaacagagaaccgttccggaaagagtgcacctggcaagtcaaggcaaacgaccgcaagtaccacgaacagccgcacttcatgaacactaaattcctgtgcattaaagagtccaaatacgccaataatgccattaagacctacaagtataatgccttcactttcatcccgatgaatttgtttgaacagttcaagcgcgccgccaacttgtacttcctggcgctgcttattcttcaggctgtgccacaaatcagcacgctggcttggtataccactctggtcccgctcctggtggtcttgggagtgaccgcaatcaaggacctcgtggacgacgttgcgagacataagatggacaaagagattaacaacagaacctgcgaggtgatcaaggatggacgctttaaagtggcgaaatggaaagagatccaagtgggagacgtgatccgcctgaagaaaaacgattttgtcccggcagacatcttgctgttgtcctcttccgagccaaattctctctgctacgtggaaaccgctgagttggatggagagacgaatctgaagttcaagatgtccctcgagattaccgaccaatacttgcagagggaagataccctggccaccttcgatggctttatcgaatgcgaggaaccgaacaaccggcttgataagttcaccggaactctgttctggagaaacacgtccttcccactggatgccgacaaaattctgctccggggctgcgtgatccggaacaccgatttctgccacggactggttatcttcgcgggagcagacactaagatcatgaagaattccgggaaaactcgctttaagaggacgaagatagattacctgatgaactacatggtgtacactatctttgtggtgctcatcctgctgagcgctgggcttgccatcggtcacgcctactgggaagcccaagtgggtaacagctcgtggtacctttacgatggagaggacgacactccaagctatcgcggctttctgatcttttggggatacatcattgtgctcaacaccatggtgcccattagcctttatgtgtccgtggaagtgatcagactgggccagagccacttcattaactgggatctgcaaatgtattacgcagagaaggatacgccagccaaagcgaggacgactaccctgaatgaacaactcgggcagatccactatatcttctcggataagactggaaccctcactcagaatatcatgacttttaagaaatgctgcatcaacggacagatctatggcgaccatcgcgacgcgtctcaacacaaccacaataagatcgagcaagtggatttttcgtggaacacgtacgcggacggtaaattggccttctatgaccactacctcatcgagcagatccaaagtggcaaggagccggaggtcaggcagttcttttttctcctcgcggtatgccatacggtcatggtcgatcgaaccgacggccagctgaattaccaggcggccagcccggatgaaggagccctggttaacgcggcccgcaactttggttttgctttcctggccagaactcagaacactatcaccatttccgagctgggaaccgagagaacctacaacgtgttggctatcctggacttcaattcggatcgcaaacgcatgagcatcattgtcagaactcctgaggggaatatcaagctgtactgcaagggggcagacacggtgatctacgaacggctgcataggatgaacccgactaagcaggagacgcaagacgctctggatatctttgccaacgaaactctccggactctgtgcctgtgctacaaggaaatcgaagagaaggaattcactgagtggaacaaaaagttcatggccgcttcggttgcgtcaactaaccgggatgaagcgctggacaaggtgtacgaggaaattgaaaaggatctcatcctgcttggggccaccgccatcgaagataagctgcaggatggagtgccggaaaccatttccaagctcgcgaaggccgacattaagatctgggtcctgacgggcgacaaaaaggaaaccgccgaaaacatcggattcgcgtgcgagctgctcactgaggatactactatctgttacggagaagatatcaactccctcctgcacgctcgcatggaaaaccagcgcaatagaggaggagtgtacgccaagtttgcccctcctgtccaggaatccttcttcccgcctggggggaacagggcgttgatcatcaccggttcgtggctgaacgagatcctgctcgaaaagaaaaccaaacggaataagatcctgaagctgaaattccctcggacggaagaagaaaggaggatgcggactcagagcaagcgccggttggaagcaaagaaagaacagcgccagaagaatttcgttgacttggcctgcgagtgttcagcggtgatttgctgtcgggtgaccccgaagcagaaagcaatggtcgtggatttggtgaaacggtacaagaaagcgatcacccttgcgatcggagacggtgcaaacgacgtgaacatgataaagaccgcccacatcggcgtgggcatctcgggtcaggagggaatgcaggcggtgatgtcgtccgactacagcttcgcgcaattccgctacctgcagaggctcttgctggtccatgggcggtggtcctacattagaatgtgcaaattcctgcgctatttcttctataagaactttgcgttcaccctggtccatttttggtactcattctttaacggctacagcgcacaaactgcatacgaagattggttcatcaccctttacaacgtgctttacacttccctccctgtgctgctcatgggactcttggaccaagatgtctcggacaagctgtcactccgcttcccgggactctacattgtgggtcagcgcgacctgctctttaactacaagcgatttttcgtgtcgctgctccacggagtgctgacctcgatgattctcttctttatcccgctgggtgcctacctgcagaccgtgggccaagacggagaggctccgtccgattaccagtcgttcgccgtgaccatcgcttctgcactggtgatcactgtgaacttccagatcgggctggacacctcctactggactttcgtcaatgccttctcgatcttcggatccatcgctctctactttggcatcatgttcgacttccattccgcagggattcacgtgttgttcccgtccgcattccagttcactggaaccgcatccaacgcactgcgccagccttacatctggctgaccatcatcttggcggtcgcagtgtgcctgctgcctgtggttgcaatccgcttcctctctatgaccatctggccgtcagaatctgacaagatccagaagcatagaaaacgactcaaggcggaagagcaatggcaacggcggcaacaagtattcaggcggggagtgagcacgcgccgctcagcgtacgcttttagccaccagcgcggttacgccgacctcatcagctccggacgcagcatcagaaaaaagaggtccccgctggacgccatcgttgcagatggaactgctgaataccgtcggaccggagactca

SEQ ID NO: 318957 - DNA, 3753 bp, Artificial Sequence
  derived and/or modified sequence
atgtccaccgaacgagattccgagactaccttcgacgaagattcccagccaaatgatgaggtcgtgccttactcggatgacgaaactgaagatgaactggatgatcagggctccgcagtcgagcctgagcagaacagagtcaaccgggaggcagaagaaaaccgtgaaccattccgaaaggaatgtacttggcaggtcaaagcaaacgacaggaagtaccatgagcagccacatttcatgaacactaagttcctgtgtattaaggaatcaaagtacgcaaacaatgccatcaaaacgtataagtacaacgcctttaccttcattcccatgaacctttttgaacagtttaagagagcagctaatctttactttctggctctcctcatcttgcaggctgtcccccaaatctctacccttgcatggtacaccactttggtgccactgctggtggtcctgggcgttaccgccatcaaggatcttgtggacgacgtggcaagacataagatggataaagaaatcaacaacagaacttgtgaagtcatcaaggatggtagattcaaagtcgccaaatggaaggaaattcaggtcggagatgtcatcagacttaagaagaacgactttgtgcctgctgatatcctgcttctcagctcctcggaaccaaactctctgtgttacgtggagactgccgaactggacggcgaaaccaatctgaagtttaagatgtctcttgagattaccgatcagtacctgcaaagagaggatactcttgcaacctttgatggattcatcgaatgcgaggagccaaacaacaggctcgataagtttaccggcactcttttttggcggaacacctcgttcccactggatgccgacaaaattcttctgcgtgggtgcgtgatccgcaacaccgatttttgtcacggactggtgatttttgccggcgcagatacgaaaatcatgaagaattccgggaaaactcggtttaagagaactaagattgactaccttatgaactacatggtctacaccattttcgttgtgttgatcctgctgtccgccggactggcaatcggacacgcatactgggaagctcaagtcggaaattcatcatggtacctgtacgatggagaggacgatacccctagctatcgaggtttccttatcttttggggatacataattgtgcttaacactatggtgccaatctcgctctacgtgtcagtggaagtgatacgtcttggacagtcgcactttatcaactgggatctgcagatgtactatgcggaaaaggatactcctgcgaaagccagaactaccacccttaacgagcagcttggacaaattcactacattttctctgataagactggcactcttactcagaatatcatgaccttcaagaaatgctgtatcaacggtcagatttacggcgaccatagagatgcaagccaacataaccacaacaagatcgaacaagtggatttctcatggaacacctatgctgatggaaaacttgccttttacgatcattacctcatcgaacaaatacagagcggaaaggaacctgaggtgagacagttcttttttctgctggcagtgtgtcatactgtgatggtggaccgcactgatggacaactgaattaccaggccgcgagccccgacgaaggagcactcgtgaatgcagcccgcaactttgggttcgcgtttcttgcgagaactcagaacactattactatctcggagctcggtactgaaagaacttacaatgtgctcgcaattctggatttcaactcggatagaaagcgaatgtccattattgttaggactcctgaaggcaatatcaaactttactgtaagggagcagataccgtgatctacgagcgacttcatagaatgaacccaactaagcaagagactcaggacgcccttgatatcttcgcaaatgaaactcttaggaccctttgcctgtgttacaaggaaatcgaagagaaggaatttaccgagtggaacaagaagtttatggcagcatcggtggcatcgactaaccgggacgaagcacttgataaggtgtacgaagagatcgaaaaggatctcatacttctgggggcaactgcaattgaagataagctccaagacggtgtcccagaaactatttcgaagctcgcaaaagccgacataaagatatgggtgctcaccggagataagaaggaaacggcagagaatatcggtttcgcatgtgaacttcttactgaagatactactatttgctacggggaggacattaactccttgcttcacgcgcggatggagaaccaaaggaaccgcggcggggtctacgctaagtttgcacctccagtccaggaatcattctttccacctggcggcaatcgggcactgatcataactggcagctggctgaacgaaattctgctggagaagaaaaccaaacgtaacaagatacttaaacttaagttccccagaactgaagaagaacgaagaatgagaacccaaagcaaaaggcgccttgaagccaagaaggaacagcggcaaaagaattttgtggacttggcatgtgaatgttcggcagtgatctgttgtcgggttaccccgaagcagaaagccatggtcgtggatctcgtgaagcggtacaagaaggctatcaccctcgcaattggtgacggagcaaatgatgtgaatatgataaagaccgcgcatataggtgtgggtatttccggtcaggaaggtatgcaagctgtcatgtcctccgattactcatttgcacagttccggtatttgcaacgactccttttggtgcatggtcgctggtcgtacattaggatgtgtaagtttctgcgctactttttctacaagaattttgcattcaccttggtgcacttttggtattccttctttaatggatacagcgcccagaccgcgtacgaagattggttcatcactctctataatgtgctgtacacttcgcttccagtgcttctgatgggcctcctggatcaagacgtctcagataagctgtccctgcggttccctggactctacatcgtggggcagcgagatctgctgttcaattacaaaaggttctttgtgtccttgctccatggtgtgcttactagcatgatcctgtttttcattccacttggggcatacttgcagaccgtgggtcaagacggcgaggcgccatcggattaccaatcatttgcagtgaccatcgcgtcagcacttgtgattaccgtgaactttcaaattggtctggatacttcgtactggactttcgtgaatgcattttctatctttggctcgatcgcattgtactttggaattatgtttgattttcatagcgccggaattcatgtgctgtttccttccgccttccaatttactggcaccgcatccaatgcactgagacagccttatatctggctcaccatcatccttgcagtggcggtctgtctccttcctgtggtggccattcggtttctctcgatgaccatctggccgagcgagagcgacaagatccagaagcacaggaagaggctgaaagcagaagaacaatggcaaaggcgccaacaagtgtttcgcaggggggtgtcaacccggcggtcggcatacgcattttcccatcaaagaggctacgcagacctgatttcgagcggaaggtccatcagaaagaagcggagccccctggacgccatcgtggcagacggaaccgcggagtatagacggaccggagattcg

SEQ ID NO: 318958 - DNA, 3753 bp, Artificial Sequence
  derived and/or modified sequence
atgagcaccgaacgtgactcggagactactttcgacgaagattcgcagcccaatgatgaagtggtgccttattccgacgatgaaaccgaagatgaactggacgatcagggtagcgccgtcgaaccagaacagaaccgggtcaacagggaagccgaagaaaatcgtgagccctttcggaaagagtgcacttggcaagtgaaggcgaacgacaggaagtatcacgaacaaccacactttatgaacaccaaattcctctgcataaaggagtcgaagtacgcaaacaacgcaattaagacctacaaatacaacgccttcacgtttatccctatgaaccttttcgaacagttcaaacgtgccgcaaacctgtactttcttgcccttctcattctgcaggcagtgccccaaatttccactctcgcatggtacaccaccctcgtgcctctgctggtcgtgctgggagtgactgcaatcaaggacctggtggatgatgtggcacggcacaaaatggataaagagatcaataatcgtacttgcgaagtgatcaaggacggacggtttaaagtggctaagtggaaggaaattcaggtcggggatgtgatccggctcaaaaagaacgactttgtgcctgcagatatcctccttctgtcctcatcggaaccaaattcgctttgctacgtggagactgcagaactggatggcgaaaccaacctgaaattcaaaatgtcgcttgaaatcactgaccagtacctgcaaagagaagatactctggccaccttcgatggttttatcgagtgtgaggaacctaataacagactcgacaagttcaccggaacccttttttggagaaacacctcgttccctctcgacgccgataagatccttttgcgcggttgtgtcatccgtaacactgacttttgtcatggactggtgattttcgcaggagcagatactaagattatgaagaattccggaaagacccgctttaagagaactaagattgactatctgatgaattacatggtgtacacgatttttgtcgtgcttattcttctttcggcgggcctggccattggccatgcatactgggaggcccaggtgggtaattcctcctggtacctctatgatggagaagatgacactccttcctataggggttttttgatcttttggggatacattatagtgctgaacactatggtgccaatcagcctgtacgtctcagttgaagtgattagacttggacaatcccactttatcaactgggatttgcagatgtactacgcagagaaggatactccagcaaaggcaagaactaccaccctgaatgaacagctgggacaaattcattacattttctcagacaagaccggtaccctgacgcagaacataatgactttcaagaagtgctgtattaacggccagatttacggggaccatcgtgatgcctcgcaacataaccataacaaaatagaacaggtggatttcagctggaatacctacgcagacggaaagctggccttctacgatcattaccttattgagcagattcaatcgggtaaggaaccggaagtgagacagtttttctttttgcttgccgtgtgccacaccgtgatggtggacagaacggacggacaacttaactaccaggcagcgagccctgacgaaggtgctttggttaatgcagcaagaaactttggttttgcattcctggcccgcacccagaacactattaccatttccgagttggggaccgaaagaacttacaacgtgctggccatacttgacttcaattccgatagaaagaggatgagcatcattgtcagaactcccgaaggtaatatcaaactgtactgtaagggtgcagatactgtgatatacgagaggcttcaccgcatgaacccgactaagcaagaaacccaggatgcacttgatatctttgccaatgaaactttgagaacgctttgtctttgttacaaagagattgaagagaaagaattcactgaatggaataagaagtttatggctgcgtcggtcgcatcaactaatcgagatgaagcattggacaaagtgtatgaagagattgaaaaggacctgatccttctcggtgcaaccgccattgaggacaagctgcaggacggagtcccagaaactatatcaaaacttgcaaaggcggatatcaagatatgggtgctcaccggagacaaaaaggaaaccgcagagaacatcggatttgcctgtgaacttctcaccgaggataccaccatctgttacggggaggacattaactcattgctccatgcaagaatggaaaatcaacgaaatcgtgggggtgtgtacgcaaagttcgctccgcctgtccaggagtcgttttttccccccggcggaaaccgcgctcttatcattaccggatcctggttgaatgaaattctcctggaaaagaaaactaagagaaacaagattctcaaattgaaatttcctcggactgaggaggagagacgaatgcgaactcaatcgaaacggagactcgaggcaaagaaggagcagcggcagaaaaactttgtcgatcttgcatgtgagtgttcggccgtcatttgttgtcgggtgacccctaagcagaaagcaatggtcgtggatctggtgaagaggtacaaaaaggccatcacccttgcaattggagatggagctaatgatgtgaacatgattaagactgcacacataggagtgggtatttcgggtcaagagggaatgcaagcagtgatgtcgtcagattacagctttgcacaatttagatacctgcagagattgcttcttgtgcacggacggtggtcatacatcagaatgtgtaaattcctgcgctactttttctacaagaattttgcattcaccctcgtgcatttctggtacagcttcttcaacggttactcggcccaaaccgcatacgaagattggttcattactttgtacaatgtcttgtacacttcgctgccagtgctccttatggggcttctggaccaagatgtgtcagataagctctcgctgagattcccaggtctgtacattgtcggtcaaagagatcttcttttcaactataagcgctttttcgtgtcacttctgcatggagtcctgaccagcatgattctcttctttattccacttggcgcatatctgcaaacggtggggcaagatggagaggcaccttccgactaccaatccttcgcagtgactattgcatcggcacttgtgatcactgtcaacttccagataggcctggacacttcgtactggacctttgtgaacgcattttccatatttggtagcatcgctctttactttggcatcatgttcgacttccactccgcaggtatccacgtcctttttccttccgctttccaatttactggcactgcctcaaatgcactgaggcagccttacatatggctcaccattatcctggcagttgcagtgtgtctcctgcctgtcgtagcgatcagatttctctccatgaccatctggccaagcgaatccgataagattcagaaacatagaaagcgactcaaagcagaggaacagtggcagagaaggcagcaagtgtttcgtcgtggcgtctcgactagaaggagcgcatacgcattctcacaccaaaggggttacgcagacttgatctcgagcggccgtagcattagaaagaagaggagcccactcgatgctattgtggcggatggcacggcagaatacaggagaactggagattcc

SEQ ID NO: 318959 - DNA, 3753 bp, Artificial Sequence
  derived and/or modified sequence
atgtctaccgaacgggacagcgagaccacatttgacgaggactcccagccaaacgacgaggtggtgccttattctgatgatgaaacagaggatgaactggacgaccagggatctgctgtggaacccgaacagaatagagtgaatcgggaggcagaagagaatagggaaccatttcgcaaagagtgcacctggcaggtgaaggccaacgatagaaagtaccacgaacagccccatttcatgaatactaaattcctgtgcattaaggagagcaagtatgccaataacgccattaaaacctataagtacaatgcatttacctttatccccatgaacttgttcgaacaattcaaacgggccgccaacctgtattttctcgcgcttctgattttgcaggctgtccctcagattagtacgctggcctggtatactacattagtgccattgttagtcgtactcggcgtgaccgccattaaagacttggtagatgatgtagcgaggcataagatggacaaagagataaacaatcggacttgtgaagtaattaaagacggaagatttaaagtcgccaaatggaaagaaatccaggtcggggacgtcatccggctcaagaagaacgacttcgtgcctgccgatattctcttacttagtagtagcgagccgaactctttgtgttatgtcgaaaccgctgagctagatggagagacaaaccttaaattcaaaatgtcgctcgagattacagatcaatacctgcagagagaggataccctggccacatttgacggctttatagagtgcgaagagcctaataataggttagacaagttcactggtaccctattttggagaaacacttcattccccctggacgctgacaagatattgttgcgggggtgcgtgatccggaacacggacttctgccacggccttgtcatcttcgccggagccgacactaaaataatgaaaaactctgggaaaaccagatttaagaggacgaagatagattacttgatgaactatatggtatacaccatcttcgtcgtcttgatcctgttgagcgcaggcctcgccattgggcacgcctactgggaggcccaggttggaaattctagctggtatctgtacgacggcgaggacgataccccgtcttaccgcggatttctaatattctggggttatattattgtgctgaacactatggtgcccatatcactgtatgtgagcgttgaagtgatcaggttggggcagtcccatttcatcaattgggatttgcaaatgtactatgccgagaaggatacacctgcaaaagctcgcaccactactctgaatgagcagctgggtcagatccattacatcttctccgacaagacaggaacactgacacagaatatcatgacctttaaaaagtgctgcattaatggccagatctatggagatcaccgggatgcgagccaacataaccacaacaaaatcgagcaagtcgatttctcctggaatacatatgcagatggaaagctcgctttctacgaccattacttgatagagcaaatccaatccgggaaggaaccagaggtgcgccaattctttttcttgctggctgtatgccataccgtcatggtggatagaacggacggtcaactgaattaccaagccgctagccctgatgagggcgccttggtcaatgccgcccgcaactttggattcgccttcctcgccaggacgcaaaacaccattaccatctctgagctgggaactgagcgaacatataatgtgcttgccatcttggattttaactccgacagaaaaaggatgtcgatcatcgttcggacccccgagggaaacataaagctgtattgcaagggcgctgacacagttatatatgagaggctccacagaatgaatcccaccaagcaagaaacccaggacgccctggacatcttcgccaacgaaaccttacgcactctgtgcctctgttacaaggaaatagaagagaaggagtttaccgaatggaacaagaaattcatggcagcatccgttgcctccactaacagggacgaggctctggacaaagtttatgaggaaattgaaaaagatttgatcttgctaggtgctactgcaatcgaggataagcttcaggatggtgtgccggagaccatttccaagctggccaaagccgacataaagatctgggtgctcacaggggacaaaaaggagaccgccgaaaatataggattcgcttgcgagttactgacagaagatacaaccatctgctacggcgaggatataaactctttgttgcacgcgagaatggagaatcaacgtaacagaggcggcgtgtatgccaaatttgccccccccgtgcaggaaagtttttttcccccggggggcaaccgagccctgatcattaccggttcatggctgaacgaaattctcttagaaaaaaaaacaaaacgcaacaaaatcctgaaacttaagtttcctagaactgaggaggagagacggatgcggacccagtccaagagacgccttgaggctaaaaaggaacagaggcagaagaatttcgtcgacctcgcttgcgagtgttcagcagtgatatgctgtcgcgtgacacctaagcaaaaagccatggtggtggacttggtaaagagatacaagaaagccatcaccttagctattggcgacggcgctaacgacgtcaacatgatcaagacagcccacatcggcgtcggaatctctggccaggagggcatgcaggccgtaatgtccagtgactactcttttgcgcagttcaggtatctacagagactgctgctggtacacggtcggtggtcttacatccggatgtgcaaatttttgcgatatttcttttacaagaactttgctttcacacttgtgcatttctggtacagcttctttaacggctactcagctcaaaccgcatacgaggactggttcatcaccctgtacaatgtgctgtatacatctctgccagtgctcctaatgggcctcctagaccaggatgtttccgacaagttgtccctgagattccctgggttatatatcgtgggccagcgcgatttgttgttcaattataaaagatttttcgtttctcttctgcacggcgtcttgacctctatgatcctcttcttcatccccttgggtgcctacctgcagacagtggggcaggacggagaggcaccatcagattaccagagtttcgccgtgacaatcgcatcggccttggttattacagtgaatttccagattggattggatacctcatattggactttcgtcaatgcgttctccatcttcgggtccatcgctctgtacttcggtataatgttcgattttcacagtgccggaatccacgtgctgttcccctctgccttccagttcaccggaacggcctctaatgccctcagacaaccctacatctggctgaccattatactcgctgtggccgtgtgtctcctgcctgtagttgccattcgcttcctatccatgaccatatggccttccgagagcgataagatacagaagcaccgcaaaagactcaaggctgaagagcagtggcagcgccggcagcaggtgttcagacggggggtcagcaccagacgctccgcttacgcattctctcaccagaggggctacgccgatctgattagtagtggccgcagcatccggaaaaaacgcagccctctggacgcaattgtagccgacgggacggcagagtatcggcggaccggcgattca

SEQ ID NO: 318960 - DNA, 3753 bp, Artificial Sequence
  derived and/or modified sequence
atgtcaactgaaagagatagtgaaacaacttttgacgaagatagtcaaccaaacgatgaagtagtaccttattctgatgatgaaactgaagatgaattagatgatcaaggatctgcagttgaaccagaacaaaatagagttaatagagaagcagaagaaaacagagaaccatttagaaaagagtgtacttggcaagtaaaagctaatgatagaaaatatcatgaacaacctcatttcatgaatacaaaatttctttgtattaaagaatcaaaatatgcaaataatgctattaaaacatacaaatataatgcatttacttttataccaatgaacttatttgaacaattcaagagggctgcaaatctttatttccttgctttattaattttacaagcagttccacaaatttctactcttgcttggtatactacacttgttcctttattagtagtcttaggagttacagctattaaagatttggttgatgatgttgctagacataagatggacaaagaaataaataatagaacatgtgaagttattaaggatggtagatttaaagtagctaaatggaaagaaattcaagttggtgatgttattagattaaagaaaaatgatttcgttccagcagatattcttttattgtcttctagtgaaccaaatagtttatgttatgttgaaactgctgaattagatggtgaaacaaatcttaaatttaagatgtctttagaaatcactgaccagtatcttcaaagagaagatacattagcaactttcgatggatttatagaatgcgaggaaccaaataacagattagataaatttacaggaactttattttggagaaatacatctttcccattagacgcagacaagattttattaagagggtgtgttattcgtaatacggatttttgtcatggtttagttatttttgcaggagctgatacaaaaattatgaagaatagtggtaaaacaagatttaaaaggactaaaattgattatttgatgaactatatggtttatacaattttcgtcgttcttattctcttatcagcaggtttagcaatagggcatgcatattgggaagcacaagttggaaactctagttggtatttatatgatggagaagatgacactccatcttatcgaggttttttaattttttggggatatataattgttctaaatactatggttcctattagtttgtacgtttcagtcgaagttattagattaggtcaatctcatttcattaattgggatttacaaatgtattatgctgaaaaagatacaccagctaaagcaagaactacaactttaaatgaacaattgggacagattcactatattttttctgataaaacaggaactttaacacaaaatatcatgacatttaagaaatgttgtatcaatggacaaatttatggggatcatagagatgcatcacagcataatcataataaaattgaacaagtcgacttctcttggaatacttatgcagatggaaaattagctttttatgatcattatttaattgaacaaattcaatctggtaaagaaccagaagtccgacaattttttttcttattggctgtctgtcatacagttatggtcgataggactgatggtcaacttaattatcaagctgcttctccagatgagggagcattagttaatgccgcacgaaatttcggatttgcttttcttgcaaggactcaaaacactattacaattagtgaacttggtacagaaagaacttataatgttttagcaattttagattttaattcagatagaaaaagaatgtcgattattgttcgtacacctgaaggtaatataaagttgtattgtaagggagcagatacagtaatttatgaaagattacacagaatgaatccaactaaacaagaaactcaagatgcacttgatatttttgcaaatgaaactttaagaacattatgtttatgttataaagaaatagaagaaaaagaatttactgaatggaacaagaaatttatggctgcttcagttgcttcaacaaatagagacgaagctttagataaagtctatgaagaaattgaaaaagatttaattcttttaggggcaacagcaattgaagataaattacaagatggagtacctgaaactatttccaaacttgcaaaagctgatatcaagatttgggttttaaccggggataaaaaggaaacggcagaaaatattggattcgcatgtgaattattaactgaagatactacaatatgttatggagaagatattaattctcttttacatgctagaatggaaaatcaaagaaatcgaggaggagtttatgcaaaattcgcaccacctgttcaagaatcattttttccaccaggaggaaatagagcattaattattactggatcttggttaaatgaaatccttcttgagaagaaaactaaacgaaataagattttaaaattaaagtttccaagaactgaagaagaacgtagaatgagaacacaatcaaaaagaagacttgaagctaaaaaagaacaacgacaaaagaactttgttgatcttgcttgtgaatgttcagctgtaatatgttgtagagttactccaaaacaaaaggcaatggtagttgatttagttaaaagatataaaaaggctattactttagcaattggagatggagctaatgatgttaatatgattaaaactgcacatattggagttgggatatctggacaagaaggtatgcaagctgtaatgtcatcagactattcatttgctcaatttagatatttacaacgtttactcttagtgcacgggagatggtcatatattagaatgtgtaagtttttaagatacttcttttataaaaactttgcttttactcttgtacatttctggtactcattttttaatggatatagtgctcaaactgcatatgaagattggtttattactttatacaatgttctttatacatcattaccagttttattaatgggtcttttagaccaagacgtgtcagataagttatctttaagattcccaggtttatatattgttggacagcgagatcttctttttaattataaacgattttttgtttcacttcttcacggagttttaacttcaatgatccttttctttattccactaggagcttatttacaaactgttggacaagatggagaagctccatccgattatcagtcatttgcagttacaatagctagtgcattagttattacagttaactttcaaattgggttagatacatcttattggacttttgttaatgcatttagtatctttggttcaattgcactttacttcggaattatgttcgattttcattctgctggaattcatgttttatttccatcagcttttcaattcacaggaacagcatctaatgctcttagacaaccatatatttggttaacaattattcttgctgtagctgtttgtcttttacctgtagttgctattcgatttttatcaatgacaatatggccttctgagagtgataaaattcaaaaacatcgtaaaagacttaaagcagaagaacaatggcaaagacgtcaacaagtttttcgtagaggagttagtactagaagatctgcttatgctttttctcatcaacgtggttatgctgatcttatttcatcaggaagatcaatacgaaaaaaacgtagtccattagacgctattgttgctgatggaacagctgaatatagaagaactggtgatagt

SEQ ID NO: 318961 - DNA, 3753 bp, Artificial Sequence
  derived and/or modified sequence
atgagtactgaaagggactccgaaacaaccttcgacgaggactcccagcccaacgatgaagtcgtgccatattccgatgacgaaactgaggacgagctcgacgaccagggctccgcggttgagccagaacagaatagagtgaaccgcgaggcggaggaaaatcgtgagccttttagaaaggagtgtacctggcaggttaaagcaaatgataggaagtaccatgaacaaccgcatttcatgaacaccaaattcctctgtattaaggagagcaaatatgctaataacgcaattaaaacctacaaatacaatgccttcactttcattcctatgaatctgtttgagcagtttaagcgtgccgccaacttgtattttttggcactgttgatactgcaagcagtgccccaaatcagcacattggcgtggtatacaaccctggttcccctgcttgtcgtacttggtgtgaccgccataaaggatctcgtagacgacgttgcaaggcataaaatggacaaggaaatcaacaacaggacctgtgaggtcattaaggacggccggttcaaggtggctaaatggaaggaaattcaggtgggtgatgtcatcaggctgaagaagaatgactttgtgccggcagacattctgttactgtccagttcagagcccaactccttatgttatgtcgaaaccgccgaattggacggggagacaaacttgaagttcaaaatgtccctcgagatcacggatcagtacctgcagcgtgaagacactctggcaacctttgatggcttcatcgaatgcgaggagccaaataatcgcttggataagttcactggtaccctgttctggcgcaataccagttttcccctggatgcggacaaaattctactgaggggatgcgtcatccgcaacacggacttctgtcacgggctagtcatctttgctggcgccgacacaaaaattatgaaaaattcaggaaagacccggtttaagcgaacaaaaattgattacctgatgaactatatggtgtacacaattttcgtcgtgctcatcctgttaagcgccggcttggccatagggcatgcttactgggaagcccaagtaggcaactcatcttggtacctatacgatggcgaagatgatacgcctagttaccgtggcttcttaatcttttgggggtatattatcgtactgaacactatggttccaatttcattgtacgtgtcggtggaggtgatcagattgggacagagtcactttatcaactgggacctccagatgtattacgcagagaaagatacacccgccaaggcgcggaccacaaccctgaacgagcaattgggacagatacattatatattctcagataagacgggcacactgactcagaacatcatgacgttcaagaagtgctgtataaacggacagatttacggcgaccatcgcgatgcatcccagcataaccacaataaaatagagcaagtagacttttcctggaacacatacgcggatgggaaactggcattctacgatcattaccttatcgagcaaattcagagcggcaaggagccagaggtgaggcagttcttcttcctactcgccgtctgtcataccgttatggtagatagaactgacggccagctgaactatcaggctgcatcccccgacgaaggcgccctcgtgaatgcagcgcggaactttggctttgcatttcttgctcgaactcagaataccatcaccatttcagaactcggaacagagagaacatataacgttctagccatcctggactttaactccgatcgcaagcgcatgtccattatagttcgcacgcctgaaggcaatatcaagctctattgcaaaggggcggataccgttatatacgagcgcctgcacagaatgaaccccacaaaacaagagacccaggatgccctggatattttcgcaaatgaaaccctgagaaccctgtgtctgtgctacaaggaaatcgaagagaaagaatttactgaatggaataaaaagttcatggcagcaagcgtggcgtccaccaacagagatgaggcactggataaggtgtacgaagaaattgagaaggacctgattctgttaggagctacagccattgaggacaagctacaggacggggtacctgaaactattagtaagttagccaaggcagacattaagatatgggttctgaccggagataaaaaggagactgcggaaaacattggattcgcctgtgagctgctaacagaagatacaactatctgttacggcgaggatatcaactcccttcttcatgctcggatggagaaccagcgtaacagagggggcgtttacgctaagttcgctcctcccgtccaggagagctttttcccccctgggggaaatcgcgccctaattataacaggctcttggctgaatgaaatactgctggaaaagaagaccaagcgaaacaagatactcaagctgaaattcccgaggacggaggaagaacgcagaatgaggacccagtccaagcgccgcttagaagctaaaaaggaacaaagacagaaaaatttcgtggatctcgcctgtgagtgtagcgctgtgatctgctgtcgcgtcacacccaagcaaaaagcgatggtggtggatctcgttaagcgatataagaaggcgattaccctggcaattggagacggagcgaacgacgtaaacatgatcaaaaccgcgcatatcggtgtgggcattagtggacaggaagggatgcaggctgttatgtcatccgattactcttttgcacagttcagatacctgcagcgtcttctattggtccatggcaggtggtcatatattcggatgtgtaaattcctgcggtatttcttctataagaattttgccttcactttggtccatttctggtactcgttttttaacggttatagcgcgcagactgcttacgaagattggtttatcacactgtataacgtcctgtacacctccctgcctgtgttgctgatggggctcctggaccaggatgtgtctgacaagttaagcctgaggtttccaggcttatacattgttggacaacgggaccttctcttcaactacaagagatttttcgtcagtctgctccacggcgtgttaaccagcatgatcctcttctttattcctttaggcgcgtacctgcagactgttggccaggacggcgaagcccccagcgactatcagtcattcgcggtaacgattgcaagcgccttggtgatcaccgttaacttccaaattggactggatactagctactggacttttgtcaatgcctttagcattttcgggtccatcgcactgtacttcggcataatgttcgacttccattctgccggaatccacgtgctctttcctagtgcgtttcagttcacgggaaccgctagtaatgccctacggcagccctatatttggttaaccatcatcttagctgtggccgtttgtttactgccagtagtggctatcagattcctatctatgacgatttggccaagtgaatccgataagatacagaaacaccgcaaacgactgaaggccgaggagcagtggcagcgcagacagcaggtgtttcgccgtggggtgtcaacaaggagatctgcatatgcctttagccaccagcgaggatacgccgatctaatttcatccgggcgctcaatcagaaaaaaacggtcacccctggacgcaatcgtggccgatgggacagctgaatatagaaggacaggtgactct

SEQ ID NO: 318962 - DNA, 3753 bp, Artificial Sequence
  derived and/or modified sequence
atgtctacagagcgggatagtgagacaacattcgatgaggattctcagcccaatgatgaagttgtcccctatagtgatgatgaaactgaagatgaactcgatgaccaagggtctgctgtagagcccgaacagaatcgggtaaatcgggaagctgaagaaaaccgtgaacccttcagaaaggaatgtacttggcaggtcaaagcaaatgataggaaatatcatgagcagccccactttatgaacactaaatttctttgcattaaagaatcaaagtatgctaataatgccattaaaacatataagtacaatgcattcacttttatccccatgaacttattcgagcagttcaaacgggccgccaatttgtattttcttgctctgcttatcctgcaggccgtgccacagatctctactttagcctggtacacaacactagtccccctcttggtggttctcggagtgactgcaatcaaggatctcgtagatgatgtggccaggcataaaatggataaagaaatcaataaccgaacttgtgaagtgatcaaagatggaaggtttaaggtggctaagtggaaagaaatccaggtcggagacgtgataagactgaagaaaaatgactttgtccccgctgatatattgctgctaagtagttcggaacctaactccctctgctacgtcgaaacagctgaactagatggggaaactaatctgaaattcaagatgtctctggaaataacagatcagtacttgcagagagaagatactctggccactttcgacgggtttattgaatgcgaggaacccaacaaccgacttgataaatttacaggaactctgttctggcggaatacatcatttcctctcgacgctgataaaattcttctccgagggtgtgttataaggaacactgacttctgccacggactcgttatatttgcaggagctgatacaaaaattatgaagaattctgggaaaactcgctttaaacgtacaaaaatagattatcttatgaattatatggtctatacaatattcgtggtccttatactgctctccgccggactcgcaatagggcacgcgtattgggaagctcaggtgggaaattctagttggtacctctatgatggggaggatgatactccttcataccggggattcctgatattttgggggtatataatagtgctcaacactatggtgccaatctcactgtatgtgtcagtcgaggttatcagactcggacagtcacacttcataaactgggatctacagatgtattatgctgagaaggatactcctgccaaagctcggactacaacactcaatgaacagctcggacagattcactatatattctcagataagacagggactctaacacagaacatcatgacatttaaaaaatgctgtattaacgggcagatatacggagaccatagggatgcctcacagcataatcataataagattgagcaggtcgatttcagttggaacacgtatgcagatgggaaactcgccttctacgatcattaccttattgaacagatacagtccgggaaagaacctgaagtcaggcagtttttttttctccttgcggtttgccacacggtcatggttgatcggacagatggacaacttaattaccaggccgcgtcacctgatgaaggggctctagtcaatgcagcaaggaacttcggatttgccttcttggcacggactcagaatacaatcactatctctgaactgggaacggaacggacttacaacgtgctcgccatccttgattttaactctgataggaaacgaatgtctattatcgtccggactcctgaaggaaatataaagctatattgcaagggagccgatacagttatctatgaaagactccaccggatgaaccccactaaacaggaaactcaggatgcactggatatctttgccaacgaaacacttcggacactatgtctttgttataaggaaatcgaagaaaaagaatttacagaatggaataaaaaattcatggccgcatccgtagcatccactaacagggatgaagccttggacaaagtgtatgaagagatagaaaaagatctcatattgctcggggctacagctatagaagataagctgcaggacggggtccccgaaacaatttctaaactagccaaggctgacattaaaatctgggttctcactggggataaaaaagaaactgccgaaaatatcgggttcgcttgtgagcttttgacagaggatacaactatttgttatggggaagatatcaatagtcttttgcacgcaaggatggaaaaccagaggaaccgggggggggtctacgccaagttcgcaccacccgttcaggagtctttctttccaccggggggaaacagggccctgatcataacagggtcttggctcaatgaaattctgttagaaaaaaagacaaaaagaaacaaaatactaaaattaaaatttcccagaactgaagaagaacgacgaatgagaactcagagtaaaagaaggctcgaagccaaaaaagagcagagacagaagaattttgtggatttagcttgtgaatgttccgcagtcatatgttgccgggtaactccgaaacagaaagccatggtggttgatctcgtcaagcggtataaaaaagcaataactctcgccattggagatggagccaatgacgtcaatatgattaagacagctcacatcggggtcgggatatccgggcaggaaggaatgcaggccgtcatgtcttctgattactcttttgcccagtttagatacttgcaaaggttgctgctcgtgcatgggcgatggagttatattaggatgtgtaaatttctcaggtatttcttctataaaaattttgcgttcactctcgtgcatttctggtattctttctttaatggatactctgcacagacagcctatgaagattggttcatcactctttataatgtactctatacatctctccctgttctgttaatgggactcctggatcaggatgtgtctgataagctttccctccgctttcctggactgtatattgtcggacaaagggatctgctctttaattataaacggttcttcgtttctctccttcacggggtactgacatctatgatcctcttctttatccctctcggagcatatctccagacagtcgggcaggatggagaagcgccgtcagattatcagtcctttgcagtcacaatagcaagtgcattagtgatcacagtgaatttccagatcgggttggatacttcttattggacattcgtgaatgctttctcaatatttgggtccattgccctttattttggaattatgttcgatttccattccgcaggaatccatgttttatttccctcggccttccaatttactggaacagccagtaacgcgcttcggcagccatatatttggctaacaatcatcctcgctgtagctgtatgtcttctgccagtcgttgcaataagatttttatccatgacaatatggccatctgagagtgataaaatacagaaacataggaaaaggcttaaggccgaagagcagtggcagcggcgccagcaggtattcagacggggggtatctactagaagaagtgcctatgccttttcccatcagcgagggtatgcagatttgatctcctcaggaagatcaattcgcaagaagaggtctcccctcgatgctatagtagctgatggaactgccgagtatcgaaggacaggagacagt

SEQ ID NO: 318963 - DNA, 3753 bp, Artificial Sequence
  derived and/or modified sequence
atgtccactgagcgggactctgagaccacctttgacgaggacagtcagccaaacgacgaggtggttccatactcggatgacgaaactgaagacgaactggacgaccagggctctgctgtcgaaccggagcagaaccgtgtcaatagggaggctgaagaaaatagggaacctttccggaaggagtgcacctggcaagtgaaagcaaacgaccgaaagtaccacgaacagccccactttatgaacacgaagttcctctgtatcaaagaatccaagtatgcaaataacgccattaaaacttataagtataacgcttttacatttatcccgatgaatctcttcgagcagtttaaacgcgcagccaacttgtatttcctcgcgctgctaatactgcaggctgtgcctcagatatcaactctggcctggtacaccacgcttgtgccattgcttgtcgtcttgggagtgaccgcaattaaggatctcgtggacgacgtggcccgccataagatggacaaggagataaacaacagaacttgcgaagtcattaaggatggtcgattcaaggtcgcaaaatggaaggagatccaggtgggggatgtgatccggctgaagaaaaacgacttcgtcccagccgacattttgcttctgtcatcgtcagagcccaatagcctgtgctacgtggaaaccgccgaattggatggtgagaccaatctgaaattcaagatgtccttagagatcacagaccaatatctgcagcgtgaggacactctggctactttcgacggatttatcgagtgcgaggaacctaacaatcgactggacaagttcacaggaacactgttttggcgcaacaccagcttccccctggacgccgataagatacttttacgagggtgtgtgatccggaataccgatttctgccatgggctggtaatttttgcaggcgccgacactaagataatgaaaaattcaggaaaaactcggttcaaaaggactaagattgactatctgatgaattacatggtgtacacaatctttgtggtcctgatcctgctcagcgccggtttggccatcggccatgcctactgggaagcccaggtgggcaattcgtcttggtatctctacgacggcgaggatgataccccttcgtatcggggatttcttatattctggggttacatcattgtgctaaacacaatggttccaatctctttatacgtaagcgtcgaagtgatccgactggggcagtcccacttcattaactgggatctccaaatgtactacgcagaaaaagacactccagccaaggcgagaaccactactcttaacgaacagctgggccagatccattacatatttagtgataagacgggcactctgacccagaacatcatgactttcaagaagtgctgcattaacggtcagatttatggtgatcaccgcgacgcctctcagcacaatcacaataagatcgagcaggttgacttcagctggaacacctatgccgatggaaagctggctttctacgaccattatctgattgagcagatccaaagcggtaaagagcccgaggttcgacagtttttcttcctgctggcggtctgccacaccgtgatggtggaccggacagatggacaattgaactaccaagcagcatcgcccgatgaaggcgccctcgtcaatgctgcacggaactttggttttgcctttctggcgagaactcagaacacgattaccatctccgagctgggaacggagcgaacgtataacgtgcttgctatcctggacttcaacagcgatcgaaagcgcatgtcaattatcgtgcgtactcccgaagggaacataaagctttactgcaagggtgccgacaccgttatctacgagagactgcaccgaatgaatccaactaagcaggaaacacaggacgctttggatatatttgctaatgagaccctccggaccttatgcctttgttacaaggaaatcgaagaaaaggaatttactgagtggaacaagaagtttatggcagccagcgtggccagtactaacagagacgaggccctcgacaaagtgtacgaagaaattgagaaggaccttatccttcttggcgctacagctatcgaagacaaactgcaggatggcgttcctgaaaccatctccaagctggctaaggccgatataaagatttgggtgctgactggtgataaaaaggagactgcagagaacatcggattcgcgtgcgagctgctgacagaggatacaacaatctgttacggcgaagatataaactcccttcttcacgccaggatggaaaaccagaggaatcggggcggtgtgtacgccaagttcgctccccccgtccaggagagcttctttcccccaggtggaaatcgtgctctgattatcactgggagttggctgaacgagatcctgctggagaagaagactaagcggaacaagattctgaaattaaaatttcccaggaccgaggaagagcgccggatgcggacgcagtctaagcggcgactggaagcaaagaaggaacagaggcagaagaacttcgtggaccttgcttgtgaatgctccgcagtgatctgctgtcgagtgacaccaaagcagaaagcaatggtagtcgacctggtcaaaaggtacaagaaagccatcacattggctatcggggatggggctaatgacgtgaacatgattaagacagcccatatcggggtgggcatctcaggccaggagggaatgcaggctgtcatgtccagtgactatagtttcgcccagttcaggtacctgcagaggctgctgctcgttcacggcagatggtcttatatccgcatgtgcaagttccttagatatttcttttacaagaacttcgccttcacacttgtccacttttggtactcgttcttcaacggatactccgcccagaccgcgtacgaagattggtttataaccttgtacaatgtgctgtacacatctctgccggtactgctgatggggctgctggaccaagatgtgtcggataaactcagccttcggttccctggcctgtatatcgtcggacagcgggatttattatttaattataagcgtttcttcgtgtccctgctgcacggcgtgctgacctccatgatccttttttttatcccactgggcgcctacctgcagaccgttggccaggatggggaggccccctccgactaccaatcttttgctgtgacgatcgcttcagccctggtcataaccgtcaactttcagatcggtcttgacacctcttactggacatttgtgaatgctttttccatcttcggatctattgccctttactttggtatcatgtttgatttccacagcgccggaatccacgttctgttcccctccgcctttcagtttaccggaacagctagcaacgcactgagacagccttacatctggctgaccataattcttgccgttgccgtgtgcctgctccccgtagtcgctatcaggttcctctccatgaccatttggccctccgagtcggacaagattcaaaagcataggaaaaggctgaaggccgaggagcagtggcagagacgtcaacaggtgtttcgacggggcgtaagtacaaggcgcagtgcttacgctttctctcaccagcgcggttacgcggacttgatctcatctgggaggagcatcagaaaaaaacggtcacctctagatgccattgtagctgatgggacggcggagtacagacgcacaggagactcc

SEQ ID NO: 318964 - DNA, 3753 bp, Artificial Sequence
  derived and/or modified sequence
atgagcacggaacgtgactccgaaacgacctttgatgaagattcgcagccaaacgatgaagtcgtcccatactcggatgatgaaaccgaggacgagctcgacgatcagggttcggcagtggagcccgaacagaaccgcgtgaacagggaagctgaggaaaacagagaaccctttcgcaaagaatgtacttggcaggttaaggcaaacgatagaaagtaccatgaacagcctcatttcatgaacacgaaatttctttgcattaaagaatctaagtacgcaaacaatgctatcaagacttacaagtacaacgcattcacctttatacccatgaacttgtttgaacagttcaaacgcgccgcaaatctgtactttctggcactgcttatactccaggctgtgcctcagatttcgaccctcgcttggtacaccaccctggtgcctcttcttgtggtcttgggcgtgaccgccataaaggacctggtcgatgatgtcgcaaggcataagatggataaggagatcaataaccgcacttgcgaagtcatcaaggacggtaggtttaaggtggcaaagtggaaggagatccaagtgggagacgtcatcagactgaagaagaatgactttgtgcctgccgatattcttctgctttcgtcctcagaaccaaatagcctttgctacgtggaaaccgcagaattggacggagaaactaacctgaaattcaaaatgtcgcttgaaatcaccgaccaatacctgcaacgggaagatactttggccacttttgacggatttatcgaatgtgaggaacctaacaaccggctggataagtttactggtaccctcttttggagaaacaccagctttccgctggatgcggacaaaattcttctgagaggctgcgtgataaggaacaccgacttttgtcatggtcttgtgatcttcgccggtgcagatactaagatcatgaaaaacagcggcaaaactagatttaagcgcacgaagattgattaccttatgaactacatggtctacacgatcttcgtggtgttgattctgctttcggcaggtctggcgattggacatgcatactgggaagcacaggtgggaaattcttcctggtacctgtacgatggggaggatgacactccatcctaccgcggcttccttatcttttggggttacataatcgtgttgaatactatggtgcctatctcactgtacgtgagcgttgaagttataagactggggcagtcccactttatcaactgggatctgcagatgtactacgctgagaaggatacgccagcaaaggcaagaaccaccactctgaacgaacagctcggacagattcactacattttctcagataagaccggaaccctgactcaaaacatcatgactttcaaaaagtgttgtattaacggccagatatacggagatcaccgtgatgcatcgcaacataaccataacaaaatcgaacaggtcgatttctcctggaacacttatgctgacggaaagctcgcattctacgaccactatctcattgaacagatacaatccggcaaggagcccgaggtccgacagttctttttcttgctcgcagtgtgccatactgtgatggtcgatagaactgatggacaactgaattatcaagccgccagccccgatgagggagcgttggtgaatgcagcacggaatttcggattcgccttcctcgcaagaactcagaataccattaccatttcggaacttgggaccgaaagaacctataatgtcctggccatactcgacttcaattccgacaggaagagaatgtccattattgtccggacgcccgagggaaacattaagctctactgtaagggagcggacaccgtgatttacgagcgactccatcggatgaatccaactaagcaggaaactcaagacgcactggatatcttcgccaacgaaaccctccgaactctgtgcctctgttataaggagatcgaagagaaggagttcaccgaatggaataagaagtttatggcggcttccgtcgcctcgactaacagagacgaagcgcttgacaaggtgtacgaagaaatagagaaggatttgatcctgctcggcgcaactgcaatcgaagataagctgcaagatggggtgccagagactatcagcaagctggccaaggccgacatcaaaatctgggtcctgactggggacaaaaaagagactgcagagaacataggatttgcatgcgaactgctcaccgaagatactacgatatgctacggcgaggacattaacagcctgctgcatgcgagaatggaaaatcaaagaaacaggggcggagtgtacgctaaattcgcacctcctgtgcaagaatcattctttccgccagggggcaatagagcgttgatcattactggatcttggctcaacgaaatcctgcttgagaaaaagactaaacggaacaagatccttaagctcaagtttccccgaacggaagaagagagacgcatgagaactcaatcgaaaagacgtcttgaagcgaagaaagagcagagacagaagaactttgtggacctggcttgtgaatgttcggcagtgatatgttgtcgcgtcacccccaaacagaaggctatggtcgtcgatcttgtgaagcggtacaaaaaggcaattactcttgccataggagatggcgcaaatgatgtcaatatgatcaagactgcacacatcggtgtgggaatatcaggtcaagaaggtatgcaggcagttatgtcatctgactactcgtttgcacaatttagatacctgcagcgacttctcctggtgcacggtcggtggagctacattcgcatgtgtaagtttcttcggtacttcttttacaagaacttcgcctttactctcgtgcatttttggtacagcttctttaacggctactcagcccaaaccgcatacgaagattggtttatcaccctgtacaacgtgctctatacgtcgcttcccgtccttctgatgggattgctggaccaagatgtctcggataaactttcgttgagatttcctggtctgtacattgtgggtcaacgtgatcttctctttaactacaagagatttttcgtgtccctccttcacggggtcctcacctccatgatattgttcttcatccctcttggggcgtatttgcagacggtgggtcaagacggcgaagcgccttccgattaccaatcatttgcggtgacgatagcctctgcacttgtcataaccgtgaattttcaaattggtcttgatacttcgtactggacctttgtcaatgcattctccatttttggaagcatcgccctttactttggaattatgtttgatttccattccgctggcatccatgtcctctttccaagcgcattccagtttaccggtactgcgagcaatgcactccgccagccatacatttggcttaccattatactggcagtggctgtttgtctgcttcctgtggtggcaatacgttttctttcgatgaccatctggccgtcggagtcagataagattcagaaacacaggaaacgtctgaaggcagaggaacagtggcagcggcggcaacaagtgttccgccggggagtgagcactcggcgctcggcatacgctttttcccatcaacgagggtatgcagatcttattagctccggacgaagcattaggaagaagcgctctcctctggacgcaattgtggcagacggaaccgctgaataccgccgcaccggggattcg

SEQ ID NO: 318965 - DNA, 3753 bp, Artificial Sequence
  derived and/or modified sequence
atgagcacggagagagacagcgagactaccttcgatgaagatagccaacctaacgatgaggtggtgccttactcggatgacgagactgaagatgagcttgatgatcagggatcagccgtcgaaccggaacaaaatagagtgaacagagaagctgaagaaaaccgagagccttttagaaaagaatgtacttggcaagtgaaagcaaacgacaggaaataccacgaacagcctcatttcatgaacactaagtttctttgtattaaggagtctaagtacgcaaacaatgccattaagacgtacaagtacaacgcatttacttttatccctatgaatctctttgaacagttcaagagagcagccaatctctactttctcgctcttctgattttgcaagcggttccacaaatctcgactcttgcatggtacactaccttggtccctcttctggtcgtgctgggtgtgactgcaataaaggatctggtggacgatgtggcacggcataagatggataaggagataaacaacaggacttgcgaagtcatcaaggacgggagatttaaggtggcgaaatggaaggaaattcaggtgggtgatgtgatcaggttgaagaaaaacgacttcgtaccagctgacattctgctcctgtcgagctcggaacccaactcactgtgctacgtggaaaccgccgagctcgatggcgaaaccaaccttaagttcaagatgagcctggaaataactgatcaatacctgcagcgggaggacactctggcgaccttcgacgggtttatcgaatgcgaagaaccaaacaacagactggataagttcaccggtaccctgttctggagaaatacttcctttccgcttgacgccgataagatactgctgagaggctgcgtcattcggaatactgacttttgtcatggacttgtgatcttcgcaggagcagatactaagattatgaagaattcgggaaaaacgaggtttaagaggactaagattgattaccttatgaactacatggtgtacacgatattcgtggtgcttattctgctgtcggccggattggccatcggccatgcgtattgggaggcacaagtcggaaacagcagctggtacctgtacgacggagaagatgataccccatcctaccgcggatttcttatcttctggggatacattatcgtgcttaacaccatggtgccaatatcactgtatgtctcagtggaggtgatcagactcggacaatcccacttcattaactgggacctgcaaatgtactacgctgagaaggataccccagctaaggccagaactactactcttaatgagcagctggggcaaatccattacatcttttcagataagactgggactcttacccaaaacataatgacttttaagaagtgttgcatcaacggtcagatttatggtgaccacagagacgcctcacagcataaccacaacaagattgaacaagttgatttcagctggaacacgtacgcagacggcaaacttgcattctatgatcattacctgatagaacagattcaatccggcaaggagccagaagtgagacaattcttcttcctgctggccgtgtgtcatacggtcatggttgatcgaacggacgggcagctgaactatcaagcagcaagccccgacgaaggagcccttgtcaacgccgcacgcaacttcggttttgctttccttgcacgcactcagaacaccattaccatttctgagttgggaactgaaagaacttacaatgtgctggccattctggatttcaactccgatcgcaagcgtatgtccattatagtcaggacgccagagggtaatatcaaactttactgtaagggggccgataccgtgatttacgagagactccaccgcatgaatcccaccaaacaagaaactcaggatgccctggacatatttgcgaatgaaactctgagaactctttgtctctgctacaaagagatcgaggagaaggagttcacggagtggaacaagaagttcatggcggcaagcgtggcttcgaccaaccgagatgaagcccttgataaggtgtacgaagagattgagaaggatcttatcttgcttggtgcaacggcaattgaagataagctgcaagatggagtgcctgaaaccataagtaaacttgcaaaggcagacattaagatttgggtgcttaccggggataagaaggaaaccgcagagaatatcggctttgcttgcgagctccttaccgaagataccactatatgttacggagaggatatcaactctttgcttcatgctcggatggaaaatcaaagaaacaggggaggtgtgtacgcaaagtttgcaccaccagtccaggagtcgttttttcccccaggtggaaatcgtgctctgatcattactggatcgtggctgaatgaaatcctgctggagaaaaagacgaagcgaaacaagatccttaaactcaagtttcctcgtacggaagaggaacgtcggatgcggacgcaatccaagcggcggcttgaggcaaagaaggagcagcgtcagaagaattttgtggatctcgcctgtgaatgctcagcagtcatctgctgtcgggtgacccctaaacaaaaggccatggtcgtggaccttgtgaagagatacaagaaggccataaccctcgcaattggagatggtgccaatgatgtgaacatgattaagaccgcgcatattggcgtgggtatttcggggcaggagggtatgcaggcagttatgtctagtgactacagctttgcacaatttagatacctgcagaggctcctgttggtgcacgggcggtggtcgtacattcgcatgtgcaagtttctcagatactttttctacaagaacttcgcatttacccttgttcatttttggtactcattcttcaatggttactcggcacagaccgcctacgaggactggtttatcactctttacaacgtcctttacaccagcctccccgtgctgctgatgggactcttggaccaggacgtgtcggataaactcagcctcagatttcccggtctgtacatagtgggccaaagagatctgctgtttaactacaagaggttttttgtgtcactgctccatggcgtgctgacctcgatgattttgtttttcatacctctgggtgcgtacctgcagaccgtaggacaagacggagaagcaccatccgactaccagtcatttgcagtgaccatagcgagcgcgcttgtgatcaccgtcaattttcaaatcggtctggatacctcatactggacctttgtcaatgccttttcgatttttggatccattgcattgtactttgggataatgttcgatttccattcggcaggaatccatgtcctcttcccatccgcctttcaatttaccggcacggcatcaaatgcattgcggcaaccatatatctggcttaccattatcctcgcagtggctgtgtgtctgcttccagtcgtggcaatccgcttccttagcatgactatttggccttctgaaagcgacaagattcaaaagcataggaagaggttgaaagccgaggaacaatggcaacgtcgccagcaagtgttccgacgcggagtgagcacgagacgcagcgcatacgccttttcacatcaacggggatacgccgatttgatctcctccggacggtcgatcaggaagaagcgatccccactggatgcaattgtggccgacggcactgccgaataccgaaggaccggcgattcc

SEQ ID NO: 318966 - DNA, 3753 bp, Artificial Sequence
  derived and/or modified sequence
atgtccactgagcgcgacagcgaaaccactttcgatgaggacagccaacctaacgacgaagtggtcccgtattcagatgacgagactgaggacgagctggatgaccagggatcagcagtggagcccgaacaaaaccgagtgaatagggaagccgaagaaaacagggagccattccgcaaggaatgcacctggcaggtcaaggctaacgaccgcaagtatcacgagcagccacactttatgaatacgaagtttctctgcatcaaggagtccaagtacgcgaacaacgccatcaagacctacaagtacaacgccttcaccttcattccgatgaatctgtttgaacagttcaagcgggcggccaacctttacttccttgctttgttgatcctgcaggctgtgccacaaatctcaacgctggcctggtataccactctggtgccgcttctggtggtgctgggtgtcactgcgattaaagatctcgtcgacgacgtcgcccggcacaagatggataaagaaatcaacaaccgcacttgtgaggtcattaaggacggaaggttcaaagtggcgaaatggaaagaaatccaggtcggggacgtgatccggctcaagaagaatgacttcgtgccagcggacattctcctgctgtcatcatcagaaccgaattcgctctgctacgtggagactgccgagctcgatggggagacgaatctgaagtttaagatgtcactcgaaatcaccgatcaatacctgcaacgcgaagatactctggctaccttcgacggcttcatcgagtgtgaagagcctaacaatcgcctggacaagttcactggaactcttttctggcggaacacgtccttcccgctggatgcagataagatcctcctcagagggtgcgtgatcaggaacaccgacttctgccacggcctcgtgatcttcgccggagccgataccaagatcatgaagaacagcggaaagaccagattcaagcggactaagatcgattacctgatgaattacatggtgtacactatcttcgtagtgctcatcctgctgtctgccggactggccatcggtcatgcgtactgggaagcccaggtcggcaactcctcgtggtacctgtacgacggggaggacgatactccttcgtaccgcggattcttgatcttctggggatacataatagtgcttaatactatggtgcctatctccctgtacgtttccgtcgaagtgatccggctgggccagtcccatttcatcaactgggacttgcaaatgtactacgccgagaaggacacgccggccaaggcacggactaccactctgaatgaacagcttggacaaatccattacatctttagcgataagactggaaccctgacccagaacatcatgacttttaagaaatgttgtatcaacggacagatctacggcgaccaccgcgacgcgtcccagcacaatcacaacaagattgaacaggtggatttctcgtggaatacctacgctgacggtaagctggccttttacgatcactacctcatcgagcagatccagtcgggcaaggagcctgaagtgagacagtttttcttcctgctggcagtctgtcacactgtcatggtggatcggactgatggccagttgaactaccaggcagcgtccccggatgaaggagccctcgtgaatgcggcccgcaactttgggttcgctttcttggcgagaacccagaatactatcacgatctcggaacttggcactgaacgtacttacaatgttctggccatccttgatttcaattcagacagaaagcggatgagcatcatcgtccgcaccccagaaggcaacatcaaactgtactgcaagggagcagatactgtgatctacgagcgcctgcacagaatgaacccgacgaagcaggagactcaagacgcgttggacattttcgctaatgagactctgagaaccctctgcctgtgctacaaagaaatcgaagaaaaggaatttactgagtggaacaagaagtttatggcggcatctgttgcgagcactaacagggacgaggctctcgacaaagtgtatgaggagattgagaaagatctgatcctcctgggcgccacggcaatcgaggacaaattgcaggacggagtgccggagactataagcaagctggccaaagccgacatcaagatctgggtcctgaccggcgacaagaaggagactgcggagaacatcgggtttgcgtgcgaactcttgaccgaggacaccaccatttgttacggcgaggatatcaacagcctgttgcacgcccgcatggaaaaccagcggaataggggaggagtttacgctaagttcgctcctccagtgcaggaatcgttcttcccgcctggaggaaaccgggcattgatcatcactggcagctggcttaacgaaatcctgctggaaaagaaaaccaaaagaaataagattttgaagctgaagttcccgaggaccgaagaggaacggcggatgcgcacccaaagcaagcgccgcctcgaggccaaaaaagaacaacggcagaagaatttcgtggacctggcctgtgaatgctccgccgttatctgttgcagggtcacccctaaacagaaggcgatggtcgtcgatctggtgaagcgctacaagaaggcaatcacgctcgctataggcgacggagctaacgacgtgaacatgatcaaaactgcacatatcggagtgggaatctccggacaagaaggcatgcaggccgtgatgtcatccgactacagcttcgcccagtttagatacttgcagagacttctcctggtccatggccgctggtcgtacatcagaatgtgtaaattcctgagatacttcttctacaagaacttcgcgtttaccctggtccacttctggtactcgtttttcaacggatactcggcgcagaccgcatacgaggactggttcatcactctgtacaacgtgttgtacaccagcctgccggtgctcctcatgggcctgcttgatcaagacgtgagcgataagttgtcacttagatttcctggcctgtacattgtgggacagcgggatctccttttcaactacaaaagattctttgtgtccttgctgcacggagtcctgacctcgatgatcctcttcttcatcccgctgggagcttacttgcagactgtgggacaagacggtgaagcgccgtccgactatcaatcgttcgccgtgaccatcgcaagcgccctggtgatcactgtgaatttccagatcggcctggatacttcctactggactttcgtcaacgcatttagcattttcggcagcatcgccctgtacttcggcatcatgttcgatttccacagcgcaggaatccatgtgcttttcccttccgctttccagtttaccgggaccgcatccaacgccctgcgccagccgtacatctggctcaccatcatcctcgcggtcgcggtgtgtctgctgccggtggtcgctatccgcttcttgtcgatgaccatctggcctagcgaatcggataagattcagaagcatcggaagagactgaaggctgaggaacagtggcaacgaaggcagcaggtctttagaaggggggtgagcacgaggagaagtgcctacgccttcagccaccagagaggatacgctgaccttatctcgtcaggtaggtcgatcagaaagaaacggtcgcctctggacgcgattgtggcggacggaaccgctgagtaccgccgcactggtgatagc

SEQ ID NO: 318967 - DNA, 3753 bp, Artificial Sequence
  derived and/or modified sequence
atgtcgacggaacgtgattcggaaacgacgtttgatgaagattcgcaaccgaatgatgaagttgtaccgtattcggatgatgaaacggaagatgaactagatgatcaaggttcggcggtagaaccggaacaaaatcgagtaaatcgtgaagcggaagaaaatcgagaaccgtttcgaaaagaatgtacgtggcaagtaaaagcgaatgatcgaaaatatcatgaacaaccgcattttatgaatacgaaatttctatgtataaaagaatcgaaatatgcgaataatgcgataaaaacgtataaatataatgcgtttacgtttataccgatgaatttatttgaacaatttaaacgagcggcgaatctatattttttagcgttattaatattacaagcggtaccgcaaatatcgacgttagcgtggtatacgacgttagttccgttactagttgtactaggtgtaacggcgataaaagatttagtagatgatgtagcgcgtcataaaatggataaagaaataaataatcgtacgtgtgaagtaataaaagatggtcgttttaaagtagcgaaatggaaagaaatacaagtaggtgatgtaatacgtttaaaaaaaaatgattttgtaccggcggatatattattattatcgtcgtcggaaccgaattcgttatgttatgtagaaacggcggaattagatggtgaaacgaatttaaaatttaaaatgtcgttagaaataacggatcaatatctacaacgtgaagatacgttagcgacgtttgatggttttatagaatgtgaagaaccgaataatcgtctagataaatttacgggtacgttattttggcgtaatacgtcgtttccgctagatgcggataaaatactactacgtggttgtgttatacgtaatacggatttttgtcatggtttagtaatatttgcgggtgcggatacgaaaataatgaaaaattcgggtaaaacgcgttttaaacgaacgaaaatagattatctaatgaattatatggtatatacgatatttgttgttttaatactactatcggcgggtctagcgataggtcatgcgtattgggaagcgcaagtaggtaattcgtcgtggtatctatatgatggtgaagatgatacgccgtcgtatcgaggttttttaatattttggggttatataatagtattaaatacgatggttccgatatcgttatatgtatcggtagaagtaatacgtttaggtcaatcgcattttataaattgggatttacaaatgtattatgcggaaaaagatacgccggcgaaagcgcgtacgacgacgttaaatgaacaattaggtcaaatacattatatattttcggataaaacgggtacgctaacgcaaaatataatgacgtttaaaaaatgttgtataaatggtcaaatatatggtgatcatcgtgatgcgtcgcaacataatcataataaaatagaacaagtagatttttcgtggaatacgtatgcggatggtaaactagcgttttatgatcattatttaatagaacaaatacaatcgggtaaagaaccggaagtacgtcaatttttttttctattagcggtttgtcatacggtaatggttgatcgtacggatggtcaactaaattatcaagcggcgtcgccggatgaaggtgcgttagtaaatgcggcgcgaaattttggttttgcgtttttagcgcgtacgcaaaatacgataacgatatcggaattaggtacggaacgtacgtataatgtactagcgatactagattttaattcggatcgaaaacgtatgtcgataatagtacgtacgccggaaggtaatataaaattatattgtaaaggtgcggatacggttatatatgaacgattacatcgtatgaatccgacgaaacaagaaacgcaagatgcgttagatatatttgcgaatgaaacgttacgaacgctatgtctatgttataaagaaatagaagaaaaagaatttacggaatggaataaaaaatttatggcggcgtcggttgcgtcgacgaatcgtgatgaagcgctagataaagtttatgaagaaatagaaaaagatttaatattattaggtgcgacggcgatagaagataaactacaagatggtgttccggaaacgatatcgaaactagcgaaagcggatataaaaatatgggttttaacgggtgataaaaaagaaacggcggaaaatataggttttgcgtgtgaactattaacggaagatacgacgatatgttatggtgaagatataaattcgttattacatgcgcgtatggaaaatcaacgaaatcgtggtggtgtatatgcgaaatttgcgccgccggtacaagaatcgttttttccgccgggtggtaatcgtgcgctaataataacgggttcgtggttaaatgaaatactattagaaaaaaaaacgaaacgaaataaaatattaaaattaaaatttccgcgtacggaagaagaacgtcgaatgcgtacgcaatcgaaacgtcgtctagaagcgaaaaaagaacaacgacaaaaaaattttgtagatttagcgtgtgaatgttcggcggtaatatgttgtcgtgtaacgccgaaacaaaaagcgatggtagttgatctagtaaaacgttataaaaaagcgataacgttagcgataggtgatggtgcgaatgatgttaatatgataaaaacggcgcatataggtgtaggtatatcgggtcaagaaggtatgcaagcggtaatgtcgtcggattattcgtttgcgcaatttcgttatctacaacgtttactattagttcatggtcgatggtcgtatatacgtatgtgtaaatttttacgatattttttttataaaaattttgcgtttacgctagtacatttttggtattcgttttttaatggttattcggcgcaaacggcgtatgaagattggtttataacgctatataatgttctatatacgtcgttaccggtactattaatgggtttattagatcaagatgtatcggataaactatcgttacgatttccgggtctatatatagttggtcaacgtgatctattatttaattataaacgtttttttgtatcgctactacatggtgtactaacgtcgatgatactattttttataccgttaggtgcgtatttacaaacggttggtcaagatggtgaagcgccgtcggattatcaatcgtttgcggtaacgatagcgtcggcgctagttataacggtaaattttcaaataggtctagatacgtcgtattggacgtttgtaaatgcgttttcgatatttggttcgatagcgttatattttggtataatgtttgattttcattcggcgggtatacatgtactatttccgtcggcgtttcaatttacgggtacggcgtcgaatgcgctacgtcaaccgtatatatggctaacgataatattagcggttgcggtatgtctattaccggtagtagcgatacgttttttatcgatgacgatatggccgtcggaatcggataaaatacaaaaacatcgtaaacgattaaaagcggaagaacaatggcaacgacgtcaacaagtttttcgtcgtggtgtatcgacgcgtcgttcggcgtatgcgttttcgcatcaacgtggttatgcggatctaatatcgtcgggtcgttcgatacgtaaaaaacgatcgccgttagatgcgatagtagcggatggtacggcggaatatcgacgtacgggtgattcg

SEQ ID NO: 318968 - DNA, 3753 bp, Artificial Sequence
  derived and/or modified sequence
atgtctactgaacgcgatagcgaaactaccttcgatgaggacagccaaccaaacgacgaggtcgtgccgtacagcgacgacgaaaccgaggatgaactcgatgaccaaggctcggccgttgaaccggaacagaaccgcgtcaacagagaggctgaggagaaccgggaaccattccgaaaagagtgcacctggcaagtgaaggcaaacgaccgcaagtaccacgagcaaccgcactttatgaatactaagttcctttgcatcaaagaatccaaatatgccaacaacgcaatcaagacgtacaaatacaatgcgttcacctttatcccaatgaatctgttcgaacaattcaagagggccgcgaatctgtacttcctcgctttgctgatcctgcaagcggtgccacagatctcaactctcgcctggtacactactctggtgccacttctggtggtgctcggggtgaccgcgatcaaggatctggtggacgacgtcgcccggcacaagatggacaaggagatcaacaaccggacctgcgaggttatcaaagacggcagatttaaggtggcgaagtggaaggagatccaggtcggcgatgttatccgcctcaagaaaaatgattttgtccctgcggacatcctgctgctgtcctcctcagaaccgaattcgctgtgctacgtggagacggcggaattggacggggaaaccaacttgaaattcaagatgtccctcgagatcaccgaccagtacctgcaaagagaagataccctggctacctttgatggattcatcgagtgcgaggaaccaaacaataggcttgataagtttaccggaaccctcttctggcggaacacttcgttccctctggatgcggataagatcttgctgcgggggtgtgtcatcaggaatacggacttttgccacggattggtcatttttgcaggggcagacaccaaaatcatgaagaactcaggaaagaccaggtttaagcgcactaaaatcgattacctgatgaattacatggtgtacactatcttcgttgtgctcattctcctcagtgctgggctcgcaatcggtcatgcctactgggaggcccaagtgggaaactcgagctggtacctctacgacggagaagatgacaccccgtcctaccggggttttctgatcttttggggctacatcatcgtcctgaacactatggttcctatctccctgtacgtgtcggttgaggtgatacgcctggggcagtcccatttcatcaactgggacctgcagatgtactacgctgagaaggacaccccggcgaaggcccgcactactactttgaacgagcaactgggacagattcactacattttctcagacaagaccggaactctcactcaaaacatcatgactttcaagaagtgttgcatcaatgggcagatttacggcgaccaccgcgacgcgtcccagcataatcataacaagatagagcaagtggacttcagctggaatacctacgcagacgggaaactggctttttacgaccattacctgatcgagcagatccaaagcggtaaagaaccggaggtgagacaattctttttcctgttggccgtgtgccacactgtcatggtcgatagaactgacggacaattgaattaccaggccgctagcccagacgaaggagcccttgtgaatgccgcgcggaactttggattcgctttcctcgcgagaacgcaaaacaccattaccatcagcgaactgggaactgagcggacctataacgtgctggccatcttggacttcaactccgaccgaaagcgcatgtccatcatcgtgaggacgcccgaaggaaacatcaagttgtactgcaagggagcggataccgtgatttacgagcgcctgcatcgcatgaatcccaccaaacaggaaacccaggatgcactggacatctttgctaatgaaaccctccggactttgtgcttgtgttacaaggaaatcgaagaaaaggagtttactgaatggaacaaaaagttcatggctgcgagcgtggcttcgactaacagagatgaggctcttgacaaggtctacgaggagatcgaaaaagatttgatcctgcttggggccaccgctatcgaggataagctgcaagacggggtcccagaaacgatctcaaaactggcgaaggcagacataaagatctgggtccttaccggggacaaaaaggagactgcggaaaacatcggattcgcatgtgagctgctgaccgaagatactaccatctgctacggagaggacatcaacagcctcctccacgcacgcatggaaaatcagcggaacagaggaggcgtgtacgcaaagttcgcgccgcccgtccaggagtcgttctttccgccgggcgggaatagggctctgatcattaccggaagctggctgaacgagattctgctggaaaagaaaaccaagcgcaacaagattctcaagctgaaatttccccggaccgaggaggaaagaagaatgcgcacgcagagcaagcggcggctcgaggcgaaaaaggagcagcggcagaaaaactttgtcgatctggcatgcgaatgctctgctgtgatctgttgtcgggtgactccgaagcagaaggccatggtcgtcgacctcgtgaagagatacaagaaagccatcactctggcaatcggggatggtgcgaacgacgtgaatatgattaagactgcccacatcggcgtgggcatttccggacaggagggtatgcaagctgtaatgtcatcggattactcatttgcacagttccgatacctgcagaggctgctgctggtgcacggacgatggtcgtatatccgcatgtgcaagtttttgagatacttcttctacaagaatttcgcattcactctcgtgcatttttggtacagcttcttcaacggatactcggctcagactgcatacgaggattggttcattaccctctacaatgtgctgtacacctcgctcccagtcctcctgatgggattgcttgatcaggacgtgtccgataaactctccctgcggtttccagggctctatatcgtgggccaacgggacctgctctttaactataagaggttcttcgtgtcgctcctccacggcgtgctgacttcaatgatcctgttcttcattccacttggagcctacctccagaccgtgggccaagatggcgaggccccatcggactaccagtcattcgcggtgaccatcgcgtccgcactggtgatcactgtgaacttccagatcggactggacacttcctactggacttttgtgaatgcgttttccatctttggttccatcgccctctatttcggaatcatgtttgactttcattcagccggaatccacgtgctgttcccctccgctttccagtttaccggtactgcctcgaatgcactccgacaaccgtacatctggctgaccatcattcttgctgtggcagtttgcctcctgcctgtggtcgcgatccgctttttgtctatgaccatttggccgtcagagtcggacaagattcaaaaacaccgcaagcgactgaaggcggaggaacagtggcagcggcggcaacaagtgttccggcgcggagtctccacgagacgctcagcatacgctttctcacaccagcgggggtacgccgaccttatcagctctggccgctcgatccgcaagaagcgctccccgctcgacgcaatagtggcagacgggaccgcagaataccggcggactggcgattca

SEQ ID NO: 318969 - DNA, 3753 bp, Artificial Sequence
  derived and/or modified sequence
atgtctaccgaacgggattcggagactacctttgacgaggattcccaaccgaacgatgaagtcgtgccatacagcgacgatgagactgaggacgaactcgacgaccaaggatcagctgtagaaccggaacagaaccgtgtgaatagggaggcggaagaaaaccgcgagccattccgtaaagaatgcacttggcaggtgaaggcaaacgacagaaagtaccatgaacagccgcacttcatgaataccaagttcctttgcattaaggaatccaagtacgcaaacaatgccattaagacttacaagtataacgccttcactttcatcccgatgaatctgtttgaacagttcaaacgggccgccaatctttacttccttgctctgctgatcctgcaagcagtgccccaaatctccaccctggcgtggtacaccacccttgtgccacttctcgtggtcctgggcgtcactgcgattaaagacctcgtggatgacgtggccagacacaaaatggataaagaaatcaacaatcggacttgcgaggtgatcaaggacggacgattcaaggtggccaagtggaaggagatccaggttggggacgtgatccggttgaaaaagaatgacttcgtcccggccgatatacttctgttgtcatcctcggagcctaattcgctctgctacgtcgaaactgcggagctcgacggagaaactaatctcaagttcaagatgtcgctggagatcacggatcagtatctgcagagagaagatacgctggcaaccttcgacggattcatcgaatgtgaagaaccgaacaatcgcctggataagttcactggaactctcttctggcgcaacacttcgttcccgctggatgccgacaaaatactgcttcgggggtgtgtgatccgcaatactgatttctgccacggactcgtgatctttgcgggtgccgataccaagatcatgaaaaactccggcaagacccggttcaagcgcactaagattgactacttgatgaactacatggtttacaccatcttcgtggtgctcatcctgctcagcgccggactggccatcggtcacgcttactgggaagcccaagtgggcaactcgagctggtacctgtacgacggagaggacgacactccttcctaccgaggtttcctgatcttttggggctatatcatcgtcttgaacacgatggtgccaatctcgctctacgtgtccgtggaggtcattcgcttgggtcagagccacttcatcaactgggacttgcagatgtactacgccgaaaaagacacccctgcaaaggcaaggactactaccctgaacgaacaactcggtcaaatacactatatcttcagcgataagactggtaccctgacccagaatatcatgaccttcaaaaagtgctgtatcaacggacaaatttatggggaccacagagacgcttctcagcataaccataacaaaatcgagcaggtggatttttcatggaacacctacgcagacggaaagctggcattctacgaccattatctgatcgagcagatccaatccggtaaggaacccgaggtgcgccagttctttttcctgctcgcagtgtgccatactgtcatggtggatcgcactgatggacaattgaactaccaagcggcgtcccctgacgaaggcgcgctggtgaatgcggctcggaacttcggattcgcctttctggctagaactcaaaacaccattacgattagcgaactggggactgagcggacgtacaatgtgctcgcaatccttgactttaactcggaccggaagcgcatgtcgatcattgttcgcaccccagaggggaatattaagctgtactgcaagggcgctgataccgtgatctacgagaggctgcatagaatgaacccaaccaagcaggaaactcaagacgccctggacatcttcgcaaatgaaaccctgaggacgctgtgcctctgctacaaggagatcgaagagaaggagttcaccgaatggaacaaaaagttcatggccgcctcagtggcgtccactaatcgcgatgaagccctcgataaggtgtacgaggaaatcgaaaaagatctgatccttctcggtgccactgccatcgaggacaagctccaggacggagtgccagagactatcagcaagctggccaaggccgatattaagatctgggtcctcaccggagataagaaggaaactgctgagaacattggcttcgcctgcgagctgctcaccgaagataccaccatctgctacggcgaggacattaattcgctgctccacgcgagaatggaaaaccagcgcaaccggggaggcgtctacgccaagttcgctccaccagttcaggagtcgttcttccccccgggaggtaaccgggccctgatcatcacgggcagctggcttaatgagatcctgctcgagaaaaagactaagcgcaacaagatcctgaaactcaaattcccgcgcacggaggaagaacgcagaatgagaactcaatcgaaacgccgactggaagccaagaaggaacaacggcagaaaaacttcgtggacctggcctgcgagtgttccgcggtgatctgctgccgggtcaccccgaaacagaaggcgatggtggtcgatctggtgaagagatacaagaaggctatcactctcgcgatcggggacggcgccaacgatgtcaacatgatcaaaaccgcccatattggcgtcggaatctcaggccaagagggaatgcaggcggtgatgtcgtcagactactcctttgctcagttccgctacctgcagcggttgctcttggtccacggaaggtggtcctacatcagaatgtgtaaatttctgcggtacttcttttacaaaaattttgcgttcaccttggttcatttttggtactcgtttttcaatggatacagcgcacagaccgcgtacgaggattggttcatcacgctgtacaacgtcctgtacaccagccttcctgtgcttctgatgggattgctcgaccaagacgtgtccgacaaactcagtctccgcttccctggactgtacatcgtggggcaaagggacctcctgttcaactacaagaggttctttgtctcgctgctgcacggagtgctcacctcaatgatcctgtttttcatccccctgggagcctaccttcagaccgtgggacaggacggggaagcacctagcgattaccagtcgttcgcagtcaccatcgcgtcagctctggtgatcactgtgaacttccaaatcggactcgatacctcctactggacctttgtgaatgcctttagcatctttgggagcatcgcactgtattttggaatcatgttcgacttccattctgccggcatccacgtcctcttcccgtcggctttccagtttaccggaaccgcctccaacgcactgagacagccgtacatctggttgactatcatcctggctgtggcggtctgtctgttgccggtcgtcgccatcaggttcctctcaatgacgatctggccgtcagaatccgataaaatccagaagcaccgcaagcgcctgaaagcggaagaacagtggcagcggagacaacaggtattccggcgaggcgtgagcacccggcgctcggcatacgccttcagccaccagcggggatacgctgacctgatctcatcaggacggtccattcgcaagaagagaagtcccctggacgctattgtggcagacggcactgcggaataccgcaggaccggagactcg

SEQ ID NO: 318970 - DNA, 3753 bp, Artificial Sequence
  derived and/or modified sequence
atgtctactgagcgggactcggagacgactttcgacgaagattcccagccaaacgatgaggtggtgccgtactccgatgacgaaactgaggatgaactcgacgaccaaggctcagccgttgaaccggaacaaaacagggtgaaccgcgaagccgaggagaacagagaacctttccgtaaggagtgcacttggcaggtgaaagcgaatgacagaaagtaccatgaacagcctcacttcatgaacacgaagttcctttgtatcaaggaatcaaagtacgctaataacgcgatcaagacgtacaagtacaacgccttcaccttcattccaatgaacctgttcgagcaattcaagcgggcagccaatctgtattttctcgcactgttgatcctgcaagctgtgccgcagatttccaccttggcgtggtacactactttggtgcccttgctcgtggtcctgggagtcaccgccattaaagacctcgtggacgacgtggcacgacacaaaatggataaggagatcaataatcggacgtgcgaggtgatcaaagacggtcgcttcaaggtggcgaagtggaaggaaatccaggtgggagacgtgatcagactgaagaagaatgatttcgtccctgccgatattcttctgctgtcaagctccgaacctaacagcctgtgctacgtggagactgctgagctggatggggaaaccaatttgaagttcaaaatgagcctggaaatcactgaccagtacctccaacgcgaggatacgctggccactttcgatggattcatcgagtgtgaagagccgaacaacaggctggacaagtttaccggaacgctgttctggagaaacacctcctttcccctggatgctgacaagatcttgctgcgcgggtgcgtgattcgcaacactgatttctgccatggcctcgtgattttcgcaggcgccgatactaaaatcatgaaaaactcaggaaagactcgcttcaagcgcaccaagatcgactaccttatgaactacatggtgtatactatcttcgtcgtgctgatcctgctgtcggctggccttgcaatcggccacgcctactgggaggcccaagtgggaaactcaagctggtacctttacgatggagaggacgataccccatcgtaccgcggcttcttgattttctggggatacattatcgtcctcaataccatggtgccgatctcgttgtacgtgtccgtggaagtcatccggcttggacagtcgcacttcattaactgggacctgcaaatgtactacgccgagaaagatacccctgcaaaggcccgcaccacgactttgaacgagcagctcggacaaatccattacattttcagcgacaagactggaactctcactcagaatatcatgaccttcaaaaagtgctgtatcaatggacaaatctacggagatcaccgcgacgcttcgcagcacaaccacaacaagatcgagcaggtcgatttttcttggaacacctacgccgacggtaagttggcgttctacgatcactatctgatcgaacagatccagtctgggaaggaaccagaggtgcggcagttcttttttctgttggcagtctgtcacaccgtgatggtcgacagaactgacggacagctgaactaccaagcggcatctccggacgagggggctttggtcaatgcagctcgtaatttcggtttcgccttccttgcccgcactcaaaacacgattactatctccgagctgggaacggagcgcacctacaatgtgctcgcaatcttggactttaactcggatcgaaagaggatgtcgatcattgtgcggaccccggaaggcaacatcaagctctactgcaaaggagccgacaccgtgatctacgaaagattgcataggatgaatcctaccaagcaggaaacccaggatgcattggacatcttcgctaacgagactctcagaaccctttgcctctgttataaggaaatcgaagaaaaggaatttaccgagtggaacaagaaattcatggccgcatccgtcgccagcactaaccgggatgaagccctggacaaggtgtacgaggagattgagaaggatttgatcttgctcggcgccactgccatagaagataagctccaggacggcgtcccggaaactatatcgaaactggcgaaagctgatatcaagatctgggtcctgacgggagacaaaaaggaaactgccgaaaacatcggattcgcgtgcgaattgctgactgaagataccactatctgctatggagaagatatcaactccctcctccatgcccggatggagaaccagaggaatcgcggcggagtttatgccaagttcgcgccgccggtgcaggagagctttttccctccaggagggaatcgtgcgctgattatcaccggcagctggctgaacgagatactgctcgaaaagaaaaccaagcgcaataagattctgaagctgaagttccccaggaccgaagaggaaaggcgcatgcgtacgcaatcgaagcggcggctggaagccaagaaggaacagcgccagaaaaacttcgtggacctggcatgcgagtgctcagcggtgatctgctgtagagtgaccccgaaacaaaaagcaatggtcgtggacctcgtgaagaggtacaaaaaagctatcacgcttgcgatcggcgacggagcaaatgatgtcaatatgatcaaaactgcgcacatcggcgtcggaatctctggacaggaagggatgcaggccgtcatgtcgtccgactattcgtttgcccaatttagatacttgcaacggctcctgctcgtgcatggccgctggtcctacatccgcatgtgcaaattcctgcggtacttcttctacaagaatttcgcattcactctggtgcacttttggtattcatttttcaacggatattccgcccagactgcctacgaagattggttcatcacgctgtacaacgtgctgtacactagcctccctgtgctgctcatggggctgctcgaccaggacgtcagcgataaactgtcgctgcgcttcccaggcctgtacatcgtgggccagcgggacctgctgttcaactacaaacgctttttcgtcagcctgctgcacggggtgctgacctcgatgatcctgttcttcatccccctgggagcttacctgcagactgttggacaggatggagaagcgccttcggactaccaatcgtttgctgtaactatcgcgtccgccctggtgatcactgtgaacttccagatcgggctggacacctcctactggacttttgtgaacgcattctcgatctttggatccatcgccctttacttcggcattatgttcgacttccactcagccggcatccacgtgctgtttcctagcgcctttcaattcactggcaccgcatccaatgcgctgcggcaaccgtacatctggcttaccatcatcctggcggtcgcggtgtgtctgctgcctgtcgttgccatccgcttcctttctatgactatttggccatccgaatcagataagatccagaagcatcggaaacggctgaaggccgaagaacagtggcagcgcaggcaacaggtatttagacggggcgtctcgactaggagatccgcttacgcgtttagccaccagcggggatacgcggacctgatcagctccggtcggtccattcggaaaaagcgctcgcctcttgacgccatcgtggcagacggaactgcagagtaccggcggactggagacagc

SEQ ID NO: 318971 - DNA, 3753 bp, Artificial Sequence
  derived and/or modified sequence
atgtcgaccgaaagagactctgaaaccacgtttgacgaggattctcagccaaacgatgaggtcgtgccctacagcgatgatgaaaccgaggacgagttggatgatcagggaagtgcagtcgagcctgaacaaaacagagtcaacagagaggcagaagagaaccgggaaccctttcgtaaggagtgtacttggcaggtgaaagcaaatgatcgtaagtaccatgagcaacctcatttcatgaacaccaagtttctttgcattaaggaaagcaagtacgctaacaacgcaattaagacttacaagtacaatgcattcacctttatccccatgaatcttttcgagcagtttaaacgcgctgcaaatctgtactttcttgcactgttgatcctgcaagcagtgccccaaatttcaacccttgcatggtacaccacgctggtgcctctccttgtcgtgcttggtgtgacggcgattaaagatctcgtcgacgacgtggccagacacaaaatggataaggaaatcaacaacaggacctgcgaagtgattaaggatggtagattcaaggtggcaaagtggaaggaaattcaagtcggtgatgtgatacgcctgaagaagaacgacttcgtgcccgcagatatcctgctgctctcttcgtcagagccaaacagcctttgttatgtggaaactgctgagctggacggagaaactaatctgaagttcaagatgtcccttgagataaccgaccagtacctccaacgggaagatacccttgcaacgttcgacggtttcatcgaatgtgaggaacctaataacagacttgacaagtttacgggcaccttgttctggaggaacacctcctttccactcgatgcagataagattctgctccgtggatgtgtgatacggaataccgatttctgtcatggactggtgatattcgcaggcgcagataccaagattatgaagaatagcggaaagactcggttcaagcgaaccaaaatcgattacctcatgaactacatggtctacaccatttttgtcgtgcttatccttctctcggccgggctggccattgggcacgcatactgggaggcccaagttggtaactcgtcatggtacctctacgatggagaggacgacaccccaagctacagaggctttctgatcttttgggggtacattatcgtgctgaacactatggtgcctatctccctgtacgtcagcgtcgaagtgattcggctcggacagtcccatttcataaactgggatctgcagatgtactatgcagaaaaggataccccggcaaaggctcgaaccactactcttaatgaacaacttggccagatccattacattttctcagacaagactggaactctcacccagaatatcatgactttcaagaaatgctgcattaatggccagatttacggcgaccatcgggatgcatcacaacataatcataacaagattgagcaagtggatttttcatggaacacttacgcggatggaaaacttgcattctacgatcattaccttattgaacagattcaatccggaaaggagccagaagtgcggcaattctttttcttgcttgccgtctgtcacaccgtcatggtggatcgcactgacgggcaactgaattatcaagctgcatcgccagatgaaggagcgctcgtgaatgccgcacgaaactttggatttgcttttctggcacgaacccaaaatacgattactatatcagaactcgggaccgaaagaacctacaatgtcctggcaatcttggatttcaattcggacagaaagcgaatgtccattatagtgcgcacccctgaggggaatatcaagctgtactgtaaaggagcggataccgtcatatacgaaagacttcataggatgaatccaactaaacaggaaacccaagacgcactggacatctttgcgaacgaaactctgagaactctttgtctttgttataaggaaattgaagagaaggaatttactgaatggaataagaagtttatggcagcctccgtcgcatcaactaatcgagacgaagccctggataaagtgtacgaagagattgaaaaggatcttattctgctgggagcgactgcaattgaggacaagctgcaagatggagtcccagaaactattagcaaactcgctaaagcagatatcaagatctgggtcctcactggtgataagaaggaaaccgcagagaatataggttttgcatgcgagctgcttactgaggacactaccatttgttacggcgaggacataaactcactgctgcacgctcgcatggaaaaccaacgtaacagaggtggtgtgtacgcgaagtttgcaccccctgtgcaggaatcgtttttcccaccggggggaaatcgggccttgataatcactggctcgtggctcaacgaaatccttttggagaaaaagaccaaacgtaacaagattttgaaacttaagttcccaagaaccgaagaagagcgtagaatgcgaactcagtcgaagcgaaggctggaggccaaaaaagagcagcggcaaaagaactttgtggacctcgcttgcgagtgtagcgcagttatttgttgtcgtgtgacccctaaacagaaggcaatggtcgtggatcttgtgaagcgatataagaaggcaatcactctcgcaataggcgatggcgcaaatgatgtgaacatgataaagaccgcacacattggagttggaatttcgggacaggaagggatgcaggcagtgatgtccagcgactattcgtttgcgcaattccggtacctccagcggctgctgcttgtgcacggtagatggtcgtacattagaatgtgtaagttccttcggtacttcttttacaagaattttgcgtttaccctggtgcacttttggtatagcttctttaacggatactcagctcaaaccgcgtacgaagattggttcatcaccctctataatgtgttgtatacctccctccccgtgcttcttatgggactgctggaccaggacgttagcgataagctcagcctgcgtttccccggcctgtacatcgttggtcagagagatctcctctttaactacaaacggtttttcgtctcgctcttgcacggagtgctcacgtcgatgattctgttcttcatccctcttggagcgtaccttcaaaccgtcggacaggatggcgaggcaccttcggattaccagtcgtttgcagtcaccattgcatcggcacttgtgatcaccgtcaacttccaaatcggtctggacacttcatactggacctttgtcaacgctttttctatattcggttcaatcgccctgtacttcggaatcatgtttgactttcattcggcagggattcacgtgcttttcccctcggcctttcagttcactggaaccgcaagcaacgcattgcggcagccctacatctggcttaccattatccttgcggtggctgtgtgtctgctcccagtggttgccatccggtttttgtccatgaccatttggccatccgaatctgataagattcagaagcatcgcaagcgcctcaaggcagaagaacagtggcaaagacgccagcaggtgtttcgcaggggagtgtccactcgaaggtcagcttacgcattctcgcatcagcgcggctatgctgatcttatcagctcagggcgttccattaggaagaagcgctccccgctggatgcgatagtggcagatggaactgcagagtaccgtaggaccggtgatagc

SEQ ID NO: 318972 - DNA, 3753 bp, Artificial Sequence
  derived and/or modified sequence
atgagcaccgaacgcgatagcgaaaccacgttcgatgaggactcacagcccaatgatgaagtcgtgccatactccgatgacgagactgaagatgaacttgatgaccaaggttccgccgtcgaaccagaacagaaccgggtcaatagagaagcagaagaaaatagggaaccttttcggaaagaatgtacttggcaggtgaaggcgaacgaccgcaagtaccacgaacaacctcactttatgaacactaagttcctctgcattaaagaaagcaagtacgcaaataacgccattaagacctacaagtataacgcatttactttcatcccaatgaatctgtttgaacagtttaagcgagccgcgaatctttactttctggcgcttctgattctgcaagccgtgccccagatcagcactctggcgtggtacaccactcttgtccccctgcttgtcgtcctgggcgtgacggctataaaggatctcgtggatgatgtcgcgagacacaaaatggacaaggagattaacaatcgcacctgcgaggtcatcaaggatggacgattcaaggttgcaaagtggaaagaaattcaggtcggtgatgtcattcgcctcaaaaagaacgactttgtgccagccgacatcctccttctttcaagctcggagcctaactctctttgctacgtggagacggctgaactcgatggagaaaccaatctgaaattcaaaatgtctcttgagattactgatcaataccttcagcgcgaagatacgcttgcaacctttgatggatttatcgagtgcgaggagcctaacaatcgcctggataagtttactggaaccctgttttggcggaacacttcctttccactcgacgcagacaaaattcttctcagagggtgtgtcattagaaacactgatttttgccatggcctggtcatttttgcaggtgcagataccaagattatgaaaaactcaggaaagactcgattcaagagaactaagatcgactaccttatgaactacatggtgtacactatctttgtcgttcttattctgctttcagctggtctggccattggacatgcatactgggaagcgcaagtgggaaattcgtcgtggtacctttacgacggagaggacgatacgccttcatacagaggtttccttatcttttggggatacatcatcgtgttgaatacgatggtgccaatttctctgtatgtttcggtggaagtgatccggctgggacagtcgcactttatcaactgggacctccaaatgtactatgccgagaaggatactcctgcaaaggctagaaccaccactctgaacgagcagttgggccagattcattacatcttttcagataaaactgggacccttactcaaaacattatgacctttaagaagtgctgtattaacggtcagatctacggcgatcacagagatgcgagccagcataatcataacaaaatcgaacaggtggacttctcatggaatacgtacgcagacggcaagttggcgttttacgatcactacttgatcgagcaaatccagagcggaaaagagccggaagtgaggcagtttttctttcttcttgcagtctgtcacaccgtgatggtggaccggacggacggacaactgaattatcaggcggcatcccctgatgagggagcgctggttaacgcagctagaaactttggctttgcctttttggcaaggacccagaataccataactattagcgaactcggtaccgaaaggacctacaatgtcctggccatactggatttcaattccgatagaaagagaatgtcaatcattgtccgcactcctgaagggaacatcaaactgtactgtaaaggagctgatactgtcatttacgaaagattgcataggatgaacccaactaagcaggagactcaggatgccttggatatctttgcgaatgaaaccttgcgtaccctgtgtttgtgctacaaagaaattgaagaaaaggagtttaccgagtggaataagaaattcatggcggcgtcagtggcatccaccaaccgcgatgaggcgcttgataaagtgtacgaagaaattgaaaaggatctgatacttctcggagcaactgcaatcgaggacaagctgcaagacggagtgccggagactataagcaagctcgcgaaggccgacatcaagatctgggtgctcactggagacaaaaaagaaaccgcagaaaacatcggctttgcctgtgaacttctgaccgaagatactactatttgttacggagaagatatcaactcgctgctgcatgccagaatggaaaaccaacgcaaccggggtggtgtgtacgcaaagtttgcccctcctgtgcaagaatcgttttttccaccaggaggcaatagggcactcatcatcactggttcatggctgaacgaaattctcttggaaaagaaaaccaagaggaataagatactgaaacttaagttccctagaactgaagaggaacggagaatgagaacgcagagcaagaggcgcctggaggcaaaaaaggagcaaagacaaaagaacttcgtggatcttgcctgtgagtgctcggcagtgatttgctgccgggtgacgcccaagcaaaaggccatggtcgttgatcttgtgaagagatacaagaaggcaatcacccttgcaattggagatggtgctaacgacgtgaacatgattaagactgcgcatatcggagtcggaatttcgggtcaagaggggatgcaggccgtgatgtcgtcggactactccttcgcccagtttcgttacctccagagactgctgcttgtgcacgggaggtggtcatatatcagaatgtgcaaattcttgagatactttttctacaagaacttcgcatttactctcgtccacttttggtacagcttctttaacggctactccgcccaaacggcatacgaagattggttcataactttgtacaatgtgctttacacgagtctgccagtgctcctgatggggctgctggatcaagatgtgtccgacaagttgagcctgagattccctggactgtatattgtgggtcagcgggacctgctgttcaattacaaaagatttttcgtgagccttctccacggggtgcttactagcatgattctctttttcatccctctcggtgcatacctccagactgtgggtcaggacggggaagcaccctcggattaccagagctttgcagtcaccatcgcatcagctttggtcattaccgtgaattttcagattggacttgatacctcctactggacttttgtcaatgcgttttcgattttcggttccattgcgctgtactttggaatcatgttcgatttccactcagcaggcattcacgtcctgtttccatccgcatttcagtttaccggaactgcttcaaatgccctgcgtcaaccatacatttggctcaccattattctggcagtggcagtgtgtctgctgcccgtggtggcaatacggtttctgtccatgaccatctggccatcagaatccgacaaaatacaaaagcacagaaagagactgaaggctgaagaacagtggcagagacgacagcaggtgtttcgccgtggtgtctcgacccgcaggagcgcttacgcatttagccatcaacgaggttacgcagacctgatatcgtccggcagatctatcagaaagaagcggtcccctctcgatgcgatagtggccgatgggaccgccgaatacagacgtaccggagattct

SEQ ID NO: 318973 - DNA, 3753 bp, Artificial Sequence
  derived and/or modified sequence
atgtctactgagagagatagtgagaccacatttgacgaggattcacagcctaacgacgaggttgtaccttacagcgacgatgaaaccgaagatgaactggacgaccagggatccgcagtggaacctgaacagaacagagtgaacagggaggcagaggaaaacagagagccttttaggaaggaatgcacgtggcaggttaaagccaacgacaggaagtatcatgaacaaccgcatttcatgaataccaaattcctgtgtattaaagaaagtaagtacgccaataacgcgattaagacttacaaatataatgccttcactttcatccccatgaacctgttcgagcaatttaaaagggcagcgaacctgtatttcctggctctcctcattcttcaagcggtgccacaaatatcaactttggcttggtacaccacgctggtcccactgctggtggtccttggcgttactgccatcaaagatctcgtcgacgatgtcgccagacacaaaatggacaaggaaattaacaataggacatgtgaggtcataaaggacggcaggtttaaagtagctaagtggaaggaaattcaggttggtgacgtgataaggctcaagaagaacgacttcgtgccagctgacatcttgctgttgagctcttctgagcccaatagcctctgttatgttgagaccgcggagcttgacggtgagaccaatttgaagttcaaaatgtccctcgaaattaccgaccagtacctgcagcgcgaagatactctcgcaacattcgacggattcattgagtgtgaagaacccaataaccgcctcgataagttcactggtaccctcttctggaggaacacatcatttcccctggacgctgacaagattttgctgcgcggttgcgtgatcagaaacaccgacttctgtcacggcctggtgatcttcgccggcgcggacacaaagataatgaagaactccggcaaaactcgctttaaaaggaccaagattgactaccttatgaactatatggtctacaccatatttgtggttctcattctgttgtcagcaggtcttgctatcggtcacgcctattgggaggctcaagtgggcaattcttcttggtatctgtacgacggcgaggatgacacaccttcctacaggggctttttgattttttggggatacatcattgtgctcaataccatggtgccgatctcactgtacgtaagcgttgaggttatcaggttgggacagtctcattttatcaactgggacctgcagatgtattatgccgaaaaggacacacccgctaaggctcgcaccaccacattgaacgaacagctgggacaaattcactacatcttctcagataagacaggtaccttgacgcagaatatcatgaccttcaagaagtgctgtattaacggccagatctatggtgaccaccgcgatgccagtcagcacaaccataacaaaattgaacaagtagacttttcttggaacacatatgccgatggcaaattggccttctacgatcattacttgatagagcagatacagtcaggtaaagagccagaagtccgccagtttttcttcctgttggcagtatgtcacacggtgatggttgatagaacagacggacagcttaactatcaagcagcgtcccccgatgaaggtgcattggttaatgcagctagaaatttcggttttgcttttttggccagaacccagaatacaatcacgatctccgagctgggtacggagaggacatacaacgtcctcgctattttggactttaacagtgatcgcaagcgcatgagcatcatcgtgagaacgcctgaaggtaacatcaagctgtactgtaaaggagcggatactgtgatatacgagaggcttcacagaatgaatcccaccaagcaggagacccaggatgccctcgatatttttgcgaacgaaacgctgagaaccctgtgtctttgctacaaggagatagaggaaaaggaattcacggagtggaacaaaaagttcatggctgcgagtgtggcgtctacgaatcgcgatgaggcactcgataaagtttacgaagagatcgagaaagacctgatccttcttggagctaccgctatcgaagataaactccaggacggagtgcccgaaactatatctaaactcgccaaagccgatatcaagatctgggtactgactggcgataagaaagagaccgctgaaaatatcggtttcgcctgcgagttgttgactgaagataccactatttgttacggagaggatatcaattctctcttgcatgctaggatggaaaatcagcgcaataggggcggtgtgtatgcaaaatttgcgcctccagtacaggaatctttttttcccccaggcggcaatagggcgctcatcatcaccggcagttggctgaacgagatcttgcttgagaaaaagactaaaaggaacaagatcctgaagctgaagttcccgagaactgaggaggaacgccgcatgaggactcagtccaagcgcaggttggaagctaaaaaggaacagaggcaaaagaacttcgtagatctggcctgcgagtgttctgctgtgatctgttgccgcgtcactcctaagcagaaggccatggtagttgacctggtcaagaggtataaaaaagctattacactggccattggtgatggtgcgaacgacgttaatatgattaagaccgctcacatcggcgtcggcatatctggtcaagaaggcatgcaagccgtcatgtcttccgactacagctttgcacagttcagataccttcagcgcctgctgctggtgcacggcaggtggagctatataagaatgtgcaagttcctgcgctatttcttctataaaaacttcgcgtttacgctggtccacttctggtactccttcttcaatggatactctgctcagactgcatacgaagactggttcataaccctctacaacgtgttgtacacatcactcccagtgctcctgatgggactccttgatcaggacgtaagtgacaagctgtcactgagattcccaggtctctacatcgtcggacagagggaccttctctttaactataaaaggttcttcgtttctctgcttcacggagtcctcacttccatgatccttttcttcataccactcggtgcctacctgcagaccgttggacaggacggcgaagcaccctccgattatcagagttttgctgtcacaatcgcgtccgccctcgtgattacagttaacttccaaattggattggacaccagttactggaccttcgtaaacgcctttagcatctttggctccattgctctttactttggtatcatgttcgacttccacagcgctggaatacacgtactgttccctagtgcttttcaatttacaggtacggcatcaaatgcattgcgccagccgtacatctggttgactatcatcttggccgtcgccgtctgcctgcttccggttgttgccattcgcttcttgagcatgacgatctggcccagcgaaagcgacaaaatacagaaacatagaaagagactcaaggccgaagaacaatggcaaagaaggcagcaggtgttcaggagaggcgtgtcaactcgccgcagtgcctacgccttttcccaccagcgcggctacgccgatctgatctcatccggtagatctattagaaagaaaaggagtccattggacgcaatagttgccgacggcacagctgagtatcgccgcaccggtgacagc

SEQ ID NO: 318974 - DNA, 3753 bp, Artificial Sequence
  derived and/or modified sequence
atgtcgacggaacgcgactctgaaactaccttcgacgaggacagccagcccaacgacgaggtcgtgccatactctgatgacgagacggaggacgagctagatgaccaaggatccgcagtggagccagaacagaaccgtgtgaatagagaagccgaggagaaccgagagccattccgcaaagagtgcacttggcaagtgaaagcgaacgaccgtaaatatcatgaacagcctcattttatgaataccaagttcttgtgtattaaagagtcgaagtacgccaataatgcaatcaagacttacaagtacaacgcattcacatttattcctatgaatctctttgagcagtttaaaagggccgccaatctctatttccttgcgttgcttattttacaagctgttcctcagatctctaccctcgcgtggtacaccacgcttgttccacttttggtggtgctgggcgtgaccgccatcaaagacctggtcgacgacgtcgcacgtcataagatggataaggaaatcaacaacaggacatgcgaagttatcaaagatggacggtttaaggttgctaagtggaaggagattcaagttggggacgtgatccgcctcaaaaagaacgactttgtaccagctgacattcttttactttcttctagtgaacccaatagtctttgctacgtggagacggcggagctagacggcgagacgaacctgaaattcaaaatgtcactcgaaatcacggatcagtacttgcagcgcgaagacacacttgcaaccttcgacggcttcattgaatgtgaggaaccaaataacagactggacaagtttaccggcacgctcttctggcgcaacacatccttccctctagatgccgacaagatactcctgaggggctgcgttatccgcaatacggatttttgtcacggacttgtgattttcgctggtgcggacaccaagatcatgaagaatagcggtaaaactcgcttcaaacgtactaagatcgattatctaatgaattacatggtgtataccatattcgttgtccttatcctgctgagtgccggactggccattggacacgcttattgggaagctcaggttggcaattcctcatggtatctttacgatggagaagatgatacgccgtcgtaccgtggctttcttattttttggggctacataattgtgttgaataccatggtccctatctctttgtacgtctcagttgaggtaatcagacttggtcaatcgcacttcatcaattgggatctgcaaatgtactacgcggagaaggacactccggcaaaggccagaacgacgactctcaatgaacagctcggccaaatacactacatcttctctgataagactggtacgctgacccagaatatcatgactttcaagaagtgttgcattaacggtcagatctatggggatcatagggacgccagccagcataatcataataaaattgaacaggttgacttttcctggaatacttacgccgatggtaaactagcattttacgatcattacctgattgagcagatccagtccggaaaggaaccagaagtgcgccagttctttttcttacttgcagtctgccatacggtaatggtagatcggaccgatggtcagttgaactaccaggcagccagcccggacgaaggagctctcgttaacgctgccagaaattttggcttcgcttttctagcacgtacacagaacacgattactatttctgaattggggacggagcgcacctacaacgtgctcgccatccttgattttaactcggaccgtaaacgtatgtcaataatagtccgaaccccagaggggaacattaagctttactgtaagggggcagatacagtcatctacgaacgcttgcaccgtatgaatcccacaaagcaggagacgcaggatgccttagatatttttgccaatgaaacgctgcgaactctgtgcttgtgttacaaggaaattgaagaaaaggagttcaccgaatggaacaaaaagttcatggccgccagcgtagcctcgaccaatagggacgaggctttagataaggtttatgaagagatcgaaaaggacttaatcctgttgggcgcgaccgctatcgaggacaaactccaggatggcgtgcctgagactataagcaagctcgctaaggcagacattaagatttgggtccttactggggacaagaaggagaccgctgagaacattgggtttgcttgcgagctgcttacagaagatactacgatttgttatggcgaggacatcaactccttgctacatgctagaatggagaaccaacgcaatcgagggggtgtctacgcaaagtttgcgccccccgtgcaagagagtttctttccacctggtggtaatcgagcgttgatcatcaccggaagttggttgaatgaaattcttcttgagaagaagacgaagcggaataagatccttaaactaaaattcccgcggactgaggaggagcggcgcatgcgcacccagtccaaacgacgattagaagcaaagaaagagcagcggcagaagaatttcgtagatctcgcctgcgaatgctccgccgtgatctgttgccgcgtcacgcctaaacaaaaggcaatggtggtagatttggttaagcgttacaagaaagccatcacgctcgctattggtgacggtgcaaatgacgtaaacatgatcaagaccgctcatatcggcgtcggtatttccggtcaagaagggatgcaggcagtcatgtctagcgattacagctttgcccagttccgatatttgcagcgtcttctcttggtgcatggtagatggtcctatatccgcatgtgcaaattccttcggtacttcttctataagaactttgcttttaccctcgtgcacttttggtactccttcttcaacggctactctgcacagaccgcttatgaggactggtttattaccctatacaacgtgttgtacacctctctcccagtactgttaatgggcttactcgaccaggacgtttctgacaagttaagcctccgattccccggcttgtacattgtaggtcagcgtgatctgctgttcaattataaacgattctttgtgagtttgctgcacggggtactcacgtcgatgattctattttttattccattgggcgcgtacctccagactgtagggcaagacggagaagctccaagcgattatcaatcattcgccgtcacaatcgcctcagctctcgtcatcaccgtcaacttccaaatcggcctggatacaagctactggacattcgtcaacgctttttcgattttcggcagcatcgccctttatttcggcatcatgtttgacttccattccgcgggaattcatgtcctgttcccttccgcgtttcaatttacgggcaccgcctcgaacgccctgcggcagccgtatatttggctaacgataatacttgcagtagctgtttgcctattacctgttgtcgctatcagatttctttctatgaccatatggccctctgaatctgataagatacaaaagcaccgtaagcgccttaaggcagaggagcaatggcagcgccgccaacaggtttttcgaaggggtgtcagcacgaggagaagtgcttacgctttttctcaccagcgcgggtacgctgatctgattagcagtgggcggtccattcgaaagaagcggtcacctcttgatgcaatcgtcgccgacggtaccgctgaatatcgccgtaccggagattct

SEQ ID NO: 318975 - DNA, 3753 bp, Artificial Sequence
  derived and/or modified sequence
atgtctaccgaacgagattcggagacaacttttgatgaagatagccagcccaacgacgaagtggtgccatactccgacgacgagaccgaggatgagttggacgaccagggttccgccgtcgagcccgagcagaatcgggtcaacagagaggctgaggagaacagggagccattccgcaaagaatgcacttggcaagtgaaggccaacgataggaagtaccatgagcagccacacttcatgaataccaagtttctttgtatcaaggagagcaaatatgcaaacaatgcaataaagacgtacaaatacaacgccttcacctttatacccatgaatctgtttgagcagtttaagagagccgctaacctgtactttctggctctcctgatcctgcaagcagttccccagatcagcacactggcctggtacactaccctggtgccactccttgtggtcctcggtgtaactgccataaaagatcttgtcgatgacgtggctcggcataagatggacaaagagattaataaccgtacttgcgaggtaatcaaagatggaaggtttaaagttgccaaatggaaagagattcaggtcggagacgttattagactcaagaagaacgattttgtgcccgcagatatattgctcctgagtagcagcgagccaaacagcctgtgctatgtggagaccgccgagctggatggagaaacgaaccttaagtttaaaatgtccctcgaaatcaccgaccagtacttgcagagggaagacacactggcaacctttgatggctttattgagtgcgaagagcctaacaaccgactggacaaattcacaggaacactgttttggaggaacacatccttccccctggatgcagataagattctgctgagaggttgcgtgatacgaaacaccgacttttgccatgggctcgtgatttttgcaggcgcagatactaagatcatgaaaaactcgggcaaaacgagatttaaaagaacaaaaattgattatcttatgaattacatggtttacaccatatttgtggtcctgatactgctctctgccgggctcgctatcgggcatgcttactgggaagctcaggtgggaaacagtagctggtatttgtacgacggtgaagacgacaccccttcttacagggggttcttaattttctgggggtatatcatcgtgctgaacacaatggtcccaatcagtctctacgtcagcgtagaagtgattcggctgggacagtctcacttcatcaactgggatctgcagatgtattatgccgagaaggatacccctgccaaggcacgtaccacaaccctgaacgagcagttgggacagattcactatattttctcagataaaaccggtacattgactcaaaacataatgactttcaaaaagtgttgtattaacggtcagatttacggggatcatcgggacgcctcccagcataaccataacaaaatcgaacaagtggactttagttggaacacatacgcggacggcaaattggccttctacgatcattacttaatcgaacagattcaaagtggaaaggaacccgaggtcaggcagtttttcttccttctggccgtgtgtcacaccgtgatggtggatcgcactgacggccagctcaattaccaggctgcatctcccgatgagggagcactggtcaacgctgcccggaactttgggttcgcttttttggcccggacccagaacaccatcacgatttccgaactgggaaccgagcgtacttacaatgtgctcgccatcctggactttaacagtgacaggaagagaatgagcatcattgtccggacaccggaaggcaacattaagctctactgcaagggggcagacacggtgatatatgagcggctgcatcggatgaacccaaccaaacaggagacgcaagatgcactggacattttcgctaatgagaccctccgcacactttgcctgtgttataaagaaatcgaggagaaggaattcacagaatggaataaaaaatttatggccgcaagtgtggcctctaccaacagggatgaggcattggataaggtttacgaggaaatagaaaaagatctcatccttttaggcgcaacagcaatcgaggataagctacaggacggagtgccggaaactatttcaaagctcgctaaggcggatattaagatctgggtcctgacaggggacaaaaaagagacagcggagaacattgggttcgcttgcgaactcttaactgaggacactaccatctgttatggcgaggacattaattctttgttgcacgcacgaatggaaaaccaacggaacagaggcggcgtgtatgcaaagtttgctccccccgttcaggaatcgttttttccgccaggtggtaatagggccttgataatcaccgggtcatggttgaatgagatcctgctggaaaagaagacgaaacggaacaagatcctaaagcttaagtttcctaggacagaagaggagcggcggatgagaacacagtcaaagaggcggctggaagccaagaaagaacaacgtcagaagaatttcgtcgacctagcatgcgaatgctcagcggtgatctgttgccgagtaacccctaagcagaaggccatggtagtggaccttgtgaagagatacaagaaggccattaccctcgccatcggtgatggcgccaatgatgtgaacatgatcaagaccgctcacatcggcgtgggcattagcggtcaggaaggcatgcaggctgttatgtcctctgattattcctttgcacagttcaggtaccttcaacgactactgctcgtacacggacgttggtcgtatatccggatgtgcaagtttttgaggtactttttttacaagaactttgcattcacactggtccacttctggtacagcttcttcaatgggtattccgctcagacagcttatgaggactggtttataactttgtacaatgtcttgtacacgtccctcccggtgttgctcatgggtctgctggatcaagatgtgtccgataagctcagtctgcggttccctggcctatatattgtgggccaaagagatctgttgtttaactacaaaagattttttgtctctttactgcacggggtactcacctccatgatcttattcttcattccactgggcgcttatctccagacagtcgggcaagacggcgaagcccccagtgattatcagtcctttgccgtcacaattgccagtgctctggtaattactgtgaacttccagatcggcctcgacacatcttactggacattcgtgaatgccttctccatcttcgggtccatcgctctgtatttcggaattatgtttgactttcattcagcaggcattcatgtactgttcccctccgcctttcagttcacagggaccgcatctaacgcgttacggcagccttatatttggttaactataatactggcggtggccgtctgcctcctacccgtggtcgctattcggttcctttcgatgactatctggccaagcgaaagtgataagatccaaaaacatcgaaaaagactgaaagcagaagaacagtggcaacgccggcagcaggtgttccggcgcggggtttccacccgaaggtcagcttatgccttctctcaccagcgcgggtacgccgatctgatttcttccgggagatccatccgcaaaaagcggtcaccactagatgcaattgtggccgatggcactgcagagtacaggcgtaccggcgacagt

SEQ ID NO: 318976 - DNA, 3753 bp, Artificial Sequence
  derived and/or modified sequence
atgtccacagagcgtgactccgagacaaccttcgacgaggacagccagccaaacgacgaggtggtgccttacagcgacgatgaaactgaggacgagctggatgatcagggctctgctgtggagccagagcagaaccgtgttaatcgcgaggctgaggagaacagagagcctttcaggaaagagtgtacctggcaggtaaaagccaacgaccgcaagtatcacgagcagccacacttcatgaacaccaagttcctttgtattaaagagtcaaagtacgctaataatgccatcaaaacatataaatataatgccttcacattcatccctatgaacctgttcgaacaattcaaacgcgccgctaatctgtacttcctggcactgcttattctgcaggccgttccacagattagcaccttggcttggtacaccaccctcgtgcctctgttggtggtgcttggtgtcaccgccatcaaagacctggtagacgacgtcgctaggcataagatggacaaggaaattaataataggacctgcgaggttatcaaggacggacgtttcaaggttgccaagtggaaagagatccaggtgggcgatgtcattcgcttgaagaagaacgatttcgtaccagccgacatactgctcttgagttctagtgagccaaactccctgtgttacgtcgagaccgccgagttggacggcgaaacaaacttgaagtttaagatgagtctggagattaccgatcagtaccttcagcgcgaggataccctggctacattcgatggatttatcgaatgcgaggaacccaacaatcgcctggataagttcacaggtactctgttttggagaaacacctctttccctctcgacgctgacaaaattctcctgagaggatgcgtgatccgcaataccgatttctgccacggtctggtcatcttcgcaggagccgacaccaagatcatgaaaaactcaggcaagaccaggttcaagaggactaagattgactacctgatgaactacatggtatacactattttcgtggtgctgatcctgctctccgctggcttggccataggtcacgcatactgggaggctcaggtgggaaattcttcttggtacctctacgacggcgaggatgacaccccctcttaccgcggcttcctcatcttctggggatatattattgtcctgaacaccatggtgcccatttcactgtacgtgtccgttgaagtgatcaggctgggtcaatctcatttcatcaactgggatttgcagatgtactacgctgagaaagatacacctgccaaagctcgcactacaaccctgaacgaacagttgggccaaatccactacatcttcagcgataagactggaactctgactcagaacattatgacattcaaaaagtgctgcattaacggtcagatttacggtgatcacagggatgcttcccagcacaatcataacaaaatcgaacaggtggatttctcttggaatacctatgccgacggcaagttggctttctatgaccactacctgattgaacagatccagagcggtaaggagcccgaggtgcgccaattctttttcttgcttgctgtctgccataccgtgatggttgaccgcaccgacggccaactgaactaccaagctgcttctcctgacgagggagccctggtcaacgctgctcgcaatttcggctttgctttcctggccagaacccagaacaccatcacaattagcgagcttggaaccgaacgtacttataacgtgctggcaatcctggatttcaattctgataggaagagaatgtctatcatagtgcgtactcccgagggtaacatcaagctctactgcaagggcgccgatacagtcatttacgaacgcctgcacagaatgaaccccaccaaacaagaaacccaagacgccctggacattttcgccaatgaaaccctccgcactctgtgtctgtgctacaaggaaattgaggagaaagaatttactgagtggaataaaaaattcatggctgctagcgttgcttcaactaatagggacgaggcactcgacaaggtgtacgaggagatcgagaaggacctgattctgctgggcgcaaccgcaatcgaagacaagcttcaggatggagttcccgagaccatttcaaagcttgccaaagctgacatcaaaatctgggtcctcaccggagacaagaaggagactgctgagaatataggcttcgcatgcgaactgctgaccgaggacactaccatctgctacggagaagacattaactcactcttgcacgcaaggatggagaaccagcgtaacagaggaggagtgtacgccaaattcgccccacctgtccaggaatctttcttcccccctggaggcaatcgcgctctgattattaccggatcctggctcaacgaaatcctgctggagaagaagactaaacgcaacaagatcctcaagcttaagttccctcgcaccgaggaagagaggcgtatgcgtactcagtcaaagcgtaggctggaggccaagaaggagcaacgccagaagaattttgtggacctcgcatgcgaatgttctgctgtgatctgttgtagggtgacaccaaagcagaaggccatggtggtagacttggtgaagaggtacaaaaaggcaatcactctcgctatcggcgatggcgccaacgacgttaacatgatcaagaccgctcacattggcgtgggaatcagtggccaggagggaatgcaggcagtgatgagctcagattattcctttgcccaattcagatacttgcaacgccttttgctggttcacggaaggtggtcctacatcaggatgtgtaagttcctgcgttacttcttttacaagaacttcgcatttacactggtccacttctggtatagtttcttcaacggttactcagctcagactgcttacgaagattggtttattactctgtacaacgtcctgtatacatctcttcccgtgttgctgatgggactgctggaccaggatgtgagcgataagttgagcctgcgtttccccggactctacattgtcggtcagagagaccttctgtttaactacaagagattttttgtctctctcctccatggagtgctgacctctatgatccttttcttcatccctcttggtgcctatctgcagactgtcggtcaggatggagaggcacctagtgactaccagtcttttgctgtcacaatcgcttcagctcttgtcatcacagtgaacttccagatcggattggacacaagttactggacattcgtaaatgccttctctatttttggttcaattgccctctatttcggcatcatgtttgattttcactcagccggtattcatgtgcttttccctagcgccttccaatttacaggcactgcttcaaacgccctgcgtcagccatatatttggctcaccatcatcctggctgtggccgtttgcctcttgccagtggtggcaatacgcttcttgtccatgaccatctggccctctgagtcagacaagatacaaaagcacaggaaacgcctgaaggctgaggagcagtggcaacgtagacaacaggtttttaggcgtggtgtgtccaccaggcgcagcgcttacgctttcagccatcagcgtggatatgctgaccttatcagttcaggtagatccatacgtaaaaaaagatctccccttgacgccatagtcgccgatggcacagctgagtacagacgcactggtgactcc

SEQ ID NO: 318977 - DNA, 3753 bp, Artificial Sequence
  derived and/or modified sequence
atgtctactgagcgtgactcggagacgacgttcgatgaagacagccagccaaatgatgaggtcgttccctactccgatgacgagaccgaggacgagctcgacgatcaggggtcggcagtcgagcctgagcagaaccgcgtcaatcgcgaggctgaagaaaaccgtgagccttttcgtaaggagtgcacgtggcaagtgaaggccaacgatcgtaaataccacgagcagccgcacttcatgaacacgaagttcttgtgcatcaaggagtccaagtacgcaaacaatgctatcaaaacatataagtacaacgcgttcacgttcatccctatgaacctgttcgagcagttcaagcgagccgccaacctgtacttcctcgcattgcttattttgcaggccgtgcctcagatctccaccttggcctggtacaccacgctggtgccgctcctggtcgtcctgggtgtcacggctatcaaggatctcgtcgacgacgttgcccgccacaagatggacaaagagatcaacaaccgcacctgcgaggtcatcaaggatggacgcttcaaagtggcaaagtggaaggaaatacaggtcggtgacgtcatccgtttaaagaagaatgacttcgtgcctgctgatatccttctgttatcttcatccgagcctaactcgttgtgctacgttgagaccgccgaactggacggtgagacaaacctcaagtttaagatgtccctggaaattaccgatcaatacctccaacgagaggacacgctggccacatttgacggtttcatcgaatgtgaggagcctaacaaccgtctcgacaagttcactggtacgctgttttggaggaatacgtctttccctctggatgccgataagatcctgctacgtggctgtgtcatcaggaacaccgacttctgccacggcctagttatcttcgctggtgcagacacgaagattatgaagaacagcggcaagactcgctttaagcgtaccaagatcgactacctcatgaactatatggtgtacacgatattcgtcgtgctcattctgctgtccgccggcctcgcaattgggcatgcctactgggaagcccaggtcggtaactcgtcttggtacttatatgatggcgaggatgataccccctcgtaccgtggttttctcatcttctggggttacatcatcgtcctgaacacgatggtccccatctcactttacgtgagcgtggaggtcatccggctcggccagtcccatttcatcaactgggatctgcagatgtactatgcagaaaaggacactcccgccaaggccaggaccaccacattgaatgagcagctggggcagatacattatattttttctgacaagactggtactctcacccagaacattatgactttcaaaaagtgctgcatcaacgggcagatatacggagaccaccgtgacgcctcccagcataaccataataaaatcgaacaggttgatttttcctggaatacttacgccgatggaaagttggcgttctacgatcattacctgattgagcagattcagagcggcaaggagcctgaggtgagacagttcttcttcctcctggctgtatgtcacactgttatggttgaccgtacggatggacaattaaactatcaggccgcgtctcccgacgagggagccttggtcaacgccgctcgtaactttggttttgcgttcttagcccgtacacagaacacgatcacgattagcgagctcggtactgagcggacctataatgtcctcgccatcctcgacttcaactccgaccgcaagcggatgtctatcattgttcgcacccctgagggcaacataaagctttactgtaaaggtgccgacaccgtcatatatgaacgcctgcaccgcatgaacccaacgaagcaggagactcaagacgcgctcgatattttcgctaacgagactctgcgcaccctctgtctgtgctataaagagattgaggagaaggaatttaccgagtggaacaagaagtttatggcagcctccgttgcctccactaaccgtgatgaagccctcgacaaggtttacgaagagattgaaaaggaccttattctgctgggcgcgaccgccatcgaagataagctccaagacggggtccccgagactattagcaagctggcgaaggcagatatcaagatctgggttcttactggtgacaagaaggaaaccgcggagaatatcggcttcgcctgcgaattgctgaccgaggataccaccatttgctacggagaggacattaatagtctgctccacgctcggatggagaaccagcgtaacagaggaggcgtctacgcgaaattcgctccccccgtccaggaaagcttcttcccccccggtggtaacagggccctgattatcaccggatcctggctgaatgagattctattggagaagaagacaaaacgtaacaagattcttaagctcaagttcccccgcacagaagaggagcgtcgaatgagaacccagagtaagcgtcgccttgaggctaagaaggagcaacgacagaagaacttcgtcgacctggcgtgcgagtgttcagcagtaatctgttgccgggtgacccccaagcaaaaggcgatggtcgttgacttggtcaagcgttacaagaaagctatcacccttgcgattggcgatggcgcgaacgacgtgaacatgattaagacggcccatatcggcgtgggtatctctggtcaggaaggcatgcaagccgtcatgtcctccgactactctttcgcccaatttcgctacttgcaaagactcctcttggtgcatggcaggtggtcttacatccgtatgtgcaagttcctgcgttattttttctacaagaacttcgccttcacgctcgtccacttttggtattccttcttcaacggttacagcgcccagactgcttacgaagactggttcatcactctctacaacgtgctgtacacatccctgccagtcttgcttatgggtctcctggaccaggacgtttctgataagctgtcactgcgcttccctggtctttacattgtggggcagagagaccttctgtttaactacaaacgattcttcgtgagcctcttgcatggagttctcacctccatgatcctcttcttcatccccttgggagcctacctccagacggtcggccaggacggtgaggcaccctcggactatcagtccttcgctgtcacgattgccagcgccctcgttatcaccgttaactttcagattggtctggacacctcctattggacctttgttaacgcgttctctatctttggatccatcgcgttgtactttggtatcatgttcgatttccattcagccggcatccacgtcctgttccctagcgccttccagttcactggcactgcctccaacgcactgaggcagccgtacatctggttgacgatcatcctcgccgtggccgtgtgcctgctgcccgtggtggcaattcgttttctctccatgactatctggccttctgagagtgacaagatccaaaagcaccgtaagcgtctaaaggccgaagaacagtggcagaggcgccagcaggtctttcggcgtggtgtctcgacccgccgttcggcctacgctttttcgcaccaacgtggctacgctgacctaatctccagtggccgatctatacgcaagaagcgtagccctttggacgcgatcgtcgcggatggaaccgccgagtaccgacggacgggtgacagc

SEQ ID NO: 318978 - DNA, 3753 bp, Artificial Sequence
  derived and/or modified sequence
atgtcgactgagagggacagcgagactactttcgatgaggattcacagcctaatgatgaagtcgtgccatactccgatgacgaaaccgaggatgaactggatgatcaaggcagcgcagtggagcctgaacaaaatagggtgaatcgagaagcagaggaaaaccgggaaccatttaggaaagagtgcacctggcaggtgaaggcaaacgatagaaaataccatgaacaacctcactttatgaacaccaagtttctttgtatcaaggagtccaagtatgcaaacaatgccatcaaaacctacaaatacaacgcattcacctttattccaatgaacctctttgagcagttcaagcgcgcagcaaacctttactttttggcactgcttatactccaggcagtgccacaaatctccaccctcgcttggtacaccactttggtgcctcttctggtcgttctcggagttactgcaatcaaggatctggtcgacgacgtggcccgacacaaaatggataaggagatcaacaataggacgtgtgaagtgataaaggatggaagatttaaggtggcgaagtggaaagaaatccaggtgggggatgttattcgtttgaagaaaaacgactttgtgccggcagacatccttctcctgtcctcgtccgaaccaaactccctctgctacgtagaaactgcagagctggatggcgaaaccaacctcaagtttaagatgtccctcgaaattaccgaccaataccttcaacgagaagatactctggcaacttttgatggatttatcgagtgcgaagaaccaaacaatagacttgacaagttcacgggtacccttttctggcgtaatacctcatttccacttgatgcagacaagattttgcttagaggatgcgtgatccgaaacactgacttttgtcatggtttggtcatttttgcaggcgcagataccaagatcatgaagaattcgggaaagactcggttcaaacgtacgaagatagattacctgatgaactacatggtgtatactatattcgtggtcttgattctcctgtcggcaggcctggcaattggtcatgcgtactgggaagctcaggtgggcaactcatcgtggtacctgtacgatggagaagatgacacgccatcctacaggggctttctgattttctgggggtacataatagtccttaacacgatggtgcctatatcactttacgtgtccgtggaagtgattcggcttggtcaatcccacttcataaactgggatctccaaatgtactacgcagaaaaagatacccccgccaaagcacgcacgactactcttaatgagcaactgggtcaaattcactacattttcagcgataagaccgggactcttactcagaatatcatgacttttaagaagtgttgcatcaacggtcagatttacggcgatcatcgcgacgcctcccagcataatcataacaagattgaacaggtcgacttttcctggaacacttacgccgatggcaaacttgcattttacgatcactaccttattgagcagatacagagcggaaaggaaccggaagtgaggcagttctttttccttctggcagtgtgccacacggtcatggtggataggaccgatggacaacttaactaccaagcagcaagcccggacgaaggggccttggtgaacgcggcaaggaactttggttttgcattcctggcccgaacccagaataccattaccatttctgagctcggtaccgaaagaacctacaacgtccttgcgattcttgacttcaattcggatcgaaaacgcatgtccatcatcgtcagaaccccagaaggaaacatcaaactttactgcaagggcgccgataccgtgatttacgaacgcctccatcggatgaacccgaccaagcaagaaactcaggacgcccttgatatctttgcaaacgaaaccctgagaactctctgcctttgttacaaggaaattgaggagaaagagtttactgaatggaacaaaaagtttatggcagccagcgtcgcgagcacgaacagagatgaggctctggacaaagtgtatgaagaaatcgaaaaggatctgatcctccttggtgcgaccgctatagaggataaacttcaagatggcgtgccagaaacgattagcaagctcgcaaaggcagacatcaagatctgggtgctgaccggcgacaaaaaggaaaccgcggagaatatcggctttgcgtgtgaactgctgacggaggataccaccatttgctacggtgaggacataaactccctgctccatgccagaatggaaaaccagcgcaaccgaggaggggtctacgctaagtttgcccctcccgtgcaggaatccttttttcctcctgggggaaacagggcgttgattatcactggttcgtggcttaacgagatcctcctggaaaagaaaaccaaaagaaacaaaattctgaagctgaagtttccacggactgaggaagaacggcgtatgagaactcaatcgaagaggagacttgaggcaaagaaggaacagcgtcaaaagaacttcgtcgatctggcctgcgagtgctcggcagtgatttgttgtagagtgacccccaaacagaaagcgatggtggtggacttggtgaagagatacaagaaggccattacgctcgccattggtgatggtgcaaacgatgtgaacatgatcaaaaccgcacatatcggtgtcggtataagcggacaggaagggatgcaagcagtcatgtcgtccgattacagcttcgcccaatttcggtacctccagcgcctgctccttgtccacgggcgctggtcgtacatacggatgtgtaagtttcttaggtactttttctacaagaactttgccttcactcttgtgcacttctggtactcctttttcaacgggtactctgcccaaaccgcatacgaagattggttcatcactctgtacaacgtcctgtacacgtctctgcctgtgctccttatgggcctgctcgatcaagatgtcagcgataagctctctctccgatttcccggcctgtacatcgtcggccagcgagacttgcttttcaactataagcggttttttgtgtccctcctccatggtgtgctgacctccatgattctcttcttcatcccacttggtgcatacctgcagaccgtgggacaggatggagaagcaccatcggattaccagtcatttgcagtgactattgcgtctgcactggtgatcacggtcaatttccagataggccttgacacgagctattggacctttgttaacgcatttagtatattcggatccattgcactctactttggaataatgtttgattttcattccgcagggatccacgtgctgtttccttccgcatttcaatttaccggaaccgcctcgaacgcactgagacaaccctacatttggttgactatcattctggcagtggccgtgtgtctgctgcctgtcgtcgccattagatttctgtcgatgactatctggccctcggagtccgataagattcagaaacatcgcaaacgcctgaaggcagaagagcaatggcaacgccgccagcaagtttttaggcgcggtgtgtcaacccgaagatcggcatacgccttttcccatcaaagaggatacgccgatctcatttcctcaggaagatccataagaaaaaagagatccccccttgatgcgatagtcgctgatggaactgccgaataccggaggacgggagattca

SEQ ID NO: 318979 - DNA, 3753 bp, Artificial Sequence
  derived and/or modified sequence
atgtctacagagcgggacagcgaaacaacctttgatgaggatagccagcctaacgacgaggtagtgccatacagcgatgatgagaccgaagacgagcttgacgaccagggctctgctgtcgagcctgagcaaaaccgtgttaaccgcgaagctgaggaaaatagagaacctttccgcaaagagtgcacatggcaagtaaaggcaaatgaccgcaaatatcacgaacagccccatttcatgaatacaaaattcctgtgcattaaggaatcaaaatacgcgaacaatgcaattaaaacctacaaatataatgcgttcactttcattcctatgaatttgttcgagcagttcaaacgcgcggctaacttgtattttttagccctgcttattctgcaagctgttcctcagatttccaccttggcttggtataccaccttggtgccattactggtggttctgggagtaactgcaatcaaagacctcgttgatgatgtggcaagacataagatggacaaggagattaacaatcggacctgtgaggttatcaaagacgggcgatttaaagtcgccaaatggaaggagatacaggtaggcgatgtgatccggttgaagaagaatgacttcgtgcctgcagacatcttgttgcttagttcaagtgaacctaattccctatgttacgtggagacggcagagctggacggcgagaccaatctgaagtttaagatgagcctcgaaattactgatcagtatcttcagagggaagataccctggccacctttgatggtttcatagagtgtgaggagcccaataatcgtctggacaagtttaccggtaccctgttttggagaaacacgtccttcccactcgacgccgacaagatcttactgcgaggatgtgtaattcggaacaccgacttctgccacggtttggtcatttttgccggcgccgacaccaagattatgaaaaactccgggaaaaccaggtttaagaggactaagatcgattacctaatgaactatatggtgtacaccatctttgtggttttgattttgctgagcgccgggctggcaataggccacgcctattgggaggctcaagtaggaaatagcagttggtacttgtacgacggtgaggacgacacaccaagctatcgggggtttctgatattctggggctatatcattgtgttgaataccatggtacctatcagtctgtatgtttccgtcgaggtgatcaggcttggccaatctcacttcattaactgggacctgcagatgtactatgccgagaaagacacccccgccaaggctaggacaactacactgaatgaacagttaggtcagattcactacatcttctcagataagaccggtactctgacacagaacattatgacattcaagaagtgttgtatcaacggccagatctatggagatcacagagacgcaagtcagcacaaccacaacaaaatcgagcaggttgacttctcatggaatacatacgcggacggaaagctggcattttacgatcattaccttatcgaacagatccagtcaggcaaggaaccggaggtccgtcagtttttcttcctgctagcagtgtgccacaccgtgatggttgaccgcactgacggacagttaaactaccaggcggcatcacccgatgaaggagctctggtaaacgccgctaggaactttgggttcgcttttcttgccaggactcagaataccatcacaatatcagagctcggtaccgagaggacatacaatgttttggctatacttgacttcaactccgatcgaaagcgtatgagcattatcgtgagaacgcctgagggaaacataaaactttactgcaaaggcgccgatacggtcatttatgagagactccaccgcatgaaccctactaagcaggaaacacaagacgcgctcgacatcttcgccaacgagacactgcggaccctctgcctgtgctataaggagatcgaggaaaaggaattcactgagtggaacaagaagtttatggcagcaagcgtcgctagcaccaatcgcgatgaagctctagacaaagtgtacgaagaaatcgaaaaggatctgatccttttgggagccaccgctatcgaggacaaattgcaggatggggttcccgaaaccatctcaaaacttgccaaggccgacataaaaatctgggtgcttacaggagataagaaagaaactgctgagaacattggtttcgcctgcgaactgttaactgaggatactaccatatgttatggagaggatatcaatagcctgctgcacgcccgcatggaaaatcagagaaatagaggcggggtgtacgccaagtttgcccctccagtccaggaatctttcttcccccccgggggaaacagagcgttgatcattacgggatcctggctcaatgagatccttctggagaagaagaccaaacggaataaaatcttgaaacttaaatttcccaggaccgaagaggaacgaagaatgcgcacccagtctaagaggcgcctggaggctaagaaggagcagaggcagaagaacttcgttgacctggcctgcgaatgttcagccgtgatttgctgcagggtcaccccaaaacagaaggctatggtggtggatttagtgaaaaggtacaagaaggctattacactggctattggggatggagccaatgacgtcaacatgatcaagacagctcacatcggtgtcgggatttcaggccaggagggcatgcaagctgtgatgagtagtgactattcatttgctcagttccggtatctgcaacgcctgttgctagtccatgggagatggtcatacatcaggatgtgtaagtttcttcgctattttttttacaagaattttgcatttaccttggtgcacttttggtacagtttttttaacggctactccgctcaaaccgcctatgaggactggttcatcactctgtataatgttctgtacacatcactcccagttctgctgatggggttgctggaccaggacgtttctgacaaactgtcactacggttcccaggactctacatcgtcgggcagagagacctgctgtttaattacaagcgctttttcgtgtccctgctccatggcgtgcttacctccatgatcttgttttttatccctctgggtgcgtacttacagacagttgggcaggacggagaagcgccttccgactaccagtcatttgctgtaaccatcgccagcgcactggtcattactgtgaactttcagatcgggttagacactagctattggaccttcgtgaacgctttttcaatctttggctcgatcgcactgtatttcggcataatgtttgacttccactccgctggaatccacgtgctgtttccatcagcgttccaattcaccggcaccgcctctaacgctcttcggcaaccatacatctggctcacaatcatcctggccgtcgctgtctgcttgctgccggtagttgctatacgcttcctctccatgacaatatggccctctgagtctgataagattcagaaacaccgaaagagactgaaggccgaggagcagtggcagcggcggcagcaagttttccgtcgcggggtgagcactagaaggtcagcctacgcattctcccatcagagaggttacgccgacctgataagctccggacgctcaatcaggaagaaacgatcgccactggacgcgatagtggccgacgggaccgcagaataccgccgcaccggggatagt

SEQ ID NO: 318980 - DNA, 3753 bp, Artificial Sequence
  derived and/or modified sequence
atgtcgacggagcgggattccgaaactaccttcgacgaggattcgcaaccaaatgatgaggtcgtgccgtactcggatgatgagactgaagatgaactggacgaccagggatccgctgtggaaccagagcaaaaccgcgtgaatagggaggcggaagaaaatcgggaaccttttcggaaggagtgtacgtggcaggtcaaggcgaacgaccgaaagtaccacgaacagccacacttcatgaacaccaagtttctttgcatcaaggagtccaagtacgccaataatgctattaagacttataagtacaacgccttcaccttcatcccgatgaatctcttcgagcaattcaagcgcgcggcgaacttgtacttcctggcactgctgattctgcaggccgtgccgcagatttcgacgcttgcctggtacaccactctcgtgccgttgttggtggtgctcggcgtgaccgcgatcaaagacctcgtggacgatgtggctcgccataagatggacaaagagatcaataaccgcacttgtgaggtgatcaaagacggaagattcaaggtggccaaatggaaggaaatccaagtgggagatgtcatccgactcaagaagaatgatttcgtgcctgcggacatcctgctcctgagctcgtccgaacctaactcactgtgctatgtggaaaccgctgagctggatggcgagactaacctgaagtttaagatgtctctggagatcacggaccaatacctccagcgcgaggacaccctggctacctttgacggcttcatcgaatgcgaggagcctaacaaccgcctggacaagttcacgggcaccctcttctggagaaacaccagcttcccattggatgctgataagatcctcctcaggggatgcgttattagaaacactgacttttgtcacggactggttatctttgccggagcagatactaagatcatgaagaactctggcaaaactagattcaaacgcaccaagatcgattacctgatgaattacatggtttacactattttcgtcgtgctcatccttctctccgccggacttgccatcggacacgcttactgggaggcacaagtgggcaattcgtcgtggtacctgtacgacggagaagatgatactccatcctaccgcggattcctgatcttttggggatacatcatcgtacttaacacgatggtgccgatcagcctgtacgtgtctgtggaggtgattcggttgggacagtcgcacttcatcaactgggacctgcagatgtactacgctgagaaagatactccggcgaaagcgcggaccactaccctcaacgagcagctgggccagatccactacatcttcagcgataaaaccgggaccctcacccagaatatcatgacctttaagaagtgttgtatcaacggtcaaatctatggcgaccatcgcgacgcgtcccagcacaaccataacaaaatcgaacaggtcgacttttcatggaacacttacgccgatggaaaactggcgttctatgaccactacctcatcgaacagatccagtcaggaaaggagcccgaagtgcggcagttcttcttcctgctggctgtgtgccacaccgtgatggttgacaggaccgatggacaattgaactaccaagctgcgtcccccgatgaaggggccctcgtgaatgcagcccgcaacttcggattcgcgttcctcgcccgcacgcagaacaccatcacgatctcagaattggggactgaacgcacctacaacgtcctggctattttggacttcaactccgaccggaagcgcatgtcgatcatcgtccggacccctgaggggaacatcaagctctactgtaagggggcagacactgtcatttacgaaagactccataggatgaatcctaccaagcaggaaactcaggatgcactggatatctttgcgaacgagactttgcgcaccctctgcctctgctacaaggaaatcgaagaaaaagaattcactgaatggaacaagaagttcatggcagcatccgtagcatccactaatcgggacgaggcgctcgacaaagtctacgaagagatcgagaaggacctgatcctgctgggagccactgccatcgaggataaactgcaagacggagtgccggaaacgatttccaaactcgccaaggccgacatcaagatatgggtgctgacgggggacaagaaagagactgcagagaacattgggtttgcctgcgagctcctgacggaggacactacgatttgctacggagaagatatcaactccctgctgcacgcccggatggaaaaccagagaaaccgcggcggagtgtacgccaaatttgccccaccagtgcaggaatcgttcttcccccctggtggaaatcgcgccttgatcatcaccggatcatggctcaatgaaatcctgctggagaagaaaaccaagcggaataagatcctcaaactgaagttcccccggactgaggaagaacgcagaatgcggacccagtcaaaaagaagattggaggcgaaaaaagagcagcgccaaaagaatttcgtggatttggcctgtgaatgttcggccgtcatctgttgtcgggttactcctaagcaaaaggccatggtcgtggacctggtcaaacgctacaaaaaggccatcactctcgccattggcgatggcgcaaacgatgtgaacatgatcaagaccgcacacattggagtgggcatctccggtcaagaaggcatgcaagccgtcatgtctagcgactactccttcgcgcagtttagataccttcaacgactcctgctggtgcacggaagatggtcgtacatcagaatgtgcaagtttctgagatacttcttctacaagaacttcgcgttcaccttggtccatttctggtacagcttcttcaacggctattccgcccagactgcttacgaggactggtttatcacgctctataatgtcctgtacaccagcctccccgtgctcctcatgggattgctcgaccaagatgtgtcggacaaactttcactccgctttccggggctgtacatcgttggacagagggatcttttgttcaattacaaacgattcttcgtgtccctgctccatggggtgctgacctcgatgatcctgttctttatccccctgggagcgtacctgcagactgtgggtcaggatggtgaggcgccgtcggactaccagtcttttgctgtgaccatcgcctccgccctggtcatcactgtcaactttcagattggactggacacctcctactggaccttcgtcaacgcattctcaattttcggatccattgcattgtacttcggaatcatgttcgactttcattcagcgggtatccatgtcctcttccctagcgccttccagttcaccggtaccgcctccaacgccttgagacagccgtacatctggctgaccatcatcctggccgtggccgtttgcttgttgcctgtggtggcaattcgcttcctctcaatgactatctggccctcagagtcagataagatccagaaacatcgcaaaaggctgaaggccgaagaacaatggcaacgccgccaacaggtgttcagaagaggagtgtcgacccgcagatctgcctacgccttctcgcaccagcggggctacgcagatctcatctcatcgggccgctcaatcagaaagaagagaagcccgctggacgcgattgtcgccgacggcaccgcggaataccggcgcactggagacagc

SEQ ID NO: 318981 - DNA, 3753 bp, Artificial Sequence
  derived and/or modified sequence
atgtccactgagcgcgactcggagactaccttcgatgaagactcgcagcctaacgacgaagtggtgccctattccgatgacgaaaccgaggacgagctggacgatcaaggctccgccgttgagccggaacagaatcgcgtcaacagggaagccgaagaaaatcgcgaaccgtttcgcaaggaatgcacctggcaagtcaaggcaaacgatcgcaagtaccatgaacaaccccatttcatgaacactaaattcctttgcatcaaagaatccaagtacgccaataacgccatcaagacttacaagtacaatgctttcactttcattccaatgaaccttttcgaacaatttaagcgcgctgccaacctttacttcctcgccctgctgatacttcaagccgttccacagatttcgaccctcgcctggtacaccactttggtgcctttgctcgtcgtgctcggtgttaccgcgatcaaggacctggtggatgacgtggcacgccacaagatggataaggagataaacaacaggacctgcgaagtgatcaaggatggtaggttcaaggtggccaagtggaaagaaatccaggtgggagacgttatccggctgaagaagaacgatttcgtgccagcagatatccttctgttgagctcttctgagccaaactcactgtgctacgtcgaaactgcggaactcgacggagagacgaacctgaaattcaagatgagcctggagataaccgaccagtatcttcaacgcgaagacactctcgccacttttgacggatttatcgagtgcgaagaacccaacaaccgtctggataagttcactggcactctcttctggcggaatacctccttcccgctggacgccgacaaaatccttctcaggggatgcgtcatcaggaacaccgacttttgccatggattggtcatattcgctggagccgatactaagattatgaaaaactcagggaagacccgcttcaaacggacgaagattgactaccttatgaattacatggtctataccatcttcgtggtgctgatcctcctcagcgcaggactggctatcggacacgcgtactgggaggcgcaggtgggcaactcgagctggtacttgtacgatggggaggatgacaccccttcttaccggggattcctcattttttggggctacatcatcgtcctcaacacgatggtccctatctccctgtacgtgtcggtggaagtcattagactgggtcaatctcacttcatcaattgggacctgcagatgtactacgcagaaaaggatacgccagctaaagcgagaaccaccactctgaatgagcaactgggccagatccactatatcttctctgacaagacgggaaccctgactcagaacattatgactttcaagaagtgttgtatcaacggccagatctacggcgatcatcgggacgcgagccaacataatcataacaagatcgagcaggtggacttttcctggaatacttacgccgacggaaagctggccttctacgaccactacctgatagaacagatccagagcgggaaagaacccgaagtgagacaatttttcttccttctggccgtgtgtcacaccgtgatggtggaccgcactgatggacaacttaattaccaggccgcgtcaccagacgagggcgctctggtcaatgccgcgcgcaatttcggtttcgcgtttctcgcccggacccagaacacgatcactatctctgagctgggcactgaacgcacctacaatgtcttggcaatcttggatttcaatagcgatagaaagcgcatgtcaatcatcgtcaggaccccagagggcaacatcaaactgtactgcaagggagcggacaccgtgatttatgagcggctccatcggatgaatccgaccaagcaagaaactcaagacgctcttgacatctttgcaaacgaaacgctccgcaccctgtgtctctgctacaaggaaatcgaagagaaggagtttaccgaatggaacaaaaagtttatggccgcctccgtggctagcacgaacagagacgaagcactcgacaaggtctacgaggaaattgaaaaggacctcatcctccttggcgcgactgcgatcgaagataaactgcaagacggggtgccggaaacgatctcgaagctggcgaaggccgatatcaagatttgggtgttgactggtgataagaaagaaaccgccgagaacattggattcgcttgcgaactcctgactgaagacaccaccatctgctacggagaagatatcaacagcttgttgcacgcgagaatggagaatcagagaaaccgcgggggcgtgtacgctaaattcgcaccgcccgtccaggagagctttttcccgccgggaggaaaccgcgctcttataatcacgggctcgtggctgaatgagatcctgttggagaaaaagacgaagagaaacaagattttgaaactgaaattccctcgaaccgaagaagagaggcggatgcgcacccaatctaagcgtcggctggaagcaaagaaggaacagcggcagaagaacttcgtggacctcgcttgcgaatgttcggcggtcatttgttgccgggtgactccgaagcagaaggctatggtcgtggatctggtgaagcgatacaagaaagccatcactctggccatcggagatggagccaatgacgtcaacatgattaaaaccgctcatatcggggttggaatatccggccaggagggaatgcaggccgtcatgtcctccgattacagcttcgcccaattccgctacctgcagcgcctcctgctggtccacggaagatggtcctacatcagaatgtgcaagttcctgagatacttcttttacaagaatttcgcgttcaccctggttcacttttggtactcgtttttcaatggttactcagctcagaccgcctacgaagattggtttatcactctgtacaacgtgctgtacacctcgcttccggtgttgcttatgggccttctcgaccaggatgtgtcggacaagttgagcctgcgcttccccggcctgtacattgtggggcagagagatctgctctttaactacaagagattcttcgtctccctccttcatggagtgctcacctcgatgatcttgttcttcatcccgctcggagcctacctgcagaccgtgggacaggacggcgaggcgccatctgactaccagtcatttgcagtgactatcgctagcgccctggtcattaccgtgaacttccagatcgggctcgacacttcctactggactttcgtgaacgcgttctcgatcttcggctcaatcgcgctctatttcggaatcatgtttgattttcactccgctgggatccacgtactgttcccgtcagccttccagttcaccggaactgccagcaatgcactgcggcagccatacatctggctgactatcatccttgcagtggccgtgtgcttgctgccggtggtcgcaatcagattcctgtcgatgactatctggccttcggagtccgataaaatccaaaagcacaggaaacggctgaaagccgaggagcagtggcagcggagacaacaagtgttccgccgcggagtctcgactcggcggagcgcttacgccttctcacaccaacgcgggtacgcggacctgatttcaagtggaaggagcatccggaagaaacgctcgccgctggacgctatcgtggcggacggaactgctgagtacaggcggactggggactcg

SEQ ID NO: 318982 - DNA, 3753 bp, Artificial Sequence
  derived and/or modified sequence
atgtctaccgagagggattcggagactaccttcgatgaggacagccagccaaacgacgaagtggtgccttactcagacgacgaaaccgaagatgaactcgacgaccagggcagcgcggtcgagccggagcagaatcgcgttaaccgggaagccgaggagaatcgggagccatttcggaaggagtgcacctggcaggtcaaggctaacgaccggaagtaccatgaacaaccccactttatgaacacgaaattcctgtgcatcaaggaatcgaaatacgcaaacaacgcaattaagacctacaagtacaatgcgtttactttcatccctatgaatctcttcgaacaattcaaaagggcagctaacctttacttcctggccctgctcatcctccaagccgtgccacagatctcaacgctggcctggtacactaccctcgtccccctgcttgtggtgctgggagtgactgccattaaggacctggtggatgatgtggcgcgccataagatggacaaggaaatcaataatcggacctgcgaggttatcaaggatggacggtttaaagtggccaagtggaaagaaatccaggtgggagacgtgattaggttgaagaagaatgacttcgtcccggccgatatcctgcttctgtcgagctccgaaccgaacagcctctgttacgtggaaaccgctgagcttgacggcgaaaccaaccttaagttcaagatgtccttggaaatcacggaccagtatctgcaacgggaggacacgctggccaccttcgacggattcatcgaatgcgaggagcccaacaaccgcctggacaagtttaccggaaccttgttctggcgaaacacgtccttccccctcgacgctgataagattctcttgcggggatgtgtgatccggaataccgacttttgtcacggcctggtcatcttcgccggagccgataccaagatcatgaaaaactctggaaagacccgcttcaagagaactaaaatcgactacctgatgaattacatggtgtatactatcttcgtggtgctgatcctcctttcggcgggactggccatcgggcatgcctactgggaggcgcaagtggggaactcgtcatggtatctgtacgatggagaggacgacactccgagctacaggggcttcctcatcttctggggatacatcatcgtcctcaataccatggtgccgatctcactctacgtgtccgtggaagtgatacgcctcgggcaatcccacttcatcaactgggacctgcaaatgtactacgctgaaaaagatactccagccaaggccagaaccactactctcaacgaacaattgggacaaatccactacatcttctcagacaagacgggaacgctgactcagaacattatgaccttcaagaagtgctgtattaacggacaaatctacggtgaccatcgcgatgccagccagcacaatcacaacaagatcgaacaggtggatttttcgtggaatacttacgcggacggaaagctcgccttctacgaccactacctgatcgagcagattcagtcaggaaaggagcctgaggtgcggcagttctttttccttcttgcggtttgccacactgtgatggtagacagaactgacggacagctgaactaccaagctgcgtcgcctgacgaaggagccctggtgaatgcagcaaggaactttgggttcgccttccttgcacggacccaaaacactatcaccatcagcgagctcggaaccgagcgcacttataacgtgctcgcaattcttgacttcaattccgatagaaaaaggatgtcgatcatcgtccggaccccggaaggaaatatcaaactctactgtaaaggagcagatactgtgatttacgagcggctccataggatgaacccgactaaacaggaaacccaagacgccctggatatcttcgcaaacgaaaccctgagaactctgtgcctctgttacaaagaaatcgaggaaaaggagttcactgaatggaacaagaaattcatggcggcctcggtggccagcactaaccgggatgaagcattggataaagtgtacgaggagatcgagaaagacctgatcttgctgggtgccacggcgatcgaagataagctccaggatggagtcccggaaactatctctaagctggccaaagcggacatcaagatctgggtcctgaccggagataagaaagaaactgctgagaatatcggtttcgcttgcgagctgctgactgaggacacgaccatctgctacggggaggacatcaactcgctcctgcacgcacggatggaaaaccagcgcaatagaggaggagtctacgcgaagttcgccccgcctgtgcaggaatccttcttcccgccgggaggcaatcgcgccctgatcatcaccggctcctggctgaatgaaatcctgctggagaagaaaactaagcgcaacaagatcctgaaactgaaattccctcgaactgaagaagaacggcgcatgcgcacccagtccaagcgcaggctcgaagccaagaaagagcagcgccagaagaatttcgtggacctcgcctgcgaatgtagcgcggtgatctgctgccgcgtcactccgaagcagaaggccatggtggtggacctggtcaagcggtacaagaaggctatcaccctggccattggagacggggctaatgatgtgaacatgatcaaaactgcccacatcggggtgggtatcagcggacaggagggcatgcaagcggttatgtccagcgactactcatttgcacagttccgctacctgcaaagattgctgctggtgcatggaagatggtcgtacatcaggatgtgtaagttcctgaggtactttttctacaaaaacttcgccttcaccctggtccacttctggtactcgtttttcaacgggtattccgctcagactgcctatgaggactggttcatcactctctacaatgtcctctacacctcgctgcctgtgctcctcatgggtttgctcgaccaggacgtctcggacaagctgtcgctgcggttccccggactctacatcgtgggacaacgggacctgctctttaactacaagcggttctttgtgagcctgctgcatggtgtcctgacctccatgattttgttctttatcccgcttggtgcatacctgcagactgtcggccaagacggagaagcgccttcagactaccagtctttcgcggtgactatcgcatcggcgctcgtcattactgtcaatttccagatcgggctggacaccagctactggaccttcgtgaatgccttctccattttcggctcaattgctctctacttcggcattatgttcgatttccatagcgcgggaatccacgtgctctttccaagcgcattccagttcactggtaccgcgtccaatgccctgagacagccttacatctggctgaccatcatcctcgctgtcgccgtctgcctgcttccagtggtcgccatccggttcctgtcgatgactatctggccttcggaatccgacaagatccaaaaacatcggaaacggctgaaagccgaagagcagtggcaacgccgccagcaggtgttccgcaggggagtgtcaactcgacggtcggcctacgctttctcacaccagaggggatatgccgatctgatcagctccggacgatcgatcagaaagaaacgttcaccactggacgccatcgtggccgacggaactgccgaatacaggagaaccggagattcc

SEQ ID NO: 318983 - DNA, 3753 bp, Artificial Sequence
  derived and/or modified sequence
atgtcaaccgaacgcgactctgaaacaacctttgatgaagactctcagccgaatgatgaggtggttccatacagtgatgatgaaaccgaagatgagcttgacgatcagggcagcgccgtcgagcctgagcagaaccgcgtgaatcgcgaggcagaagaaaacagagaaccatttcggaaggagtgcacatggcaggtaaaagctaacgaccggaaataccatgaacagccacatttcatgaacacaaaatttctctgcatcaaagagtcaaaatacgcaaacaacgctattaagacctacaagtacaatgcgttcacatttattcccatgaacctctttgaacagttcaagcgtgccgctaacctttactttctggccctattgatccttcaggcagtcccccagatcagcacgttggcatggtacacaaccctagtcccccttctcgtcgtgctgggcgtgacagctatcaaggatttggtggacgacgttgcccggcacaagatggacaaggagatcaataaccgcacatgcgaagtgatcaaggatggccgtttcaaggtcgcaaaatggaaagaaatccaagtgggcgatgtcatccgtctcaaaaagaatgattttgtacctgcagatattctcctgctctcctccagcgaacctaacagcttgtgctatgttgagacagctgaacttgacggcgaaaccaacctcaagttcaaaatgtctcttgagattaccgaccaatacctgcagagagaggatactttggccacatttgatgggttcatcgaatgtgaagaacccaataacagattagataagttcactggcacactgttctggagaaacacctcatttcccctggacgctgataagatcctcctgaggggatgtgtgatccgtaacacagacttttgtcacggactcgtgatctttgctggagcggatacgaaaattatgaagaatagcggaaagactcggttcaagcgcactaagattgattatctgatgaactacatggtgtacactatctttgtcgtgttaatattactttcagcaggcctggctatcgggcatgcttactgggaggcacaggtgggaaacagcagctggtacctgtatgacggcgaggacgacacaccgtcgtacagaggctttctgattttctggggatacattatagtgctcaacaccatggttccaatttctctctacgtttcagtggaggtgattcggcttggacagtctcattttataaattgggacctgcagatgtattacgcagagaaggatacccctgccaaggccaggaccacaactctcaacgaacaattgggccagatacattatattttttcagataaaactggcacccttactcagaacataatgacatttaagaagtgctgcattaacggtcagatttacggtgaccacagggatgcttctcaacacaaccataataagatcgaacaggtcgacttttcctggaatacatacgcagacggaaagctggccttctacgatcactatctgatcgagcaaatccaaagtggcaaagagcctgaggtgcggcagttctttttcctgctggccgtctgtcacacagtgatggttgataggacagatggacagctgaactaccaggctgcaagcccggatgagggcgctctcgtgaatgcagctaggaatttcggctttgcatttctcgcacgcacccagaacacaatcacgattagcgagctcggaactgaacggacatacaacgtgctggctatcttggacttcaatagcgatcggaaacggatgagcattatcgttaggaccccagagggaaacatcaagctgtactgcaagggagctgacacagttatctacgagaggctgcatcgcatgaacccaaccaaacaagagacacaggacgcattagatatcttcgcaaatgagacgctcaggacgctctgtttgtgttacaaagagatcgaagaaaaagagtttacagagtggaacaaaaaatttatggccgcttctgtggcatcaaccaacagggacgaagcattagataaggtctacgaggaaatcgaaaaagatctcatcctgctgggcgctacagccattgaagacaaactgcaggacggtgtccctgagaccataagcaaactggctaaggctgatattaagatttgggtgcttaccggggataaaaaagaaacagctgaaaatattggctttgcgtgcgaattactgaccgaggacacaaccatctgctacggagaagacatcaattcactgcttcacgccaggatggaaaaccaaagaaaccgtggcggtgtatacgccaaatttgctcctcccgttcaagagagtttcttcccacctggaggaaacagagcgctgataatcaccggatcttggcttaatgaaatcctcctggaaaagaaaaccaagaggaataaaatacttaaactgaaatttccccgtaccgaagaagagcggcgtatgcggacacagagcaagcgtagacttgaagctaaaaaagaacaaaggcaaaaaaattttgttgatctggcgtgcgagtgctccgcagtaatctgttgtagggtcactcctaagcaaaaggctatggttgtggacctggtcaagagatataagaaagccatcactctcgccatcggagacggcgccaatgatgtcaacatgatcaagacggcccatatcggagtgggtatctccggccaagaaggtatgcaagctgtcatgtccagcgattactcttttgcccaattccgttatctgcaacgtctgctgctggtgcacggccgttggtcctacatccgcatgtgtaaatttctgagatactttttttataagaactttgcatttacactggtgcatttttggtattcttttttcaacggctacagtgcacagactgcttacgaggactggtttatcaccctgtacaacgttctctacacttctctgcccgttctcctgatgggactcctggatcaagacgtgagcgacaaactttccctcagatttccaggactctatatcgtcgggcagcgcgatttgctctttaactacaaaagattctttgtctctctgctccatggagtgctgactagcatgatccttttttttattcctctcggtgcatatctgcaaacggtgggccaggacggcgaagcacctagcgactaccagagtttcgctgtgaccatcgccagcgctctcgtaattacagttaacttccagattggacttgatacatcttactggacctttgtgaatgccttctctatcttcggaagtatcgctctttactttggaatcatgttcgattttcacagcgccggtattcacgtgctgttccccagcgcatttcagtttactggcaccgcatccaacgctttgagacagccttacatctggctgacaattatcctcgcggtcgcagtgtgcttgctgcctgttgtggctatcagatttctttctatgacaatctggccttccgaaagtgataaaatccaaaagcatcggaaacggctgaaagccgaagaacagtggcagaggaggcagcaagtatttcggcgcggcgtctctactcgccgaagtgcctacgcattcagccatcaacgtgggtatgcggacctcatcagcagcgggcgctccattagaaaaaagcgcagtcccctcgacgccatagtggctgacgggacagctgaatataggaggaccggcgattca

SEQ ID NO: 318984 - DNA, 3753 bp, Artificial Sequence
  derived and/or modified sequence
atgagcactgagcgggacagcgagaccacgtttgacgaggattcccagcctaatgacgaagttgtcccatactccgacgacgaaacagaggatgagcttgatgatcaggggtctgctgtggagccagaacagaatcgggttaatcgggaggccgaggagaacagggaaccctttaggaaagaatgcacctggcaggtgaaagcaaacgacagaaagtatcacgaacagccacactttatgaataccaaatttttgtgtataaaggagtccaagtacgctaacaacgcaattaaaacatacaaatacaacgcttttacatttatccctatgaacctgttcgagcagttcaagcgagctgcgaacctgtattttctcgcccttctgattcttcaggcagtgccccagattagcacgcttgcatggtacacaactctggtccccctgctggtggttctgggtgtgactgcaatcaaggatctggtggacgacgtggcgcggcacaaaatggacaaggaaattaacaatcgcacatgtgaggttattaaggacggacgcttcaaagtcgccaagtggaaggagatacaggtgggggacgtcattcgcttgaagaaaaatgattttgtgccagccgacatacttctgctttccagctctgaacctaattccttgtgttatgtagaaaccgccgagcttgatggcgagaccaacctgaagtttaagatgtcacttgagattactgatcaatatttgcagagagaggacaccctggcgacatttgatggattcattgagtgcgaagagcccaacaaccgcctggacaaatttaccggtaccctgttctggagaaatacctccttccccctcgatgccgacaagatcttgctgagaggttgtgttatcaggaatacagacttttgtcacggactggtgattttcgctggagcagatactaagataatgaagaatagcgggaagactcgattcaagaggaccaaaattgattacttgatgaattacatggtatatactatctttgttgttctgattctgctttccgccggattggcaattggccatgcttactgggaagcccaggtgggaaactctagctggtacttgtatgacggcgaggacgatacaccctcctacaggggatttttgattttttggggttatattattgttttgaatacaatggtgccaatctcactgtatgtgtctgtcgaagtcatcaggttggggcagagtcattttattaattgggacttgcagatgtactacgccgaaaaggatacgcccgcgaaggccaggaccactaccctcaacgagcaactggggcaaatccattatatatttagcgacaagacgggaacactcacacagaatatcatgacatttaagaagtgctgcatcaatggacaaatatatggcgaccaccgggatgcctctcaacacaaccacaataaaattgagcaggttgatttcagctggaatacatacgctgatggtaagctggcattctacgaccactacctcatcgagcagatccagtcaggaaaggagcccgaggttagacaattttttttcctgctggctgtgtgccacactgtgatggtcgatagaacggacggtcaactgaattatcaggcagccagtcccgacgagggggcactggtcaacgctgcccgcaatttcggctttgctttcctggcgcgcacccaaaacacaatcactatttccgaattgggtaccgagcggacatacaatgtcctggccatcttggatttcaactccgaccgcaagcggatgagtattatcgtgcggaccccggagggcaacataaagctttattgcaaaggggcagatacagtcatttacgagcggctccataggatgaacccgacgaagcaggagactcaggacgcactggacattttcgccaacgagaccctgcgcacactctgtctttgttacaaagagatcgaagagaaggagttcaccgagtggaacaaaaagttcatggccgccagtgttgcaagtacaaaccgagacgaggcactggataaggtgtacgaggagattgagaaggatctgatcctgctcggcgccaccgcgatcgaggataagctccaggacggcgtgccagaaaccatttccaagctggcgaaagcggacattaagatatgggttcttacaggcgataaaaaggaaaccgctgaaaatatagggttcgcgtgcgaactcctcactgaagacactactatatgttacggcgaggacataaacagcctgcttcacgcaaggatggagaaccagagaaacagaggcggcgtctatgccaagtttgcaccccctgtgcaggaatctttttttccccctgggggtaatagagctttgatcatcaccggcagctggctgaatgagatcctgctcgaaaagaaaacaaagcggaataagatcttgaagctcaaattccctcggaccgaggaggaacgccggatgagaacacagtccaaaagacgactggaggccaagaaagaacagagacagaagaacttcgtggacctggcgtgcgagtgctctgctgtaatttgctgtagagtgacccctaagcaaaaggccatggtggtcgatctggtcaagagatacaagaaggcgatcacccttgcaattggtgatggagccaatgacgtaaacatgatcaaaacggcacacatcggggtgggaataagtgggcaagaagggatgcaggctgttatgtcctcagattactcattcgcacagttcaggtatctccagagacttctgttggtacacggccggtggagttacatccggatgtgtaagttcctgcggtactttttttacaagaacttcgccttcacgctggtgcatttctggtacagcttttttaacggctatagcgcccagaccgcctacgaagactggttcatcactctctataacgtgctttacaccagcctgccagtgctgctcatggggcttcttgatcaggatgtgtccgacaaattgtctctcaggtttccaggtctttacatagttggacagagagatttgctgttcaattataaaagatttttcgtaagtctgttgcatggcgtgctcacttctatgatcttgttcttcattccgctgggggcatatctgcaaacggttggtcaggatggcgaagcgcctagcgattatcaatccttcgcagttactattgcaagcgcactggtcattaccgtaaacttccaaattgggctggacacctcctactggactttcgttaacgctttcagcatctttgggagcatcgctctctattttggcatcatgttcgactttcattcagccgggatccacgtcctttttccctccgcattccagtttacaggcacagcaagcaacgccctgcgccagccctacatatggctgacaataatactggccgttgccgtctgcctgctgcctgtggtggccatccgatttttgagcatgaccatctggccctctgagtccgacaagatccaaaagcaccggaaaagactgaaagccgaggaacaatggcagcgccgccaacaggtattccgacgcggagtgagtacaagacggtccgcttatgcattctctcaccagagaggatacgccgatctgatctcctcaggccgctctataaggaagaagagatctcccctggacgccatcgttgcggatggaaccgcagagtaccgcaggacaggtgactct

SEQ ID NO: 318985 - DNA, 3753 bp, Artificial Sequence
  derived and/or modified sequence
atgagcactgaacgagattctgagaccacttttgacgaggatagccagcctaacgatgaagttgtcccctatagcgatgacgagacggaggacgaactagacgaccagggaagtgctgtggagccagagcagaatcgagtgaaccgagaagctgaagagaaccgcgaaccttttcgtaaggaatgcacatggcaggtcaaggcaaatgataggaagtatcacgagcagccacacttcatgaatacgaagttcctatgcataaaggaatccaagtatgcaaacaacgctattaagacttacaaatataacgcgttcacatttattcccatgaacctgtttgagcagttcaagcgcgcagccaacctctatttcttagctctgctgatcctccaggctgttccccaaataagcaccctggcgtggtacaccaccctcgtgcctttactcgtggtgctgggcgttacagccattaaggatcttgtggacgacgtggcaagacataaaatggataaagagatcaataatagaacttgtgaggttatcaaagatggaagattcaaggtggcaaagtggaaggaaatacaggtgggtgatgtaatacggctgaaaaaaaatgattttgtgcccgccgatatattgttgctgtctagctcagaaccaaacagcctatgttatgtagagacggctgagctggacggcgagacaaacctgaagttcaagatgtctctcgaaataacagaccagtacctacagcgtgaagatacactggcaactttcgatggtttcatagaatgcgaagagcccaacaacaggctggataagttcacgggcacactcttttggcgaaacacctctttccctttagatgccgataaaatacttttgagggggtgtgtaatcaggaacactgatttctgccatggccttgtcatttttgccggggcggacactaagataatgaagaacagtggtaaaacaagattcaaaaggactaagattgattatctgatgaattacatggtttatacaatcttcgtagtgttgattctgctcagtgccggactcgccattggccacgcctattgggaagcgcaggtcggcaactcaagctggtacctatacgacggagaggatgacaccccatcataccgtgggttcctgatattttggggctacataatcgttctgaataccatggtgcccatatcactctatgtatctgtggaggtgatacgcctaggacaatcccacttcatcaactgggatctgcaaatgtattacgccgagaaagataccccagcaaaggcccggactacaacgctgaatgaacaattgggccagatccattatatcttttcagacaaaacaggcacgcttacccaaaatatcatgacgttcaagaaatgttgcatcaatggccaaatttacggagaccacagagacgcctcgcagcacaaccataacaagatcgaacaggttgatttttcctggaacacatatgccgacggaaaattggctttctacgatcattatctgattgagcagatccagagcggtaaggagcctgaggtacgacagtttttcttcctgctcgcagtgtgtcacactgtgatggtggaccgcacagatgggcagctcaactaccaagcagcaagtcctgatgaaggagctctggttaacgccgctagaaatttcggattcgcatttcttgcacggactcagaatacgattacaatcagtgaactggggaccgagaggacctataacgtgcttgcgatattagactttaacagtgaccgaaagaggatgtcgatcatagtgaggacaccagaaggcaacataaagctctactgcaagggggctgatacagttatctatgaaaggctgcataggatgaaccccacaaagcaggaaacccaagacgctctcgacatcttcgcgaatgaaacgctaaggacactttgtctgtgttacaaagaaatcgaggaaaaggagttcaccgagtggaataagaaattcatggcggccagcgtggcttcaacaaatagagacgaggccttggacaaagtgtacgaagagatcgagaaggatcttattctcctgggtgctacagccattgaggacaagctacaggacggagtccctgagacgattagcaaactggctaaggccgacatcaaaatctgggttctgactggcgacaaaaaagaaaccgcagagaatataggctttgcctgtgaacttcttacagaggacaccaccatctgttacggggaagacatcaacagcctgcttcacgccagaatggaaaatcagagaaacaggggaggggtatatgctaaattcgctcctcctgtgcaggaaagctttttcccccctggaggaaaccgggcgcttatcattacaggttcttggctcaatgaaattttgctagagaaaaagaccaagcgtaacaagatattgaaactcaagttccctcgaacagaagaagagaggaggatgagaacccagtctaagcgacgcttggaagctaagaaagagcagaggcagaaaaacttcgttgatctggcatgcgagtgctctgcggttatctgctgcagggtaaccccaaaacagaaagccatggtagtcgacctcgttaagcgatacaaaaaagctatcaccctggctattggtgatggcgcaaacgacgtaaatatgatcaaaacagctcacatcggcgtcggaatcagcggccaggagggcatgcaagccgtaatgtcgtctgattactcatttgcgcaattcaggtaccttcaaaggttactgctggtccatggaagatggagttacatccgaatgtgtaaattcctgaggtacttcttttataaaaacttcgccttcacactggtgcacttttggtacagcttttttaatgggtatagcgctcagacggcctatgaggactggttcattacactttataacgttctgtacacatccttaccagtcctcctaatgggactgctggaccaggacgtgtctgataaactgtcactacgattccctggcctgtacattgtcggccagagagacttgttgtttaactacaagaggtttttcgtctcactgcttcatggcgtcctgacaagcatgattctattcttcattccgctgggggcctaccttcagaccgttggacaggacggggaagccccatccgactaccagagcttcgctgttactattgcatctgctctggttatcactgtcaacttccagatcggcctagacacttcatactggactttcgtgaatgcattttccatattcgggtcaatcgctttgtactttggcatcatgtttgattttcattccgccggcatccatgttctctttccgagcgcgttccagtttactggtaccgcaagcaacgcgctgaggcagccatacatatggctgacaattattctggctgtggccgtctgtctcctgcctgttgtggccattcgatttctctctatgaccatctggcccagcgagtccgacaagatccagaaacaccgtaaacgacttaaagcggaagagcaatggcagcggcgacagcaggtgtttaggaggggggtttcgacaagacgatcagcctacgccttcagccaccagcgtggctacgccgatctcatcagttctggacgatctatacgaaaaaagagatctcccctggacgccatcgtagctgatggaacagctgaatatagacgaactggcgattcc

SEQ ID NO: 318986 - DNA, 3753 bp, Artificial Sequence
  derived and/or modified sequence
atgagtactgaacgggattcggagaccacgttcgatgaagactcgcagcctaatgatgaggtcgtcccgtacagcgacgatgagactgaagatgaacttgatgatcaaggtagtgccgtcgagcccgaacaaaaccgtgtgaatcgagaggctgaggagaatagagaaccgtttcgaaaagagtgtacatggcaagtgaaggccaacgatcgtaaatatcacgaacagccacatttcatgaacaccaagtttctttgcatcaaagaaagcaaatatgctaataatgccattaagacatataaatataacgcttttacattcattccaatgaatttgtttgaacagtttaaacgggcggctaatttgtattttctggcgttgctgatcctacaagcagtgccacagatttctactctagcttggtacacaaccctggttcccctactcgtcgtcttaggagttacagctatcaaagatctcgttgatgatgtcgcgcgtcacaagatggataaggagatcaacaatcggacctgcgaagttattaaggatggaagatttaaagtggcgaaatggaaagaaatccaagttggcgacgtgatcagactaaagaagaatgatttcgtaccagctgacatccttcttctgagctcatctgaaccaaacagcttatgttatgttgagacagctgaactcgatggggagacaaatcttaaattcaagatgtctctggagatcactgaccagtacctccagcgggaagatactttggcaacatttgacggttttattgaatgtgaggaaccaaataatcggcttgacaagtttaccggaactttgttttggaggaatacgtcatttccgctggatgccgacaagattctattgcgcggatgcgttattcgtaatacagacttctgtcatgggttggtcatttttgctggagcagatactaagattatgaagaactcaggaaaaacccgattcaaacgtacaaagatagattaccttatgaattacatggtgtatacgattttcgtggttctcattctgctctcggcaggtttagccattggtcatgcctattgggaggcacaggttggaaattcttcttggtatctgtatgatggtgaagatgatactccatcctatcgaggtttccttattttttggggatacattattgtcctcaacactatggttccaataagtctatatgtatcggtggaagtcattcgcctcggacaatcgcactttatcaattgggatcttcagatgtactacgctgaaaaagatacgccagctaaggctagaaccaccactcttaacgagcagcttggacaaattcactacattttttccgacaagacgggtaccctaacacagaacattatgacatttaagaaatgctgtattaatggacaaatttatggtgaccatcgagatgcttcacaacataaccataataaaattgagcaagtcgacttttcgtggaacacttacgccgatggtaaactcgctttttacgaccactatcttatcgagcaaattcaatcaggaaaagagccagaggtgcgtcagttcttcttccttttggctgtttgtcatactgttatggttgatcgaacggacggacaacttaattatcaagcagcctctccagacgaaggagcgctagttaacgctgcacgaaattttggctttgcatttttagcaagaacacaaaacaccatcacaatttcagaattgggaacggagagaacatacaatgtactagctatccttgatttcaattccgatcgaaaacgaatgagcataatcgtacgaacaccagaaggaaatattaagctttattgtaagggtgcagacacggtaatctatgaaagattgcatcgaatgaacccaacgaagcaggaaacgcaggacgcattagacatattcgcgaacgaaactttgaggactttgtgtctttgttataaggaaatcgaggagaaagagtttactgaatggaacaaaaaattcatggctgcttctgtagcttccacgaatcgcgacgaggctttggataaagtttacgaagaaatcgaaaaggacttgattttattaggagcaacagctattgaagacaaactgcaagatggagttccagaaactataagtaaactcgcaaaggcagacatcaaaatttgggtcctaacaggagacaagaaagaaacagcagagaatattggcttcgcctgtgagctattgactgaagacaccacgatttgctatggggaggacatcaactcccttctccatgcacgtatggaaaaccaacgaaatagaggaggtgtttacgctaaattcgctccaccagtgcaagagtcatttttcccacccggaggaaaccgtgcacttattattaccggatcttggcttaatgaaattctgttggagaaaaaaaccaagcgcaataaaatcttgaaactcaagtttccgaggacggaggaagaaaggcgaatgcgaactcagtccaagcggcgattagaagctaaaaaagaacagcgacaaaagaattttgtcgatcttgcatgcgagtgttcggcggtcatatgctgcagagtaacccctaagcaaaaggcaatggttgtcgatttggttaaacgttacaagaaggctattacacttgccatcggggacggtgctaatgatgtgaacatgatcaaaaccgcacatattggagtcggaatatctggacaggagggtatgcaagccgtaatgagttcggattattcctttgctcaattccgttatctgcagagattgctgctagttcatggccgttggtcgtatattagaatgtgcaaattcttgaggtattttttctacaaaaatttcgcattcactctggttcatttctggtactcattcttcaatggatattctgcacaaactgcttatgaggattggttcattactctgtacaacgtcctctatacgtcacttccagttcttctcatgggactgttggatcaagatgtctcagataaactttctctacgttttccaggattatatattgttggacagagggatttgctgttcaattataagcgtttttttgttagtcttctgcatggtgttctaacgagtatgatcttgttcttcataccattgggagcatatctccaaactgtgggacaggatggagaggctccgtcagattaccagtcgttcgcagtaacgattgcgtctgcacttgttatcacagtgaatttccagatcggcctcgacacgtcttactggaccttcgtcaacgcgttctccatttttggatcaatagcactgtatttcggaatcatgtttgattttcatagtgctggaatacatgtgttatttccatcagccttccagtttacgggaaccgcgagcaatgctcttagacagccatatatttggttaacaataatcttagctgttgcagtttgcttgctgccagtggtggccatacgctttctttcgatgacaatatggccatcagagtctgataagatccaaaaacatagaaaacggttaaaggctgaggagcaatggcaaagaagacagcaagtttttagacgaggagttagtacacgacgttccgcttacgctttctcacatcaacgcggatacgccgatttgatatcaagcggccgatcgattagaaaaaagaggtcaccgttggatgcaattgtcgcggacggtactgcagaatatcgacgcactggagattct

SEQ ID NO: 318987 - DNA, 3753 bp, Artificial Sequence
  derived and/or modified sequence
atgtcgaccgaacgtgactcggaaaccacctttgatgaagattctcaacccaacgatgaggtggtgccttacagcgacgatgaaactgaagatgagcttgatgaccagggatccgcggtggagccagagcaaaacagagtcaaccgggaggccgaagaaaatagagagccttttaggaaggagtgcacgtggcaggtgaaagcaaacgatcggaagtaccacgagcagccccatttcatgaacactaagttcctttgcattaaagaatcgaaatacgcaaacaacgccatcaagacgtacaagtacaatgcattcacctttattccgatgaaccttttcgaacagtttaagcgggcagctaacctctactttctggcactcctgatcctgcaggcggttcctcaaatttcaacgctggcttggtacaccaccctggtccctctgctggtcgtgctgggtgttaccgcaatcaaggatctggtggacgatgtggccaggcacaagatggataaggaaatcaataatcgcacctgtgaagttatcaaagatggcaggtttaaggtcgccaagtggaaagagatacaagtgggagatgtgatacgacttaagaaaaacgactttgtgcctgcagacattctgttgctctcctcctcagagccaaattctctgtgttacgtggaaactgcagagctggacggggaaaccaatctgaagtttaagatgtccctggaaattaccgatcaataccttcagcgtgaggacactctcgcgacgtttgatggctttatagaatgtgaagaacctaataaccggctcgataagttcaccggaacccttttctggagaaacaccagctttcctctcgatgcagacaaaatccttctcaggggttgtgtgattagaaacactgatttctgccacggtctggtgattttcgcaggagctgacacgaagataatgaagaattcaggaaaaacccggtttaaacggaccaagatcgattaccttatgaattacatggtgtacacgatatttgtggtactcatcctgctttccgcaggactggcaatagggcatgcatactgggaggcacaagtgggcaactccagctggtacctgtacgacggagaagatgataccccttcgtatagagggtttctgatcttttggggctacatcatcgtgctcaacaccatggtcccaattagcctttacgtatccgtggaagtgattcggctgggacagtcacatttcatcaactgggatctgcaaatgtactacgcagagaaggatacgcctgccaaggcacggaccaccactctcaatgaacaacttggtcaaattcactacatcttttcggacaaaactggaacccttacccagaatatcatgacgtttaagaagtgctgcatcaatggacagatatacggagatcacagagatgcatcacaacataaccataacaaaatcgaacaagtcgacttctcatggaacacgtacgccgacggtaaacttgctttttacgaccattaccttattgaacaaatccaaagcggtaaggaacccgaagtgcggcaattcttctttctgctggctgtgtgtcacaccgtgatggtggatagaacggacggacagctcaactatcaggcagcctcgccagacgagggagcactcgtaaacgccgctcgcaactttggattcgcatttctcgcgcgcacgcaaaacactatcaccatttccgaattgggtactgaacgcacctacaatgtgctggcaattttggacttcaattccgaccggaagaggatgtcgattatcgtgcgaacccccgaaggcaacatcaagctgtactgtaaaggtgcagacaccgtgatttatgagcgcctgcataggatgaatccaactaaacaggaaacgcaggatgccctcgacatctttgcaaacgaaactttgcgaactctgtgtctttgttacaaggaaatagaggaaaaagaattcaccgaatggaacaagaagtttatggcagcaagcgttgcatccaccaaccgtgacgaagctcttgataaagtgtatgaggaaatagaaaaggacctcatcctccttggagcaacggcaattgaagataaacttcaagatggggtccctgaaaccatatcaaagttggcgaaggccgatatcaagatttgggtcctgaccggagataagaaagaaaccgcagagaatatagggttcgcctgcgaattgctgaccgaggacacgactatatgctacggcgaggacatcaactctctgctccatgcaaggatggaaaaccagcggaatcgtggtggtgtgtacgcgaagttcgcacctccagtccaagagtcattctttccaccgggaggtaatagggccctcatcattactggatcgtggcttaacgaaatcctgctggagaaaaagaccaagcgtaacaaaattcttaaacttaagttcccacgaaccgaggaagaaagacggatgcggacccagtccaagcgcaggcttgaagcgaaaaaggaacaacggcaaaagaattttgtggacctggcgtgtgaatgtagcgcagttatttgttgtcgtgtgacgcccaagcaaaaagcaatggtagtggatctggtgaagcggtacaaaaaggccattaccctggccattggagacggcgccaatgacgtcaacatgattaagactgcacatattggggtcggaatctccggacaagagggtatgcaagcggttatgtcatcagattactcgtttgcacagtttcgctacctccaacggctccttctggtgcacggtcgatggtcatacatcaggatgtgtaagttcctgagatactttttctacaagaattttgccttcaccctcgtccatttttggtacagcttctttaatggctactctgcacagacggcatacgaggattggttcatcaccttgtacaatgtgctctacacttcgcttcctgtgcttttgatgggtcttttggatcaggacgtgtccgacaagctgtcgctgagatttccaggtctttacattgtgggacagagagatctgcttttcaactacaagagatttttcgtctcactgctgcatggggtgcttacctccatgatactgttcttcatccctctgggagcctatcttcaaactgtgggacaggatggcgaggcaccttcggattaccagtcctttgcagttactattgcatcggctttggtgattaccgtgaacttccaaatcggacttgacactagctactggaccttcgtgaacgccttttcgatctttggttccatcgccctgtattttggaattatgtttgatttccattcggcagggattcacgtcttgtttccttccgcctttcaatttactggcaccgcatcaaacgctctgcgtcagccatacatctggcttaccattattctcgcagtcgccgtctgcttgctcccagtcgtggctattagatttctcagcatgaccatctggcccagcgaatccgacaagattcagaagcatcgcaagagactcaaggcggaggaacagtggcagcggcgacaacaggtctttcggcgcggcgtctctaccagacgcagcgcctatgcgttttcacatcagcgaggatacgcagatctgatttcgagcggaagatcaattaggaaaaagcgttcacctctggatgcaattgtggcagatgggactgccgaatacagacgaacgggtgattcg

SEQ ID NO: 318988 - DNA, 3753 bp, Artificial Sequence
  derived and/or modified sequence
atgagcactgagcgtgattccgaaacaacgttcgacgaggacagccaacccaatgacgaggtggtgccctacagcgatgatgagaccgaggatgaactggacgatcagggaagcgccgtggagcctgaacaaaatagggtcaatcgtgaggccgaagagaatcgcgaaccctttagaaaggaatgtacatggcaggtgaaggccaacgatcggaaatatcacgagcagccccactttatgaacaccaaatttctgtgtatcaaggagagtaaatatgccaataacgcgatcaagacttataagtacaacgccttcactttcattcctatgaacctgttcgagcagttcaaaagggcagcgaatttgtactttctggcactactgatcctgcaggcggttcctcagatcagtaccctggcatggtacacaaccctggtgcccctgctggtggtgttaggtgtgactgctatcaaggacctcgtggacgatgtcgcccgtcataaaatggataaagagatcaacaaccgcacatgtgaagttatcaaggatggccggtttaaagtggccaagtggaaggagatacaggtcggggacgttatccgtttgaaaaagaacgacttcgtaccggccgacattttgctgctaagcagctcagagcccaatagtctctgctacgtcgaaacagccgagctggatggagagactaatctgaagttcaaaatgtctttagagatcactgaccagtatcttcagcgagaagatacactcgccacattcgatggttttatcgaatgtgaagaacccaacaaccggctggataagtttacgggaaccttgttttggcggaatacatcattccccttggatgccgacaagatcctgctccgaggatgtgtcatcaggaacaccgatttctgccacgggttggtcatctttgccggtgccgatacaaagattatgaagaacagcggaaagacccggtttaaacggaccaaaattgattatctaatgaattacatggtttacacgatctttgtggtcctgattcttctatccgccgggctggcgatcggacacgcttactgggaggcgcaggtcggcaattcctcatggtatctgtatgacggcgaggacgacaccccctcctaccgaggtttccttatcttttgggggtatatcattgtgttgaataccatggtgcctatcagtctctacgtgagcgtcgaggtgatccggctgggtcagtcccacttcatcaactgggacctgcagatgtactacgcggagaaggatacccccgccaaagctcggactaccactctgaatgagcagctgggccagattcactacatcttttctgataaaacgggcacattgactcagaacatcatgacgttcaagaagtgctgcatcaatggccagatatatggagaccacagagacgcttcccagcacaatcataataagatcgagcaggtggacttctcttggaacacgtacgcagacggcaagttggccttttatgatcactatcttatagagcaaatccaaagtggcaaagagccagaagtcaggcagttcttcttcctactcgcagtttgccataccgtaatggtggatcggacagatggccagctgaactaccaggctgcttctcccgatgaaggggcgctggtcaatgcagccaggaactttggctttgcattcctggctcggacccaaaatacaatcactatctccgagttgggtaccgagcgaacatacaatgtccttgctattttggatttcaatagcgatcggaaacgcatgagtataatcgtacggactccggagggcaatattaagctatattgcaaaggcgccgataccgttatctatgagaggctgcataggatgaatcccacgaagcaggaaactcaggacgccttagatatctttgccaacgagactctcagaaccctgtgtctgtgctataaggagatcgaagagaaggagtttacagagtggaataagaagtttatggccgcttccgtggcttctactaacagggacgaggcactagataaagtgtacgaggagattgagaaagatctgattttactcggtgcaaccgcgatagaggataaactccaagacggtgtacctgagacaatctcgaaactcgcaaaggcagatattaagatttgggtactgacgggtgacaaaaaggaaacagcggaaaacattgggttcgcttgtgaattattgaccgaagataccacaatttgttacggtgaagacattaactcgctcctccacgctcggatggagaaccagcgcaatcgcgggggtgtctacgccaagtttgcccctccagtccaagagtccttttttcctcccgggggaaatcgcgcactcattataaccggttcatggctcaacgaaatcttgttggagaagaagacaaagaggaacaagatccttaagctcaaattccctcgcacagaggaagagcggcgcatgcgcacgcagagtaagagacggctagaggctaagaaagaacaacgccagaagaatttcgtggatctcgcttgtgaatgctcagctgttatttgttgcagagtgactcccaaacagaaagccatggtcgtcgatttggtgaaacggtacaagaaggccataactttggctataggagatggcgcaaatgatgtcaatatgatcaaaacagcccacatcggcgtcggaatatcgggacaagaaggcatgcaggctgtcatgagctctgactactccttcgcacagttccgctacttacagcggctgctgctggtgcacgggcggtggagttatatcagaatgtgcaaattccttagatattttttctataaaaattttgcttttactctggtgcacttttggtactcttttttcaatggctattctgcccaaaccgcctatgaagactggttcatcaccctgtataacgtgctgtacacttccctcccagtgcttctcatgggtttgcttgaccaggatgtctccgataagctgtcactcaggtttcccggtctgtacatcgtggggcagcgggacctgttattcaactacaagagattcttcgtaagcctcctacatggcgtgctcacctctatgattctgttttttataccccttggcgcatatcttcagacggttggccaagatggcgaggcaccaagtgattaccagagctttgccgtcaccatcgcttctgccttggtgatcaccgtcaatttccaaatcgggttggacacatcttactggacctttgtgaatgccttctccatattcgggtctatcgctctttactttgggattatgttcgattttcatagtgctggtatccatgttctgtttccctcagctttccaattcacgggcaccgccagtaatgcactcaggcagccatacatctggcttacaatcatcttggctgtcgccgtgtgtctgcttccggtagtggccattcgcttcctgagtatgacgatctggccctccgagtcagacaagatccagaaacatagaaagcggctcaaggcagaggagcagtggcagaggcgccagcaggtatttagacgaggcgtgtctaccaggcggagtgcctacgctttttcacatcagcgcggctatgcagatttgatctcgtccgggcgatcgatccgcaagaagagatctcccctggacgcaatagttgcagatgggactgccgagtatagaagaacaggagatagt

SEQ ID NO: 318989 - DNA, 3753 bp, Artificial Sequence
  derived and/or modified sequence
atgtctactgaaagagattccgagactacctttgacgaggattcgcaaccgaacgatgaagtggtcccatactctgatgacgagactgaggacgaactcgatgatcaaggatccgccgtcgaacccgagcaaaatcgggtcaacagggaagccgaggaaaacagagagccattcaggaaagaatgcacctggcaagtgaaagcaaatgaccggaaataccatgagcaacctcatttcatgaatactaagtttctctgtattaaggaatccaaatacgcaaataacgcaatcaagacctacaagtataacgcctttacctttatacctatgaaccttttcgaacagtttaagcgagcagcaaatctgtactttttggcgctgctgattttgcaagccgtgccccagattagtacgctggcatggtacactacccttgtgcccttgctggtcgtgcttggagtcactgcaatcaaggatcttgttgatgacgtggcgcgccataagatggataaagagattaacaaccggacttgtgaagtgattaaggacggaaggtttaaagtggccaagtggaaggagattcaagttggagatgtgattagacttaagaaaaacgattttgtccctgcagacatcctgcttctgtcatcctcagaaccaaatagcctttgttacgtggagactgccgaactggatggagagactaatctgaagtttaagatgtcattggaaataactgatcaatacctgcagagagaagatacccttgccacctttgatggctttattgagtgtgaagaacctaacaacagactggacaaattcacgggtacccttttctggcggaacacgtcgtttcctctggatgcagacaaaatacttctgcgcggttgtgtgattcgaaataccgatttttgtcatggactggtgattttcgcaggcgccgatactaagattatgaagaattcgggaaaaacccgctttaagcgtaccaagattgattacttgatgaactacatggtgtacacgatttttgtggtgctcatcctcctgtccgccgggttggccattggtcacgcatattgggaagcacaggtcggaaattctagctggtatctttacgatggtgaggatgacaccccatcgtaccggggttttctgattttctggggctacatcattgtgctgaacacgatggtgccgatctccctgtacgtgtcggtggaagtgattagactgggtcaatcacacttcattaactgggatcttcaaatgtactacgctgaaaaggacactccggcaaaggctagaactaccacgctgaacgaacagcttgggcaaattcactacatcttcagcgacaaaactggcaccctgacgcaaaacattatgacttttaagaaatgctgcatcaacggacagatatacggagatcaccgtgatgcgtctcaacacaatcacaataagattgaacaagtggatttttcatggaacacctacgccgatggtaaactggcgttttacgatcattacttgattgagcagatacaatcaggtaaggaacctgaggtgaggcagtttttctttctgctggccgtgtgtcatactgttatggtggaccggaccgatggccagttgaattaccaagcagccagccctgacgaaggcgctttggtgaacgcggcacgtaatttcggatttgcctttcttgctagaactcagaacaccattaccatatccgaacttggaaccgaaaggacctacaatgtccttgccattcttgactttaacagcgaccgaaagcgaatgtcaatcatagtgcgcactcctgagggaaacatcaagctgtactgtaagggtgcagacacggtgatttacgagcgtttgcatcgaatgaatcccaccaagcaggaaacgcaggacgcacttgacattttcgcgaacgaaacccttagaaccctgtgcctctgttacaaagaaattgaagaaaaggagtttaccgaatggaacaagaaattcatggcagcgtctgtggcgagcactaatagagacgaggcacttgataaggtctacgaagaaatcgagaaagacctcattcttttgggagcaaccgccattgaagataagctccaagacggagtccctgaaaccatttcaaagctggctaaagcagacattaagatttgggttctgaccggtgacaagaaggaaacggcagaaaacatcgggtttgcctgcgagctcctgactgaagataccaccatctgttacggagaagatatcaattcacttctccatgccagaatggagaaccagagaaatagaggaggcgtgtacgcgaagtttgccccgccagtgcaagaatccttcttcccacccggtggcaaccgggcactgatcataactggaagctggctcaacgaaatactgctcgagaaaaagaccaaacgcaacaagatactgaagctcaaattccctcggacggaggaggagcgcaggatgcgcacgcagtcaaaaaggcgcctggaagcaaagaaggagcaaaggcagaaaaactttgtcgatctggcatgcgaatgctctgcggtgatctgttgtcgtgtgactccaaagcaaaaggcaatggtggtggaccttgtcaagagatacaagaaggcaattactctggcaattggagatggggcgaacgatgtgaacatgatcaagacggcacacatcggggttgggatcagcggccaggaaggtatgcaggcggtgatgtcctctgattactcgtttgcccaattcagatacctgcaacgcttgctccttgtccatggccggtggtcctatatccgaatgtgtaagttccttaggtactttttctataagaattttgcttttacgctcgttcatttttggtactcgttcttcaacggatatagtgcccaaactgcatacgaggactggtttatcaccctctacaacgtcctttacacttcgcttccagtccttctcatgggattgctcgaccaagatgtctcagataaactgagcctcagattccctgggttgtacatcgtaggtcagcgcgatctcctcttcaattacaaacgcttttttgtctcgttgctgcatggggtgctgacgtccatgattctctttttcatcccgctgggtgcatacctgcaaacggtgggacaggatggtgaagccccctctgattaccaatcattcgcagtgaccatcgcctcggcactggtgataaccgtgaactttcaaatcggacttgatacttcctattggacctttgtgaacgcattttctatctttggttccatcgcactgtattttgggatcatgtttgattttcattcggctggcattcacgtgctgttcccatcagcattccagttcaccggaaccgcaagcaacgcgctgcgccagccatacatttggcttaccatcatcttggctgtcgcagtgtgccttctgcctgtggtggccattagatttctgtcgatgactatctggccgtccgaatcggataagatacagaagcatcggaaaaggcttaaggcagaggagcaatggcagaggcgacaacaggtctttagaaggggagtgtcgacgagacggagcgcatacgcattctcgcatcaaagaggttacgccgatcttatttcgtcggggcgctccatacgaaagaagcgaagcccacttgatgcgatcgttgcagatggaaccgctgagtacagaagaaccggagactcg

SEQ ID NO: 318990 - DNA, 3753 bp, Artificial Sequence
  derived and/or modified sequence
atgtcaacggaaagagacagcgagactacttttgatgaggattcccagccaaacgatgaagtggtaccctactccgacgatgaaactgaggatgagttggacgatcaggggtctgccgtagaacccgagcagaatagggtcaacagggaagctgaagagaatcgggaaccatttcggaaggagtgcacatggcaggtgaaagcaaatgacaggaaataccatgaacaacctcactttatgaacacaaaattcctgtgtattaaagaatcgaagtacgccaacaatgccatcaagacctataagtataatgccttcacttttatccctatgaacctgtttgagcaattcaagcgagctgctaacttgtactttctggcactcctaatcctccaggcagtaccccagatctcaactctagcctggtacacaactttagttcccctgctcgtcgtcctgggggtgaccgccataaaggatctggtcgacgatgtggcccgccataaaatggataaggaaatcaataatcgcacttgcgaggtcattaaggacgggaggttcaaggtcgccaaatggaaggagatccaggtcggtgacgtgattcgcctcaaaaaaaatgattttgtgcccgcagacatacttctactgagctcctctgaaccaaactcattgtgctatgttgagacggccgaattggacggggaaacgaatctcaagttcaaaatgagtttagagatcaccgaccagtatctccagagagaggataccctcgcgacatttgacggattcattgaatgtgaagaacccaacaacaggcttgacaagttcacgggaaccctgttctggcggaacacttcctttcccctggacgccgacaagatacttctgcgaggctgtgtgatccggaatactgacttctgtcacggcctggtgatttttgccggtgccgacactaagattatgaagaactccgggaagacccgtttcaaacgaactaaaatcgactacttgatgaactacatggtctacacaatctttgtggtgctcattctcctgtctgctggtctagccatcggccacgcctactgggaagcccaggtaggaaattctagctggtatctgtacgatggtgaagacgatactccctcttatcgaggattcctgatattctggggttacatcatcgtacttaacacgatggtgcccatttccctgtatgtgtctgtggaggtcattaggctgggccagtcccattttatcaattgggacctgcagatgtactatgctgaaaaagatacccccgccaaagctcgcacgaccacgctgaacgaacagctggggcaaattcactatatcttctccgacaaaacgggcactcttacccagaatatcatgaccttcaaaaaatgctgcatcaatggccagatctacggcgaccatcgggacgcctctcagcataaccataacaaaatcgaacaagttgatttctcttggaatacctatgcagatgggaagttggctttctacgaccattacctgatcgagcagatccagtctggcaaggagccggaggtgagacagttcttctttctgctggccgtgtgccatactgtgatggtggacaggacggatggccagctcaactatcaggcagccagcccagatgagggggcactagtaaacgccgcgcggaactttggattcgcttttcttgcaaggacccagaataccattacaatcagtgaactgggcaccgaacgaacttacaatgtgctggcaatccttgactttaacagcgacaggaaacgcatgtcgataatcgtcaggaccccagaagggaatatcaagctgtactgtaaaggggccgacacagtcatttatgaaagactgcatcggatgaatccgactaagcaggaaacccaggatgccctggatatcttcgccaatgagacgctgcgcacactctgtctctgctataaggagattgaagagaaggaattcaccgagtggaataagaagttcatggcggcatctgtggcctccacaaatcgagatgaagccctggataaagtttatgaagaaatcgagaaggatctgattctgttgggcgccacggccatcgaagacaagttgcaggacggggtgccagaaaccatctctaaactggcgaaagcagacattaagatatgggtgctcaccggggacaagaaagagacagctgagaacatcggctttgcatgtgagttgctgaccgaggacacaacgatttgctatggcgaggatatcaactctctcctgcacgcgaggatggagaaccaacggaaccggggaggtgtgtatgccaagtttgctcccccagtccaggagtccttcttccctcccggcgggaatagagcgttgataatcacggggagttggctgaatgaaatcctgctggagaagaaaaccaaaaggaacaagatccttaaactcaaattccctagaaccgaagaggaacgcaggatgcgtacccagagtaagagacgactggaagcgaaaaaggaacaaagacagaagaattttgttgatctggcttgcgaatgttctgcagtgatctgctgtagggtcacccccaagcaaaaggctatggtcgtggatctagttaaaaggtacaagaaggccatcacactagccataggggacggggcgaacgacgttaacatgatcaagactgcacacataggagttggcatcagcgggcaagaggggatgcaagctgtgatgagttccgattatagttttgctcagttcagatatctgcaacggctgttgctcgtgcatggtcgatggagctatattcgaatgtgcaagttcctgaggtactttttctataagaattttgccttcactctggtacatttctggtattcattctttaatggttattccgcccagacagcgtatgaagattggttcatcactctgtataacgtgctctataccagcttacctgtgctcctgatggggctgctggatcaggatgtgagtgacaaactatccctcagatttcctggtctttacatagtcggccagcgcgaccttctgttcaactataaacgatttttcgtgagtcttctgcatggagtgttgactagtatgatactgtttttcatccccctgggcgcctatcttcagaccgtggggcaagatggcgaagcgccctctgactatcagagctttgcagtcaccattgcgagcgccttggttatcacagtgaacttccaaattggcttagacactagttactggacctttgtaaatgccttttcgatatttggttctatcgcattgtatttcggtattatgtttgattttcactccgctggcatccatgtgctgtttccctcggcctttcaatttactgggacagctagcaacgccctgaggcagccgtatatctggctgacgatcatcctggccgttgcggtttgcctgctgccagtagtcgctatcagatttttgtcaatgacaatctggccctccgagagcgataagatccagaagcaccgaaagcgcctcaaagccgaagaacaatggcaaaggagacagcaagtattcaggcggggtgtctccacacggcggtccgcatacgccttttctcatcaacgagggtacgcagacctgatcagctcgggcagatctattcgaaagaagaggtccccactcgatgccattgtcgccgatggcaccgcggaataccgcaggactggggacagt

SEQ ID NO: 318991 - DNA, 3753 bp, Artificial Sequence
  derived and/or modified sequence
atgtctacagaacgagactctgaaactaccttcgatgaggactctcaaccgaatgatgaggtggtcccgtactccgacgatgagacagaggacgagctggacgatcagggaagcgctgtcgagccggaacaaaacagggtcaatagggaggcagaggagaacagggaaccattcaggaaggagtgtacttggcaggttaaggctaatgatcgcaagtaccacgagcagcctcatttcatgaacacgaagtttttgtgtatcaaagagagcaagtacgccaataatgcaataaagacctataagtacaacgccttcaccttcatcccaatgaatctgttcgaacaattcaaaagagccgctaatctctacttccttgccctgctgattcttcaggcagtaccgcagattagcacgttggcatggtataccaccctggtccctctgctcgtcgttcttggagtgaccgcaataaaggacttggtggatgacgtggctcgacacaaaatggataaggagatcaataaccgaacctgtgaggtgattaaagacgggaggtttaaggttgccaagtggaaggagatccaggtgggtgacgttattagactcaagaagaatgactttgtgcctgccgacatccttctcctctcatcatctgagccaaatagcctgtgttacgtcgaaaccgctgagttggatggtgagacgaacctgaagtttaaaatgagtctggaaattacggaccagtatctgcagagggaggacacgctggctacttttgacgggttcattgagtgcgaggagcccaacaaccgactcgacaagtttaccggcactctgttctggaggaatacttccttccccctcgacgccgacaagattcttctgaggggctgtgtgattcgaaacacagacttctgtcatggacttgtgatctttgccggcgccgataccaagatcatgaagaactcaggcaaaacacggttcaagcggacaaagatagactacttgatgaattatatggtgtacaccatttttgtcgtgctgattttgctctcagcaggccttgctataggccatgcttactgggaggcccaggtgggtaacagcagctggtatctctacgacggtgaagacgacaccccgagctaccgcggcttcctgatcttctgggggtatatcatcgtacttaataccatggttcccattagcttgtatgtcagcgtggaggtgatcaggctgggccaatcccactttatcaactgggatctccaaatgtactacgccgagaaagacacacctgctaaggccaggaccactacgctgaacgaacagctgggccagatccattacatcttctccgacaaaacaggcacccttacgcagaatatcatgactttcaagaaatgttgcattaatgggcagatctacggagatcacagagatgcatcacagcataatcacaacaaaatcgagcaggtcgacttttcctggaatacatatgcagatggaaagctggcattctacgaccattacctcattgaacagattcagtcaggcaaggagccagaagtgcggcagttcttttttttgctggcagtttgccacacggtgatggtggatcgcaccgacggacagttgaactaccaggccgcgtcacctgacgagggagcactcgtcaacgctgccagaaactttgggttcgcgttcctggcaaggacccagaatacaataacaattagtgagctcggaacagagagaacctataatgtcttggccatccttgacttcaactcagacaggaagcgcatgtcaattatcgttaggactccggaggggaacatcaaactgtattgcaaaggggctgatacagtgatctatgaaaggttgcaccggatgaatccaacaaagcaagaaacccaggacgccttggatatcttcgccaatgagactttgcggaccctgtgtctctgctataaggaaattgaggagaaggaatttactgaatggaataaaaagttcatggccgccagcgtggcttcaactaacagggatgaggctctggacaaagtgtatgaggagattgaaaaggatctgatcctgttgggtgctactgcaattgaggacaaattgcaagatggtgtgcctgagacaatttccaagcttgctaaagccgatatcaagatctgggtcctcaccggcgataagaaggagaccgcagagaatatcgggttcgcctgcgagcttctgacagaggacactaccatctgctacggggaggatatcaacagtctcctgcacgctagaatggagaaccagcgcaataggggaggcgtctacgctaagtttgcaccgcccgtgcaggagagtttttttccccccgggggcaacagggctctgatcatcacgggcagctggcttaatgaaattttgctcgagaagaagaccaagcgaaacaagatcctgaaactgaagttcccgcgaacagaagaggagagacggatgcgcacacaaagcaaaaggcgactcgaggcaaaaaaagaacaacggcagaagaattttgtggacctggcttgcgaatgctcagcggtgatttgttgccgagtgactcctaaacagaaagctatggtcgttgacctggtaaagagatacaaaaaggccatcacgctcgctattggagacggagctaacgacgttaacatgataaaaacagcccacatcggtgttggcattagcggccaggaggggatgcaggcagtgatgtctagtgattactccttcgcccagttccggtacctccagagacttttgctggtccatggacggtggagttacattcggatgtgcaagttcttgcggtactttttttataaaaattttgcttttacactggtgcacttctggtactccttcttcaacgggtactctgcacagaccgcttacgaagattggtttattactctgtataatgtactgtacacaagcttgcccgtgctgcttatgggacttttggatcaggatgtctcagacaagctgtccctgcggtttcctggcctgtacatagtgggacagcgggaccttttgtttaactacaaacggttctttgtaagtctcttgcacggggtgcttaccagcatgatcctgttttttattccattgggggcctatctccaaaccgttggccaggacggagaggcaccttcagactaccaatcattcgccgtgaccatcgctagcgccctggtgatcactgtaaatttccagatcgggctggacacaagctattggacatttgtgaatgctttctccatcttcggctcaatcgcactttactttggaatcatgtttgacttccacagtgccggtatccacgtgctctttcccagcgccttccagttcaccggcaccgccagtaatgccctgcggcagccttacatctggctgacgattattctggctgtggcagtctgtttgctccctgtggtcgcaattcggttcctctccatgaccatttggccttcagaatccgacaaaatccagaagcaccgcaaaaggcttaaagccgaggagcagtggcagcggcgacaacaggtgtttagacgcggtgtaagcaccagacggagcgcctatgccttctcacaccaacgggggtacgccgacctcatcagcagtgggcgctctatcagaaagaagagatcaccgctcgatgcgatcgtcgccgatgggacggccgagtatcggaggacaggagacagt

SEQ ID NO: 318992 - DNA, 3753 bp, Artificial Sequence
  derived and/or modified sequence
atgtcgaccgagcgcgatagcgagacgacctttgacgaggattcccagccgaatgatgaagtcgtgccttactctgacgatgagactgaggacgaattggatgaccaaggctcggccgtggagcctgagcagaaccgcgtcaatagagaagccgaagagaatcgcgagccgttcagaaaggaatgcacttggcaggtgaaggcgaatgatcgcaagtaccatgagcagccgcactttatgaacactaagttcctgtgcatcaaggaatcgaagtacgcgaacaacgccatcaagacttacaagtacaatgcatttaccttcataccgatgaacttgtttgagcaattcaagcgcgcagccaatctttacttcctggcgcttctgatcctgcaggcggttccgcaaatcagcactctcgcgtggtacaccacccttgtgccgttgctggtcgtgctgggcgtcaccgcgattaaggacctggtggatgacgtcgcccgccacaagatggacaaagaaatcaataatcggacttgtgaggtcatcaaggacggtagattcaaggtggccaagtggaaggaaatccaggtcggtgatgttattaggctcaagaaaaatgatttcgtgccagcagacatcctgctgctgtcctcctccgagcctaactccctgtgctacgtggaaactgctgagctcgacggcgaaactaatctgaaattcaagatgtcgcttgagatcacggaccagtatctgcaacgcgaagatacccttgcgacgttcgacggctttatagaatgcgaggaacctaacaatcggctcgacaaattcactgggacgctcttttggcggaacactagtttccctctcgatgccgacaagatcttgctgcgcggctgcgtgatccggaatactgacttttgtcacggactggtgatcttcgctggagcagacacgaagatcatgaagaacagcggaaaaactcgctttaaacgcactaagatcgactacctgatgaactacatggtctacacgatcttcgtggtgctcatcttgctgtcggcaggattggcgatcggacacgcctactgggaagcccaagtcggtaactcctcgtggtacctttacgacggcgaggacgataccccttcttacaggggattcctgatcttctggggatacatcattgtgcttaacaccatggtgcctatttcactgtacgtgtccgtggaagtgatccggctgggccagtctcacttcattaactgggatcttcagatgtactacgcagaaaaggacactccggcaaaggcacgcaccaccaccctgaacgagcagcttggacaaatccattacatcttctcagataaaaccggaaccctgactcagaacatcatgaccttcaagaaatgctgcatcaacggacagatctacggcgaccacagagacgcctcacaacacaaccacaacaaaatcgaacaggtggatttctcctggaatacctacgctgatggaaagctcgccttctatgatcattatctcatcgaacagatccaaagcggcaaggagcctgaggtgcgacagttcttctttctcttggccgtctgccacactgtgatggtggaccggaccgatgggcaactgaactaccaagctgcgtcgccggatgaaggagcgctggtgaacgctgccagaaatttcgggtttgctttcctggcgcggacccagaacaccatcaccatctccgagctcgggactgagcgcacttacaatgtgctcgcaatcttggatttcaattcggatcggaagcgcatgagcattatcgtccgtactccggagggcaacatcaagctctactgcaagggtgcagatacggtcatctacgaaaggctgcaccgcatgaacccgactaaacaagagacgcaagatgcgctggacatcttcgccaacgaaactctgcgcaccctctgtctgtgctacaaagaaatcgaggagaaggagtttaccgagtggaacaagaaattcatggcggcatccgtggcatcgaccaatagagatgaggccctcgacaaggtctacgaggaaattgaaaaggatctgatcctgttgggcgctaccgccatcgaagataagctccaagacggagtgccggaaaccatctcgaagctggcaaaggcagatatcaaaatctgggttctcactggggataagaaggaaactgcggaaaacattggattcgcctgtgagcttctgactgaggacactactatctgctatggagaggacatcaatagcctgctgcacgcgcgcatggagaatcaaagaaaccggggaggagtgtacgctaaattcgctccacccgtgcaggagtccttcttcccgcccggcggaaatcgggccctgatcatcactggatcatggctgaacgagatcctcttggaaaagaaaaccaagcgcaacaaaatcttgaagctgaagtttccaagaaccgaggaggagcgcagaatgcgcacccagtccaaacggagactggaagccaagaaggaacagcgccaaaagaacttcgtggacttggcctgcgagtgcagcgccgtgatctgctgtcgcgtcaccccgaagcagaaggccatggtcgtggatctggtgaagcggtacaagaaagccatcactttggcaatcggagacggggccaacgatgtgaatatgatcaaaaccgctcacatcggcgtgggaatctccggccaagaaggcatgcaagcggtgatgtcgtccgattactcgtttgcacagttccgctatctgcaaagattgctgctggtgcacgggcgctggtcgtatatcaggatgtgcaaatttctgagatacttcttctacaagaactttgccttcactctggttcatttctggtactcgtttttcaacggctactccgcccagactgcctacgaggactggtttatcacgctctacaacgtgctctacacgagtctcccagtgttgctgatgggactcctcgaccaagatgtttctgacaaactcagcctgcgctttccaggcctgtacatcgtgggacagcgcgacctgctgtttaactacaaaagattctttgtctcactcctgcatggggtgcttacctcaatgatcttgttcttcatcccgttgggagcatacctccaaactgtgggccaagatggcgaagctccgtcagactaccagtcgttcgccgtgaccatcgcttctgccctggtgatcacggtcaatttccagattgggctggacacctcatactggaccttcgtgaacgcattctcgatcttcggctcgattgccctctacttcggaattatgttcgacttccattccgccggcattcacgtcttgtttccgagcgccttccagttcactggcacggcctcaaatgcgctgcggcagccgtacatctggctcaccattatcctggccgtcgcggtgtgtcttttgccagtggtggcgatcagattcttgagcatgaccatctggccatccgagtcggacaagatccagaagcatcgcaagcgcctcaaggccgaagaacagtggcaacggagacagcaagtctttagacgaggggtcagcaccagacgaagcgcatatgccttctcgcaccagcggggatacgcggacttgatctcgtccggccggagcatccgcaagaaacggagcccccttgacgccatcgtcgcggatggtaccgctgagtaccggagaaccggcgacagc

SEQ ID NO: 318993 - DNA, 3753 bp, Artificial Sequence
  derived and/or modified sequence
atgtctacggagcgtgactcagagaccacatttgatgaggatagccaaccaaacgatgaagtggtgccttactcggacgacgaaacagaggatgagctggatgaccaggggtcagccgtcgagccagagcagaacagagtcaatcgggaagcagaggaaaacagggagccctttcggaaagagtgcacatggcaagttaaagcaaatgaccgcaaatatcatgaacagcctcacttcatgaataccaagtttttgtgtatcaaggaatctaaatatgcaaacaacgccattaagacctataagtataacgcgttcacatttattccaatgaacctctttgaacagtttaagcgggcggcaaacctgtatttcctggccctgctgattttacaggcggtgcctcagattagcacactggcttggtacaccaccctggttcctctgttggtggtcctgggcgttacagccataaaagatcttgtggacgacgtcgcaaggcataaaatggacaaagaaatcaataatagaacgtgcgaagtgatcaaagatggaaggtttaaggttgctaagtggaaagaaatacaggtgggggatgtcattagactaaagaaaaatgatttcgttccagcggatatcctgctactgtcttctagtgagcccaattctctgtgttatgtcgagaccgccgaactggacggcgagacaaatttgaagttcaagatgtctttggagatcaccgaccagtatttgcaacgcgaagatacactggcaacctttgacggcttcatcgaatgcgaggagccgaacaatagactggataaattcacaggcaccttgttttggcggaatacgtccttccccctggatgcagacaagatcctgctgagagggtgtgtgattcgtaacacggacttttgccacggcctagtgattttcgccggcgcagacacgaaaattatgaagaatagtgggaaaaccagattcaagagaactaaaatcgattatctgatgaattacatggtgtacacaatcttcgtggtgctgatacttctaagcgcaggtcttgccattggccacgcctactgggaagcacaggtgggaaactccagctggtacctatacgatggagaggatgacacaccctcttaccgtggctttttgatattttggggctacattatcgtgctgaacaccatggtccctatctctctgtacgttagtgtggaggttatcaggttgggtcagtcacattttattaattgggatctgcagatgtactacgctgagaaagatacgcctgccaaggctcgcacaaccacgctgaatgaacagctcggtcaaatccattatatcttctccgacaagaccggcaccctcacacagaacatcatgacgtttaagaagtgttgcatcaacggccagatctatggagatcatcgggacgcttctcagcataatcacaacaaaatcgaacaggtggatttctcatggaatacatacgcagatggtaaattggcgttctacgatcattatttaattgagcaaattcaaagcggtaaggaacctgaggtgcggcaattcttctttctgttggctgtgtgccacacagttatggtggacaggactgatgggcagcttaactaccaggccgcctctccggatgaaggcgccctcgtaaatgcggctcggaacttcgggtttgcctttctcgcacgaactcaaaacaccattacgatatccgaactggggaccgagcggacatataatgtgttggccattctggatttcaacagcgacagaaagagaatgtccatcattgtccgcacacctgaaggaaacatcaagctgtactgtaaaggggcggataccgtcatttacgagagactgcaccggatgaatccaaccaagcaggagacacaggatgctttggatatcttcgccaacgaaactctgcgtacactgtgcctctgctataaggagattgaggagaaagagtttacggagtggaacaaaaaatttatggctgctagcgtcgcctctaccaatcgcgacgaggcgctcgacaaggtctacgaggagatcgagaaagacttgatcctgctgggtgccaccgcaattgaggataaactccaggacggagtgccggaaaccataagcaagcttgcaaaggctgatatcaagatctgggtactgactggtgataaaaaggagaccgctgagaacatcggatttgcatgtgaactgctgaccgaggatacaaccatctgttacggagaggatattaactctctactacacgctagaatggaaaaccaacgcaacagggggggagtgtacgctaagttcgctccaccggtccaggagtcattttttccccccggcggaaacagggccctcattattaccggcagttggcttaacgaaatactactggagaagaagacaaagaggaacaaaattctgaagcttaaattcccaagaaccgaggaggaacggcggatgcgaacgcagagcaagaggagactggaggccaagaaggagcagaggcagaaaaacttcgtggacctcgcatgcgaatgcagcgccgtgatatgttgtagggtgactccaaagcagaaggccatggtggtcgatctcgttaaacgctacaaaaaggccattaccctggcgattggcgatggtgctaatgacgtgaatatgatcaagactgcgcacatcggtgtggggatcagcgggcaggagggaatgcaggcagtgatgtcttctgactattcgtttgctcagttcagatacctgcagagactcctgttggtgcacggcagatggtcttatatcagaatgtgtaagtttctacggtacttcttttacaagaattttgctttcacattggtccatttctggtactccttcttcaacggttatagcgctcagacggcttacgaggactggtttattaccctgtacaatgtgctgtacacctcccttcctgtcctcttgatgggcctcctggatcaagacgtgagcgataagttgagcttgagattcccaggcctgtatattgttgggcagagagacctgttgttcaattacaagaggttttttgtgagtctgctccatggagtgttgacatccatgatacttttttttatccccctgggggcatacctccagacggtaggtcaggatggggaggccccgagcgattatcagagctttgccgtcaccatcgctagcgctttggtcattacagtcaattttcagataggcctggacacctcttactggacctttgtgaacgcattttctatctttggcagcatcgccttgtatttcgggatcatgtttgatttccactccgctggtatacacgttctgtttccctctgcctttcagttcacgggaactgcatcaaacgcactgcggcaaccatatatctggcttacaattatcttggctgtcgctgtgtgcttattacccgtcgtggcaatcagatttctgagcatgacgatttggccatcagaatccgataagatccagaaacaccgcaaacgcttgaaagcagaagagcagtggcaacgtcggcagcaggtcttccgcaggggggtgagtactcgcagatctgcctatgccttttctcaccagcggggttatgcagacttgatttcaagtgggcgctccattcggaagaagaggtcacccctggatgccatagtcgctgacgggaccgccgagtaccggcgcaccggagactca

SEQ ID NO: 318994 - DNA, 3753 bp, Artificial Sequence
  derived and/or modified sequence
atgtcgaccgaaagagactcggagactacctttgacgaggattcgcagccgaacgatgaagtggtgccctacagcgacgatgaaactgaagatgaacttgatgatcaaggatccgcggtggagcccgaacaaaaccgagtgaatcgggaggctgaagagaatagagaacctttcaggaaggaatgtacctggcaagtgaaggcaaacgatcggaaataccacgaacaacctcatttcatgaacaccaagtttctttgcatcaaagaatcgaaatacgcaaataacgcaattaagacttacaaatacaatgcattcacctttattcctatgaacctgtttgagcagtttaaacgggcagccaatctttactttttggcactgttgatactgcaagcagtgccacaaatttcgacccttgcctggtacaccactttggtcccactgctggtggtgcttggcgtgactgcgattaaggaccttgtcgatgatgtggccaggcataagatggacaaggagatcaacaacagaacctgcgaagtgattaaggatggacgctttaaagtcgcgaagtggaaggaaattcaagtgggcgacgtgattcgcctgaagaagaacgattttgtgcccgccgacattcttctcctctcgagctccgagcccaatagtctgtgctacgtcgagactgcagaacttgatggagaaaccaacttgaaattcaagatgagcctcgagatcactgatcagtaccttcaacgggaagataccctcgcaactttcgacgggttcatcgagtgcgaagaacccaataacagactggacaagtttaccggaacgctgttttggagaaacacgtccttcccgctggacgcagataagattctgttgagagggtgtgtcattcggaacactgatttctgccacggattggtcatttttgcaggcgccgataccaagattatgaagaattccggtaagacccgttttaagaggaccaagattgattacctcatgaattacatggtctacaccatattcgtggttctgattcttctgtcagcaggacttgccataggacatgcttactgggaggcacaggttggaaactcctcctggtacctttacgacggtgaggatgataccccttcataccgcgggtttctgattttctggggatacattattgtgctgaacacgatggtgccaatttcgctctacgtctcagttgaagtgatacgtcttggtcagtcgcatttcatcaactgggacttgcaaatgtactacgctgagaaagacacccctgcaaaagcacgaactaccacgcttaatgaacagctgggacagattcactacattttctcagataaaacgggaactttgacccagaacattatgacttttaagaagtgttgtattaacggtcagatttacggtgaccatcgggatgcttctcaacacaaccataacaagattgaacaggttgattttagctggaacacttatgccgatgggaagctggccttctacgatcactacctgattgagcagatccagtcgggtaaggaaccggaagtaaggcagtttttcttccttctcgcggtgtgtcacaccgtgatggtggatcggaccgatggccagcttaactaccaggcggcgtcccctgatgagggtgcactcgtgaacgccgcgcgtaactttggatttgcgtttttggcccgcacccaaaatacgattactatctccgaacttggtaccgagcgcacttacaatgtgctggcgatccttgatttcaattcggatagaaagcggatgtccatcattgtgcgaacccctgaaggcaatatcaaactttattgtaagggagcggatactgtgatctacgagcggcttcatagaatgaaccctactaaacaggagacgcaagatgcactcgatatcttcgcaaatgagactctgagaaccctttgtttgtgctataaagaaattgaagaaaaagagtttactgagtggaacaaaaagtttatggcagcatctgtcgcgtcaaccaatcgcgacgaagcactggacaaggtgtacgaagaaatcgaaaaggatttgattctcctgggagcaaccgcgattgaggacaagctccaggatggagtgcccgaaactatatcgaaactggcaaaggcagatatcaagatctgggtccttacgggtgacaaaaaagaaactgcagaaaacataggttttgcatgtgagctgcttactgaagatactactatttgttatggcgaggacattaactcgctccttcatgcccgaatggagaaccagcggaatcgcgggggcgtgtacgcaaagtttgcccctcctgtgcaggagtcatttttccctccgggcggcaatcgggcactcatcattacgggttcgtggcttaacgagattctccttgagaaaaagactaaacgcaataagatcctgaaactcaagtttccacgtaccgaagaagaacgccgcatgagaacccaatccaagcgaaggcttgaagcgaagaaagaacagcgccaaaagaactttgtggacctcgcatgtgaatgtagcgccgtgatttgctgtcgagtgaccccaaaacaaaaggccatggtcgtcgacctcgtgaagagatacaaaaaggcaattactctcgcaattggggatggcgccaacgatgtgaacatgattaagaccgcgcatataggcgtcggaatatcgggtcaggaaggtatgcaagccgtgatgtcgtcagactactccttcgcccagtttagataccttcagcgtctgttgctggtgcatggccggtggagctatattcgaatgtgtaaattcctgcgttatttcttctataagaattttgcgtttactctggtgcacttttggtacagcttcttcaacggttactcggcacagaccgcctatgaggactggttcataaccctttacaacgttttgtacacgtccctgcctgtgcttctgatgggcctgcttgaccaagatgtgtcagacaagctgtcacttcggttccctggtctgtacatagtgggtcaacgggacctgctgttcaactacaagcgtttctttgtcagcctgctgcatggggtgctcacctcaatgattctgttctttataccacttggcgcttacctccaaacggtgggacaagatggagaagcgccgtcagattaccagtcctttgcagtgaccattgcgtcggcacttgtgattacggtgaattttcaaataggactggacacctcgtactggacctttgtcaatgcattttcgatatttggatcaatagcactttactttggtattatgtttgatttccattccgcgggaattcacgtgctctttcctagcgcatttcaatttactggtactgcttccaacgcacttcggcaaccatacatttggcttactatcattttggcggttgccgtttgcctcctccctgtcgtagcaatcagatttctgagcatgaccatttggccttcggaatcggataagatccagaagcatagaaagagactgaaggccgaggagcaatggcaaagaaggcaacaagttttccgacgcggtgtctcaactcggagatcagcatacgccttcagtcatcaacgcgggtatgccgatctcatctcaagcggaagatcgattcgcaagaaaagatcacctcttgatgcgattgtggccgatggaaccgccgagtataggcgtactggcgattcg

SEQ ID NO: 318995 - DNA, 3753 bp, Artificial Sequence
  derived and/or modified sequence
atgagcacagaacgggatagcgagacgactttcgatgaggactctcagccaaacgatgaggtggttccttactctgacgacgagacagaagacgaactggacgatcagggctcagccgtcgaacccgagcaaaaccgggtgaatcgagaagcagaagagaacagggagcctttccgtaaagagtgtacttggcaggtgaaagctaatgatcggaagtaccatgaacaaccccacttcatgaacaccaaatttctctgcataaaagagagcaaatatgcaaataacgccatcaagacctacaaatacaatgccttcacatttatccccatgaacttgttcgaacagttcaaaagggccgccaatttatattttctggcactgctgatcctgcaggccgtgcctcagatctctacactggcctggtatacgaccctggtgcccctcctggtggtgctaggcgtgacagctatcaaggatttggtggacgacgtggctcggcataagatggataaagaaatcaacaatcggacttgcgaggtgataaaggatgggcggtttaaagtggcgaaatggaaggagatccaggtgggtgacgttatacgcctcaagaagaatgattttgtgcctgcggatattctgctgctaagctcctcagagcccaattccctgtgctatgtggagacagccgagctcgatggtgagaccaacctgaagttcaagatgagcctcgaaataacggatcagtacctccagcgcgaagatactctggccacattcgacggattcatagaatgtgaagaaccaaataacagacttgataagtttaccggaaccttgttctggcgaaacacgagctttcctctcgacgcagataagattctgctacggggttgtgttattcgaaacaccgacttttgccatggtctggttatcttcgccggagccgataccaagataatgaaaaactcaggaaagaccagattcaagcggacaaaaatcgactacctcatgaattatatggtgtataccatctttgtagtgcttatactgctgagcgccggactggcaatcggtcatgcatactgggaagcacaggtcggtaactcaagctggtacctctacgatggcgaagatgatactccatcttatcgcggattcttaatcttttgggggtacatcatcgtgctcaataccatggtcccaatcagtttgtatgtcagtgtagaagttatcaggttgggccagtcccatttcatcaattgggacctccagatgtattacgctgaaaaggacacccctgctaaagcccggaccaccacccttaatgaacaacttggtcagattcattacatattttccgataagactggtactctaactcagaatattatgacgttcaaaaaatgctgtattaatggacagatttatggagaccaccgggatgcaagtcagcataatcacaacaaaatcgaacaggtggacttttcgtggaatacttatgcggatggtaaactcgctttttatgatcactatctgatcgaacaaatccagagtggaaaagaacccgaagtccggcagttcttttttctgctggctgtttgccacactgtgatggttgatcgaaccgatggccagctgaactatcaggccgcttcccccgatgaaggagcactcgtcaatgccgcaaggaactttggttttgcatttttagcacgaacacaaaataccatcaccatttcggaactggggaccgaaaggacttacaacgtgctggccatcttggattttaactcagatcggaagcggatgtctatcatcgtcagaacgcctgagggtaacattaaactttattgcaagggagccgatactgtgatctacgagcgactgcaccggatgaatcccacgaagcaggagacacaggatgcactcgacatcttcgccaatgagactcttagaaccctgtgcttgtgttacaaggaaattgaggagaaggagttcacggaatggaacaagaaattcatggccgctagtgtcgcatcgaccaatcgggacgaggcactggacaaagtttacgaggagattgagaaggacctgatcctcctgggcgctacagccatcgaagataaactccaggacggggtgcccgagactataagcaagctggctaaagcagatattaaaatatgggtccttacaggcgataagaaggagactgcagaaaacatcggcttcgcctgcgaattactcacagaagacaccaccatctgctatggcgaggacatcaactctctgctgcacgcccgaatggagaaccagcgcaataggggcggagtgtacgcaaagtttgccccaccagttcaggagtctttctttccacccggcggaaatcgtgccctgataataacagggtcatggctaaatgagattttgctcgagaagaagaccaaaagaaacaaaattctgaagttgaaatttcccagaaccgaggaggaaaggcgcatgcggacacagagcaaacggcgccttgaagccaagaaggagcagcgccaaaaaaacttcgtggatctggcgtgtgagtgctccgcagtcatctgttgccgcgtgacccctaagcagaaggccatggtagtcgacctggtaaagcgctataaaaaagctatcacactcgcaatcggcgacggagccaacgatgtaaatatgattaaaactgcacacataggcgtgggtataagcggccaggagggcatgcaggccgtgatgtctagtgactattctttcgcacaattcagatatttacagcgcctgttgctggtccatggtcggtggagctacatccgcatgtgcaagttcttgcgctatttcttctacaagaattttgcctttaccttggtccacttctggtattcgttcttcaatggctattcggcccaaacggcctatgaagattggtttataactctgtacaatgtgttgtacactagcttgcctgtgctgctgatggggctgttggatcaggacgtatcagacaaactttcgctcaggttccccggcctgtatatagtcggccaacgtgaccttctcttcaattacaaaaggttctttgttagcctcctacacggagtgttgaccagtatgattttgttcttcattccactgggggcgtacctacaaaccgttgggcaagacggagaagctccgtccgattatcagagctttgcggtgacaatcgcatcagccctcgtaattacagttaactttcagatagggttggacacctcctactggacttttgttaacgcttttagcatctttggctccatagccctgtactttgggattatgttcgactttcattctgccggcatccacgtgctgttcccttccgcgtttcaattcacaggcactgcgagcaacgccctgcgacaaccatacatctggctgactataattttggcagtggccgtgtgcctgctgcccgtggtagctattagatttctgagcatgaccatttggcccagtgagtctgataagatacaaaagcatagaaaaagactaaaggccgaagagcagtggcagaggaggcagcaggtcttccggaggggcgtgtccactaggaggtctgcttacgccttttctcatcagagaggctatgccgacctcatctcctccggccgatcaatccgcaaaaaacgatcccctttggatgccatcgtcgccgacggaacagccgagtatcgccggacaggtgacagc

SEQ ID NO: 318996 - DNA, 3753 bp, Artificial Sequence
  derived and/or modified sequence
atgagcaccgaaagggattccgagacaaccttcgacgaagactcccagccaaacgacgaggttgtgccttacagcgatgacgagacagaagatgagctggacgatcagggtagcgcagtcgagccggaacagaatcgcgtgaatcgtgaggccgaggagaaccgcgaacctttcagaaaagagtgcacctggcaggtgaaggctaatgatcgcaagtaccatgaacagccgcacttcatgaataccaaatttttgtgcatcaaagaatcaaaatatgcaaacaatgcaattaaaacctataaatataacgcatttacgttcataccgatgaatctgttcgagcagttcaaacgcgccgcaaacttgtactttttagctctgttgattttgcaggccgtgccgcagatcagcactctggcgtggtatacgactctggtgcctctgctggttgtcctgggtgttacggcaatcaaagaccttgtcgatgacgtcgcccgtcacaagatggacaaggagatcaataatcgcacgtgtgaggttatcaaagatggtcgctttaaagtcgccaaatggaaagagatccaggttggcgatgtcattcggctgaaaaaaaacgattttgtccctgcagacattctgctgctgagcagcagcgagccaaatagcttatgctacgtcgaaacggcggagctagacggcgaaacaaatctaaaatttaagatgagcctggagataacggaccagtatctgcagagggaggataccctggccactttcgatggtttcatcgagtgcgaggaaccaaataaccgtctggacaagttcaccggtacccttttttggcgtaataccagctttccgctggatgcagataagatattgctccgcggatgcgttattagaaatactgatttctgtcacggtctggtgatctttgccggtgcggatacgaagataatgaaaaattctggtaaaaccagattcaagcgaaccaagattgactacttgatgaactacatggtttatacaattttcgtggtgttgatcttactgagcgcgggcttggctatcggtcatgcctactgggaggcacaggtgggcaattcatcttggtacttgtatgacggtgaggacgatacccctagctatcgtggatttctgattttttggggttatatcattgtcctcaataccatggtccctattagcttgtacgttagcgtggaggtgattcgtctgggccagtcccacttcattaattgggatctgcaaatgtactatgctgagaaagataccccggcgaaggcacgcaccactacgcttaatgagcaactaggccagattcactacattttcagcgataaaaccggtacgctgacccaaaatattatgacgtttaaaaagtgctgcataaacggccagatttacggcgaccatagggatgcatctcagcacaatcacaacaagatcgagcaggtcgacttctcgtggaatacctatgcggacggaaaattagccttttatgaccattaccttatcgagcaaatccagtctggtaaagagcctgaggtgcgccaattcttttttctgctcgcagtgtgccacacagttatggtggatcgcaccgacggacaactgaactatcaggctgcttccccagatgaaggcgccctggtcaatgcggccaggaactttgggtttgcgttcctggcacgcacccaaaacaccatcactatctctgagttgggcaccgagcgcacttacaatgtgctggcgatcctggattttaacagcgaccgtaaacgtatgagcatcattgtcagaacgccagagggtaatatcaagctttattgcaagggtgccgacactgtcatctacgagcgcttgcataggatgaatccaactaagcaggagacccaagatgctctggatatctttgctaacgaaaccctcaggaccctgtgtctctgctataaagaaattgaagagaaagagttcactgagtggaacaagaagtttatggctgcaagcgtggctagtacgaatagagatgaggcgctggataaggtctatgaggaaattgaaaaggatctgatcttactgggcgcgaccgctatagaggataaactgcaagatggcgtgccagagaccattagcaagttggccaaagctgacattaagatttgggtgctgaccggtgataaaaaggagactgcggagaacattggcttcgcttgcgaactgctgactgaggacaccacgatctgctatggtgaagatattaattccctcctgcacgcacggatggagaaccagcgaaaccgtggtggtgtgtatgcgaagtttgcgcctcctgtgcaagagtcgtttttcccgccaggaggcaatcgtgccctgattatcaccggcagctggttgaacgaaattctgctcgagaagaaaactaagaggaacaaaatcctgaagcttaaattcccgcgcacggaggaggagcgccgcatgagaactcaatcaaagcgccgtctggaggccaaaaaggagcagaggcagaagaattttgtcgacctggcgtgtgaatgtagcgctgtgatctgctgccgtgtcacgccaaagcaaaaagcgatggtggttgatctggtgaagcgctacaagaaggccattacactggccataggcgatggtgccaacgacgtgaacatgatcaaaactgctcacatcggtgtcggcattagcggacaggagggtatgcaagctgtcatgagcagcgactactccttcgctcagttccgctatctgcaaagactgctgctggttcacggccgctggtcctacatccgcatgtgcaagttcctgcgctacttcttctataaaaacttcgctttcaccctggttcatttctggtactcattctttaacggctactctgcgcaaaccgcgtacgaggactggtttatcactctatataatgtgttatacacatctctgcctgtcctgcttatggggttgctggaccaggacgtctctgataagttgagtcttcgattcccaggtctgtacatcgttggccaacgcgatctcctcttcaattataagcggtttttcgtgagcttgttacacggtgtcctgacctccatgattctgttctttataccactgggtgcctacctgcagaccgtgggtcaggatggcgaagcccctagcgactatcagtcctttgcagtaacgatcgcatctgcgctggttatcaccgtcaattttcagattggactcgatactagctattggacgtttgtgaacgcattttctatttttggctctattgcgctgtactttgggatcatgttcgattttcattctgcaggcattcacgtcctgttccccagcgcatttcagttcaccggcaccgcgtcaaacgcgctccgccaaccgtacatttggctgactatcattctcgcggtcgcggtgtgtttgctgccagtggtcgctatccgctttctgtccatgaccatctggccgagcgaatcggataagatacagaagcatcgcaaacggctgaaggctgaggaacaatggcaacgtcggcaacaagtgttccggcgcggggtgtccactcgccgttcggcatacgctttcagccaccagaggggctatgcagatctgatttcgagcggccggagcattcgcaagaaacggtcacctttggacgcaattgtggctgatggtacggcggagtataggcgcactggcgattct

SEQ ID NO: 318997 - DNA, 3753 bp, Artificial Sequence
  derived and/or modified sequence
atgtcaactgagcgggactccgaaacgacgtttgatgaggacagtcagccaaacgacgaagtggtgccgtactctgatgacgaaaccgaagatgagctggatgaccagggaagcgccgtggagccggagcagaatcgggtcaatcgggaggcggaggagaacagagaaccgttcagaaaggagtgcacctggcaggtgaaggcaaacgaccgcaaataccacgaacagccacactttatgaacactaagttcctgtgcatcaaagagtcgaagtacgcgaacaatgccatcaaaacttacaagtataacgccttcactttcatcccgatgaatctctttgaacagttcaagcgcgcagcgaacttgtactttctcgcgctcctgatactgcaggcggtgccgcagatctcaaccctcgcttggtacaccactctggtgccattgctcgtggtgttgggagtgaccgcaatcaaggacctggtcgacgacgtcgcccgccacaagatggataaggagatcaataaccgcacttgtgaggtcattaaggacggccgtttcaaggtcgccaagtggaaggagatccaggtcggagacgtgatacgcttgaagaagaacgatttcgtccctgcagacatccttctcttgagctcgtcagaaccaaatagtctgtgttacgtggaaaccgcggaactcgatggggaaactaacttgaagtttaagatgagccttgaaattactgatcaatacctgcaacgcgaggacactctcgccacctttgacggattcattgagtgcgaagaacctaataaccgcctcgataagttcacgggaactctgttttggcggaataccagctttccgctcgacgcggataagatccttctgagaggatgtgtgatccgcaatactgacttctgccacggactggtgatctttgccggcgctgatactaagatcatgaagaattcaggaaagaccaggttcaaacgcacgaagatagactacctgatgaactacatggtgtacactatcttcgtggtcctgattctgctttccgctgggctggccatcggccatgcctattgggaggcccaagtcggaaactcgtcctggtacctctacgatggtgaggacgatactccgtcgtatagaggattcctcatcttctggggctacattatcgtgctgaataccatggtcccgatctcgttgtacgtcagcgtcgaagtgatccgcctcggccagtcgcatttcattaactgggacttgcagatgtactacgctgaaaaagacaccccagcgaaggcacggaccactaccctgaacgaacagctcggtcaaatccactacatcttctccgataaaaccggaactcttacccagaatatcatgacgttcaaaaagtgttgtatcaacggacaaatctacggagatcatagggatgccagtcagcataatcacaacaaaatcgagcaggtggatttctcatggaacacctacgctgatggcaagctggccttctacgaccactacttgatagaacagatccaatccggaaaagaaccggaagtgagacaattcttcttcctcctggctgtgtgccataccgtgatggtggatcggaccgacggacagctgaactaccaagccgccagcccggacgagggagcgcttgtgaatgctgccaggaacttcggattcgccttcttggcgaggacccaaaataccatcactatctcggaactcggcaccgaacggacctacaatgttttggccattctcgacttcaattcggaccgcaagcggatgtccatcatcgtgcgcacgcctgaaggtaacatcaagctgtactgcaaaggcgcggataccgtcatctacgaaagacttcacagaatgaatccgactaagcaggaaactcaggatgcgctcgacatcttcgccaatgaaaccctccggaccttgtgcctgtgctacaaggagatcgaagaaaaagaattcaccgagtggaacaaaaagttcatggcagcttcagtggcgagcactaacagagatgaggctctggacaaggtctacgaggaaattgaaaaggacctcatcttgttgggagcaaccgctatcgaggacaagctgcaagacggagtgccggaaactatctctaaacttgccaaggccgacatcaagatctgggtcctgaccggcgataagaaggagactgcagagaatattggatttgcctgcgaactgctcaccgaggacactactatctgctacggtgaggatatcaactcactcctgcatgcccggatggaaaatcaacgcaaccgcggaggcgtgtacgcaaaattcgcacctccggtccaggagtccttcttccccccgggtggaaatcgggcactgatcatcaccggatcctggctgaacgaaatcctcctcgaaaagaaaaccaagagaaacaagattctgaaactgaagtttccacggaccgaagaagagcggagaatgagaactcagtccaagcggagactcgaagcaaagaaggagcagagacagaagaacttcgtggatctggcgtgcgagtgttcggctgtgatctgttgtcgggtcactccgaagcagaaagcaatggtggtggatctcgtgaagcgctacaagaaggctattactcttgcgatcggagatggtgccaacgacgtcaacatgattaagactgcccacataggagtggggatctccggacaagagggtatgcaagcggtgatgtcgagcgattatagcttcgcccaattccggtatctgcaaagactgctcctcgtgcatggacgctggtcgtacatcagaatgtgcaagtttctcaggtacttcttctataagaattttgccttcactttggtgcatttctggtattcattctttaacgggtacagcgctcagaccgcctacgaggactggttcattacgctgtacaacgtgctgtacacgtcactgccggtactgctcatgggtttgctggatcaagacgtgtccgacaagctctccttgcgctttccgggactctacatcgtgggccaaagagatcttctgtttaactacaaacggttcttcgtgtcgctgcttcatggcgtgcttacttcgatgattctgttcttcatcccactgggagcctatctgcaaaccgtggggcaggacggcgaggccccatccgactaccagtcattcgcggtgaccatcgcctccgcgctggtgatcactgtcaattttcagatcggtttggacacgtcgtactggacctttgtgaacgccttctcaattttcggttccattgcgctgtacttcggcatcatgttcgacttccatagcgccggaattcacgtgctgttcccttccgctttccaattcaccggtactgcaagcaacgcgctccgacagccttacatttggcttaccattatcctggccgtcgccgtctgccttctgccggtggtcgctatccgctttttgtcgatgactatctggccaagcgaatccgataagatccagaagcaccggaaacggctcaaggccgaagagcagtggcagaggagacaacaggtttttagaaggggcgtctcgactcgccgctcggcgtacgcgttctcacatcagcgcggatacgccgacctgatctcgtcaggtcggtccatccgcaaaaagcgctcgccgctcgacgccatcgtggcggacggaactgctgagtaccgacgtaccggggactcg

SEQ ID NO: 318998 - DNA, 3753 bp, Artificial Sequence
  derived and/or modified sequence
atgtctacagagcgtgactctgaaacaacttttgatgaagattctcaacctaacgatgaagtggtaccttattctgatgatgaaacagaagatgaattggatgatcaaggaagcgccgttgagcctgaacaaaacagggttaatcgggaggctgaagagaaccgtgaaccatttcgcaaggaatgcacatggcaggtaaaggcgaatgacaggaagtatcatgagcaacctcattttatgaatactaagttcctgtgcattaaggagtcaaagtacgcaaacaacgcaattaaaacctataagtataatgcttttacttttatccctatgaatcttttcgagcaatttaagagggctgccaatctgtacttcctggcactcttaatccttcaggcagttccacagataagcactctcgcttggtacactacactcgttccactcttggttgttcttggcgttaccgccattaaagatctagtggatgatgttgcacgtcataaaatggacaaagagattaacaaccgtacatgtgaagttattaaggatggcagatttaaagtcgcgaaatggaaggagattcaagtaggtgatgtaattcgtctaaaaaaaaacgatttcgtacctgctgatattttgttactgtcatcatccgagccaaactctttatgctatgtcgaaactgctgaactcgatggggagactaaccttaagttcaaaatgtccctagaaattacagaccaatacctgcagagggaagatactctcgcaactttcgacggtttcattgaatgtgaagagccaaacaaccgattagacaagttcaccgggactctgttttggaggaacacttcatttcctttggatgctgataaaattctgctccgaggatgtgttatacgcaatactgacttctgccacggtttggttatttttgcaggtgcggatacaaaaatcatgaaaaatagtggtaaaacaagattcaagaggaccaaaattgattatttgatgaattatatggtctatacaatattcgtggttcttatattgctatcagcaggtcttgctatcggacatgcttactgggaagcacaagttggaaattctagctggtacttgtacgacggtgaagatgacaccccgagctatcgagggtttctcatcttttggggatatataattgtgcttaatacaatggttccgatatcattgtatgtgtctgttgaggttataagacttggccagtctcatttcattaattgggatcttcaaatgtattatgctgagaaggatacaccagctaaagctcgtactacaactcttaacgagcaactgggccaaattcactacatcttctccgataagacaggaactttgacccaaaatattatgactttcaaaaagtgctgtataaatggtcagatatatggtgatcatagagatgcatcacagcacaaccataacaagatcgaacaggttgacttctcttggaacacgtacgcagacggtaaactcgctttctatgatcattacttgattgagcagatccaatcaggtaaggaaccggaggtgcgtcaatttttcttcttgcttgcagtttgtcataccgttatggtcgacaggaccgacggtcaactgaactatcaagccgcatcacctgatgagggagcattggtaaatgctgctaggaattttggattcgcttttcttgcccgaacccaaaatacaattacaatttccgaacttggtactgagagaacttataatgttttagctatcttagattttaacagcgacaggaagaggatgtccatcatcgttcggacgcctgagggaaacattaaactttactgcaaaggagcagatacagtaatctacgagaggcttcaccgtatgaatcccactaaacaggaaacacaggatgctcttgatatcttcgcaaatgagactttacgcactctgtgcctatgctacaaggagatcgaggagaaggaattcacagaatggaataaaaaattcatggcagcaagcgtagcttccaccaatagagatgaagctctggataaagtttacgaagaaatagagaaagatttgattttgctcggcgctactgccatcgaggacaaattgcaagatggtgtacctgagactatttccaaactcgcaaaagcagatatcaaaatttgggtacttactggggataaaaaggaaacagcagagaacatcggattcgcatgtgaattacttacggaggacaccactatttgttacggtgaagatattaacagtttgctgcatgcacgtatggagaatcagaggaatcgtggaggtgtgtatgccaagtttgctccacctgtgcaagagtcattcttccctcctggtggtaatagggcgctaataattactggaagctggcttaacgagatcctgttggagaaaaagacaaagcggaacaagattcttaagctaaagtttcctcgtacagaagaggaacgacgtatgcgtacacaatccaaaaggaggctggaggctaaaaaggagcagcgacagaagaactttgtcgatctcgcttgcgaatgtagcgctgtgatttgttgccgagtgactcctaagcagaaagcgatggtcgtggatttagtcaagaggtacaagaaggctatcacattggcaattggcgatggagctaacgatgtcaatatgataaaaacagcccatatcggtgtcggtatatctggtcaagaaggaatgcaagctgtgatgtcatcagattattcattcgcacagttcagatacttgcagaggttgctgctcgttcatggtcgttggagctacattcgtatgtgtaaattccttcgttactttttctacaagaattttgcattcactctggttcacttttggtactcctttttcaacggctattccgcacaaacagcctatgaagattggtttataacgctttacaacgtcttatacaccagcttaccggttcttcttatgggccttttggatcaggatgtaagtgacaagctttcacttagatttccagggttgtatattgttgggcaaagggatctgctttttaactacaagcgattcttcgtttccctattacacggtgtgcttacttcaatgatcctgttttttattccgctgggagcctatttgcaaacagtaggccaggacggagaagccccctccgattaccagtcattcgctgtaactattgcttcagcattggtgataacagttaactttcagatcgggcttgacacctcctactggactttcgtgaatgctttttccattttcggttccatagctctctattttgggatcatgttcgactttcattcagcagggatacatgtgttgttcccaagtgccttccaatttaccggtactgcctcaaatgcccttagacaaccttatatctggttgacaataattctggcagtggctgtctgtttgcttcctgtggtcgctattcgtttcttgtctatgaccatatggccctctgaatcggacaagatccaaaagcataggaaaagacttaaggccgaggagcagtggcaacgaaggcaacaagtgttccgtaggggggtttcaaccagaagaagcgcatatgcgttttctcaccagcgtggctatgccgatctcatctccagtggtcgttctataaggaaaaagcgttcaccccttgatgctattgtcgccgatggaactgcagagtacagacggacaggagattcc

SEQ ID NO: 318999 - DNA, 3753 bp, Artificial Sequence
  derived and/or modified sequence
atgtcaacagaaagagactctgagaccacatttgatgaggactcacagccaaatgacgaggtagtgccatactcggacgatgaaaccgaggacgaactggacgaccaggggtcggcagtggaaccggagcagaaccgcgtcaatcgggaggctgaagagaatcgcgaaccgttccgtaaagagtgtacctggcaagtgaaggctaatgacagaaagtatcacgaacaaccgcattttatgaacacaaagttcttatgcattaaggagtcgaagtatgcaaacaatgctatcaaaacatacaaatacaatgcatttacattcatccctatgaatttgttcgagcaattcaagcgagcagcgaacctttacttcctggccctccttatcctgcaggcagtccctcaaatctccactttggcttggtacacaaccctcgtgcctctgctggtagttcttggagtgacagctataaaagacctcgtggacgacgtggcccgacacaagatggataaagaaataaataatcgcacctgtgaagttatcaaggacggtaggttcaaagtggcaaagtggaaagagattcaggtgggagatgtgatccggctgaagaaaaatgattttgtgccagccgatatactgctcttgtccagcagtgagcccaactcgctgtgctatgtggagaccgcagaactggatggtgagacgaacctcaagttcaagatgtcattagaaataacagatcaatatttgcagcgagaggacacactggccacgtttgacgggtttatagaatgcgaggagccgaacaaccgactggacaaattcaccggcacgctcttttggcgtaacacttcatttcctcttgatgctgataaaatcctgctcagaggctgcgtgattaggaacacagacttctgtcacggactggtcatctttgcgggggctgatacaaagattatgaagaatagtggcaagactagatttaaacgcacgaaaatcgattacctaatgaactacatggtgtacaccatcttcgttgttttgattctgctttctgccggcctggccataggacatgcatattgggaagcgcaggttggcaactcatcatggtacctgtacgacggggaggacgataccccctcatatagaggattcctgatcttttggggctacattatcgtactgaacacaatggtgcctatctcattgtacgtgtcagtggaagttatcaggctgggccagagtcatttcatcaactgggacctccagatgtattatgccgagaaagatactccagccaaggcccggacgaccaccttgaatgaacagctggggcagattcattacatcttttccgacaaaactggcacgctgacacagaacataatgacattcaaaaagtgctgcatcaacgggcaaatctacggcgaccatcgcgatgcctcacagcataatcataacaaaatcgagcaggtggattttagttggaacacatatgctgatggcaagctggcgttctacgatcactaccttattgaacagatccagagcggtaaagaaccagaggttcggcagttcttttttctgctggcggtttgtcacactgtgatggtggatcgtacggacggccaacttaactaccaggcggcctccccggatgagggagctctggtgaatgcagctcggaacttcggctttgcgtttttggcacgcactcagaatactattacaatcagcgagctcggcactgagcggacttataacgttctggccatcttggattttaattctgatcgcaagagaatgtctataattgtccgtacccccgaggggaatatcaagttgtactgcaagggcgctgataccgtgatctacgaacgcttacacagaatgaaccccacaaaacaggagacacaagacgccttggacatctttgcaaatgaaaccctgagaaccctttgcctctgctacaaagaaatcgaggagaaggaatttaccgaatggaacaagaagttcatggctgcatcagtcgcttccactaatcgggacgaagccctcgacaaggtgtacgaggaaatcgagaaggacctgatactgctgggagcaacagctattgaggataaactgcaggacggggtgcccgaaactatcagtaagttggccaaagccgacatcaagatatgggtactcactggtgacaaaaaagagacagcagagaacatcggatttgcctgtgagctcctgactgaggacactaccatttgttacggagaagatataaactctcttctccatgctcgaatggagaaccaaaggaaccgcggcggagtgtatgcgaagttcgccccccctgttcaggagtccttcttcccccccggagggaaccgtgctctgattataaccgggtcctggttgaacgagatcctgcttgagaagaaaacaaaacgaaataagattcttaagttaaagttccctaggactgaagaggagcggagaatgcgtactcaatctaagcggcgactagaagcaaagaaggaacaacggcagaaaaactttgtcgacctggcgtgtgaatgttctgcggtcatatgctgccgagtgacacccaaacagaaagcgatggtcgtggacctcgtgaaaaggtataaaaaagctatcacattagccatcggcgatggggctaatgacgtaaacatgatcaagactgctcacatcggagtgggcatatccggacaggaggggatgcaggccgtaatgtcttctgactacagcttcgctcagttcagatacctccagcgcctcctgctcgtccacggacggtggtcatacatacggatgtgcaagtttctaagatacttcttctataagaacttcgccttcacgctggttcacttttggtactcctttttcaacgggtatagcgcccagaccgcatacgaagattggtttattacgctttataatgtcttgtacactagcttaccggttctcctgatgggtctgctcgaccaagatgtgagcgataaactgtctttgagattcccgggactgtatatcgtcggacaaagggacctactgttcaattataagcggttctttgtctccctgcttcatggtgtcctgaccagcatgatactgttctttatcccgctgggtgcctatctgcagacagtcgggcaggacggggaggcgcccagcgattatcaaagcttcgccgtcaccattgcttccgccttagtgataacggtgaatttccagattggactggatactagctactggacttttgtgaatgctttttccatctttggatcgatcgcattgtactttggtataatgtttgatttccatagcgccggaatccacgtgctgtttccctctgcctttcagttcaccggaaccgcaagtaatgccctgcgtcagccatatatctggctaactatcattctggcagtagcagtctgtctcttgccagtcgttgctattcggttcttgagcatgacaatatggccgtcagagtccgataagatccagaaacacaggaagcggctaaaagctgaggagcagtggcagcggcgtcaacaggtgtttagaaggggggtcagcacccggcgcagcgcgtacgctttcagccaccagaggggttatgcagatctgatctcgtccggccgctcaatccggaaaaagaggtcccctcttgacgctatcgtggctgacggcactgcggaataccggcgcactggggacagc

SEQ ID NO: 319000 - DNA, 3753 bp, Artificial Sequence
  derived and/or modified sequence
atgtccacggagcgcgatagcgaaactaccttcgatgaagattcgcaacctaacgatgaagtggtcccatactcggacgatgaaaccgaggatgaactggacgaccagggatcggccgtcgagccagaacaaaaccgggtcaatcgggaagctgaagaaaatagggagccgttcagaaaggaatgtacctggcaggtaaaagctaacgacaggaaataccacgagcagccgcatttcatgaacactaagtttctgtgtatcaaggagagcaagtacgcgaacaacgcgataaagacttacaagtacaacgccttcactttcatccctatgaacctcttcgaacaattcaagcgggcagccaacctgtacttcctggcgttgctcatccttcaagcggtgccacaaatcagcacgcttgcctggtacactaccctggtgccgctcttggtcgtgctgggggtgacggcaataaaggatctcgtcgacgatgtggcacggcacaagatggataaagagatcaataacaggacttgcgaagtgatcaaggatggccggtttaaggtcgctaaatggaaggaaatccaggtcggtgatgtgatccggctgaagaaaaatgatttcgttccagcagatatcctgcttctgtcgtcgtccgaacctaattcactgtgctacgtggaaacggcggagcttgacggagagactaacttgaagtttaagatgtcactcgagatcacggaccagtacctgcagcgggaggacactttggctacctttgacggcttcatcgagtgtgaggaacccaataaccggctggacaagttcaccggaaccctcttctggagaaacacctccttccccctggacgcggataagatcctccttcggggatgcgtgatccggaacactgacttctgtcacggacttgtgatcttcgccggtgcagacaccaagatcatgaagaactccggcaaaaccagattcaaaagaactaagatcgactaccttatgaattacatggtatacaccatattcgtcgtccttatcctcctgtctgctggactcgccattgggcatgcgtattgggaggcacaagtgggtaactcgtcttggtatttgtacgacggagaggatgacaccccgtcctaccgtggatttctgatcttctggggctacatcatcgtcctcaacacgatggtgcctattagcctttacgttagcgtggaagtgatccgcctggggcaatcacatttcattaactgggacctgcagatgtattacgcggaaaaggacaccccagccaaggcgagaactactactctgaatgagcaactcggccaaatccactacatattcagtgacaaaactgggacgctgacccagaatatcatgactttcaaaaagtgctgcattaatggacagatctatggtgatcatagggacgctagccaacataaccacaacaaaattgaacaggtggacttctcctggaatacttacgctgatgggaagctggcattctacgaccactacctgatcgagcagatccaatcgggtaaggagccggaagtgcgccagtttttctttctcctggcagtgtgccacaccgtcatggtcgaccgcacggatggtcagctcaactaccaggcggcctcgccggatgaaggagccttggtgaacgctgcccggaacttcgggtttgctttcctcgctcggacccagaacaccatcactatatcggagctcggaactgagaggacctacaatgtgttggcaatcctggatttcaattctgaccgcaagcggatgtcgatcattgttcgcacccccgagggaaacattaagctctactgcaagggagccgacacggtgatttacgagcgcttgcatcgcatgaatcctactaagcaggaaacccaggacgcactggacatttttgctaacgagactctcagaaccctttgcctttgctacaaagagatcgaagaaaaagaattcaccgagtggaacaagaaattcatggcggcctcggtggcatcgaccaacagagacgaagcgcttgacaaagtctacgaggaaatcgaaaaggacctgatcctgctgggggcgactgccatcgaagataaactccaggacggagtgccggaaactatttccaaactggccaaggctgatatcaagatctgggtgcttactggtgacaagaaggagactgcggaaaacatcggattcgcttgtgaactgctgaccgaggataccactatctgctacggagaagatatcaactcgctgttgcacgcccgcatggaaaaccagcggaaccggggaggagtgtacgcgaagttcgcccctccagtgcaagaatctttcttcccaccgggaggaaatcgcgctctcatcatcaccggcagctggctgaatgagatcttgctggagaagaaaaccaaaagaaataagatcctgaagttgaagttccctcgaactgaagaagagcggcggatgaggacccagagcaagcgccgcctggaggcaaagaaggaacagcggcaaaagaacttcgtggatctggcatgtgaatgcagcgccgtgatttgctgcagggtgaccccgaagcagaaagccatggtggtcgatctggtcaaaagatacaaaaaggccatcaccctggctattggcgacggagcaaatgacgtcaacatgatcaagaccgcccatattggtgtgggcatctcaggacaagaagggatgcaggcagtgatgtcctccgactattcgttcgcccagttcaggtacctgcaacgcctcctcctggtgcacgggagatggtcatacattagaatgtgcaagtttctcagatactttttctacaagaacttcgcgttcacgctggtccatttttggtacagcttcttcaatggatactccgcccagaccgcctacgaggactggttcatcaccctttacaacgtgctgtacacttcgttgccagtgctcctgatgggcctcttggatcaggatgtaagcgacaagttgtctctgcgctttccgggtttgtacattgtgggtcagcgggacctgctcttcaattacaagcggttcttcgtgagcctgctgcacggtgtgctgacttcaatgatcctgttcttcattccgctcggagcatacctgcagacggttggccaagacggagaagccccatccgattaccagagcttcgccgttacgatcgcatccgccctggtcatcaccgtcaattttcaaatcggtttggacacttcatactggactttcgtgaacgccttttcaatcttcggaagcattgcactgtactttggaatcatgtttgacttccatagcgctggcatccacgtgctgttcccgtccgcattccagtttactggaaccgcctcaaatgctctgaggcaaccctacatctggctgactataatcttggcagtggccgtctgcttgctgccggtcgtggcaatccgcttcctgtcaatgactatctggccgagcgagagcgacaagatccagaaacacaggaaaagactgaaagccgaagagcaatggcagcgccgtcaacaagtgtttcgcagaggggtgtcaactcgccgcagcgcgtacgccttttcccaccagcgcggttatgccgatctgatctcctccggacggtccatccgcaagaaacggtcccctcttgatgctatcgtggcggatggaaccgcggaatatcgacggaccggagactcc

SEQ ID NO: 319001 - protein, 164 aa, Artificial Sequence
  derived and/or modified sequence
MDDLCEANGTFAISLFKILGEEDNSRNVFFSPMSISSALAMVFMGAKGSTAAQMSQALCLYKDGDIHRGFQSLLSEVNRTGTQYLLRTANRLFGEKTCDFLPDFKEYCQKFYQAELEELSFAEDTEECRKHINDWVAEKTEGKISEVLDAGTVDPLTKLVLVNA

SEQ ID NO: 319002 - protein, 197 aa, Artificial Sequence
  derived and/or modified sequence
MAAWKSWTALRLCATVVVLDMVVCKGFVEDLDESFKENRNDDIWLVDFYAPWCGHCKKLEPIWNEVGLEMKSIGSPVKVGKMDATSYSSIASEFGVRGYPTIKLALIRPLPSQQMFEHMQKRHRVFFVYVGGESPLKEKYIDAASELIVYTYFFSASEEVVPEYVTLKEMPAVLVFKDETYFVYDGKFQIFNSCKTF

SEQ ID NO: 319003 - DNA, 594 bp, Artificial Sequence
  derived and/or modified sequence
atggccgcctggaagagctggaccgccctgagactgtgcgccaccgtggtggtgctggacatggtggtgtgcaagggcttcgtggaggacctggacgagagcttcaaggagaacagaaacgacgacatctggctggtggacttctacgccccctggtgcggccactgcaagaagctggagcccatctggaacgaggtgggcctggagatgaagagcatcggcagccccgtgaaggtgggcaagatggacgccaccagctacagcagcatcgccagcgagttcggcgtgagaggctaccccaccatcaagctggccctgatcagacccctgcccagccagcagatgttcgagcacatgcagaagagacacagagtgttcttcgtgtacgtgggcggcgagagccccctgaaggagaagtacatcgacgccgccagcgagctgatcgtgtacacctacttcttcagcgccagcgaggaggtggtgcccgagtacgtgaccctgaaggagatgcccgccgtgctggtgttcaaggacgagacctacttcgtgtacgacggcaagttccagatcttcaacagctgcaagaccttctag

SEQ ID NO: 319004 - DNA, 594 bp, Artificial Sequence
  derived and/or modified sequence
atggctgcatggaaatcatggacagctctaaggctgtgtgccaccgtggtggtcctggatatggtcgtctgcaagggctttgtcgaagatctggatgagtcttttaaggagaatcggaatgatgacatatggcttgtggacttctacgcaccctggtgtggacactgcaaaaagctggaacctatctggaacgaggtaggattagagatgaagtcaattggctcccctgtcaaagtcgggaaaatggacgccacgagttattcgagcatcgcctccgagtttggcgttcggggctatccaacgattaaacttgcactaatccgccccctccctagccagcagatgttcgaacacatgcagaaacggcatcgcgtgttctttgtttatgtaggcggggagagccccctgaaagagaagtatattgatgccgcctctgaattaatcgtctacacatacttcttcagtgcttcagaagaggttgtccccgagtatgtcactctgaaagagatgcccgccgtgctcgtcttcaaggatgagacctatttcgtgtatgacgggaagtttcaaatttttaactcctgtaagacattttag

SEQ ID NO: 319005 - DNA, 594 bp, Artificial Sequence
  derived and/or modified sequence
atggccgcctggaagtcctggacagccctgcggctgtgtgccaccgtggtggtgctggacatggtggtgtgcaagggctttgtggaggacctggatgagagcttcaaggaaaatagaaatgatgacatctggctggtggacttctacgccccctggtgtggccactgcaagaagctggagcccatctggaatgaggtgggcctggagatgaagagcatcggcagccctgtgaaggtgggcaagatggatgccaccagctacagcagcatcgccagcgagtttggagtgcggggctaccccaccatcaagctggccctgatccggcccctgcccagccagcagatgtttgagcacatgcagaagaggcacagggtcttctttgtgtatgtgggcggggagagccccctgaaggagaagtacattgatgctgccagcgagctgattgtgtacacctacttcttcagcgccagcgaggaggtggtgcctgaatatgtgaccctgaaggagatgcctgctgtgctggtgttcaaggatgagacctactttgtgtatgatggcaagttccagatcttcaacagctgcaagaccttctag

SEQ ID NO: 319006 - DNA, 594 bp, Artificial Sequence
  derived and/or modified sequence
atggccgcctggaagagctggaccgccctgcggctgtgcgccaccgtggtcgtgctcgacatggtagtatgcaagggcttcgtagaagacctggacgaatcttttaaggagaaccggaacgacgatatctggctggtggacttttatgccccatggtgtggtcattgcaaaaaattagagccgatctggaatgaggtcggcttggagatgaaatccatcgggtcacccgtcaaggtaggtaagatggatgcaacatcctacagctcaattgcttctgagtttggggtgcggggatacccaactattaaactggccctgattcggccccttccatcccagcagatgtttgagcacatgcagaaacggcaccgcgtttttttcgtttatgttgggggcgagtcacccctcaaggaaaagtatatcgacgcggcatcagaactgatcgtgtacacttatttcttttctgcttccgaagaagtggtcccagagtacgtaactttaaaggagatgccggcggtcctggtgttcaaggatgagacttattttgtgtatgacggaaagtttcagatattcaactcttgtaaaactttctag

SEQ ID NO: 319007 - DNA, 594 bp, Artificial Sequence
  derived and/or modified sequence
atggccgcttggaagagctggaccgctctgagactctgtgccactgtggtcgttttggacatggtggtctgtaaggggttcgtggaagacctggatgagtcctttaaggaaaacagaaatgatgatatatggctggtggatttttacgctccctggtgtggacactgcaaaaagctggagccaatttggaacgaggttggcctggagatgaaatccataggaagccccgtcaaggtaggtaagatggatgccaccagttactcttcaattgcctccgagtttggcgtaaggggctatcctacaattaaactagctcttatcagacctctccctagccagcagatgtttgagcacatgcaaaaacgccatagagtgttttttgtttacgttgggggtgagtcccccctgaaggagaaatacatcgacgcggctagtgaattgatcgtgtatacttattttttcagcgctagtgaggaagtggttcctgagtacgtgacgttaaaggaaatgccagccgttctcgtatttaaggacgagacctatttcgtctacgatggcaagttccagattttcaactcatgtaaaactttctag

SEQ ID NO: 319008 - DNA, 4752 bp, Artificial Sequence
  derived and/or modified sequence
ggtagccccgcccccgtagttagcgcggtgcttctcttccgctccgggtcggctccgtttccctttccgggcgggcaggcggcggaccccagtgtctttatccctcttttgcacagtcagcttctgcagctctcccgggctagcatggcagcgtggaagagttggacggccctgcggctctgcgccacagttgttgtacttgatatggtcgtctgtaaaggatttgtagaagatttagatgaatcgtttaaagaaaatcgaaatgatgacatttggcttgtagatttttatgcgccatggtgtggccattgtaaaaagctggaaccaatttggaatgaagttggtcttgagatgaaaagcattggttctccagttaaggttggaaagatggatgctacttcctattctagcattgcttcagagtttggagttcgaggttatccaacaattaagctattaaaaggggacttggcatataattatagaggaccacgaacaaaagatgatattattgagtttgctcacagagtatctggggctctaattcggccacttccaagtcaacaaatgtttgaacatatgcagaagagacaccgtgtatttttcgtttatgtaggtggagaatcacctttgaaagagaaatacatagatgctgcttcagaattgattgtatatacatacttcttttctgcctcagaagaagtggttcctgagtatgtgacactaaaagagatgccagctgtgcttgttttcaaagatgaaacttactttgtttatgatgagtatgaagatggtgatctgtcatcatggatcaacagggaaaggtttcagaattaccttgctatggatggcttcctcttgtatgaacttggagacacaggaaagcttgtggctcttgcagttattgatgagaaaaatacatcagttgaacataccagattgaagtcaattattcaggaagttgcaagagattacagagacctcttccatagggattttcagtttggccacatggatggaaatgactacataaataccttgctgatggatgaattgacagtcccaactgtagttgtactgaatacttcaaaccagcaatatttcttgctagatagacagattaagaatgttgaagacatggtccagtttattaataacattttggatggcacagtagaagcccaaggaggtgatagcattttgcagagattgaaaagaatagtatttgatgccaaatctactattgtgtctatattcaagagctcaccactgatgggctgctttctctttggcctgccactgggtgtcatcagtatcatgtgctatggaatctacacagccgacacagatggaggttatatagaagaacgatatgaagtgtctaaaagtgaaaatgaaaaccaagaacagatagaagagagcaaagaacagcaggagcccagcagtggaggatctgtagtgcctacagtgcaggagcccaaggatgtattagaaaagaagaaagattgagacttgatgactataaaatatttgttaggacttcaaattattaaagagtctatttattgaatttagacatttaatcatgatctttacagaaaagaacatgttattcgtattttgctaatatcaactgcatggattaaagtagtccctccatacatggggaagtgtttggagcaaagagatgaacagtttgtctgaaacaaacacagagcactccatcaaaatttacctgatctttgtgattagaacagaacaattctatttgcatgtttctctatctgaatattctgtgacaaaaagttaagattcttgggcagaatatttaaattggtcagtcaggtagaagatacatgtgtgatatagaaaaataatgcctctcctgctgccatccgtttccctcatatattttggacaagatttatatggacaaaattaagtctttaaaatttaggcactttaaggagaactaataactttttccatgtatcaagattatgaggttaaaaataatgtggttttatatagcatagtggttttattttgttagttatttttaaaggagaagaaatgttactttttaactttatactcagttgcattatcataaaattttcatatatgcctagataatggggaaaaaaagtcttgtgattgactttcgcaaaataaacaggatttactgagtagaggtttcagcccattccttggaatactaacaggtatttcatcagtcattgtaggttgggaagggtctctgttaatcctactctgctttagccagaatagcctagtattttatttctattttatatattgagatttcttctaacatttcctttgataaaaatcttctgctttttgaaaagtggtatgtatcatatttttatgtttctggtgtgtgaactttatggtaacttctactctagaatacgtacgtatgcacccacagacacacacagtttattgacacatctattatgtaatgctgtagacctgtccgtgtctgcttcataaggagtaacgactgacattagcatgtccagtgacaagtcacatccggtgtaaaaaaaagagatcagccagttaccttctccattgtcttagttctgtcacccatttcgtcaagtgacctctcatcttctataaactaatacaggaattctttccaaagcaatgtctaaaaactcttttttttaaagtaacagtttggtatgtttattgtagataaattatttttgaggccttcattttagctaagtttagaatttatattaggcaactatgatttgagtggttattcattgagtaattttccactataaagaattttattgaacatttattaaaaaataatgtaatgcatggtcaaaaaatatgtaattcatggtctggacactgacgttgtttagggatttagtcatcaaggacagccctctgttgtttctaatgccgtactaatcaagactgtatggacacttgcatcttaagtactaaggaattactagtgattgttttattttatccatgtactcttttagtatttaataattaaatacctattcttagtgtttgacactccatatttcttttttttggaaatgaaacaaatatgcagtccaaaattcaggaactactagagtgaaatgatattaagtggaaaccagagataaatgctgttaatttaacaagtagattcttctccaaagaatgatgagtgattcttgggaagataaatgttaatgttcccaatagtcaagcttgttttgcagtagtgaaaagcttagatgagtacggatacctcatttgaaactcagcctagtaaggaagtgaaaacttagcagtcagtgacatggggaaatagttatagaaaatgtcactgaattttttcatatttataattagtcatttacatatttttgtcttgttgatcattacctgtaaatgaaagaccttaataggaaaaaaagagtaaagctcagtgtgaatgcaaacatccacaaaatatgatcttcgtttatattctgtgatgttgtttataaatgaatgcctcagttctctgctacccttttcacagctttgtactgtttgccttatattctatttgtgcttttaaagtgtgtctgttgggaaaacaaaatgtgtaggtggtttgtaagtgaataatttttatttcttcttgtattaaaattttgtttttttctctactttgggagatgtttatttacattgtcagactattcacaaaacagattctaaaatttgtttgctcgtatgctgttcccttcaatgtgatatcagagattactatgaatgttagtttcattccgtgaaacattacttccatataaagacagatctcttaataagtgaatctagtggaagaacataggtatcattctaattccatggtaaattttgtcatgattctatatgaataatggggtccttcaggaagttggaatttttgccttctcttttaattgcagtgaagttctctttataacttctaaaattcggaattctagatccttgcttttgcagaatttggtgctcagacaatatttaaggacatttcagcgagacaaagtgcatgtttttatcgagtaccctgtgcaccacattatatctggcaattctttttgtttcattatgtgcatcaatatttttctcagctactattacctgaaacttgtttaacatgtattagacctagaattttcattttctttctcacatagttgcttcctggtatctgatttagaaataacatttaaatgccaagtatctgggggattgaaggaagggtctatatgagcaggtgaattagcagtactgtttttgtttagtggatattgttagtgactttttgtgtgtgttttgctttgggacctttttattttggtgttgcaaaaagtaacatattttcatcattgcttcatacgacatggagttaggacagggaaaaatcattcaacactccttatgcattaaatgatcaaataaaccagtgtaggatattaagactatcaattggtgggattaggcttgacattttatttttataaatatatattttttctgaatgtgtctgagtccaagagtgggcaaaaaataattttctactttggactaatctatagaggtttttgaaagtctgcattactaacttgttgaattcatgatattctgcctatggcacaaattgtaaacctttgtttttctaaaataaagtaattgaaaacctgc

SEQ ID NO: 319009 - DNA, 913 bp, Artificial Sequence
  derived and/or modified sequence
gggcgggcaggcggcggaccccagtgtctttatccctcttttgcacagtcagcttctgcagctctcccgggctagcatggcagcgtggaagagttggacggccctgcggctctgcgccacagttgttgtacttgatatggtcgtctgtaaaggatttgtagaagatttagatgaatcgtttaaagaaaatcgaaatgatgacatttggcttgtagatttttatgcgccatggtgtggccattgtaaaaagctggaaccaatttggaatgaagttggtcttgagatgaaaagcattggttctccagttaaggttggaaagatggatgctacttcctattctagcattgcttcagagtttggagttcgaggttatccaacaattaagctggctctaattcggccacttccaagtcaacaaatgtttgaacatatgcagaagagacaccgtgtatttttcgtttatgtaggtggagaatcacctttgaaagagaaatacatagatgctgcttcagaattgattgtatatacatacttcttttctgcctcagaagaagtggttcctgagtatgtgacactaaaagagatgccagctgtgcttgttttcaaagatgaaacttactttgtttatgatggtaagttccaaatctttaactcatgtaaaacattttaaaattaaaatgtctgttatacaacttaggtgtaaagattatgtaaatgcttctactgttcaatgagaataacagttctcatgacttgaatgcctgatgttttgggttttttttcacccttcaacttataattgttagttatttttattctgagctttacctacacaacattctttttgttgttgtttgttaaattatatgcgtttttgaggaataaattctatgtgatttttatacattacttt

SEQ ID NO: 319010 - DNA, 1398 bp, Artificial Sequence
  derived and/or modified sequence
ggtagccccgcccccgtagttagcgcggtgcttctcttccgctccgggtcggctccgtttccctttccgggcgggcaggcggcggaccccagtgtctttatccctcttttgcacagtcagcttctgcagctctcccgggctagcatggcagcgtggaagagttggacggccctgcggctctgcgccacagttgttgtacttgatatggtcgtctgtaaaggatttgtagaagatttagatgaatcgtttaaagaaaatcgaaatgatgacatttggcttgtagatttttatgcgccatggtgtggccattgtaaaaagctggaaccaatttggaatgaagttggtcttgagatgaaaagcattggttctccagttaaggttggaaagatggatgctacttcctattctagcattgcttcagagtttggagttcgaggttatccaacaattaagctattaaaaggggacttggcatataattatagaggaccacgaacaaaagatgatattattgagtttgctcacagagtatctggggctctaattcggccacttccaagtcaacaaatgtttgaacatatgcagaagagacaccgtgtatttttcgtttatgtaggtggagaatcacctttgaaagagaaatacatagatgctgcttcagaattgattgtatatacatacttcttttctgcctcagaagaagtggttcctgagtatgtgacactaaaagagatgccagctgtgcttgttttcaaagatgaaacttactttgtttatgatgagtatgaagatggtgatctgtcatcatggatcaacagggaaaggtttcagaattaccttgctatggatggcttcctcttgtatgaacttggagacacaggaaagcttgtggctcttgcagttattgatgagaaaaatacatcagttgaacataccagattgaagtcaattattcaggaagttgcaagagattacagagacctcttccatagggattttcagtttggccacatggatggaaatgactacataaataccttgctgatggatgaattgacagtcccaactgtagttgtactgaatacttcaaaccagcaatatttcttgctagatagacagattaagaatgttgaagacatggtccagtttattaataacattttggatggcacagtagaagcccaaggaggtgatagcattttgcagagattgaaaagaatagtatttgatgccaaatctactattgtgtctatattcaagagctcaccactgatgggctgctttctctttggcctgccactgggtgtcatcagtatcatgtgctatggaatctacacagccgacacagatggaggttatatagaagaacgatatgaagtgtctaaaaaaaagaagaaa

SEQ ID NO: 319011 - protein, 475 aa, Artificial Sequence
  derived and/or modified sequence
MAALTTLFKYIDENQDRYIKKLAKWVAIQSVSAWPEKRGEIRRMMEVAAADVKQLGGSVELVDIGKQKLPDGSEIPLPPILLGRLGSDPQKKTVCIYGHLDVQPAALEDGWDSEPFTLVERDGKLYGRGSTDDKGPVAGWINALEAYQKTGQEIPVNVRFCLEGMEESGSEGLDELIFARKDTFFKDVDYVCISDNYWLGKKKPCITYGLRGICYFFIEVECSNKDLHSGVYGGSVHEAMTDLILLMGSLVDKRGNILIPGINEAVAAVTEEEHKLYDDIDFDIEEFAKDVGAQILLHSHKKDILMHRWRYPSLSLHGIEGAFSGSGAKTVIPRKVVGKFSIRLVPNMTPEVVGEQVTSYLTKKFAELRSPNEFKVYMGHGGKPWVSDFSHPHYLAGRRAMKTVFGVEPDLTREGGSIPVTLTFQEATGKNVMLLPVGSADDGAHSQNEKLNRYNYIEGTKMLAAYLYEVSQLKD

SEQ ID NO: 319012 - DNA, 1428 bp, Artificial Sequence
  derived and/or modified sequence
atggcagcattgaccacactgtttaagtatatcgatgagaaccaggatcgttacatcaagaagcttgccaaatgggttgcaatacagtccgtgagcgcatggccagaaaagaggggcgaaataaggcggatgatggaagtggccgctgctgacgtgaagcagttgggagggtcagtggaactggtggatatcgggaagcagaaactgccagacggctccgaaattcccctgccccccatcttgttgggccggttaggctccgatccccaaaagaagaccgtgtgcatctatggccatctggacgtccaacccgcagccttggaagatggatgggacagtgagcccttcacactcgtcgaacgtgacggaaaactgtacggtcgaggaagcaccgatgataaaggtcctgtggcagggtggatcaacgctctggaagcttaccaaaagacaggacaggagatcccagtaaatgtccgcttctgcctggaaggcatggaagaaagcggaagcgagggtttggacgaattgattttcgctaggaaagatacctttttcaaggacgtcgactacgtctgtatttcagataactattggctcggcaaaaagaagccatgtataacatatggcttgcgcgggatatgctactttttcatagaggttgagtgttccaacaaggacctgcactcaggcgtctacggcgggagtgtacacgaggccatgactgatttgattctcctgatgggatcacttgtcgacaagcgtggaaatattctgatacccggcattaacgaagcggtcgctgctgttaccgaggaggagcacaaattgtatgacgatatcgacttcgacatcgaggagttcgctaaggacgtcggcgcacagattctcctgcactctcacaaaaaggacatcctcatgcaccgctggaggtatccctccctcagcttgcacggtatcgaaggagccttttcgggatcaggagcgaagactgttattcctcggaaagtggtaggaaaatttagtatccgcctcgtacctaacatgaccccagaagtggtgggggagcaagtgacctcgtacctgacaaagaaattcgcagagctcagatctccaaacgagtttaaggtatacatgggccatggaggaaagccttgggtgtcagatttttcccatcctcactacctggcaggccgacgcgccatgaaaaccgtctttggcgtggagcccgatttgaccagggagggtgggtccatccctgtaaccctcacctttcaggaagctactggtaagaatgttatgttgctccccgttggcagcgcagatgacggcgcccatagccaaaacgaaaaacttaacagatacaattatatcgaggggacaaagatgcttgctgcctacctttatgaggtcagccagcttaaggattag

SEQ ID NO: 319013 - DNA, 1428 bp, Artificial Sequence
  derived and/or modified sequence
atggccgccctgaccaccctcttcaagtacattgatgagaaccaggaccgctacatcaagaagctggccaagtgggtggccatccagagcgtgtctgcctggccagagaagagaggagagatccggaggatgatggaggtggccgctgctgatgtgaagcagctgggcggctctgtggagctggtggacatcggcaagcagaagctgcctgatggcagcgagatccccctgccccccatcctgctgggccgcctgggcagtgacccccagaagaagacagtgtgcatctacggccacctggatgtgcagcctgctgccctggaggatggctgggacagcgagcccttcaccctggtggagagagatggcaagctgtatggccggggcagcacagatgacaagggccctgtggccggctggatcaatgccctggaggcctaccagaagacaggccaggagatccctgtgaatgtgcgcttctgcctggagggcatggaggagagcggcagcgagggcctggatgagctgatctttgccaggaaggacaccttcttcaaggatgtggactatgtgtgcatcagtgacaactactggctgggcaagaagaagccctgcatcacctacggcctgcggggcatctgctacttcttcatcgaggtggagtgcagcaacaaggacctgcacagcggcgtgtatggaggctctgtgcatgaggccatgacagacctgatcctgctgatgggcagcctggtggacaagaggggcaacatcctgatccctggcatcaatgaagctgtggccgctgtgacagaggaggagcacaagctgtatgatgacatcgactttgacatcgaggagtttgccaaggatgtgggcgcccagatcctgctgcacagccacaagaaggacatcctgatgcaccgctggagataccccagcctgagcctgcatggaattgaaggagccttcagcggcagcggggccaagacagtcatccccaggaaggtggtgggcaagttcagcatccggctggtgcccaacatgaccccagaggtggtgggggagcaggtgaccagctacctgaccaagaagtttgctgagctgcggagccccaatgagttcaaggtgtacatgggccacggcggcaagccctgggtgtctgacttcagccacccccactacctggccggccggcgggccatgaagacagtgtttggagtggagccagacctgacccgggagggcggcagcatccctgtgaccctgaccttccaggaggccaccgggaagaatgtgatgctgctgcctgtgggcagcgcagatgatggagcccacagccagaatgagaagctgaaccgctacaactacatcgagggcaccaagatgctggccgcctacctgtatgaggtgtcccagctgaaggactag

SEQ ID NO: 319014 - DNA, 1428 bp, Artificial Sequence
  derived and/or modified sequence
atggccgccctgaccaccctgttcaagtacatcgacgagaaccaggacaggtacattaagaagctagccaagtgggtggccatccagagcgtgtccgcttggcccgagaaaagaggagaaattcggagaatgatggaagtggccgctgccgatgttaaacagctcggcgggtcagtggagcttgtcgacatcggtaagcagaagctgcccgatgggtcggagattcccctgccacccattctcttgggtagacttggatctgacccacaaaagaagacagtctgtatctacggacacttggatgttcaacctgccgctttggaggacggttgggattccgagcccttcactctcgttgaaagagacggcaagctatacggccggggttccaccgatgacaaaggacctgtggccgggtggatcaacgccctggaagcataccagaagacaggacaggagatacccgtgaatgtgcgcttttgtctggaagggatggaggaatccggctcagagggtctggacgaactgatctttgcccggaaagatacattttttaaagatgtggattatgtgtgtatcagcgacaactactggctcgggaagaaaaagccctgcatcacatacggcttgcgcggaatatgctacttctttatcgaagtggagtgtagtaacaaagatctgcacagtggagtctacgggggctcagtgcacgaggccatgacagacctaatcctgttaatggggagtctggtggacaagcggggaaacattctcatccctggtattaacgaggctgtggccgctgtaacagaagaagaacacaagctgtatgacgatatcgacttcgatatcgaggagtttgccaaggacgttggcgctcagatcttgctgcacagccacaagaaggacattctcatgcatcgctggaggtatccgtctttgtcgctccacgggattgaaggagcgttctctggctccggcgcaaaaaccgtgatccctagaaaagtggtcgggaagttctcaataagactcgtgccaaacatgaccccagaggtggtcggggagcaggtgaccagctatctcacaaaaaaatttgccgagctgaggtcccccaacgaatttaaagtctacatggggcatgggggtaagccatgggtcagtgatttcagccacccccactatcttgctgggagacgtgccatgaagacggtctttggagtggaacctgacctgacccgcgagggcggctccatccccgtgactctgacttttcaggaagccacagggaagaacgttatgctgttaccagttggctctgctgacgatggtgcccattcccagaacgagaagctgaataggtataattacatcgagggaacaaaaatgctggccgcctacttatacgaggtaagtcagctgaaagactag

SEQ ID NO: 319015 - DNA, 1428 bp, Artificial Sequence
  derived and/or modified sequence
atggcggctttgacaacattattcaaatatatcgatgaaaatcaggatcgctacatcaagaaactagctaaatgggtggcaattcaaagcgtgtccgcttggcccgaaaagcgcggtgagatccggagaatgatggaggtggccgctgctgacgtgaagcagctgggaggtagtgtagagctagtggacatcggtaagcagaaacttcccgacggatcagagatccctttgccgcctattctcctgggccgactgggctccgaccctcagaagaaaaccgtctgcatttatggacacctggatgttcagccagccgctctcgaggacgggtgggacagcgaaccattcaccttagtggagcgggacggcaaactatacggaaggggaagtacagacgacaagggtccagtcgctggctggattaatgctcttgaggcgtatcagaaaactggccaggagattcccgtcaacgtacgcttttgcctggaggggatggaggaatctggtagcgaaggactagacgagctgatcttcgcgagaaaagacacattctttaaagatgtcgactacgtgtgtatttccgacaactactggctcggcaaaaagaagccttgcatcacatatgggctgcgaggaatatgttacttttttatcgaagttgagtgcagcaataaggatctccatagcggagtatacggcggatcagttcacgaggccatgacggacctgatacttcttatgggttctcttgtcgacaagagaggcaatattctcatcccaggcattaatgaagccgttgcggcagttacagaggaggaacacaagttatacgatgacattgatttcgacatcgaggaatttgccaaggatgtgggtgctcagatcttactgcattcacacaaaaaggatatactgatgcataggtggcggtatccaagcttgtccctgcatggaattgagggtgccttcagcggcagcggcgcaaagacggtcattccacgtaaggtagtaggtaaatttagtatccggctggttcccaacatgactcctgaagtcgtcggggaacaggtgacttcctacctgacaaagaaattcgccgagctgcgaagcccaaatgagttcaaggtctacatgggacacggaggcaaaccctgggtatcggacttttcacacccccattacttggccggtagaagggccatgaaaacagtgtttggcgtagagccagaccttactagggaaggcggatctatcccagtgacattaaccttccaggaagccaccggcaaaaacgtgatgctgctgcccgttggatccgcagacgacggcgcacactctcagaacgagaagcttaataggtataattatatcgaggggactaagatgttggccgcatatttgtatgaagtgagtcagctgaaggactag

SEQ ID NO: 319016 - DNA, 2804 bp, Artificial Sequence
  derived and/or modified sequence
gaaatggggcggggagagagtgacaccacccctctgcctgtggctggattggtgggcgtggcgggggcgtggcgatgcctgccctccggacaaggcggggttggtggccagggcgaccgcggggcgggccagcgccgggggtcgtggccgggacacgtggtacggaaccggcgccgcgcttgctgctggtaacagggccttgcctagtgggccttccttcccaggtcgcccctcagtctccactagagacaggactgaccagttgctcttccttccaagaaccttcgagatctgcggtctggggtctggttgaaagatggcggccctcactaccctgtttaagtacatagatgaaaatcaggatcgctacattaagaaactcgcaaaatgggtggctatccagagtgtgtctgcgtggccggagaagagaggcgaaatcaggaggatgatggaagttgctgctgcagatgttaagcagttggggggctctgtggaactggtggatatcggaaaacaaaagctccctgatggctcggagatcccgctccctcctattctgctcggcaggctgggctccgacccacagaagaagaccgtgtgcatttacgggcacctggatgtgcagcctgcagccctggaggacggctgggacagcgagcccttcaccctggtggagcgagacggcaagctgtatgggagaggttcgactgatgataagggcccggtggccggctggataaacgccctggaagcgtatcagaaaacaggccaggagattcctgtcaacgtccgattctgcctcgaaggcatggaggagtcaggctctgagggcctagacgagctgatttttgcccggaaagacacattctttaaggatgtggactatgtctgcatttctgacaattactggctgggaaagaagaagccctgcatcacctacggcctcaggggcatttgctactttttcatcgaggtggagtgcagcaacaaagacctccattctggggtgtacgggggctcggtgcatgaggccatgactgatctcattttgctgatgggctctttggtggacaagagggggaacatcctgatccccggcattaacgaggccgtggccgccgtcacggaagaggagcacaagctgtacgacgacatcgactttgacatagaggagtttgccaaggatgtgggggcgcagatcctcctgcacagccacaagaaagacatcctcatgcaccgatggcggtacccgtctctgtccctccatggcatcgaaggcgccttctctgggtctggggccaagaccgtgattcccaggaaggtggttggcaagttctccatcaggctcgtgccgaacatgactcctgaagtcgtcggcgagcaggtcacaagctacctaactaagaagtttgctgaactacgcagccccaatgagttcaaggtgtacatgggccacggtgggaagccctgggtctccgacttcagtcaccctcattacctggctgggagaagagccatgaagacagtttttggtgttgagccagacttgaccagggaaggcggcagtattcccgtgaccttgacctttcaggaggccacgggcaagaacgtcatgctgctgcctgtggggtcagcggatgacggagcccactcccagaatgaaaagctcaacaggtataactacatagagggaaccaagatgctggccgcgtacctgtatgaggtctcccagctgaaggactaggccaagccctctgtgtgccatctccaatgagaaggaatcctgccctcacctcacccttttccaacttgcccagggaagtggaggttccctctttcctttccctcttgtcaggtcatccatgactttagagaacagacacaagtgtatccagctgtccacgggtggagctacccgttgggcttatgagtgacctggagtgacagctgagtcaccctgggtaagttctcagagtggtcaggatggcttgacctgcagaagatacccaaggtccaaaagcacaaggtctgcggaaagttctggttgtcggccgggcaccacggctcacacctataatcgagcactttgggaggccaagacaggaggatcacttgaggccaggagtctgagacaagcctaggcaacaaaacaagactctgtctctacaaaaagtttaagaaatgagccagacatggtggtgtatgcctgtagtcccagccactcagaaggctgaggcaggaggatcgcttgagaccaagagtttgagcctgcggtgagctgtgaatgcaccacggcactcaagcctgggcaatgtagcaagatcctgtctctacaagaaattttttaaaaatgagccaagtgtggtggtgcatgcctgtagttccagctactcaggacactgacgtaggagggttgcttgagactgagagttggaggctgcgatgagccatgaatgccccactgcactccagcctgggcgacagaacgagaccccatctcaaaaaaaataagttctggttgtcattgaattgggataaacagagagcttgatgctttctgccttctgtctcaggtgatgcattgcacatttgggatatttggaaaggaaatgaggaaagaaattagggcctcctctgatctctcgctatctgcgggtcctgtccttttctcaagaccttcaccattactggcattttcctgtcttctctttagtatgatccctcaaaacctcactaactggaaggatgattttgtctcagtttgtactcctaaataaaaagtaaacatgacacctctaaaagaa

SEQ ID NO: 319017 - DNA, 1428 bp, Artificial Sequence
  derived and/or modified sequence
atggccgccctgaccaccctgttcaagtacatcgacgagaaccaggacagatacatcaagaagctggccaagtgggtggccatccagagcgtgagcgcctggcccgagaagagaggcgagatcagaagaatgatggaggtggccgccgccgacgtgaagcagctgggcggcagcgtggagctggtggacatcggcaagcagaagctgcccgacggcagcgagatccccctgccccccatcctgctgggcagactgggcagcgacccccagaagaagaccgtgtgcatctacggccacctggacgtgcagcccgccgccctggaggacggctgggacagcgagcccttcaccctggtggagagagacggcaagctgtacggcagaggcagcaccgacgacaagggccccgtggccggctggatcaacgccctggaggcctaccagaagaccggccaggagatccccgtgaacgtgagattctgcctggagggcatggaggagagcggcagcgagggcctggacgagctgatcttcgccagaaaggacaccttcttcaaggacgtggactacgtgtgcatcagcgacaactactggctgggcaagaagaagccctgcatcacctacggcctgagaggcatctgctacttcttcatcgaggtggagtgcagcaacaaggacctgcacagcggcgtgtacggcggcagcgtgcacgaggccatgaccgacctgatcctgctgatgggcagcctggtggacaagagaggcaacatcctgatccccggcatcaacgaggccgtggccgccgtgaccgaggaggagcacaagctgtacgacgacatcgacttcgacatcgaggagttcgccaaggacgtgggcgcccagatcctgctgcacagccacaagaaggacatcctgatgcacagatggagataccccagcctgagcctgcacggcatcgagggcgccttcagcggcagcggcgccaagaccgtgatccccagaaaggtggtgggcaagttcagcatcagactggtgcccaacatgacccccgaggtggtgggcgagcaggtgaccagctacctgaccaagaagttcgccgagctgagaagccccaacgagttcaaggtgtacatgggccacggcggcaagccctgggtgagcgacttcagccacccccactacctggccggcagaagagccatgaagaccgtgttcggcgtggagcccgacctgaccagagagggcggcagcatccccgtgaccctgaccttccaggaggccaccggcaagaacgtgatgctgctgcccgtgggcagcgccgacgacggcgcccacagccagaacgagaagctgaacagatacaactacatcgagggcaccaagatgctggccgcctacctgtacgaggtgagccagctgaaggactag

SEQ ID NO: 319018 - DNA, 4016 bp, Artificial Sequence
  derived and/or modified sequence
gtccagcctgtttaaacggaaaggacagagatcctgtctgttcaatgtaaaaaaaaaaaaaaaaaaaaaaaaaagaaaaaaagaaaaaaaaaatcagatcagaccgagagagagaggagagagggagagagagagggagagagagagggagagagagaggagagggagggagggagagagagaggggggagagcagagagagagcgcgagcgcgagcgagcgagagaagaggagaaagagagagagcagagagcgagcggagagcgaggtgtagagaaaccgagggggagagaacccgagtgtgtgtatgcgtgtgcgtgtgtgagcgcgagcgagcgagagagaggagcgagagagtgtgagcgagaaagaataaaaggaaagaagattttctctatgtatataaagatggccacgttagcaaacggacaggctgacaacgcaagcctcagtaccaacgggctcggcagcagcccgggcagtgccgggcacatgaacggattaagccacagcccggggaacccgtcgaccattcccatgaaggaccacgatgccatcaagctgttcattgggcagatcccccgcaacctggatgagaaggacctcaagcccctcttcgaggagtttggcaaaatctacgagcttacggttctgaaggacaggttcacaggcatgcacaaaggctgcgccttcctcacctactgcgagcgtgagtcagcgctgaaggcccagagcgcgctgcacgagcagaagactctgcccgggatgaaccggccgatccaggtgaagcctgcggacagcgagagccgaaagatagaaaactcttcgtgggcatgctcaacaagcaacagtccgaggacgacgtgcgccgccttttcgaggcctttgggaacatcgaggagtgcaccatcctgcgcgggcccgacggcaacagcaaggggtgcgcctttgtgaagtactcctcccacgccgaggcgcaggccgccatcaacgcgctacacggcagccagaccatgccgggagcctcgtccagtctggtggtcaagttcgccgacaccgacaaggagcgcacgatgcggcgaatgcagcagatggctggccagatgggcatgttcaaccccatggccatccctttcggggcctacggcgcctacgctcaggcactgatgcagcagcaagcggccctgatggcatcagtcgcgcagggcggctacctgaaccccatggctgccttcgctgccgcccagatgcagcagatggcggccctcaacatgtggcctggcggccgcacctatgaccccaacctcaggtggcagcacccctccgggcatcactgcaccagccgtgcctagcatcccatcccccattggggtgaatggcttcaccggcctccccccacaggccaatgggcaacctgctgcggaagctgtgttcgccaatggcatccacccctacccagcacagagccccaccgccgcggaccccctgcagcaggcctacgccggagtgcagcagtatgcaggtccagctgcctaccctgctgcctatggtcagataagccaggcctttcctcagccgcctccaatgatcccccagcagcagagagaagggcccgagggctgtaacctgttcatctaccatctgccccaggagtttggggacgctgagctgatgcagatgttcctccctttcggcttcgtgagcttcgacaacccggccagcgcgcagaccgccatccaggccatgaacggcttccagatcggcatgaagaggctcaaggtgcagctgaagcggcccaaagacgccaatcgcccgtactgagcgccggcgggagcgtcccccgggggagaccaggactcgcacagggcaggatgctgaacgggctacattaaaaaacaaacctctctctatatatatttataaatgagaactgttggatgacacctttgacatatcagccaatatcaatcaagctgaagactccagacactgtctgtgtgactgtaacatttcttcaaggaaagtatagcgtctatggagttcagagggcacgtgtttgggggaaaatatatatgacatgaagaagaagatgaagaaaaatgagaaaaaaacacacaaaaggcaactttaaaacaaaatatcacgagcagacggggaggctgaagggctgggagctgggaggagacgctgcttaccgatcccggggcttttccagcccacgggcgcctgacgcaggctggggcaagtggtgcgtggggcctggtccccaaggggcggctgagaggccgccactgagcatctctatctgtcattcctttagctatttagggaccaaaggaccaaactttttattgcagatgtgtagctctatgtcaaatagagggggaatggaggaccccctccttcctgcctcatggctgttcttgaaacagcttagagcgattctatgaaaaaatgtaataaaaaattaaaaaaaaaacaaaaaacaaaaaaaacaacaaaaaaaggaaaaataacgcttcaatgcttttaaaacagcaagataatagttctttgatactttgagaggcgctttgatgaccctcatccaagtctatgacactttcctatggttttctgtattctatgtctggatggagctgttaaaagatgaacaaattggtggatatttggggaaagcaacacaaatcttaaaactcacccgtgaagtgtgagaaaacaaggaggggaacaaatgggacttaccaagcaaggtcattgttgtgaaaagtctgtaaatgcttctaactcttccccctcttaaaatcataatagttgtacagaattttaaaaaggaaaagtttaaaatacctatataatagaagaaaaattagaggaaagcaaaaaataaaaaaaaaaaataaaaaaggaaaaaaaaaacctatagaagttagcattactgctaaaatcccagatgttgtaggactgtacttttgtagagtttagacagagcatcaatcccttctccccgcgagtgcagtcggatgccgttgtccccaagggccaggccgaactcgccccacacctgcgggcgcctggctgccgacgccggtggaggccacgccgtcggtcgggaacggtcgcgtcgcccgggtcgccgccgccgccgccgccgtcatcctcgcctctcgcttccctctgggagctgcgcgcgcttcactcaccttccgcttcactcgccttccacgcttgctccagagactttccgggcaagggagaactgggaactttcatcttaaaacaactagacaacacacacacacacaaaaccttaaaaaagagagagaaaaataaacaatctttgaagaatttctgaaactgtttacaaggaattttgaaaaacagggatgtttaaatgatgccggctctgtttttctgtaaataaatttgcatattttgtaggacttttaattgtaatgatagagaaaaaaacaaggaaaactatttaatgaaagcacgatatttatctttggtaaatgactttagagcagttaaagacattgcttaaaaaactcagaatcagaaaaaacactgaattatttaagaacacatatattttaaagtataacatatttattataatttatttgcacccttgggaagattgctttggcattctgccttgattccttctcattgatgtccaggtcatctggaggccgggggttctcagacctaccagtttccctttagaagaacaaatttccagttcctctagggcctcctgcctttcctttctttctgtcaattttgttgttgttgttgtttttcattttctttttttctcttgactcctccttttaggatgtccagatgtaaaaaaaaaaaaaaaaaaaagaaaaaaagaaaaaaaaaagaaaacagctgcagttcagtacaactgctcttttcacactcaactccctaaaactccttgtaaccttctgtaactattggatgacgctttctccagcttagccctaaataaagcacagttt

SEQ ID NO: 319019 - protein, 212 aa, Artificial Sequence
  derived and/or modified sequence
VSAEGPERAARAEDSARDEPADPGEACGQREPKDRKLFVGMLNKQQSEDDVRRLFEAFGNIEECTILRGPDGNSKGCAFVKYSSHAEAQAAINALHGSQTMPGASSSLVVKFADTDKERTMRRMQQMAGQMGMFNPMAIPFGAYGAYAQALMQQQAALMASVAQGGYLNPMAAFAAAQMQQMAALNMWPGGRTYDPNLRWQHPSGHHCTSRA

SEQ ID NO: 319020 - DNA, 639 bp, Artificial Sequence
  derived and/or modified sequence
gtgagcgctgagggccccgagagggccgcacgagcagaggacagcgctagagatgagcctgccgaccccggtgaagcatgtggacagagggaacccaaggataggaagctgtttgtgggtatgctgaacaagcagcaatcagaggacgatgtacgaaggttgttcgaagccttcggcaacattgaagagtgtacaatcctcagagggcccgatggcaactcaaaagggtgtgcctttgtgaagtactcttctcatgctgaggcacaggctgcaatcaacgcgctgcacggctctcaaacaatgcctggcgctagcagttctcttgttgtgaagtttgcagataccgacaaagaaagaactatgagaaggatgcagcagatggcgggccagatggggatgtttaatccaatggctatcccttttggagcctatggcgcttatgcacaggcgcttatgcagcagcaggccgccctcatggcctctgtcgcccaaggtggatatttgaatcccatggctgcgttcgccgccgcgcagatgcagcagatggcagcacttaacatgtggcccggcggaagaacctacgaccctaatctccgatggcagcatccgtccgggcatcattgcacaagcagggcctag

SEQ ID NO: 319021 - DNA, 639 bp, Artificial Sequence
  derived and/or modified sequence
gtgtctgctgagggccctgagagagctgcccgggcagaagattctgccagagatgagcctgctgaccctggagaggcctgtggccagcgggagcccaaggacaggaagctgtttgtgggcatgctgaacaagcagcagagtgaagatgatgtgcggcggctgtttgaggccttcggcaacattgaagaatgtaccatcctgcggggcccagatggcaacagcaagggctgtgcctttgtgaagtacagcagccacgccgaggcccaggccgccatcaatgccctgcacggcagccagaccatgcctggggccagcagcagcctggtggtgaagtttgctgacacagacaaggagaggaccatgaggaggatgcagcagatggccggccagatgggcatgttcaaccccatggccatcccctttggagcctacggggcctatgcccaggccctgatgcagcagcaggccgccctgatggcctctgtggcccagggcggctacctgaaccccatggccgcctttgctgctgcccagatgcagcagatggccgccctgaacatgtggccaggcggccgcacctatgaccccaacctgcgctggcagcaccccagcggccaccactgcaccagccgggcctag

SEQ ID NO: 319022 - DNA, 639 bp, Artificial Sequence
  derived and/or modified sequence
gtgagcgccgagggccccgagcgggccgcccgggccgaggacagcgccagagatgagccggcagatccgggcgaagcttgcggacaacgcgagcctaaggaccgcaaacttttcgtgggaatgttgaataaacaacagtcggaggacgacgtgcgtaggctatttgaagcctttgggaatatcgaggaatgcaccatactgaggggtcctgacggcaacagcaaaggttgcgcatttgttaagtatagtagccacgctgaagcacaagctgccattaacgctttgcatggcagccagacaatgccaggggcctcgagttccctggtcgtgaagtttgcggacaccgacaaggagagaaccatgcgccgcatgcagcaaatggcaggtcagatggggatgttcaaccccatggctatacccttcggtgcatatggcgcatacgcccaggcccttatgcagcagcaggccgcattgatggcttcagtggctcagggcggctatttaaatcccatggctgcttttgcagccgcccagatgcaacagatggccgccttgaatatgtggcctggagggaggacttatgaccctaacttgaggtggcagcacccctcaggccaccactgcacttcacgggcctag

SEQ ID NO: 319023 - DNA, 639 bp, Artificial Sequence
  derived and/or modified sequence
gttagcgcggagggcccagaaagagccgcacgggctgaggactccgctcgggatgagccggctgaccctggagaggcatgcgggcagcgggagccaaaagatcggaagctcttcgtgggcatgctaaataaacagcagtccgaggatgacgtgagacgcctctttgaggcctttgggaatatcgaggaatgcactatcctgagaggaccagatgggaactccaaaggatgtgcatttgtgaagtatagctctcatgcagaggcccaggccgcaatcaacgctctgcatgggagtcaaacaatgcctggtgcttcaagctcactcgtggtgaagtttgcagacaccgataaggaaaggacaatgcggaggatgcagcagatggccggtcagatgggaatgttcaatcctatggccatacccttcggtgcttacggggcttacgcgcaggccttaatgcagcagcaggcagctctgatggcgtccgttgcgcaggggggatacttgaacccgatggctgcattcgcagcggcacaaatgcaacagatggctgctctgaatatgtggcctggaggtagaacatatgacccgaacctcagatggcaacacccttctggacatcactgtacttctagagcttag

SEQ ID NO: 319024 - DNA, 639 bp, Artificial Sequence
  derived and/or modified sequence
gtgagcgccgagggccccgagagagccgccagagccgaggacagcgccagagacgagcccgccgaccccggcgaggcctgcggccagagagagcccaaggacagaaagctgttcgtgggcatgctgaacaagcagcagagcgaggacgacgtgagaagactgttcgaggccttcggcaacatcgaggagtgcaccatcctgagaggccccgacggcaacagcaagggctgcgccttcgtgaagtacagcagccacgccgaggcccaggccgccatcaacgccctgcacggcagccagaccatgcccggcgccagcagcagcctggtggtgaagttcgccgacaccgacaaggagagaaccatgagaagaatgcagcagatggccggccagatgggcatgttcaaccccatggccatccccttcggcgcctacggcgcctacgcccaggccctgatgcagcagcaggccgccctgatggccagcgtggcccagggcggctacctgaaccccatggccgccttcgccgccgcccagatgcagcagatggccgccctgaacatgtggcccggcggcagaacctacgaccccaacctgagatggcagcaccccagcggccaccactgcaccagcagagcctag

SEQ ID NO: 319025 - protein, 390 aa, Artificial Sequence
  derived and/or modified sequence
MNSLSEANTKFMFDLFQQFRKSKENNIFYSPISITSALGMVLLGAKDNTAQQISKVLHFDQVTENTTEKAATYHVDRSGNVHHQFQKLLTEFNKSTDAYELKIANKLFGEKTYQFLQEYLDAIKKFYQTSVESTDFANAPEESRKKINSWVESQTNEKIKNLFPDGTIGNDTTLVLVNAIYFKGQWENKFKKENTKEEKFWPNKNTYKSVQMMRQYNSFNFALLEDVQAKVLEIPYKGKDLSMIVLLPNEIDGLQKLEEKLTAEKLMEWTSLQNMRETCVDLHLPRFKMEESYDLKDTLRTMGMVNIFNGDADLSGMTWSHGLSVSKVLHKAFVEVTEEGVEAAAATAVVVVELSSPSTNEEFCCNHPFLFFIRQNKTNSILFYGRFSSP

SEQ ID NO: 319026 - DNA, 1173 bp, Artificial Sequence
  derived and/or modified sequence
atgaattctctgagcgaggctaataccaaattcatgtttgatttgtttcagcagttccgtaaatcaaaagagaataacatcttctattcccctatctcaatcacctctgctctggggatggtgttactgggggccaaagacaatactgcccagcaaatcagcaaggtactacacttcgatcaggtgacagagaacacaactgagaaggccgccacgtaccacgtggatagaagcggaaatgtgcaccaccagtttcagaaattgttaacagaattcaataaatccactgatgcttacgagttgaaaatcgctaataaactattcggcgagaaaacctatcagtttttgcaggaataccttgatgccataaaaaagttttaccagactagtgtggagtctaccgacttcgctaatgccccagaggaaagcagaaaaaaaattaactcctgggttgaatcccagaccaacgaaaagatcaagaatctttttcccgacggtacaatcgggaacgataccacccttgtgttggtgaatgctatctatttcaagggtcagtgggaaaacaaatttaaaaaagaaaataccaaggaagagaagttttggccaaacaagaacacctacaagtctgtacagatgatgcgtcaatacaatagcttcaatttcgctctgttagaggatgtccaggccaaggtactcgagataccttacaaaggcaaggacttgtcaatgattgttctgttgccaaatgaaatcgacgggctccaaaagctagaggagaagctgaccgctgaaaaactgatggaatggacaagcctgcagaatatgcgagagacctgcgtggatctgcatctgcctcggtttaaaatggaagagagctacgacctcaaagatacactgcgaactatgggcatggtgaacattttcaacggcgatgctgacctcagtgggatgacttggagccatggcctgtcggtgagtaaagtactccacaaggcattcgtggaggtgacagaagagggtgtggaagcagctgctgcaaccgctgtcgttgttgtggaactttccagtccatcaaccaacgaggagttctgctgcaaccacccatttctcttcttcatacggcagaataaaaccaacagcattctattctacgggagattctcatctccgtag

SEQ ID NO: 319027 - DNA, 1173 bp, Artificial Sequence
  derived and/or modified sequence
atgaacagcctgtctgaggccaacaccaagttcatgtttgacctcttccagcagttcaggaagagcaaggagaacaacatcttctacagccccatcagcatcaccagcgccctgggcatggtgctgctgggcgccaaggacaacacagcccagcagatcagcaaggtgctgcactttgaccaggtgacagagaacaccacagagaaggccgccacctaccacgtggacagaagtggaaatgtgcaccaccagttccagaagctgctgacagagttcaacaagagcacagatgcctatgagctgaagatcgccaacaagctgtttggagagaagacctaccagttcctgcaggagtacctggatgccatcaagaagttctaccagacctctgtggagagcacagactttgccaatgcccctgaggagagcaggaagaagatcaacagctgggtggagagccagaccaatgagaagatcaagaacctcttcccagatggcaccatcggaaatgacaccaccctggtgctggtgaatgccatctacttcaagggccagtgggagaacaagttcaagaaggagaacaccaaggaggagaagttctggcccaacaagaacacctacaagtctgtgcagatgatgaggcagtacaacagcttcaactttgccctgctggaggatgtgcaggccaaggtgctggagatcccctacaagggcaaggacctgtccatgattgtgctgctgcccaatgaaattgatggcctgcagaagctggaggagaagctgacagctgagaagctgatggagtggaccagcctgcagaacatgagggagacctgtgtggacctgcacctgccccgcttcaagatggaggagagctatgacctgaaggacaccctgcggaccatgggcatggtgaacatcttcaatggagatgctgacctgagcggcatgacctggagccacggcctgtctgtgtccaaggtgctgcacaaggcctttgtggaggtgacagaggagggcgtggaggccgctgctgccacagctgtggtggtggtggagctgagcagccccagcaccaatgaggagttctgctgcaaccaccccttcctgttcttcatccggcagaacaagaccaacagcatcctcttctacggccgcttcagcagcccctag

SEQ ID NO: 319028 - DNA, 1173 bp, Artificial Sequence
  derived and/or modified sequence
atgaacagcctgagcgaggccaacaccaagttcatgttcgacctgtttcagcagttccggaagagcaaggaaaataacatcttttactctcctatttccataacctccgcattaggcatggtgctgctgggggcgaaggacaacactgcccaacaaatctctaaggttctccatttcgaccaggttacggaaaatactactgagaaggccgccacgtatcacgttgacaggtccgggaacgtgcatcatcaattccagaagttgcttacggagtttaacaagtccactgacgcctatgaacttaagatcgccaacaagctgttcggggagaagacctaccagtttctgcaagagtatctggacgccattaaaaaattttatcagacatccgtcgaatctacagactttgctaacgcaccagaggagagccgaaagaagatcaactcatgggtggaaagccagactaacgagaagattaagaatctgtttcctgacggaactataggaaatgacaccaccctggtccttgtgaacgctatctactttaaaggccagtgggaaaacaagtttaagaaagagaatacaaaagaggaaaaattctggcccaataagaatacttacaagagtgttcagatgatgcgacagtacaatagtttcaattttgctcttctcgaagacgtgcaggcgaaagttctggaaataccatacaagggaaaggatcttagtatgatcgtgttgctcccgaacgagattgatgggctgcagaaactcgaagaaaaactgactgcagagaagctgatggagtggacctctctgcagaatatgcgtgagacatgcgttgacctgcacctgcctaggttcaagatggaggaatcctatgacctaaaagatactttgcgcacaatgggcatggtgaatatctttaatggggacgccgatctctccgggatgacatggtcacacggtctaagtgtgtcaaaagtgttgcataaggcattcgtcgaggtgacagaagagggggtggaggccgctgcagccacggccgtggtagtggtagagctcagcagtcccagcacaaacgaggaattttgctgtaatcaccccttccttttcttcattcggcaaaataaaaccaacagtattctgttttatgggaggttcagctctccatag

SEQ ID NO: 319029 - DNA, 1173 bp, Artificial Sequence
  derived and/or modified sequence
atgaatagtctgagtgaagccaatactaagttcatgttcgatttgttccagcaattccgaaaatcaaaagagaataatatattttattcacccattagtattactagcgcattaggtatggtactgctaggcgcaaaggacaatacggctcagcagatctctaaggtactgcacttcgaccaagtgactgagaacactactgaaaaagccgctacataccatgtggacaggtcggggaatgtacatcaccagtttcaaaagctacttaccgagtttaacaagagtacagacgcatacgaactcaaaatcgccaataagttatttggggagaagacgtatcagttcctccaagagtacctggacgccataaaaaagttctaccagaccagcgtagaaagtaccgacttcgccaatgctcctgaggagtccaggaagaaaatcaatagctgggtggagtcacagacgaacgagaaaatcaaaaacctcttcccagacggcacaattgggaatgataccactctggtcctggttaatgctatttactttaagggacagtgggagaataagttcaagaaggaaaataccaaggaagaaaagttctggccgaacaaaaacacatacaagagcgtccaaatgatgcgacagtataattcctttaattttgccctcctggaggacgtccaggcgaaggtgcttgaaattccctataagggtaaggatctttccatgattgtgctgctccccaacgagatcgacggattgcagaagctggaggaaaaactgacggctgaaaaactgatggaatggaccagcctgcagaatatgagagagacttgtgtagacctccacctgccacgctttaagatggaggaaagctacgatctgaaggacactttacgcacaatgggtatggtcaacatttttaacggggatgcagatcttagtggcatgacttggtctcacggcctcagcgtctctaaagtgctccacaaagcatttgttgaggtgacggaggagggcgtggaggccgctgctgccacggcagtggtggtcgttgagctgagctctccttctacaaacgaggagttttgttgcaatcacccctttctgttttttataagacagaataagactaacagtatcctgttttatggacgatttagttctccctag

SEQ ID NO: 319030 - DNA, 1749 bp, Artificial Sequence
  derived and/or modified sequence
aagaggagaggcataaatttaggatctcacccttcattccacagacacacacagcctctctgcccacctctgcttcctctaggaacacaggagttccagatcacatcgagttcaccatgaattcactcagtgaagccaacaccaagttcatgttcgatctgttccaacagttcagaaaatcaaaagagaacaacatcttctattcccctatcagcatcacatcagcattagggatggtcctcttaggagccaaagacaacactgcacaacaaattagcaaggttcttcactttgatcaagtcacagagaacaccacagaaaaagctgcaacatatcatgttgataggtcaggaaatgttcatcaccagtttcaaaagcttctgactgaattcaacaaatccactgatgcatatgagctgaagatcgccaacaagctcttcggagaaaagacgtatcaatttttacaggaatatttagatgccatcaagaaattttaccagaccagtgtggaatctactgattttgcaaatgctccagaagaaagtcgaaagaagattaactcctgggtggaaagtcaaacgaatgaaaaaattaaaaacctatttcctgatgggactattggcaatgatacgacactggttcttgtgaacgcaatctatttcaaagggcagtgggagaataaatttaaaaaagaaaacactaaagaggaaaaattttggccaaacaagaatacatacaaatctgtacagatgatgaggcaatacaattcctttaattttgccttgctggaggatgtacaggccaaggtcctggaaataccatacaaaggcaaagatctaagcatgattgtgctgctgccaaatgaaatcgatggtctgcagaagcttgaagagaaactcactgctgagaaattgatggaatggacaagtttgcagaatatgagagagacatgtgtcgatttacacttacctcggttcaaaatggaagagagctatgacctcaaggacacgttgagaaccatgggaatggtgaatatcttcaatggggatgcagacctctcaggcatgacctggagccacggtctctcagtatctaaagtcctacacaaggcctttgtggaggtcactgaggagggagtggaagctgcagctgccaccgctgtagtagtagtcgaattatcatctccttcaactaatgaagagttctgttgtaatcaccctttcctattcttcataaggcaaaataagaccaacagcatcctcttctatggcagattctcatccccatagatgcaattagtctgtcactccatttagaaaatgttcacctagaggtgttctggtaaactgattgctggcaacaacagattctcttggctcatatttcttttctatctcatcttgatgatgatagtcatcatcaagaatttaatgattaaaatagcatgcctttctctctttctcttaataagcccacatataaatgtacttttccttccagaaaaatttcccttgaggaaaaatgtccaagataagatgaatcatttaataccgtgtcttctaaatttgaaatataattctgtttctgacctgttttaaatgaaccaaaccaaatcatactttctcttcaaatttagcaacctagaaacacacatttctttgaatttaggtgatacctaaatccttcttatgtttctaaattttgtgattctataaaacacatcatcaataaaataatgacataaaatca

SEQ ID NO: 319031 - DNA, 1173 bp, Artificial Sequence
  derived and/or modified sequence
atgaacagcctgagcgaggccaacaccaagttcatgttcgacctgttccagcagttcagaaagagcaaggagaacaacatcttctacagccccatcagcatcaccagcgccctgggcatggtgctgctgggcgccaaggacaacaccgcccagcagatcagcaaggtgctgcacttcgaccaggtgaccgagaacaccaccgagaaggccgccacctaccacgtggacagaagcggcaacgtgcaccaccagttccagaagctgctgaccgagttcaacaagagcaccgacgcctacgagctgaagatcgccaacaagctgttcggcgagaagacctaccagttcctgcaggagtacctggacgccatcaagaagttctaccagaccagcgtggagagcaccgacttcgccaacgcccccgaggagagcagaaagaagatcaacagctgggtggagagccagaccaacgagaagatcaagaacctgttccccgacggcaccatcggcaacgacaccaccctggtgctggtgaacgccatctacttcaagggccagtgggagaacaagttcaagaaggagaacaccaaggaggagaagttctggcccaacaagaacacctacaagagcgtgcagatgatgagacagtacaacagcttcaacttcgccctgctggaggacgtgcaggccaaggtgctggagatcccctacaagggcaaggacctgagcatgatcgtgctgctgcccaacgagatcgacggcctgcagaagctggaggagaagctgaccgccgagaagctgatggagtggaccagcctgcagaacatgagagagacctgcgtggacctgcacctgcccagattcaagatggaggagagctacgacctgaaggacaccctgagaaccatgggcatggtgaacatcttcaacggcgacgccgacctgagcggcatgacctggagccacggcctgagcgtgagcaaggtgctgcacaaggccttcgtggaggtgaccgaggagggcgtggaggccgccgccgccaccgccgtggtggtggtggagctgagcagccccagcaccaacgaggagttctgctgcaaccaccccttcctgttcttcatcagacagaacaagaccaacagcatcctgttctacggcagattcagcagcccctag

SEQ ID NO: 319032 - protein, 389 aa, Artificial Sequence
  derived and/or modified sequence
MEDSPTMVRVDSPTMVRGENQVSPCQGRRCFPKALGYVTGDMKELANQLKDKPVVLQFIDWILRGISQVVFVNNPVSGILILVGLLVQNPWWALTGWLGTVVSTLMALLLSQDRSLIASGLYGYNATLVGVLMAVFSDKGDYFWWLLLPVCAMSMTCPIFSSALNSMLSKWDLPVFTLPFNMALSMYLSATGHYNPFFPAKLVIPITTAPNISWSDLSALELLKSIPVGVGQIYGCDNPWTGGIFLGAILLSSPLMCLHAAIGSLLGIAAGLSLSAPFEDIYFGLWGFNSSLACIAMGGMFMALTWQTHLLALGCALFTAYLGVGMANFMAEVGLPACTWPFCLATLLFLIMTTKNSNIYKMPLSKVTYPEENRIFYLQAKKRMVESPL

SEQ ID NO: 319033 - protein, 281 aa, Artificial Sequence
  derived and/or modified sequence
MGRRNRSLIASGLYGYNATLVGVLMAVFSDKGDYFWWLLLPVCAMSMTCPIFSSALNSMLSKWDLPVFTLPFNMALSMYLSATGHYNPFFPAKLVIPITTAPNISWSDLSALELLKSIPVGVGQIYGCDNPWTGGIFLGAILLSSPLMCLHAAIGSLLGIAAGLSLSAPFEDIYFGLWGFNSSLACIAMGGMFMALTWQTHLLALGCALFTAYLGVGMANFMAEVGLPACTWPFCLATLLFLIMTTKNSNIYKMPLSKVTYPEENRIFYLQAKKRMVESPL

SEQ ID NO: 319034 - DNA, 3971 bp, Artificial Sequence
  derived and/or modified sequence
acacagagcagagtggggctctgagtatataactgttaggtgcctccctccagcaccatctcctgagaagcactctcccttgtcgtggaggtgggcaaatctttatcagccactgccttctgctgccaggaagccagctagagtggtctttaaagaaaactgggcatctcctgctacttaaaatcaaaaactacctaaaataaagattatagagccagaggaagagatagccatggaggacagccccactatggttagagtggacagccccactatggttaggggtgaaaaccaggtttcgccatgtcaagggagaaggtgcttccccaaagctcttggctatgtcaccggtgacatgaaagaacttgccaaccagcttaaagacaaacccgtggtgctccagttcattgactggattctccggggcatatcccaagtggtgttcgtcaacaaccccgtcagtggaatcctgattctggtaggacttcttgttcagaacccctggtgggctctcactggctggctgggaacagtggtctccactctgatggccctcttgctcagccaggacaggtcattaatagcatctgggctctatggctacaatgccaccctggtgggagtactcatggctgtcttttcggacaagggagactatttctggtggctgttactccctgtatgtgctatgtccatgacttgcccaattttctcaagtgcattgaattccatgctcagcaaatgggacctccccgtcttcaccctccctttcaacatggcgttgtcaatgtacctttcagccacaggacattacaatccattctttccagccaaactggtcatacctataactacagctccaaatatctcctggtctgacctcagtgccctggagttgttgaaatctataccagtgggagttggtcagatctatggctgtgataatccatggacagggggcattttcctgggagccatcctactctcctccccactcatgtgcctgcatgctgccataggatcattgctgggcatagcagcgggactcagtctttcagccccatttgaggacatctactttggactctggggtttcaacagctctctggcctgcattgcaatgggaggaatgttcatggcgctcacctggcaaacccacctcctggctcttggctgtgccctgttcacggcctatcttggagtcggcatggcaaactttatggctgaggttggattgccagcttgtacctggcccttctgtttggccacgctattgttcctcatcatgaccacaaaaaattccaacatctacaagatgcccctcagtaaagttacttatcctgaagaaaaccgcatcttctacctgcaagccaagaaaagaatggtggaaagccctttgtgagaacaagccccatttgcagccatggtcacgagtcatttctgcctgactgctccagctaacttccagggtctcagcaaactgctgtttttcacgagtatcaactttcatactgacgcgtctgtaatctgttcttatgctcattttgtattttcctttcaactccaggaatatccttgagcatatgagagtcacatccaggtgatgtgctctggtatggaatttgaaaccccaatggggccttggcactaagactggaatgtatataaagtcaaagtgctccaacagaaggaggaagtgaaaacaaactattagtatttattgatattcttggtgtttagctggctcgatgatgttaacagtattaaaaattaaaccccataaaccaactaagccttatggaattcacagtcacaaaatcgaagttaatccagaattctgtgataagcagcttggctttttttttaaatcaatgcaagttacacattatagccagaatctgtatcacagaggtgcaagctgacagcagagctcagtccccacttcctgcaaacaatggcctgcaccctatcccttgtgtgtgtgacattctctcatgggacaatgttggggtttttcagactgacaggactgcaagagggagaaaggaattttgtcaatcaaaattattctgtattgcaacttttctcagagattgcaaaggattttttaggtagagattatttttccttatgaaaaatgatctgttttaaatgagataaaataggagaagttcctggcttaacctgttcttacatattaaagaaaagttacttactgtatttatgaaatactcagcttaggcatttttactttaacccctaaattgattttgtaaatgccacaaatgcatagaattgttaccaacctccaaagggctctttaaaatcatattttttattcatttgaggatgtcttataaagactgaaggcaaaggtcagattgcttacgggtgttatttttataagttgttgaattccttaatttaaaaaagctcattattttttgcacactcacaatattctctctcagaaatcaatggcatttgaaccaccaaaaagaaataaagggctgagtgcggtggctcacgcctgtaatcccagcactttggggagcccaggcgggcagattgcttgaacccaggagttcaagaccagcctgggcagcatggtgaaaccctgtatctacaaaaaatacaaaaattagccaggcatggtggtgggtgcctgtagttccagctacttgggaggctgaggtgggaaaatgacttgagcccaggaggaggaggctgcagtgagctaagattgcaccactgcactccaacctgggcgacaagagtgaaactgtgtctctcaaaaaaaaaaaaaaacaaacaaaaacaaaaacaaaacaaaacaaaacaaaacaaaacaggtaaggattcccctgttttcctctctttaattttaaagttatcagttccgtaaagtctctgtaaccaaacatactgaagacagcaacagaagtcacgttcagggactggctcacacctgtaatcccagcactttgggagatggaggtaaaaggatctcttgagcccaggagttcaagaccagcttgggcaacatagcaagactccatctcttaaaaaataaaaatagtaacattagccaggtgtagcagcacacatctgcagcagctactcaggaggctgaggtggaaagatcgcttgtgcacagaagttcgaggctgcagtgagctatatgatcatgtcactgcactccagcctgtgtgaccgagcaagaccctatctcaaaaaaattaattaattaattaattaattaatttaaaaaggaagtcatgttcatttactttccacttcagtgtgtatcgtgtagtattttggaggttggaaagtgaaacgtaggaatcctgaagattttttccacttctagtttgcagtgctcagtgcacaatatacattttgctgaatgaataaacagaaatagggaagtaaacctacaaatattttagggagaagctcacttcttccttttctcaggaaaccaagcaagcaaacatatcgttccaattttaaaacccagtgaccaaagcctttggaactatgaatttgcaactgtcataggtttatggatattgctgtggagaagctcaattttcagtgtttgaactgaaccctttcttgttagggaacgtgtgaaagaagaattgtggggaaaaaaaagcaagcataaccaaagatcatcagcagtgaagaatctaggctgtggctgagagaaccagaggcctctaaaatggacccgagtcgatcttcagaacagggatctaccatgcaggagcttcttgtgctcacacaaatctgtaaatgggaacattgtacattgtcgaatttaaatgatattaattttctcaagctatttttgttactattttcctaaaattgaatatttgcagggagcacttatactttttcctaatgtctgtataacaaatttctatgcaagtacatgaataaattatgctcacagctca

SEQ ID NO: 319035 - DNA, 645 bp, Artificial Sequence
  derived and/or modified sequence
atgaatgggagatccctgattggtggagcgggcgacgccagacacggcccagtgtggaaagacccgtttggaactaaagcaggggatgcagctagacgcggaatcgctcggttaagtctggctctcgctgatgggtctcaggagcaggaacctgaggaagagatcgctatggaagacagcccaaccatggtccgtgtagattctccaaccatggtaagaggagagaatcaggtgtccccttgccaggggaggcgttgtttccccaaagccctggggtacgtcacgggggatatgaaagaactggctaatcaattaaaggacaagcctgtagttctgcagttcattgactggattctgcgcgggatctcccaagttgtgtttgtaaacaatcctgtgtctggaattctcattctggttggactgttggttcaaaatccttggtgggcgctgacagggtggctcggcacggtcgtcagcaccctgatggccctcctgctgtctcaagatcgatccctcatagctagcggcctctatgggtacaacgcaacccttgtgggcgtgctgatggccgtcttcagcgacaagggcgactatttttggtggttgttactacctgtgtgcgctatgtctatgacatgttgttag

SEQ ID NO: 319036 - DNA, 645 bp, Artificial Sequence
  derived and/or modified sequence
atgaatggccgcagcctgattggaggagctggagatgcccggcacggccctgtgtggaaggaccccttcggcaccaaggctggagatgctgcccggcggggcatcgcccggctgagcctggccctggctgatggcagccaggagcaggagcctgaggaggagatcgccatggaggacagccccaccatggtgcgggtggacagccccaccatggtgagaggagagaaccaggtgagcccctgccagggccgccgctgcttccccaaggccctgggctacgtgactggagacatgaaggagctggccaaccagctgaaggacaagcctgtggtgctgcagttcatcgactggatcctgcggggcatcagccaggtggtgtttgtgaacaaccctgtgtctggcatcctgatcctggtgggcctgctggtgcagaacccctggtgggccctgaccggctggctgggcaccgtggtgtccaccctgatggccctgctgctgagccaggacaggagcctgattgccagcggcctgtatggctacaatgccaccctggtgggcgtgctgatggctgtgttcagtgacaagggggactacttctggtggctgctgctgcctgtgtgtgccatgtccatgacctgctgctag

SEQ ID NO: 319037 - DNA, 645 bp, Artificial Sequence
  derived and/or modified sequence
atgaacggccggagcctgatcggcggcgccggcgacgcccggcacggccctgtgtggaaggacccgttcgggaccaaagcaggtgacgccgctaggcgaggtatagctcgactctcactggctctggcagatggttcccaggaacaagagccggaggaggaaatcgctatggaagatagtcctaccatggtacgggtggatagcccaaccatggttcggggagagaaccaagtttcaccctgccaaggacgccggtgtttcccaaaagcgctcggttacgtgaccggcgacatgaaggagctcgcaaatcagctaaaggataagcctgtggttttgcaatttattgactggatcctgcggggaatttcacaggtagtcttcgtcaacaaccccgtttcgggcatcctcatactggtgggactcctagtgcaaaacccatggtgggcgctgaccggatggttaggcacagttgtcagtaccctgatggcacttctcctcagccaagatcggagccttatcgcttcaggtctgtacggatacaacgctactctggtgggcgtactcatggctgtgttttctgacaaaggggactatttttggtggttgctgctgccagtgtgtgccatgagcatgacctgctgctag

SEQ ID NO: 319038 - DNA, 645 bp, Artificial Sequence
  derived and/or modified sequence
atgaatggacgcagtctgatcggtggagcaggtgatgcccgacacgggcctgtctggaaggatcctttcgggaccaaagctggagatgcggctcggaggggaatcgctagactgagtctggccttagccgacggatcacaggaacaggagcctgaggaggaaattgccatggaagactccccaacaatggttcgggtagactctcccaccatggtccgaggagaaaaccaggtatcaccatgccagggacggaggtgttttcccaaagcacttggctatgtgaccggagacatgaaagagctcgcgaatcagctcaaggacaagcctgtagtcctgcagtttatcgactggattcttagggggatttcacaggtggtttttgtgaataatcccgttagcgggattttgatactagtcggcttgttggtgcagaatccctggtgggccctaaccggttggctcggcaccgtggtttcaactctgatggccctgctactgagccaagatcgctcactgattgcctcaggtctgtacggatataatgccactctggtcggcgtgctgatggccgtgttctcagacaagggggattatttctggtggttgctgcttcctgtctgcgcaatgtctatgacttgttgctag

SEQ ID NO: 319039 - DNA, 1684 bp, Artificial Sequence
  derived and/or modified sequence
gcactctcccttgtcgtggaggtgggcaaatctttatcagccactgccttctgctgccaggaagccagctagagtggtctttaaagaaaactgggcatctcctgctacttaaaatcaaaaactacctaaaataaagattataaaaaagtaaggatgaatggacggtctttgattggcggcgctggtgacgcccgtcatggtcctgtttggaaggacccttttggaactaaagctggtgacgcagcgcgcagaggcatcgcccggctaagcttggccctggcagatgggtcgcaggaacaggagccagaggaagagatagccatggaggacagccccactatggttagagtggacagccccactatggttaggggtgaaaaccaggtttcgccatgtcaagggagaaggtgcttccccaaagctcttggctatgtcaccggtgacatgaaagaacttgccaaccagcttaaagacaaacccgtggtgctccagttcattgactggattctccggggcatatcccaagtggtgttcgtcaacaaccccgtcagtggaatcctgattctggtaggacttcttgttcagaacccctggtgggctctcactggctggctgggaacagtggtctccactctgatggccctcttgctcagccaggacaggtcattaatagcatctgggctctatggctacaatgccaccctggtgggagtactcatggctgtcttttcggacaagggagactatttctggtggctgttactccctgtatgtgctatgtccatgacttgttgttgaaatctataccagtgggagttggtcagatctatggctgtgataatccatggacagggggcattttcctgggagccatcctactctcctccccactcatgtgcctgcatgctgccataggatcattgctgggcatagcagcgggactcagtctttcagccccatttgaggacatctactttggactctggggtttcaacagctctctggcctgcattgcaatgggaggaatgttcatggcgctcacctggcaaacccacctcctggctcttggctgtgccctgttcacggcctatcttggagtcggcatggcaaactttatggctgaggttggattgccagcttgtacctggcccttctgtttggccacgctattgttcctcatcatgaccacaaaaaattccaacatctacaagatgcccctcagtaaagttacttatcctgaagaaaaccgcatcttctacctgcaagccaagaaaagaatggtggaaagccctttgtgagaacaagccccatttgcagccatggtcacgagtcatttctgcctgactgctccagctaacttccagggtctcagcaaactgctgtttttcacgagtatcaactttcatactgacgcgtctgtaatctgttcttatgctcattttgtattttcctttcaactccaggaatatccttgagcatatgagagtcacatccaggtgatgtgctctggtatggaatttgaaaccccaatggggccttggcactaagactggaatgtatataaagtcaaagtgctccaacagaaggaggaagtgaaaacaaactattagtatttattgatattcttggtgtttagctggctcgatgatgttaacagtattaaaaattaaaccccataaaccaa

SEQ ID NO: 319040 - DNA, 645 bp, Artificial Sequence
  derived and/or modified sequence
atgaacggcagaagcctgatcggcggcgccggcgacgccagacacggccccgtgtggaaggaccccttcggcaccaaggccggcgacgccgccagaagaggcatcgccagactgagcctggccctggccgacggcagccaggagcaggagcccgaggaggagatcgccatggaggacagccccaccatggtgagagtggacagccccaccatggtgagaggcgagaaccaggtgagcccctgccagggcagaagatgcttccccaaggccctgggctacgtgaccggcgacatgaaggagctggccaaccagctgaaggacaagcccgtggtgctgcagttcatcgactggatcctgagaggcatcagccaggtggtgttcgtgaacaaccccgtgagcggcatcctgatcctggtgggcctgctggtgcagaacccctggtgggccctgaccggctggctgggcaccgtggtgagcaccctgatggccctgctgctgagccaggacagaagcctgatcgccagcggcctgtacggctacaacgccaccctggtgggcgtgctgatggccgtgttcagcgacaagggcgactacttctggtggctgctgctgcccgtgtgcgccatgagcatgacctgctgctag

SEQ ID NO: 319041 - DNA, 1008 bp, Artificial Sequence
  derived and/or modified sequence
atgctgcacaccaacctggtgtacctggccaccatcgccgacagcaaccagaacatgcagagcctgctgcccgccccccccacccagaacatgcccatgggccccggcggcatgaaccagagcggccccccccccccccccagaagccacaacatgcccagcgacggcatggtgggcggcggcccccccgccccccacatgcagaaccagatgaacggccagatgcccggccccaaccacatgcccatgcagggccccggccccaaccagctgaacatgaccaacagcagcatgaacatgcccagcagcagccacggcagcatgggcggctacaaccacagcgtgcccagcagccagagcatgcccgtgcagaaccagatgaccatgagccagggccagcccatgggcaactacggccccagacccaacatgagcatgcagcccaaccagggccccatgatgcaccagcagccccccagccagcagtacaacatgccccagggcggcggccagcactaccagggccagcagccccccatgggcatgatgggccaggtgaaccagggcaaccacatgatgggccagagacagatccccccctacagacccccccagcagggccccccccagcagtacagcggccaggaggactactacggcgaccagtacagccacggcggccagggcccccccgagggcatgaaccagcagtactaccccgacggcaacagccagtacggccagcagcaggacgcctaccagggcccccccccccagcagggctaccccccccagcagcagcagtaccccggccagcagggctaccccggccagcagcagggctacggccccagccagggcggccccggcccccagtaccccaactacccccagggccagggccagcagtacggcggctacagacccacccagcccggccccccccagcccccccagcagagaccctacggctacgaccagggccagtacggcaactaccagcagtag

SEQ ID NO: 319042 - DNA, 1008 bp, Artificial Sequence
  derived and/or modified sequence
atgcttcataccaacctggtttacctggcgaccatagcagactctaaccaaaacatgcaaagcctccttccagccccccctacccagaatatgcccatgggccctggcgggatgaatcaatctggaccccctcctccacctcgatctcacaacatgcctagcgatggcatggtggggggaggtccacctgctcctcacatgcagaaccagatgaacggacagatgcctggcccaaatcacatgcctatgcagggtcctgggccgaaccagctcaatatgactaattccagcatgaatatgcccagctcatcccacggctctatgggcggctataatcattctgtaccatcctcccagtccatgcccgtgcagaatcaaatgaccatgtctcagggccaacctatgggcaattatggtccccgtcccaatatgtccatgcagcctaaccagggaccgatgatgcaccagcagccacccagtcaacagtacaacatgcctcagggcggcggccagcactaccagggacagcaaccccccatgggcatgatgggccaggtaaaccaaggaaatcatatgatggggcagaggcagatccccccatatcggcctccacaacaaggcccccctcagcagtactcagggcaggaggattactatggggatcagtacagccacggaggtcagggaccccccgaaggcatgaatcagcagtactatccagacggtaattctcagtacggacagcagcaggacgcttaccagggtcctccaccccagcaggggtatcctccacagcagcagcagtaccccgggcaacaggggtaccctggacagcagcaaggatatggccctagccagggtggacctgggcctcagtaccccaactacccccaagggcagggacagcagtatggaggctacaggcctacccagccaggacctcctcagcctccacaacagcggccctatgggtacgaccagggccagtacggtaattatcagcagtag

SEQ ID NO: 319043 - DNA, 1008 bp, Artificial Sequence
  derived and/or modified sequence
atgctccatacaaatctggtgtatctcgctacgatcgctgattcaaaccagaatatgcagtctctgctacctgctccacccacccagaacatgcctatgggccctggcggtatgaaccagtccgggccacctcctccacccagaagccataacatgccttccgatggaatggtggggggtggtccgcccgctccacacatgcagaatcagatgaatggacagatgcccggccctaaccatatgcctatgcagggtccaggtcctaatcagctgaacatgaccaactcatcgatgaacatgccctccagctctcacgggtctatgggtggatataatcactctgtgccgagcagccagtctatgccagtccagaatcaaatgactatgagccagggtcaacccatgggcaactatggcccacgcccaaatatgtccatgcagcccaaccagggtccaatgatgcaccaacaaccgccatcccagcaatacaatatgcctcaaggaggaggccagcactaccaaggacagcaaccgccaatgggcatgatgggccaggtgaatcaaggcaaccacatgatgggccagcggcagatacctccgtaccgaccccctcagcaaggtcccccccagcagtactcagggcaagaggactactatggcgaccaatatagccatgggggccagggcccgccagagggaatgaatcagcagtattaccctgatggaaactcccaatacggtcagcagcaggacgcctatcagggccctcccccacaacaggggtatccaccgcagcagcaacaatacccaggacagcaaggctatcccggacagcagcaaggttatggcccaagccagggcggccctggaccccagtatcccaactacccgcagggccagggacaacaatacgggggctatcgacccacccaaccaggccccccccagcctccccaacagcggccatacggctatgaccagggccaatacggtaactatcagcagtag

SEQ ID NO: 319044 - DNA, 1008 bp, Artificial Sequence
  derived and/or modified sequence
atgctgcacaccaacctggtgtacctggccaccatcgctgacagcaaccagaacatgcagagcctgctgcctgccccacccacccagaacatgcccatgggccctgggggcatgaaccagagcggccccccacctccacccaggagccacaacatgcccagtgatggcatggtgggcggcggccccccagccccccacatgcagaaccagatgaatggccagatgcctggccccaaccacatgcccatgcagggccctggccccaaccagctgaacatgaccaacagctccatgaacatgcccagcagcagccacggctccatgggcggctacaaccacagcgtgcccagcagccagagcatgcctgtgcagaaccagatgaccatgagccagggccagcccatgggcaactacggcccccggcccaacatgtccatgcagcccaaccagggccccatgatgcaccagcagccccccagccagcagtacaacatgccccagggcggcggccagcactaccagggccagcagccccccatgggcatgatgggccaggtgaaccagggcaaccacatgatgggccagaggcagatccccccctacagaccaccccagcagggccccccccagcagtacagcggccaggaggactactatggagaccagtacagccatggaggccagggccccccagagggcatgaaccagcagtactacccagatggcaacagccagtatggccagcagcaggatgcctaccagggccccccaccccagcagggctacccaccccagcagcagcagtacccaggccagcagggctacccaggccagcagcagggctacggccccagccagggcggccctggcccccagtaccccaactacccccagggccagggccagcagtatggaggctaccggcccacccagcccggccccccccagcccccccagcagaggccctacggctatgaccagggccagtatggcaactaccagcagtag

SEQ ID NO: 319045 - DNA, 1008 bp, Artificial Sequence
  derived and/or modified sequence
atgctgcacaccaacctggtgtacctggccaccatcgccgacagcaaccaaaatatgcagtctctgctcccagccccacccacccagaatatgccgatggggccaggggggatgaatcagagcgggccacctcctcccccgagaagtcataacatgccatcagacgggatggtcggcgggggcccgcccgccccacacatgcagaaccagatgaacggccagatgccaggacctaaccacatgcccatgcagggtcccgggcccaatcaactcaacatgactaattccagcatgaatatgccctcaagctctcatgggtcgatggggggttacaatcacagcgtaccatcaagccagtccatgcctgtgcagaatcagatgaccatgtcccagggccagcccatgggcaactacggtcctcggccaaacatgagcatgcagcccaatcaagggcccatgatgcatcaacagcctccaagccagcagtataacatgccacaggggggcggccagcattatcagggccagcagccacccatgggcatgatgggccaggtgaaccagggcaatcatatgatgggacagagacaaatacctccttaccggcccccccaacagggcccgcctcagcagtattcaggacaggaggattattatggagatcagtactctcatggaggccagggacctcctgagggaatgaatcagcagtactaccccgatgggaacagtcagtacgggcagcagcaggatgcttaccagggacctcctccgcaacaggggtatcctccccagcaacagcagtaccctggccagcaaggatatcctggccagcagcaggggtatggaccctcacagggcggccccgggccacagtatcctaattacccacagggccaggggcaacagtacggcggttacaggcctacccagcccggaccaccacaacctcctcagcagcgcccatatggatacgatcagggacagtacggcaattatcagcaatag

SEQ ID NO: 319046 - DNA, 1008 bp, Artificial Sequence
  derived and/or modified sequence
atgctgcacaccaacctggtgtacctggccaccatcgccgacagcaaccagaacatgcaatcactcctccccgcgccccccacgcagaacatgcctatgggcccaggcggcatgaaccagtcaggcccaccccctcctccacgaagtcacaacatgcctagtgacgggatggtgggcggaggccctcctgcccctcacatgcagaaccagatgaacgggcagatgccgggcccaaaccacatgcccatgcagggccctggcccgaaccagttgaatatgaccaacagtagcatgaatatgccttcgtctagccatggttcaatgggaggatataaccactctgtaccctcctcacagagtatgcccgtccagaaccaaatgactatgagtcaggggcagccaatgggaaattatggcccacgtccaaacatgtctatgcagccaaatcaggggcccatgatgcaccagcaacctccgtcacaacaatacaacatgcctcagggcggaggccagcactaccaggggcaacagccacccatggggatgatggggcaggttaaccaagggaaccatatgatgggccagcgccagatccctccctatcgtcctcctcagcagggacccccacaacagtactcaggccaggaggattactacggagatcagtactctcacggcggacaaggaccgcccgaagggatgaaccagcaatactaccccgacggcaattcacagtacggtcagcagcaagatgcctaccagggacctccaccacagcagggctatccgccccaacagcagcagtatcctggccaacaaggttaccccgggcagcagcagggttatggcccctcccagggcggtcccggtccgcaataccccaactatccccaaggccagggtcaacaatacggcggataccgtccaactcaacctgggccacctcaaccgcctcaacagcgaccatatggctacgaccagggtcagtatggaaattatcaacagtag

SEQ ID NO: 319047 - DNA, 1008 bp, Artificial Sequence
  derived and/or modified sequence
atgctgcatacaaacctcgtgtatctagcaacaatcgctgactccaaccagaacatgcagagcctgctccccgctccacccactcagaacatgcccatggggcctggaggcatgaatcagagcggaccgccaccgcctcccagatcccacaacatgccaagtgacgggatggtgggcggaggaccccctgcccctcatatgcagaaccagatgaacggtcaaatgccaggccctaatcacatgccaatgcagggtcccggacccaaccaattgaacatgaccaattcaagcatgaacatgccatcctcctctcacggctctatgggaggctataatcacagcgtgcctagttctcagtctatgcccgtgcagaaccagatgactatgtcccagggtcagccaatgggcaactacggtccccgtcccaatatgtctatgcagcctaaccagggcccaatgatgcaccagcaaccgccaagccagcagtacaacatgccacagggaggaggacagcattatcagggccaacagccacccatgggcatgatgggacaggtgaaccaggggaaccatatgatggggcagcggcagatccctccctacaggcctcctcagcaaggtcctccccagcagtattccgggcaggaggattattacggcgatcaatattcacatgggggtcagggccctccagaaggcatgaatcaacagtattaccccgatggaaattctcagtacgggcagcagcaagatgcgtatcaggggcctccaccccagcaaggatatccccctcagcagcagcaatatcctggacaacagggataccccggacagcaacagggctacggtccctcccagggaggtccgggtcctcagtaccccaactatccccagggtcagggacagcagtatggaggataccgccctacgcagccaggaccacctcagcccccacagcaacgcccatacggctacgaccaagggcaatatggcaattaccagcagtag

SEQ ID NO: 319048 - DNA, 1008 bp, Artificial Sequence
  derived and/or modified sequence
atgttgcacaccaatctggtgtacctggctaccatcgccgattccaaccagaacatgcagagcttgttgcctgcccctcccacccagaacatgcccatgggcccaggaggaatgaatcagtcgggaccacctccgcctccgaggtcccacaacatgccctcggatggcatggtcgggggaggccctcccgcacctcacatgcagaatcagatgaatgggcagatgcctggacccaatcatatgcccatgcagggtccaggccctaatcaactcaacatgacgaattcttctatgaatatgccctcctcatctcatgggtccatgggaggctacaatcatagcgttccttcctcccagtcaatgccagtccaaaatcaaatgaccatgagtcaaggtcagcccatgggcaactatggaccacgccctaacatgagcatgcaaccaaatcaaggcccaatgatgcatcaacagcccccaagccagcaatacaacatgccccagggagggggacagcactaccagggacaacagcctcccatggggatgatgggccaggtcaatcaaggcaaccacatgatggggcagagacagatacctccatatcgcccaccacagcaaggccctccccagcagtattctggacaggaagactattacggtgatcaatactcccacggcggtcaggggccaccagaggggatgaaccaacagtactatccagacggtaattcccagtatggccaacagcaggatgcctaccagggcccaccaccacagcagggataccctccacagcagcagcagtatcctggacagcaaggatacccgggtcaacagcagggctacgggccaagccaggggggacctggaccacagtacccgaactatccccagggacaggggcagcagtacgggggttacaggccaacccagccgggaccaccccagccgccacagcagcggccatatggctacgaccaggggcagtatggaaactatcagcaatag

SEQ ID NO: 319049 - protein, 667 aa, Artificial Sequence
  derived and/or modified sequence
MHHQQRMAALGTDKELSDLLDFSAMFSPPVSSGKNGPTSLASGHFTGSNVEDRSSSGSWGNGGHPSPSRNYGDGTPYDHMTSRDLGSHDNLSPPFVNSRIQSKTERGSYSSYGRESNLQGCHQQSLLGGDMDMGNPGTLSPTKPGSQYYQYSSNNPRRRPLHSSAMEVQTKKVRKVPPGLPSSVYAPSASTADYNRDSPGYPSSKPATSTFPSSFFMQDGHHSSDPWSSSSGMNQPGYAGMLGNSSHIPQSSSYCSLHPHERLSYPSHSSADINSSLPPMSTFHRSGTNHYSTSSCTPPANGTDSIMANRGSGAAGSSQTGDALGKALASIYSPDHTNNSFSSNPSTPVGSPPSLSAGTAVWSRNGGQASSSPNYEGPLHSLQSRIEDRLERLDDAIHVLRNHAVGPSTAMPGGHGDMHGIIGPSHNGAMGGLGSGYGTGLLSANRHSLMVGTHREDGVALRGSHSLLPNQVPVPQLPVQSATSPDLNPPQDPYRGMPPGLQGQSVSSGSSEIKSDDEGDENLQDTKSSEDKKLDDDKKDIKSITSNNDDEDLTPEQKAEREKERRMANNARERLRVRDINEAFKELGRMVQLHLKSDKPQTKLLILHQAVAVILSLEQQVRERNLNPKAACLKRREEEKVSSEPPPLSLAGPHPGMGDASNHMGQM

SEQ ID NO: 319050 - protein, 643 aa, Artificial Sequence
  derived and/or modified sequence
MFSPPVSSGKNGPTSLASGHFTGSNVEDRSSSGSWGNGGHPSPSRNYGDGTPYDHMTSRDLGSHDNLSPPFVNSRIQSKTERGSYSSYGRESNLQGCHQQSLLGGDMDMGNPGTLSPTKPGSQYYQYSSNNPRRRPLHSSAMEVQTKKVRKVPPGLPSSVYAPSASTADYNRDSPGYPSSKPATSTFPSSFFMQDGHHSSDPWSSSSGMNQPGYAGMLGNSSHIPQSSSYCSLHPHERLSYPSHSSADINSSLPPMSTFHRSGTNHYSTSSCTPPANGTDSIMANRGSGAAGSSQTGDALGKALASIYSPDHTNNSFSSNPSTPVGSPPSLSAGTAVWSRNGGQASSSPNYEGPLHSLQSRIEDRLERLDDAIHVLRNHAVGPSTAMPGGHGDMHGIIGPSHNGAMGGLGSGYGTGLLSANRHSLMVGTHREDGVALRGSHSLLPNQVPVPQLPVQSATSPDLNPPQDPYRGMPPGLQGQSVSSGSSEIKSDDEGDENLQDTKSSEDKKLDDDKKDIKSITSNNDDEDLTPEQKAEREKERRMANNARERLRVRDINEAFKELGRMVQLHLKSDKPQTKLLILHQAVAVILSLEQQVRERNLNPKAACLKRREEEKVSSEPPPLSLAGPHPGMGDASNHMGQM

SEQ ID NO: 319051 - DNA, 8317 bp, Artificial Sequence
  derived and/or modified sequence
gtgtgtggatgtgtgagtgagagggaacgagagtaagagaaagaaagaagtgaggggatgtaaactcgaataaatttcaaagtgcctccgagggatgcaacgggcaaaaactgaactgttcaggcttcagattgtaactgacgatctgaggaaaaatgaggtgctcgatgaattttcgtttgtattttttggcgaggcgggggaggtgttgagattttttttttttcccctcggggtgggtgcgagggggatgcatcctagcctgcccgacccggagcaagtcgcgtctccccgccggagcccccccacccatttctttgctgaacttgcaattccgtgcgcctcggcgtgtttccccctccccccttccctccgtcccctcccctccccggagaagagagttggtgttaagagtcagggatcttggctgtgtgtctgcggatctgtagtggcggcggcggcggcggcggcggggaggcagcaggcgcgggagcgggcgcaggagcaggcggcggcggtggcggcggcggttagacatgaacgccgcctcggcgccggcggtgcacggagagccccttctcgcgcgcgggcggtttgtgtgattttgctaaaatgcatcaccaacagcgaatggctgccttagggacggacaaagagctgagtgatttactggatttcagtgcgatgttttcacctcctgtgagcagtgggaaaaatggaccaacttctttggcaagtggacattttactggctcaaatgtagaagacagaagtagctcagggtcctgggggaatggaggacatccaagcccgtccaggaactatggagatgggactccctatgaccacatgaccagcagggaccttgggtcacatgacaatctctctccaccttttgtcaattccagaatacaaagtaaaacagaaaggggctcatactcatcttatgggagagaatcaaacttacagggttgccaccagcagagtctccttggaggtgacatggatatgggcaacccaggaaccctttcgcccaccaaacctggttcccagtactatcagtattctagcaataatccccgaaggaggcctcttcacagtagtgccatggaggtacagacaaagaaagttcgaaaagttcctccaggtttgccatcttcagtctatgctccatcagcaagcactgccgactacaatagggactcgccaggctatccttcctccaaaccagcaaccagcactttccctagctccttcttcatgcaagatggccatcacagcagtgacccttggagctcctccagtgggatgaatcagcctggctatgcaggaatgttgggcaactcttctcatattccacagtccagcagctactgtagcctgcatccacatgaacgtttgagctatccatcacactcctcagcagacatcaattccagtcttcctccgatgtccactttccatcgtagtggtacaaaccattacagcacctcttcctgtacgcctcctgccaacgggacagacagtataatggcaaatagaggaagcggggcagccggcagctcccagactggagatgctctggggaaagcacttgcttcgatctattctccagatcacactaacaacagcttttcatcaaacccttcaactcctgttggctctcctccatctctctcagcaggcacagctgtttggtctagaaatggaggacaggcctcatcgtctcctaattatgaaggacccttacactctttgcaaagccgaattgaagatcgtttagaaagactggatgatgctattcatgttctccggaaccatgcagtgggcccatccacagctatgcctggtggtcatggggacatgcatggaatcattggaccttctcataatggagccatgggtggtctgggctcagggtatggaaccggccttctttcagccaacagacattcactcatggtggggacccatcgtgaagatggcgtggccctgagaggcagccattctcttctgccaaaccaggttccggttccacagcttcctgtccagtctgcgacttcccctgacctgaacccaccccaggacccttacagaggcatgccaccaggactacaggggcagagtgtctcctctggcagctctgagatcaaatccgatgacgagggtgatgagaacctgcaagacacgaaatcttcggaggacaagaaattagatgacgacaagaaggatatcaaatcaattactagcaataatgacgatgaggacctgacaccagagcagaaggcagagcgtgagaaggagcggaggatggccaacaatgcccgagagcgtctgcgggtccgtgacatcaacgaggctttcaaagagctcggccgcatggtgcagctccacctcaagagtgacaagccccagaccaagctcctgatcctccaccaggcggtggccgtcatcctcagtctggagcagcaagtccgagaaaggaatctgaatccgaaagctgcgtgtctgaaaagaagggaggaagagaaggtgtcctcagagcctccccctctctccttggccggcccacaccctggaatgggagacgcatcgaatcacatgggacagatgtaaaagggtccaagttgccacattgcttcattaaaacaagagaccacttccttaacagctgtattatcttaaacccacataaacacttctccttaacccccatttttgtaatataagacaagtctgagtagttatgaatcgcagacgcaagaggtttcagcattcccaattatcaaaaaacagaaaaacaaaaaaaagaaagaaaaaagtgcaacttgagggacgactttctttaacatatcattcagaatgtgcaaagcagtatgtacaggctgagacacagcccagagactgaacggcaatctttccacactgtggaacaatgcatttgtgcctaaacttcttttggaaaaaaaaaatataattaatttgtaagtctgaaaaaaaaatatttaatttaaaaaaaattgtaaacttgcaataatgaaaaagtgtacttctgaagaaaactacatgaacgtttttgttggtattcaagtcagctagtgtttataattactggatattgaattaggggaagctcggctgccctagtaacaaaaccagcaaacgtcctgatgacaacgaagtgatgacattagccattccttagggtaggaggaacagatggatcttatagacctatgacaaatatatatataaatatatatataaatatatattaaaaatttagtgactatggtaagcttttgttcatttgtttcagacttttttctcctgtaaaaaaatagtactgattaacttttttaaaagaaagattttactgtaaatatggatttttttttttttggtcttatttctgtccctttccctggtttgttatcgtaacctgtagtgccaactctgcttccagaggggtagtgcaggatgaaatgctgaccctgatgttgcttctcattcataaataagtagaaagttgtttctccagtcttttgggaacacaggacttaaaagtcacatcatgtgtagatattacaagcagcattaccaagacatggcaaaaagagtttgtctgaattgtaatgttgcgtttgtgaacctattctgggattttcagaggtacaaggttagaatgctacaatgttaccactgtgccttccaatgtttatatcatcggaaacataacataatcaaagtggctgtgatttaacaaaatgattaaagtgttacctacctgtgtagccgaagtagtgtgcagtgaggcgtttctgaatacatggtcagatttttggaaaaaaacaaaaacaaaaaaaacaagtaaagttcaaaaaccgtcaaatgagaaaattgcaagtagtgtgacagagctgattgattttgttgctttcttgattttttttttcaaaatgggtttactaaaatgtagatgacttaactgcctcctccttcgtctgaaaaatgccaatattcaatcatcatgcagcattataacaagccttataagtcctaaagcattaagttgcacttttttgaggaggggtagtgcagtatttctctggccagtatgaatgaagtttatacttaccatatttgatagaaacatagatcaagctatggcacagcgactcatcagatagctagctttgacgtctgggcacaattgaaccaacttccatcgtgaatctttataatgattgactttggtgtatagtgcagtaaacaaatagtgctcctagttaagtatttgtcagcatccttttgtctctaacttgtttctatttttacagccacacaattcttggcatgtattaagaaaaaaaaaaatccctgttcaagtagtttttccacctatcagcactgagtaaatgccataaatccattgaaatggtctaaatgttccatctgttctcctgttttgccagttatatagtaatgaaatacatttgtaaattttatgcaacaaatggcaaacgtatcattattttgaaattgtgtatgtaaaagttatatttttacatgtagactcttgttattatgtgttttaatacattgtatcagtttttgtttttttttaaaaactgtggtttaaaaagaagtctcatttaaatgaaatagctacaagaatcagaattttatgttcatttctgaaaatgtaagaacaaataagatagttaccacgtggtcatcttttacaaacccataaacattttgattagctgtgtgtgtgttgaaaaactgtaaatatgttcagtagcgataaaactaaaataactttgatttgttgataagttcctaaaatgtggaggtggattaaaaccttaggagaatagcagaaatcaaacttcatgaaaagttattttggggctttcctgtgaaatgtatgaacaaagaggctcagagaaggacatggaagacaataatgtatactctctcctcctccctgaataatgaaaaccatgtgtatttgttccctccgtatgttaaagatttccttttagtggtacattctgcactcattttgtatagtctaccaaggcgggtatccctaggaacaatattatataggaagcaggtatactctgatcacattcaggataagtgtacagaagaaaatacggtgtttactctttagggaactggaaacactccctgcattgatgtacattttaagaatggcacttttgatacatgttatcataaaggtgcttaatagagctgaattaaagtttttcaaatctgtaaacaaagcaaaaaagtaaattgtagtcatttgattattttttaaattggtgctttatattttgttctcactcagagtaaaagctgcaatttattgttcaccagctttgatgtattcattactcagtaatgcaatacctctattgttgaattccctttggaaataagtgaaaattctaacggccactgaaagctgctcgctaggttttgcttggtggagaaacataatctgcacctatccatattaattgggttgtatccccattaaaaaagaaaaaaagggaatgtggcctttttagtgtgttttttattgttgttgttttgtaattatcaaacccaggtaagatattggtatcctgcactggattttcaaatgaagttcagcagaagacagttaagattaaagtactatacaaaaatttcaaaagggtccatactacgctatctgtatgacgacacttaggctggggatctctttcagaaactcggactttaaaagcaacttggagcagttgatccacctccacattcaagtaatttatgaatatgcagaatagggatctgttcatctagaaatttttaccatttgtcttctgtgtagctgcaaggaacactaatgtttatacaactgtcagtccacccagtggtgcaactggttctgattcagtcttccgattcctttttatttttcactttttcctatttctgaatttttttttttatttgtgatcttgattttgatgaggggttggggagtggggagggagtcgaaccaagacttggagttaagaggattttcatcttttgcatccaacaggcagaatatgatctgtgtccaaaagtgaacttgagtcaggaatgaatcaatttcagcataaacaagcacaaaaatttagtctgctggctgactggaagcaaaaaagtcaagatggaatatgatgaattccaacacaatggggcaccaaggcctttaggcctctctttttattttgctttggttttgtttgtttttctttagagacatgctctttctcatgggacttgaagtggactcatctttgtgcagtgctggttttgccatactcatttcaagtattatagacatatgtaatggtgaaaatatatgaactgtggcctttttcattcttgttacttgtgatgcaattaagtgaagataagaaaaaaaaaaaaaaagcagagatttaccatgtatcagtgcctggctttttgttataaagctttgtttgtctagtgctcttttgctataaaatagactgtagtacaccctagtaggaaaaaaaaaaaactaaatttaaaaataaaaaatatatttggcttatttttcgcaggagcaatccttttataccatgaatattacaaaaaaattgtcagattctgaatatttcttctttgtagatttttggaatcattatgagtaaaagtttgttactttattttactatttaaaagatgttattttaccatgtgttaccaagatgaaactgtatgggtagcttttttgtttgttttttgttttgtttttgtttttgtttttgtttttagttgtaggtcgcagcggggaaattttttgcgactgtacacatagctgcagcattaaaaacttaaaaaaattgttaaaaaaaaaaaaagggaaaacatttcaaaaaaaaaaaaaaagataaacagttacaccttgttttcaatgtgtggctgagtgcctcgattttttcatgtttttggtgtatttctgatttgtagaagtgtccaaacaggttgtgtgctggagttccttcaagacaaaaacaaacccagcttggtcaaggccattacctgtttcccatctgtagttattcgatgaagtcatgtacatgaccgttctgtagcaataaatgtgccatttttataaactgtttctgacacttgtttcatttcattttgcattgtccatatagctatgattctcttctgtaagtaaaacgcatctatatttcattttccaagtgttggaggtattgacagcttaacaaacaaaacatacaaaaaaaatcacaaaaacaaattgaaaagcaaagcacatgattgatcaaggaagagatgcccttaatgaaaatggaacgggatgcatgcaaaacaaaaagaaaactgtctagaggattaactaattgaaggaatataattaatgtgtgtgtaacactgaagctatgcatttgaagagctctgaactgcaccagtgttttcggttgtgctgcaggttgctaagtcaagtcagccttaaccttttgcaccagttggtcggctgtttggcagaacattctcagatcttttcagtcaaaaatctaagatgatttattttgtatcactttgttaaaagctgaatattgttaactacagttaatattaacactgtatttatactttctcaaactacatccgccccaccacttctggttgcctctgttgactattaatccagatgtaaacaaccagatgtttttttctaacttgtacaaactgacgtgtgtcaactatcatggaaggaaaaaaatgtacagattaaaattattcagtgttatgtactgtaagttaatatttttgtagaatggacatcaatctactttgcaaaatttggaggctatttcaacattgcactgtagaaatgtaaagtaatgtatgcaatgtaaaggaaagcccgcggtagctgagcgcttcataacagaatgttctaatcaagtacgtggtatttggggatgtctccaatattgctcttgtattctttctaattgggtttagtgactagttgaaggaaaatgttataacgccatttggttcacatgtgaagtgccctccatagccaaatgttgggatttttttttttttcgtttttggttggactgtttgcagatatttaaattttatgaaatttccaaagattttggttgataacccccttttaccttctaaatgatttgagatgttcttatgttcttactgtgtgttttaaatatatataaaagagccacaagca

SEQ ID NO: 319052 - protein, 537 aa, Artificial Sequence
  derived and/or modified sequence
MDMGNPGTLSPTKPGSQYYQYSSNNPRRRPLHSSAMEVQTKKVRKVPPGLPSSVYAPSASTADYNRDSPGYPSSKPATSTFPSSFFMQDGHHSSDPWSSSSGMNQPGYAGMLGNSSHIPQSSSYCSLHPHERLSYPSHSSADINSSLPPMSTFHRSGTNHYSTSSCTPPANGTDSIMANRGSGAAGSSQTGDALGKALASIYSPDHTNNSFSSNPSTPVGSPPSLSAGTAVWSRNGGQASSSPNYEGPLHSLQSRIEDRLERLDDAIHVLRNHAVGPSTAMPGGHGDMHGIIGPSHNGAMGGLGSGYGTGLLSANRHSLMVGTHREDGVALRGSHSLLPNQVPVPQLPVQSATSPDLNPPQDPYRGMPPGLQGQSVSSGSSEIKSDDEGDENLQDTKSSEDKKLDDDKKDIKSITSNNDDEDLTPEQKAEREKERRMANNARERLRVRDINEAFKELGRMVQLHLKSDKPQTKLLILHQAVAVILSLEQQVRERNLNPKAACLKRREEEKVSSEPPPLSLAGPHPGMGDASNHMGQM

SEQ ID NO: 319053 - DNA, 2745 bp, Artificial Sequence
  derived and/or modified sequence
cttctctttataagcccgcagttcccggatgtgaatggattacaatgtatctttcagggaaacctattattatcaatgtgactccacgggggagtccatggtgatgatgatgaggaggaggatgatgatgatgagacacctctaaacttggaacaagtttaagactttatgagagaagaaaaaaaatcaccaacaagaattgtttgaggaaaaattataactatcctgtgttcatttttttttttataaacaataagaaaaagttgttggatttttttttaatgatttcttttttgggggagggaattttgttgcagttttatggtggaaaatgcaaaaaccagagccaggtgcataatcttgtaatctgtggatatccctggagcaggactgagtaccagttaaaatactttttggggatacacatgtgagatactaagtacttgcagaagatttttgtctctctttttaaagtctctttccttggaatattgtgagaatatttgtggccatttaagatgttttcacctcctgtgagcagtgggaaaaatggaccaacttctttggcaagtggacattttactggctcaaatgtagaagacagaagtagctcagggtcctgggggaatggaggacatccaagcccgtccaggaactatggagatgggactccctatgaccacatgaccagcagggaccttgggtcacatgacaatctctctccaccttttgtcaattccagaatacaaagtaaaacagaaaggggctcatactcatcttatgggagagaatcaaacttacagggttgccaccagcagagtctccttggaggtgacatggatatgggcaacccaggaaccctttcgcccaccaaacctggttcccagtactatcagtattctagcaataatccccgaaggaggcctcttcacagtagtgccatggaggtacagacaaagaaagttcgaaaagttcctccaggtttgccatcttcagtctatgctccatcagcaagcactgccgactacaatagggactcgccaggctatccttcctccaaaccagcaaccagcactttccctagctccttcttcatgcaagatggccatcacagcagtgacccttggagctcctccagtgggatgaatcagcctggctatgcaggaatgttgggcaactcttctcatattccacagtccagcagctactgtagcctgcatccacatgaacgtttgagctatccatcacactcctcagcagacatcaattccagtcttcctccgatgtccactttccatcgtagtggtacaaaccattacagcacctcttcctgtacgcctcctgccaacgggacagacagtataatggcaaatagaggaagcggggcagccggcagctcccagactggagatgctctggggaaagcacttgcttcgatctattctccagatcacactaacaacagcttttcatcaaacccttcaactcctgttggctctcctccatctctctcagcaggcacagctgtttggtctagaaatggaggacaggcctcatcgtctcctaattatgaaggacccttacactctttgcaaagccgaattgaagatcgtttagaaagactggatgatgctattcatgttctccggaaccatgcagtgggcccatccacagctatgcctggtggtcatggggacatgcatggaatcattggaccttctcataatggagccatgggtggtctgggctcagggtatggaaccggccttctttcagccaacagacattcactcatggtggggacccatcgtgaagatggcgtggccctgagaggcagccattctcttctgccaaaccaggttccggttccacagcttcctgtccagtctgcgacttcccctgacctgaacccaccccaggacccttacagaggcatgccaccaggactacaggggcagagtgtctcctctggcagctctgagatcaaatccgatgacgagggtgatgagaacctgcaagacacgaaatcttcggaggacaagaaattagatgacgacaagaaggatatcaaatcaattactaggtcaagatctagcaataatgacgatgaggacctgacaccagagcagaaggcagagcgtgagaaggagcggaggatggccaacaatgcccgagagcgtctgcgggtccgtgacatcaacgaggctttcaaagagctcggccgcatggtgcagctccacctcaagagtgacaagccccagaccaagctcctgatcctccaccaggcggtggccgtcatcctcagtctggagcagcaagtccgagaaaggaatctgaatccgaaagctgcgtgtctgaaaagaagggaggaagagaaggtgtcctcagagcctccccctctctccttggccggcccacaccctggaatgggagacgcatcgaatcacatgggacagatgtaaaagggtccaagttgccacattgcttcattaaaacaagagaccacttccttaacagctgtattatcttaaacccacataaacacttctccttaacccccatttttgtaatataagacaagtctgagtagttatgaatcgcagacgcaagaggtttcagcattcccaattatcaaaaaacagaaaaacaaaaaaaagaaagaaaaaagtgcaacttgagggacgactttctttaacatatcattcagaatgtgcaaagcagtatgtacaggctgagacacagccc

SEQ ID NO: 319054 - protein, 1558 aa, Artificial Sequence
  derived and/or modified sequence
MGLCGLLERCWLHHDPDGVLTLNAENTNYAYQVPNFHKCEICLLSFPKESQFQRHMRDHERNDKPHRCDQCPQTFNVEFNLTLHKCTHSGEDPTCPVCNKKFSRVASLKAHIMLHEKEENLICSECGDEFTLQSQLAVHMEEHRQELAGTRQHACKACKKEFETSSELKEHMKTHYKIRVSSTRSYNRNIDRSGFTYSCPHCGKTFQKPSQLTRHIRIHTGERPFKCSECGKAFNQKGALQTHMIKHTGEKPHACAFCPAAFSQKGNLQSHVQRVHSEVKNGPTYNCTECSCVFKSLGSLNTHISKMHMGGPQNSTSSTETAHVLTATLFQTLPLQQTEAQATSASSQPSSQAVSDVIQQLLELSEPAPVESGQSPQPGQQLSITVGINQDILQQALENSGLSSIPAAAHPNDSCHAKTSAPHAQNPDVSSVSNEQTDPTDAEQEKEQESPEKLDKKEKKMIKKKSPFLPGSIREENGVRWHVCPYCAKEFRKPSDLVRHIRIHTHEKPFKCPQCFRAFAVKSTLTAHIKTHTGIKAFKCQYCMKSFSTSGSLKVHIRLHTGVRPFACPHCDKKFRTSGHRKTHIASHFKHTELRKMRHQRKPAKVRVGKTNIPVPDIPLQEPILITDLGLIQPIPKNQFFQSYFNNNFVNEADRPYKCFYCHRAYKKSCHLKQHIRSHTGEKPFKCSQCGRGFVSAGVLKAHIRTHTGLKSFKCLICNGAFTTGGSLRRHMGIHNDLRPYMCPYCQKTFKTSLNCKKHMKTHRYELAQQLQQHQQAASIDDSTVDQQSMQASTQMQVEIESDELPQTAEVVAANPEAMLDLEPQHVVGTEEAGLGQQLADQPLEADEDGFVAPQDPLRGHVDQFEEQSPAQQSFEPAGLPQGFTVTDTYHQQPQFPPVQQLQDSSTLESQALSTSFHQQSLLQAPSSDGMNVTTRLIQESSQEELDLQAQGSQFLEDNEDQSRRSYRCDYCNKGFKKSSHLKQHVRSHTGEKPYKCKLCGRGFVSSGVLKSHEKTHTGVKAFSCSVCNASFTTNGSLTRHMATHMSMKPYKCPFCEEGFRTTVHCKKHMKRHQTVPSAVSATGETEGGDICMEEEEEHSDRNASRKSRPEVITFTEEETAQLAKIRPQESATVSEKVLVQSAAEKDRISELRDKQAELQDEPKHANCCTYCPKSFKKPSDLVRHVRIHTGEKPYKCDECGKSFTVKSTLDCHVKTHTGQKLFSCHVCSNAFSTKGSLKVHMRLHTGAKPFKCPHCELRFRTSGRRKTHMQFHYKPDPKKARKPMTRSSSEGLQPVNLLNSSSTDPNVFIMNNSVLTGQFDQNLLQPGLVGQAILPASVSAGGDLTVSLTDGSLATLEGIQLQLAANLVGPNVQISGIDAASINNITLQIDPSILQQTLQQGNLLAQQLTGEPGLAPQNSSLQTSDSTVPASVVIQPISGLSLQPTVTSANLTIGPLSEQDSVLTTNSSGTQDLTQVMTSQGLVSPSGGPHEITLTINNSSLSQVLAQAAGPTATSSSGSPQEITLTISGSRSVQHSVGPQECGSVEALYLENSSDKT

SEQ ID NO: 319055 - DNA, 4677 bp, Artificial Sequence
  derived and/or modified sequence
atgggcctgtgcggcctgctggagagatgctggctgcaccacgaccccgacggcgtgctgaccctgaacgccgagaacaccaactacgcctaccaggtgcccaacttccacaagtgcgagatctgcctgctgagcttccccaaggagagccagttccagagacacatgagagaccacgagagaaacgacaagccccacagatgcgaccagtgcccccagaccttcaacgtggagttcaacctgaccctgcacaagtgcacccacagcggcgaggaccccacctgccccgtgtgcaacaagaagttcagcagagtggccagcctgaaggcccacatcatgctgcacgagaaggaggagaacctgatctgcagcgagtgcggcgacgagttcaccctgcagagccagctggccgtgcacatggaggagcacagacaggagctggccggcaccagacagcacgcctgcaaggcctgcaagaaggagttcgagaccagcagcgagctgaaggagcacatgaagacccactacaagatcagagtgagcagcaccagaagctacaacagaaacatcgacagaagcggcttcacctacagctgcccccactgcggcaagaccttccagaagcccagccagctgaccagacacatcagaatccacaccggcgagagacccttcaagtgcagcgagtgcggcaaggccttcaaccagaagggcgccctgcagacccacatgatcaagcacaccggcgagaagccccacgcctgcgccttctgccccgccgccttcagccagaagggcaacctgcagagccacgtgcagagagtgcacagcgaggtgaagaacggccccacctacaactgcaccgagtgcagctgcgtgttcaagagcctgggcagcctgaacacccacatcagcaagatgcacatgggcggcccccagaacagcaccagcagcaccgagaccgcccacgtgctgaccgccaccctgttccagaccctgcccctgcagcagaccgaggcccaggccaccagcgccagcagccagcccagcagccaggccgtgagcgacgtgatccagcagctgctggagctgagcgagcccgcccccgtggagagcggccagagcccccagcccggccagcagctgagcatcaccgtgggcatcaaccaggacatcctgcagcaggccctggagaacagcggcctgagcagcatccccgccgccgcccaccccaacgacagctgccacgccaagaccagcgccccccacgcccagaaccccgacgtgagcagcgtgagcaacgagcagaccgaccccaccgacgccgagcaggagaaggagcaggagagccccgagaagctggacaagaaggagaagaagatgatcaagaagaagagccccttcctgcccggcagcatcagagaggagaacggcgtgagatggcacgtgtgcccctactgcgccaaggagttcagaaagcccagcgacctggtgagacacatcagaatccacacccacgagaagcccttcaagtgcccccagtgcttcagagccttcgccgtgaagagcaccctgaccgcccacatcaagacccacaccggcatcaaggccttcaagtgccagtactgcatgaagagcttcagcaccagcggcagcctgaaggtgcacatcagactgcacaccggcgtgagacccttcgcctgcccccactgcgacaagaagttcagaaccagcggccacagaaagacccacatcgccagccacttcaagcacaccgagctgagaaagatgagacaccagagaaagcccgccaaggtgagagtgggcaagaccaacatccccgtgcccgacatccccctgcaggagcccatcctgatcaccgacctgggcctgatccagcccatccccaagaaccagttcttccagagctacttcaacaacaacttcgtgaacgaggccgacagaccctacaagtgcttctactgccacagagcctacaagaagagctgccacctgaagcagcacatcagaagccacaccggcgagaagcccttcaagtgcagccagtgcggcagaggcttcgtgagcgccggcgtgctgaaggcccacatcagaacccacaccggcctgaagagcttcaagtgcctgatctgcaacggcgccttcaccaccggcggcagcctgagaagacacatgggcatccacaacgacctgagaccctacatgtgcccctactgccagaagaccttcaagaccagcctgaactgcaagaagcacatgaagacccacagatacgagctggcccagcagctgcagcagcaccagcaggccgccagcatcgacgacagcaccgtggaccagcagagcatgcaggccagcacccagatgcaggtggagatcgagagcgacgagctgccccagaccgccgaggtggtggccgccaaccccgaggccatgctggacctggagccccagcacgtggtgggcaccgaggaggccggcctgggccagcagctggccgaccagcccctggaggccgacgaggacggcttcgtggccccccaggaccccctgagaggccacgtggaccagttcgaggagcagagccccgcccagcagagcttcgagcccgccggcctgccccagggcttcaccgtgaccgacacctaccaccagcagccccagttcccccccgtgcagcagctgcaggacagcagcaccctggagagccaggccctgagcaccagcttccaccagcagagcctgctgcaggcccccagcagcgacggcatgaacgtgaccaccagactgatccaggagagcagccaggaggagctggacctgcaggcccagggcagccagttcctggaggacaacgaggaccagagcagaagaagctacagatgcgactactgcaacaagggcttcaagaagagcagccacctgaagcagcacgtgagaagccacaccggcgagaagccctacaagtgcaagctgtgcggcagaggcttcgtgagcagcggcgtgctgaagagccacgagaagacccacaccggcgtgaaggccttcagctgcagcgtgtgcaacgccagcttcaccaccaacggcagcctgaccagacacatggccacccacatgagcatgaagccctacaagtgccccttctgcgaggagggcttcagaaccaccgtgcactgcaagaagcacatgaagagacaccagaccgtgcccagcgccgtgagcgccaccggcgagaccgagggcggcgacatctgcatggaggaggaggaggagcacagcgacagaaacgccagcagaaagagcagacccgaggtgatcaccttcaccgaggaggagaccgcccagctggccaagatcagaccccaggagagcgccaccgtgagcgagaaggtgctggtgcagagcgccgccgagaaggacagaatcagcgagctgagagacaagcaggccgagctgcaggacgagcccaagcacgccaactgctgcacctactgccccaagagcttcaagaagcccagcgacctggtgagacacgtgagaatccacaccggcgagaagccctacaagtgcgacgagtgcggcaagagcttcaccgtgaagagcaccctggactgccacgtgaagacccacaccggccagaagctgttcagctgccacgtgtgcagcaacgccttcagcaccaagggcagcctgaaggtgcacatgagactgcacaccggcgccaagcccttcaagtgcccccactgcgagctgagattcagaaccagcggcagaagaaagacccacatgcagttccactacaagcccgaccccaagaaggccagaaagcccatgaccagaagcagcagcgagggcctgcagcccgtgaacctgctgaacagcagcagcaccgaccccaacgtgttcatcatgaacaacagcgtgctgaccggccagttcgaccagaacctgctgcagcccggcctggtgggccaggccatcctgcccgccagcgtgagcgccggcggcgacctgaccgtgagcctgaccgacggcagcctggccaccctggagggcatccagctgcagctggccgccaacctggtgggccccaacgtgcagatcagcggcatcgacgccgccagcatcaacaacatcaccctgcagatcgaccccagcatcctgcagcagaccctgcagcagggcaacctgctggcccagcagctgaccggcgagcccggcctggccccccagaacagcagcctgcagaccagcgacagcaccgtgcccgccagcgtggtgatccagcccatcagcggcctgagcctgcagcccaccgtgaccagcgccaacctgaccatcggccccctgagcgagcaggacagcgtgctgaccaccaacagcagcggcacccaggacctgacccaggtgatgaccagccagggcctggtgagccccagcggcggcccccacgagatcaccctgaccatcaacaacagcagcctgagccaggtgctggcccaggccgccggccccaccgccaccagcagcagcggcagcccccaggagatcaccctgaccatcagcggcagcagaagcgtgcagcacagcgtgggcccccaggagtgcggcagcgtggaggccctgtacctggagaacagcagcgacaagacctag

SEQ ID NO: 319056 - DNA, 4677 bp, Artificial Sequence
  derived and/or modified sequence
atggggctctgtggcttgcttgagaggtgctggctgcatcatgatcctgatggcgttctaacgctaaacgcagaaaacactaattacgcttaccaggtgcctaacttccacaaatgcgaaatctgcctgctctccttccctaaagagagccaatttcagaggcatatgcgggaccacgaaagaaacgacaaaccacatcgctgtgatcaatgccctcagactttcaatgtggagttcaacctcactcttcacaagtgcacgcactcaggcgaagatccaacatgcccagtttgcaataagaagttctctcgggtggcatcgcttaaagcgcacataatgcttcatgagaaagaggagaacctgatctgttcagagtgcggcgatgagttcacgctacagagccagctagccgtccatatggaagagcaccgacaggagctggcaggcacgagacagcatgcgtgcaaagcatgtaagaaggagttcgaaacttcttccgagttaaaagagcacatgaaaacccactacaagattcgagtgagctctactcgctcctacaaccgtaatatcgatagatcaggattcacctactcttgtcctcactgcggtaagacgtttcagaagccttcacagttgactaggcatattcgcatccacactggggagcgtcctttcaagtgctcagagtgcgggaaagccttcaaccagaagggcgctctccagacccatatgataaaacataccggagagaagccccatgcctgcgccttttgcccggccgccttcagtcagaaaggcaacctgcagagccatgtccagcgtgtgcactccgaggtgaagaacggacctacatataattgcacagagtgctcctgtgtctttaaatctctgggctctttaaatactcatatctctaagatgcacatggggggccctcagaatagtacatcatcaacggaaaccgcgcatgtgcttaccgcaacattattccagactctgcctctgcagcagactgaagcacaagccaccagcgccagctctcaaccctcctcccaggccgtcagcgacgttatacagcaactcttagaactgagtgagccagccccagtagagagtggccagagccctcagcctggccagcaactgagcatcaccgtgggaatcaatcaggacatcctgcagcaggcgctggaaaacagcgggttatcatctatcccggccgccgcacacccgaacgattcttgccacgcgaaaacctctgcaccacatgctcagaacccagacgtcagctcagtttccaacgaacagactgatcctactgatgcagagcaggaaaaagagcaagagtcccctgagaagctcgacaagaaggagaaaaagatgattaagaagaaaagcccattcctgcccgggtccatccgtgaggagaatggcgtgaggtggcatgtctgcccttactgcgctaaagagtttcgcaagccaagcgacctggtacgacatatccggattcatacacacgaaaaaccatttaaatgccctcagtgttttagagcattcgcagtgaagtccacactaacagctcacatcaagacacatactgggatcaaagcattcaaatgtcaatactgcatgaagagcttcagcacttcgggctccttaaaggtccacatacgactgcacacaggcgttaggcccttcgcctgcccccattgtgacaaaaagtttcgtacaagcgggcatcgtaagacccatatcgcgagccacttcaaacacacggagctgcggaaaatgcgacaccaacgcaagccagccaaggttagggtgggcaagactaatatcccagtccccgatatacccctgcaggagccaatactgatcactgatttgggtctgatacagcccatacctaaaaatcagttcttccaaagctactttaataacaatttcgtgaacgaggctgatagaccatataagtgcttctactgtcaccgggcgtacaaaaagtcttgccacctaaagcagcacatacgtagccacacgggggaaaagccctttaaatgttctcagtgcggccgcggatttgtatccgctggcgttctcaaggctcatatacggacacacaccggcctgaaatcctttaagtgcttaatttgcaatggcgccttcacaacagggggatcgctgcgcagacacatgggaatccacaacgacctaagaccgtatatgtgcccttactgccagaagaccttcaaaacttcccttaactgcaaaaagcatatgaagacccaccgttatgaactggcacaacaattgcagcagcaccagcaagcagcctctattgacgatagtaccgtcgaccagcaatccatgcaggcctctacacagatgcaagttgagattgagagtgatgaacttccacagactgccgaggtggtagctgcgaatccagaggcaatgctggacctggaaccgcaacatgtggtcggtaccgaggaggccggactaggccagcagttggctgatcagccactggaagcggatgaagacgggttcgtggctccccaggaccctctgaggggacatgttgatcagtttgaagagcagagtcctgcccagcaatctttcgaacctgcgggtctgccacagggttttacagtcaccgacacctaccatcagcaaccacagttccctcccgtgcagcagctgcaagactctagtacacttgagtctcaagccctttcaacctctttccatcagcagtctttgctgcaggcacctagtagcgacgggatgaatgtgacaactagactgatacaggaatcttcccaggaggaactggatctccaggcacaggggagtcagttcctggaggacaatgaagaccaatctcgccggagctatcggtgcgactattgcaacaaaggctttaagaaatcgtcacacctgaagcagcacgttagaagtcatacaggcgagaagccatacaaatgcaaactttgtgggcgcggatttgtctcaagcggcgtcctgaagtcgcatgaaaaaacccacaccggggtcaaggccttctcatgtagcgtgtgtaacgcctcatttactacaaatgggtcactcacacggcacatggcaacgcacatgtctatgaagccttataagtgtcccttctgcgaagaagggttccgcacaactgtgcattgtaaaaagcatatgaaaagacatcagaccgtgccatccgctgtttcagcaaccggtgaaaccgagggaggggacatctgcatggaggaggaggaggagcactcggatcgcaatgcaagcaggaaaagtaggcctgaggtgataaccttcacagaggaggagactgcccagctcgccaagatcagaccacaggagtccgccaccgtctccgaaaaggtcctggttcagtcggccgcagaaaaggataggatctctgagctgcgagacaaacaagccgaactccaagacgagccgaagcacgcaaactgttgtacctactgcccaaaatctttcaagaagccctctgatctggtccgtcatgtgagaatccacacgggagagaagccttataagtgtgatgagtgtgggaagagtttcaccgttaagtccaccttggattgccacgtcaaaacgcacaccggtcagaaactcttctcttgccacgtgtgctctaacgctttctccaccaagggatctctgaaggtacacatgcggctgcacaccggcgccaagcccttcaagtgtccacactgtgagctgagatttcgcacgagtggcagacggaagacccacatgcagtttcattacaagcccgatccgaaaaaggccagaaaacccatgacacgctcctcctctgagggactacagcctgtgaatctgcttaatagctcttccaccgaccctaatgttttcattatgaataatagtgtcctcactggccagtttgatcagaacctgctccagccgggtctcgtgggtcaggccatcttacctgcatctgtgagcgccgggggggatctgactgttagcctaaccgacggttcactggcgactctcgaaggaattcagctgcaactggctgcaaacttggtggggcccaatgttcagatcagcggcatcgatgccgccagcattaacaatatcaccctacagatcgacccctccatactccagcagactttacagcaaggaaatctgctggcacagcagctgacaggagaacccgggcttgccccccaaaactcttctctccagacatccgactccacggtacctgcaagcgttgtgatccagcctatatctggactgtccttgcagcctacagttacttccgcgaacctcacaattggccctctgtccgagcaggacagcgtgctcacaacaaactcctccggaacccaagatctgacccaagttatgacatcacaggggctggtctccccctcaggcggccctcacgagataaccctgaccatcaacaattcttccctgagccaagtactggcgcaagcagctggcccaactgccacctcttcatccgggtcccctcaggaaatcactctcaccattagcggatcacgatctgtacagcactctgtgggacctcaggagtgtggtagtgtggaagcactatatctggagaattccagcgataagacttag

SEQ ID NO: 319057 - DNA, 4677 bp, Artificial Sequence
  derived and/or modified sequence
atgggcctctgcggactgctggagagatgctggctccaccatgacccagatggggtgctgaccctgaacgcggaaaacactaactacgcctaccaggtgccaaacttccacaagtgtgaaatctgcctgttatcatttcctaaagagtcacagttccaacgccacatgcgggaccacgagcggaacgataagccacatcgttgtgaccagtgcccccagacgttcaatgtggagtttaacctaacgcttcataagtgtactcattcgggagaggacccaacctgccccgtgtgtaacaagaagtttagccgcgtggcttcgttaaaggcacacataatgttgcacgagaaggaggagaatttgatttgttcagaatgcggcgacgagttcactctccaatcgcagctcgcggtccatatggaggaacataggcaagagctggcaggcacccgccagcacgcatgtaaagcatgcaagaaggaatttgagacaagttccgagttaaaagagcacatgaaaacccattacaagattagagtatcttccacccgatcttacaatcggaacatcgatcgtagtggcttcacctactcgtgtccccattgcggcaagacattccagaaacccagccaactgacaagacacataagaatccacaccggcgagagaccctttaaatgcagtgagtgcggcaaagcattcaatcagaaaggagccttacagacgcatatgattaagcacaccggggaaaagcctcacgcctgcgccttctgcccggcagccttttcacagaaggggaacctccagtcacatgtccaacgagtccacagcgaggtcaagaacggcccaacatacaattgtacagaatgttcctgtgtattcaagtcgctggggagtttaaatacgcatatcagcaagatgcatatgggggggccacagaactctacctcctccaccgagacagctcacgtcttgaccgcaacattatttcagactttaccactgcagcagacagaggcccaggcaaccagcgccagcagccaaccgtcttcacaggccgtgtccgacgtgattcagcaactattagaattatctgaaccagcccctgtggagtctgggcagtccccgcagcccggccagcagcttagcatcacggtcggcattaatcaggatatcctgcagcaggcccttgagaattctggtctcagcagcatccctgccgccgcccacccaaatgattcctgccacgccaagacgtccgctccccatgcacaaaatccagatgtgtctagcgtatctaacgaacagacggaccccaccgatgcagagcaggaaaaggaacaggagtcccccgagaaactggataaaaaggagaagaagatgatcaagaagaaaagccccttcctacctggcagcatacgtgaggagaatggcgtgcggtggcatgtgtgcccgtactgtgccaaagagttcagaaaaccctcagacctggtacgacacattcgcatccatacccatgaaaagcccttcaaatgtcctcagtgttttcgcgcctttgcagtgaaaagtacactaaccgcgcatattaaaacccacacagggatcaaagcgtttaaatgtcaatactgcatgaagtcctttagcacttcaggctccttgaaagttcatatcaggctacacaccggggtccgcccatttgcatgcccacactgtgacaaaaaattcagaactagcggacatcgcaaaactcacatagctagtcattttaagcatacagagctcagaaagatgaggcatcagcgaaagcctgcgaaggtgagagtcgggaaaactaacatccccgtgccagatattccgctgcaggagcctatcttaatcacagacttgggacttatacaacccattcctaaaaatcagttttttcaatcttacttcaacaataactttgtcaatgaagcagatcgtccatacaaatgtttctattgccaccgggcttataaaaaaagctgtcacctgaaacagcatatccggtcccatactggagagaagccattcaagtgctctcagtgcggacgggggtttgtcagcgcaggcgtcctgaaggcacatatcaggacgcacacaggccttaagtcattcaaatgtctgatctgcaacggggcattcacgaccgggggctcgttgcgtcgtcacatgggtattcacaacgacctgcggccatacatgtgtccgtactgtcaaaagacatttaagacctccctgaactgcaaaaaacacatgaaaacgcacaggtacgaactggctcagcagctccaacagcatcagcaagctgccagtatagatgactctaccgtggatcagcagtccatgcaagcctccacacagatgcaggtggagatcgagtccgacgaactgcctcagacagccgaagtggtcgctgccaacccagaggccatgctggacttggaaccacagcatgtcgttggtacagaagaagccggcctgggacagcaactggccgaccagccccttgaggcagacgaagatgggtttgtggccccccaggatcccttgagaggccacgttgatcaatttgaagaacaatcccctgcacagcagtccttcgagcctgccgggctgccccagggcttcacggtgactgacacataccatcagcagcctcaattccctccagtgcaacaactccaagactcatctactctcgagagccaagcccttagcacttcttttcatcagcagagcctcttacaggcaccctcaagcgacgggatgaacgtcacgactcgccttatccaggaatcttctcaggaggagctcgatctgcaggctcaaggaagtcagttcctggaggataatgaagaccaaagcagacgcagctacaggtgtgattactgcaataagggcttcaaaaagagttcccatcttaaacagcacgtgcgatcgcacactggcgagaagccgtataagtgcaaattatgtgggcggggatttgtcagtagtggggtgctgaagagccatgaaaagacccatactggcgtgaaggctttctcctgtagtgtttgcaatgctagcttcacaacgaatggtagcctgacacggcatatggctactcatatgtccatgaaaccctataagtgccccttctgtgaagaagggtttcgcactacagtccactgtaagaaacatatgaaacgccatcagactgttccatcagctgtctcagccacaggggagaccgaagggggcgacatttgcatggaggaggaagaagaacactccgaccgaaatgcaagtcggaagagccggccagaggtcattacattcactgaagaggagacagcacagctggctaaaatcaggccacaggagtctgcaaccgtgtcggaaaaagtcctggtccagagtgctgccgagaaggataggattagcgagctgagagataaacaggctgagctacaggatgaacctaaacacgcgaactgctgcacttattgccctaagtcctttaaaaaaccctccgatctggttcgccacgtaaggatccatactggagagaagccctacaagtgtgatgagtgcggtaagtcgtttaccgtcaagtctaccctggactgtcatgtgaagactcacaccggtcaaaaactgtttagctgccacgtgtgctcgaatgccttctctaccaagggttcgcttaaggtgcacatgcgcctgcataccggagcaaaacccttcaagtgcccccactgtgaactaaggttccgtacatcaggaagacgtaagactcacatgcagtttcattacaaacccgatcccaagaaagcaaggaagcccatgacccggagctccagcgagggactgcagcctgttaatctgctgaattcttcgtcaactgatcccaatgtgttcatcatgaataacagcgttctgactggacagtttgaccagaacttgctgcagcctgggctcgtcggtcaggcgatactgcctgcctctgtgagcgccggcggtgacctgacagtgagtctgaccgatggatccctggctacattagaagggattcaacttcaactggcggctaacctagtgggacctaacgtgcagatctccggcatcgatgccgcctctatcaataacatcactctgcagatcgatccctcgattttgcaacagaccctgcagcaaggaaacctcctcgcccagcagttgaccggcgagccaggtctcgcaccacagaactcctccctgcaaacatcagacagcaccgtgcctgcgagtgttgtgattcagcccatctcaggcctttccttacagcctaccgtaacatccgcaaatttaaccattggaccactgagcgagcaggacagcgtacttactaccaactcctcgggaactcaggacttaacccaggtgatgacatcacaggggctggtgtcaccttccggcggccctcatgaaatcacgctcacaataaataactcctcactgtcacaagtattagcccaggccgccggtccaaccgccaccagttcaagcgggagtcctcaagagatcacattgaccattagcggttctcggagtgtgcaacacagcgtgggacctcaggaatgtgggtccgtagaagccctgtatctggagaattcgagcgataaaacttag

SEQ ID NO: 319058 - DNA, 4677 bp, Artificial Sequence
  derived and/or modified sequence
atgggcctgtgtggcctgctggagcgctgctggctgcaccacgaccctgatggagtgctgaccctgaatgctgagaacaccaactatgcctaccaggtgcccaacttccacaagtgtgagatctgcctgctgtccttccccaaggagagccagttccagaggcacatgagggaccatgaaagaaatgacaagccccaccgctgtgaccagtgcccccagaccttcaacgtggagttcaacctgaccctgcacaagtgcacccacagcggggaggaccccacctgccctgtgtgcaacaagaagttcagccgggtggccagcctgaaggcccacatcatgctgcacgagaaggaggagaacctgatctgcagtgaatgtggagatgagttcaccctgcagagccagctggccgtgcacatggaggagcaccggcaggagctggccggcacccggcagcacgcctgcaaggcctgcaagaaggagtttgagaccagcagcgagctgaaggagcacatgaagacccactacaagatccgggtgagcagcaccaggagctacaacagaaacatcgacagaagtggcttcacctacagctgcccccactgtgggaagaccttccagaagcccagccagctgaccaggcacatccgcatccacactggagagcggcccttcaagtgcagtgaatgtgggaaggccttcaaccagaagggggccctgcagacccacatgatcaagcacactggagagaagccccacgcctgtgccttctgcccagctgccttcagccagaagggcaacctgcagagccacgtgcagagggtgcacagcgaggtgaagaatggccccacctacaactgcacagaatgttcctgtgtgttcaagagcctgggcagcctgaacacccacatcagcaagatgcacatgggcggcccccagaacagcaccagcagcacagaaacagcccacgtgctgacagccaccctcttccagaccctgcccctgcagcagacagaggcccaggccaccagcgccagcagccagcccagcagccaggccgtgtctgatgtgatccagcagctgctggagctgtctgagcccgcccctgtggagagcggccagagcccccagcccggccagcagctgagcatcaccgtgggcatcaaccaggacatcctgcagcaggccctggagaacagcggcctgagcagcatcccagctgctgcccaccccaatgacagctgccacgccaagaccagcgcccctcatgcccagaacccagatgtgtcctctgtgtccaatgagcagacagaccccacagatgctgagcaggagaaggagcaggagagccctgagaagctggacaagaaggagaagaagatgatcaagaagaagagccccttcctgcccggcagcatccgggaggagaatggagtgcgctggcacgtgtgcccctactgtgccaaggagttcaggaagcccagcgacctggtgcgccacatccgcatccacacccatgagaagcccttcaagtgcccccagtgcttccgggcctttgctgtgaagagcaccctgacagcccacatcaagacccacacaggcatcaaggccttcaagtgccagtactgcatgaagagcttcagcaccagcggcagcctgaaggtgcacatccggctgcacactggagtgcggccctttgcctgcccccactgtgacaagaagttccgcaccagcggccacaggaagacccacatcgccagccacttcaagcacacagagctgaggaagatgaggcaccagaggaagccagccaaggtgcgggtgggcaagaccaacatccctgtgcctgacatccccctgcaggagcccatcctgatcacagacctgggcctcatccagcccatccccaagaaccagttcttccagagctacttcaacaacaactttgtgaatgaagctgaccggccctacaagtgcttctactgccaccgggcctacaagaagagctgccacctgaagcagcacatccgcagccacactggagagaagcccttcaagtgcagccagtgtggccggggctttgtgtctgctggggtgctgaaggcccacatccgcacccacacaggcctgaagagcttcaagtgcctgatctgcaatggagccttcaccaccggcggcagcctgcggcggcacatgggcatccacaatgacctgcggccctacatgtgcccctactgccagaagaccttcaagaccagcctgaactgcaagaagcacatgaagacccacagatatgagctggcccagcagctgcagcagcaccagcaggccgccagcattgatgacagcacagtggaccagcagagcatgcaggccagcacccagatgcaggtggagattgaaagtgatgagctgccccagacagctgaggtggtggccgccaaccctgaggccatgctggacctggagccccagcacgtggtgggcacagaggaggccggcctgggccagcagctggccgaccagcccctggaggctgatgaagatggctttgtggccccccaggaccccctgcggggccacgtggaccagtttgaggagcagagccctgcccagcagagctttgagcccgccggcctgccccagggcttcaccgtgacagacacctaccaccagcagccccagtttcctcctgtgcagcagctgcaggacagcagcaccctggagagccaggccctgagcaccagcttccaccagcagagcctgctgcaggcccccagcagtgatggcatgaatgtgaccaccaggctcatccaggagagcagccaggaggagctggacctgcaggcccagggcagccagttcctggaggacaatgaagaccagagccgccgcagctaccgctgtgactactgcaacaagggcttcaagaagagcagccacctgaagcagcacgtgcgcagccacactggagagaagccctacaagtgcaagctgtgtggccggggctttgtgtcctctggagtgctgaagagccatgagaagacccacactggagtgaaggccttcagctgcagcgtgtgcaatgccagcttcaccaccaacggcagcctgaccaggcacatggccacccacatgtccatgaagccctacaagtgccccttctgtgaggagggcttccgcaccaccgtgcactgcaagaagcacatgaagaggcaccagacagtgcccagcgctgtgtctgccactggagaaacagagggcggggacatctgcatggaggaggaggaggagcacagcgacagaaatgccagcaggaagagcaggcctgaggtgatcaccttcacagaggaggagacagcccagctggccaagatccggccccaggagagcgccaccgtgtctgagaaggtgctggtgcagagcgctgctgagaaggaccgcatcagcgagctgcgggacaagcaggccgagctgcaggatgagcccaagcacgccaactgctgcacctactgccccaagagcttcaagaagcccagcgacctggtgagacatgtgcgcatccacactggagagaagccctacaagtgtgatgaatgtgggaagagcttcaccgtgaagagcaccctggactgccacgtgaagacccacacaggccagaagctgttcagctgccacgtgtgcagcaatgccttcagcaccaagggcagcctgaaggtgcacatgaggctgcacactggagccaagcccttcaagtgcccccactgtgagctgcgcttccgcaccagcggccgcaggaagacccacatgcagttccactacaagccagaccccaagaaggccaggaagcccatgaccaggagcagcagcgagggcctgcagcctgtgaacctgctgaacagcagcagcacagaccccaacgtgttcatcatgaacaacagcgtgctgaccggccagtttgaccagaacctgctgcagcccggcctggtgggccaggccatcctgcctgcctctgtgtctgctggaggagacctgactgtgtccctgacagatggcagcctggccaccctggagggcatccagctgcagctggccgccaacctggtgggccccaacgtgcagatcagcggcattgatgctgccagcatcaacaacatcaccctgcagattgaccccagcatcctgcagcagaccctgcagcagggcaacctgctggcccagcagctgaccggggagcccggcctggccccccagaacagcagcctgcagaccagtgacagcacagtgcctgcctctgtggtgatccagcccatcagcggcctgagcctgcagcccaccgtgaccagcgccaacctgaccatcggccccctgtctgagcaggacagcgtgctgaccaccaacagcagcggcacccaggacctgacccaggtgatgaccagccagggcctggtgagccccagcggcggcccccatgagatcaccctgaccatcaacaacagcagcctgagccaggtgctggcccaggccgccggccccacagccaccagcagcagcggcagcccccaggagatcaccctgaccatcagcggcagccgctctgtgcagcacagcgtgggcccccaggagtgtggctctgtggaggccctgtacctggagaacagcagtgacaagacctag

SEQ ID NO: 319059 - DNA, 4677 bp, Artificial Sequence
  derived and/or modified sequence
atgggcctgtgcggcctgctggagcggtgctggctgcaccacgacccagacggggtcctgacacttaacgccgaaaatacaaattatgcctatcaagtaccaaactttcacaagtgcgaaatttgcctgttaagcttccctaaggagagccagttccaaagacacatgcgtgatcacgagagaaatgataaaccacacagatgcgaccaatgtccccagaccttcaatgtggagtttaaccttactctgcataagtgcacccatagcggggaggatccgacctgtcccgtatgcaataagaagttctctcgcgtagcaagcctgaaggcacatatcatgctgcatgagaaagaggaaaatttaatttgttctgaatgtggcgatgagttcacgctccaatcccagctggccgtccacatggaagagcatagacaggagctcgccggcacgaggcagcatgcctgtaaggcatgtaagaaggagttcgagacttcttccgaactgaaggaacatatgaaaacgcactacaagataagggtgtcatctactcggagttacaatcgaaatattgaccggtctggctttacatattcatgtccacactgtgggaaaacttttcagaaaccctcacagcttacacggcatattcggatccacaccggcgaacggcctttcaaatgctccgaatgtggcaaggcgttcaaccagaagggggccctccagacgcacatgattaagcacacaggagaaaaaccccatgcctgtgctttctgtccggcagcattcagtcagaagggcaacctgcagagtcacgtgcagcgggtccacagtgaggtcaaaaacgggccaacttataactgcactgagtgttcttgtgtctttaagagtctgggctctcttaacacgcatataagcaagatgcacatgggaggcccccagaactctaccagctccacggagaccgcacatgtgttaaccgctactttattccaaacactgcccctgcaacaaacagaagctcaagcaacttccgcctcaagtcagccctcctcccaagccgtcagcgacgtgatccaacagctgctcgagctcagcgagcccgcacccgtggagtcgggacaatctccacagccaggtcaacagcttagcattacagtgggaatcaaccaggacattttgcagcaggccctggagaatagcggactgtctagcattcccgcagccgcacacccaaatgacagctgccatgctaaaacctcagccccacatgcccagaacccggacgtgagcagcgtctccaacgagcagaccgaccccactgatgctgaacaggagaaggagcaagaatcccccgagaaactggataaaaaggaaaagaagatgattaagaagaagagcccttttttacccggatccatacgggaggaaaatggggtgcgttggcacgtgtgtccttactgtgcgaaggaattcagaaagcccagcgatctagttcgacacatccggatacatacccacgaaaagccctttaaatgcccacagtgtttcagggcatttgcagtcaaaagtactctaaccgcacatatcaaaacgcacaccggaattaaagccttcaagtgtcagtactgtatgaagagtttttcaactagtggctccctgaaagtgcacatacggctgcacacgggagtacgcccctttgcttgccctcattgcgacaagaaattccgcacctcaggccatcgcaaaacccacatagcttctcattttaaacacacagagctacgaaaaatgcgtcaccagcgcaagcctgcaaaagtgcgggtgggaaaaaccaacatccctgtccctgatattccactgcaagaacctatcctcatcacagacctggggctgatccagcccatcccaaagaaccagttctttcagagttattttaataacaattttgtcaacgaggccgacaggccctataagtgtttttattgtcacagggcctacaagaagtcctgtcacctcaagcagcacattagaagtcacacgggtgagaagccgtttaagtgttctcaatgcggaagaggatttgtgtccgcgggggtgctcaaggcccatattcgcacgcatacggggctgaagagcttcaaatgcttgatctgcaatggagcttttaccaccggtggttcactgaggagacacatgggtatccacaatgatttaagaccttatatgtgcccatattgtcagaagaccttcaaaacctctctgaattgcaagaaacatatgaaaacacaccggtacgaactggcccagcagctgcagcaacatcagcaggccgcatctatagacgatagcaccgtggaccagcagtccatgcaggcgtcaacccagatgcaggtcgagatcgaaagcgatgaactgccgcagactgccgaagttgtggccgccaatccagaagcaatgctggatctggagcctcagcacgtggtgggcaccgaggaggccggactgggacagcagctagccgatcaacccctggaagccgacgaggatggatttgtagccccccaggatcccctccgcggacacgttgaccagttcgaagaacagtcacccgcccaacagtctttcgaacctgccgggcttccacaaggctttacagtcacagacacctatcatcaacagccacaattccctccggtccagcaactgcaggactcttccacactcgagtcccaagcgctgtcaacttcttttcaccagcagtcactgctccaggccccttcatctgacggaatgaacgtaacaaccaggcttatccaagagtcttcacaggaagaattggatcttcaagcacaaggctcccaatttctggaggataatgaggaccagtcccgccgctcatacaggtgtgactattgcaataagggcttcaaaaaaagctcccatctgaaacagcacgtgcgctcccatacaggagaaaaaccctataaatgtaagctatgcggacgtggatttgtatcctcaggagtgctgaaaagtcacgagaagactcacaccggggtaaaggcctttagctgcagtgtgtgtaatgcttcttttactacgaatggatccctcacccgccacatggccacacatatgagcatgaagccctacaagtgtcctttctgtgaggaggggttccgcacaaccgtgcattgtaaaaaacacatgaaacgtcaccagaccgtgcccagtgctgtgtccgcaacgggagaaaccgaggggggcgatatatgtatggaagaagaggaggagcactccgatagaaacgcctctcggaagtcccgcccagaggtcatcacgttcactgaggaagaaaccgcccagctggctaaaattaggccgcaagagagcgccaccgtgtcggaaaaggtgctcgtgcaatctgccgcagaaaaggataggatcagtgaattgcgtgacaagcaggctgagctgcaggatgaacccaagcacgcaaactgttgtacatactgccccaagtcgttcaaaaagccctctgacttggtaaggcacgtgagaatccatactggagagaagccttataagtgcgacgagtgtggaaaatccttcactgtcaagtcgaccctggactgccatgtaaaaacccataccggtcagaagctctttagctgccacgtgtgctctaatgcattctctaccaaggggtccctcaaagtgcatatgagactccataccggcgctaagccgtttaaatgcccgcattgcgagctgcgattccggacttcaggacgtcggaagacacacatgcagttccactacaagcccgaccctaagaaggccagaaagcctatgacccgaagctcgtccgaggggcttcagccagtaaatttgctgaacagttcttccacagatcctaatgtattcatcatgaacaacagcgtcctgaccgggcagtttgatcagaacctccttcagccagggctggtcggacaggcaatcctcccagcaagtgtgtccgctggtggcgatttgacggtcagcttgactgacggctcactggctacactggagggaatccagctacagctcgccgcaaatctggtcgggcccaatgtgcaaatttcgggcattgacgcagcaagcatcaacaatataaccctgcagatcgacccctcaatcttacaacagaccctgcaacaaggaaatctgttagctcagcagctcacaggggaaccgggactggcaccgcagaactcgtctctgcagaccagcgatagcaccgttcccgcatccgtggtgattcagccaatcagtggactaagcctccagcccactgtgacctctgctaacctgaccattggtcccctaagcgagcaggactccgtgcttacgacaaactccagcgggacccaggatctgacccaggtgatgacaagtcaggggctggtgtcgcctagtgggggtccccacgagatcactctaacaatcaacaacagttctctgtcacaagtacttgcccaggccgccggtcctactgctacctcatcaagcggatcaccacaggagattactctgacgatctcagggtctcggtctgtccagcattctgtaggcccacaggaatgtggaagcgtggaggctctatatctggaaaacagctccgacaaaacctag

SEQ ID NO: 319060 - DNA, 4677 bp, Artificial Sequence
  derived and/or modified sequence
atgggcctgtgcggcctgctggagcggtgctggctgcaccacgacccagacggggtactgactctgaacgctgaaaatactaattacgcttaccaggtgccaaattttcacaagtgcgagatctgtctgctaagcttcccaaaagaatcacagtttcagcgccatatgcgggaccatgaacgcaatgacaagccacacagatgcgatcagtgcccccagactttcaatgtggaatttaacctgacactacataagtgcacgcacagtggcgaagaccccacgtgccctgtgtgtaataagaaatttagccgcgttgcatccctgaaggcgcacattatgctccatgagaaggaggagaacttaatctgttcagaatgcggggatgaatttaccctccagtcgcaacttgccgttcatatggaggaacacagacaggaattggctgggacgagacagcacgcttgtaaagcctgtaaaaaggaattcgaaacgtcgtcagagctgaaagaacatatgaagacgcattacaagatcagagtgtcatccactaggtcttacaaccgcaatattgaccgctcaggcttcacctacagttgcccacactgcgggaaaaccttccagaagccatcgcagctcactcggcacatacgcatccatacaggagagagacctttcaagtgctcagagtgcggcaaagcttttaatcagaaaggggccctccagacccacatgatcaaacacacgggagagaaaccgcacgcatgcgcattctgtcctgcagcctttagtcagaaaggaaacctccagtcccacgtgcagagggtgcactccgaagtaaaaaatggtcccacatacaactgcacagagtgctcatgtgtattcaagtcgctgggctctctcaatacacacatctccaagatgcacatgggcggcccccagaactcaactagctctaccgagacggctcatgtgctgaccgcaactctcttccagaccctgccactgcaacagaccgaggctcaggcaacctctgcctctagccagcccagctcccaagccgttagtgacgtgattcagcaactgctggaattgtcagaacccgctccggtcgaaagtggtcaatcccctcaaccaggtcagcagttaagtataacggttggtattaatcaggatattctacagcaagcccttgaaaactctgggctgtcaagcatcccagccgcagctcaccctaatgattcatgtcacgctaaaacttctgcacctcatgcccagaaccctgacgtatcttctgttagcaatgaacaaaccgatccaaccgacgcagagcaagaaaaggagcaggagtctcctgaaaagctggataaaaaggagaaaaagatgataaagaaaaaatcaccattccttcctggctctatccgcgaggagaatggggtcagatggcacgtgtgcccttattgcgctaaggaatttcgcaagccttctgacctcgtgaggcatatcagaatccacactcacgaaaaacctttcaaatgcccccagtgttttagggcctttgctgtcaaatctacactaactgctcacatcaaaacacacaccggaatcaaggcctttaaatgtcagtattgcatgaagtcttttagcacctccgggtccttgaaagtccacattcggttacacacgggggtgcggcctttcgcatgtccacattgtgacaagaaattcaggactagtggtcacagaaagacccatatagcctcgcacttcaagcatacagagcttagaaaaatgcgccaccagagaaagcctgcgaaagtacgggtcggcaaaaccaacatcccggtgcccgatattccattgcaggagcctattctgattacagacctgggtctgattcagccaattccaaaaaaccagttcttccagtcctactttaataacaatttcgttaatgaggcagaccggccatataaatgcttctattgccacagggcatacaagaagagttgccatctgaaacagcacatccgaagccataccggagagaaaccctttaagtgctcccagtgcggacgggggttcgtttccgctggcgtgctcaaggcccacattcggacacacactggtctgaaatcttttaagtgcctgatctgtaatggagcctttacaaccggcggaagtctgaggaggcacatgggtatacataatgatctgcgtccgtacatgtgtccatactgtcaaaagacattcaagacgtcactcaactgtaaaaaacacatgaaaacccaccgttacgagcttgcccagcagctccagcagcatcagcaggccgcctcaattgatgactctactgtggaccaacagtccatgcaagctagtacccagatgcaggttgagattgagagtgatgagctccctcagactgctgaggtagtggccgcaaaccccgaggccatgctggatttggagccccagcacgtcgtgggaaccgaagaggcgggactgggccagcagctcgctgatcagccactggaggctgatgaggatggtttcgtggctccccaggatcccctcagaggacatgtagaccagttcgaggagcagtcacccgcccagcagagcttcgagcccgctggcctcccacaagggtttacagtgaccgacacgtatcatcaacagccgcaattccccccggttcagcaactacaggactctagcacattggagagtcaggctctcagcacctcatttcatcaacagagtctcctccaggcccctagctccgacggcatgaacgttacaacacggctgatccaagagagcagccaggaggagctggacctgcaagctcaaggcagtcagttcctcgaggataacgaggatcagtcacggcgaagctacagatgtgactattgcaataagggctttaagaagagcagccacttgaagcagcacgtacgctcccatactggtgagaagccatacaaatgcaagctgtgtggtagaggttttgtttctagcggagttttaaagtcccatgagaagacacatacaggagtaaaagcattttcctgtagtgtatgcaatgcatcttttaccaccaatgggagtcttaccagacatatggccactcacatgtctatgaagccctataaatgccctttctgcgaagaaggttttaggaccactgtacactgtaagaaacacatgaagaggcatcaaacagtgccctctgccgtaagtgccacaggtgagaccgaagggggcgacatatgtatggaagaggaagaagaacattccgatcgaaatgcatccaggaaaagtcgcccagaagttataactttcaccgaagaagagaccgctcaactggcaaagattagacctcaagagagtgcaaccgtaagtgagaaggtgctagtgcagtcagccgcagagaaggaccgcatctccgaactgagagataagcaagccgaacttcaggatgaacccaagcacgccaactgctgcacatattgtccaaagagttttaagaaaccttcagatctggtgaggcacgtgcgcatacacacgggggagaagccatataaatgcgacgagtgcggtaagtcctttaccgtgaagtctactttggactgccacgtgaagactcacactggccagaagctgttctcctgccatgtgtgcagtaacgccttttcaacaaaggggtccctgaaagtgcatatgcgcctgcataccggcgccaagcccttcaaatgcccccactgcgagctcagatttcgtacctccggcaggagaaaaacccacatgcagtttcattacaaacccgacccgaagaaggcccggaagcctatgaccagaagttccagcgagggcttgcagccggtgaacttgctgaattcgtcctccaccgaccctaatgtctttattatgaacaattccgtcctgactgggcagttcgaccagaacctactccagcctggcttggtcgggcaagcgattctgcctgcctctgtttctgccggcggcgaccttacagtgtctcttacagatggatccctggctacactcgagggaattcagcttcagctcgccgccaatctggtcggcccgaacgtgcagattagcggcatcgacgccgcttccataaacaacatcaccttgcagatcgacccctctatcctgcaacagacgctccagcagggaaatctgcttgcccagcagctgaccggcgaacccggcctcgcaccacagaattcctccctgcagacttcagattcaacagtaccagcaagtgtcgttattcagcccatctccggactgtcactgcaacccactgtgaccagcgcaaacctgaccattggccctctttctgagcaggacagcgtgctgactactaacagctctgggacccaggatctcacgcaggtgatgactagccaagggctggtgagcccaagcgggggcccacacgagatcactctgactattaataactccagcctctcacaggttctcgcacaggctgctggtcctaccgcaacctcctcttccggatctccacaggagatcacccttacgatttctggctccagatctgtgcagcacagtgttggaccccaggagtgcggttccgtagaggctctctatctggagaattcctccgataagacttag

SEQ ID NO: 319061 - DNA, 4677 bp, Artificial Sequence
  derived and/or modified sequence
atgggcctgtgcggcttgctagaacgctgctggctacatcacgatcccgatggcgttctaaccttgaacgctgagaacaccaactatgcttaccaggttccaaactttcataaatgtgagatctgcctactcagcttccccaaagagtcgcagttccagcggcatatgcgcgatcacgagaggaacgataagccccaccgatgtgatcagtgccctcagacatttaacgtagagttcaacctaacgctccataaatgcacacattcaggagaggatccgacctgcccagtctgtaacaagaagttcagccgggtagcctccctcaaggcacatatcatgcttcatgaaaaagaggagaatcttatctgctccgagtgcggagatgaattcaccctccagagccagttagccgtgcacatggaggagcatagacaggagctggccggtacccgacagcatgcttgtaaggcatgtaagaaggagtttgagacaagcagcgagctgaaggaacatatgaaaactcactacaagataagggtgtccagcacccgatcctacaacaggaacattgatcgctctggatttacttactcatgcccccattgtgggaagacctttcagaagccttcccaattaacacgacatattaggatacatactggggagaggccgtttaaatgttccgaatgcgggaaagccttcaaccagaaaggggctctacagacgcacatgatcaaacatacaggggaaaaaccgcatgcgtgcgcgttctgccctgccgctttcagccaaaaaggcaaccttcagagccacgtacagcgggtgcactccgaagtcaagaacggcccaacttataattgtactgagtgctcctgcgttttcaagtctctcggatccctgaatacacacatatccaagatgcacatgggcggaccacagaacagcaccagtagtacagagactgcccatgtgttgactgcgaccctgttccaaaccttgcccctgcaacagacagaggctcaagccacctcagcctcttcacaaccttcaagccaggcggtgtccgacgtcatccagcaacttcttgagctgagcgagcccgcacctgtggaatccggacagagcccccagccgggacaacaattgtctattaccgtgggaattaaccaggacattctgcaacaagcgctggagaattctggactttccagcatccctgcggctgcccacccaaatgacagttgccatgcgaagacatcggccccacatgcccaaaatcccgacgtaagctcggtgagcaacgaacagacagacccaaccgacgctgaacaagagaaggagcaggaaagccccgaaaagcttgataagaaggagaaaaagatgatcaagaagaagagcccattcttacctgggagcatccgggaagaaaatggcgtgcggtggcacgtgtgtccttattgcgccaaggaattccgcaaaccctccgacttagtcagacacataaggattcatacacacgagaagccattcaaatgcccccaatgtttccgggcatttgccgtcaagtccacacttacagcccacataaaaacccacaccggtatcaaagcctttaaatgtcagtattgtatgaaaagcttcagtactagcggaagcctgaaggtccacatccgtcttcacaccggagtgcgtccattcgcttgcccgcattgcgacaaaaaatttcggacctctgggcaccgaaagactcatatcgctagtcactttaagcacaccgagcttagaaaaatgagacatcagcgcaagccagctaaagtccgcgtgggcaagactaatatccccgtgcccgatatccctctgcaagagcccatcctgatcacagatttgggtctgatacaacctattcccaagaaccaattcttccaatcatacttcaacaataacttcgtgaacgaagcagatcggccttataagtgcttttattgccaccgagcctacaagaagagttgtcacctgaaacagcatatccgatcgcatacaggggaaaagccatttaagtgttcccagtgcggacgcggttttgtgtcagcaggggtgctgaaggcccacatcagaacccacacggggctgaaaagctttaagtgtcttatttgcaatggagccttcactaccggcggaagtctgcgacgtcacatgggcattcacaatgatctgagaccatacatgtgtccctattgtcagaaaactttcaaaacttcacttaattgcaagaagcacatgaagacccaccgctatgaactggctcagcagttacaacagcatcagcaagccgcatcaatcgatgatagcactgtagaccagcagtccatgcaggcttccacacagatgcaggtggagattgagagtgacgaactgccgcagacggcggaggtggtggcagctaaccccgaagccatgttggatcttgaaccgcagcacgtggttggcactgaggaggcaggtttaggacaacagctcgcggatcagcccctagaggctgacgaagacggcttcgtcgctccgcaggatcccctgcgtggccacgtggatcaatttgaagagcagtccccagcacagcagtccttcgagcccgcaggcctcccccaaggatttacagtaaccgacacctaccaccagcagccacagtttccacccgtgcaacagttgcaagatagtagcaccttagaatcgcaagcattaagtactagcttccaccagcaaagcctgttacaggcaccctcttccgacgggatgaacgtaacaactcgtctcatccaggagtctagccaggaagagctggacctccaagcacagggcagtcagtttcttgaagacaatgaggaccaatctcggagaagctataggtgcgattattgcaacaagggctttaagaaatcgtcccatctgaagcagcatgttaggagccacacaggtgagaagccctataaatgcaagttgtgcggaagaggtttcgtgtcaagtggcgtgctgaagtcacatgagaagacccacacgggcgtgaaggcatttagctgttcagtatgcaatgcgtcattcaccacaaacggctctctgactcgccatatggcgactcatatgagcatgaagccctacaaatgccccttctgcgaggaggggtttcgaacaacagttcactgtaagaagcacatgaagcggcatcagacagtgccctctgccgtctccgctaccggcgagaccgagggaggcgacatatgtatggaggaggaagaagagcacagcgatcgaaatgcttctaggaagagccgcccagaagtgataacctttaccgaggaagaaaccgcacagcttgcgaagatccgaccgcaggagagtgccactgtgagcgaaaaggtactggtgcagagcgccgctgaaaaagaccggatctccgaactgagggacaaacaagcagagcttcaggatgaacctaagcatgcgaactgctgcacctattgccccaagtcgtttaaaaagccctctgatctcgtgcggcacgtgcggatccatactggcgagaaaccctataaatgcgatgagtgtggtaagtcctttacggtgaaatcgactctggattgccacgtcaagactcataccggacagaagttgttcagctgccatgtgtgctcaaacgcattttcaacaaaagggtcattaaaagtccatatgagactccacaccggcgctaagccatttaagtgcccccactgcgagctgcgatttagaaccagcgggcgacggaagacacacatgcagtttcactacaaacctgatccgaagaaggccaggaagcctatgacgaggtcttcctccgaaggactccaacctgtgaatctgcttaacagctcatcaaccgaccccaacgtgtttatcatgaacaactcagtccttaccggccagttcgatcagaatctgctccagccgggattggtagggcaggccatactgccagcctcggtttcagcgggaggagatctgaccgtcagtctgactgacggttcactggcaaccctcgagggcatccagctgcagctagcggcaaatcttgtgggcccaaacgttcaaatctcaggcattgacgccgcaagtattaataatatcacgcttcagattgatccaagcatattacagcagaccttacagcagggcaatttactcgcccagcagttaacaggtgaacccggactggcaccgcagaacagctctctgcagacctctgattccacggttccagccagcgtagtgatccaacctataagcggcctgtccctgcagcccacagtcacatcagcgaacctgacaatcggaccgctgagcgagcaggattcagtcctgactacaaattctagcggcactcaggatctgactcaggtcatgaccagtcaggggctggtctccccgtctggcggaccgcacgagatcactttgaccattaacaattctagtctcagccaggtgctggcacaggccgctggacctactgctacgtcttcttcaggctcacctcaggaaatcactcttacaattagtggctctcgtagtgtgcagcactccgtgggacctcaagagtgcggcagtgtcgaagcactgtatctggagaacagcagtgacaaaacctag

SEQ ID NO: 319062 - DNA, 4676 bp, Artificial Sequence
  derived and/or modified sequence
atgggtctgtgcgggctgttagagagatgctggctgcaccatgaccctgatggggtcctgaccttgaacgcggagaacaccaactacgcttaccaggtgcctaacttccataagtgtgagatatgcttgctgagcttccccaaagagtcccaatttcagcggcatatgcgagaccacgagaggaacgataaacctcacaggtgcgatcagtgcccgcagacattcaatgtcgagtttaacttgaccctccacaagtgtacacactccggagaagacccgacttgccctgtgtgtaacaaaaagtttagcagagtggcttcactgaaagcacatatcatgctgcatgaaaaagaggagaacttgatctgtagtgagtgtggcgacgagtttacgctccaatcccaactggccgtccatatggaggagcatagacaagagctcgctggcacccgccagcatgcatgcaaagcctgtaagaaggagttcgaaacgtcatcggagctgaaagaacatatgaagacccactacaaaatccgggtgagctcaacgcggagctataataggaacatcgacagaagcggctttacatatagttgcccccactgcggcaagacgttccagaaacctagtcagctcacaaggcatatcagaattcacacaggcgaacgtcctttcaaatgtagtgaatgtggtaaggccttcaatcagaagggagcactgcagactcatatgattaagcacactggagagaagccccacgcgtgtgccttctgtcccgctgcatttagccagaagggcaatctgcagtcacacgtgcaacgagtacactccgaagttaaaaacggtcccacttacaactgcaccgagtgctcatgtgtgtttaaaagcctggggagtctcaacacccacattagcaagatgcacatgggaggcccacagaattcaacatcctccactgagaccgcccacgtgctgacggccacactctttcagacgcttccattgcaacagactgaggcccaggccactagcgcctctagccagccctcctcacaggccgtttctgatgtcatccagcagttgctggaattaagcgagcctgcgcctgtagaatccggccagtctccccagccaggccagcagctttccatcactgtgggaatcaaccaggacatcctacagcaggcgctagagaactctggcctgtcctctatccccgctgctgcacatccaaatgactcatgccacgctaagacctcagcacctcacgcccagaaccctgacgtgagctcagtttccaacgagcagactgatccgacagatgctgagcaggagaaagaacaggagtcccctgagaaactggacaagaaggagaaaaagatgatcaaaaagaagtctccgttcctgcccggatctatcagagaggaaaacggggtccgctggcacgtctgtccctattgcgccaaagaatttaggaaaccgagcgatctagtgaggcacatacggatccacacacatgagaagccatttaagtgccctcagtgcttccgcgcatttgcagttaaatccacccttaccgcccatatcaaaacccacactggcataaaggccttcaagtgccagtattgtatgaaaagttttagcactagtggatctctgaaagtccatatacggctgcataccggcgtgcgtccattcgcctgcccccactgtgataagaaattcagaacgagcggtcaccgcaaaacccatattgcctctcattttaaacacactgagctaagaaagatgaggcatcagagaaaacctgccaaggtacgagtgggcaaaaccaacattcctgttcccgacatcccattacaagaaccgatactgattacagatcttggccttattcagcccataccaaaaaaccagttttttcagtcttacttcaataataattttgtgaatgaagcagatcgaccctacaagtgcttctactgtcacagagcctacaaaaaatcttgtcacctcaagcagcatattcggagccataccggcgaaaaaccctttaaatgttcccagtgtggccgtggctttgtctctgctggggtattgaaggcacacataaggacacatactggtctcaaatcttttaaatgcctgatctgtaacggcgcatttactaccgggggtagtcttagaaggcatatgggcatccataatgatttacgaccttatatgtgcccctattgccagaaaacctttaagacaagcctcaactgcaagaaacacatgaagacccacagatacgagctggcgcaacagctgcagcaacaccagcaggccgctagcattgatgatagcacagtggaccagcagtcgatgcaagcatctacccagatgcaagttgaaattgagtcagacgagctgccgcagacagcagaagtggtggcggctaacccagaggccatgcttgacctcgaaccccaacacgtggttggcacggaggaggccggacttggtcagcagttagcagaccagcctttggaggccgatgaagacggattcgtagcgcctcaggaccctctacggggtcatgtcgatcagttcgaagaacagtccccagctcagcagtccttcgagccagctggtctgccacagggcttcacagtaacagacacctaccatcaacagccacaatttcctccggtccagcagctccaggactccagcacactcgagagccaggcactgagtacttcgttccaccagcaatcgctgctacaggctccttcctccgacggtatgaacgtgactactaggttaatccaagaatcatcccaggaagaacttgatctacaggctcaggggtcacagttcctggaagataacgaggatcagtcacggaggtcctatagatgtgactactgcaacaaagggtttaagaagagttcccacctgaaacagcatgtgaggagccacactggggaaaaaccctacaaatgcaagttatgcggccgtgggttcgtctcatcaggcgtgctgaaatctcacgagaaaacccacactggcgttaaggcattcagttgtagcgtttgtaacgcctcttttacaaccaatgggagtctcacacgacacatggccactcatatgagtatgaagccgtataaatgccccttttgcgaagaagggttcaggacaactgtccattgtaagaagcatatgaaaaggcatcagaccgtgccttcagccgtctctgccacaggcgaaaccgaaggcggagacatctgcatggaggaagaggaggagcactcggacaggaacgcctcacgtaagagccgccctgaggtgataactttcactgaagaagaaaccgctcagctggccaaaatccgacctcaggagagcgctaccgtcagtgagaaggtgctggtgcaaagcgcggcagaaaaagacaggatctcagaactccgggataaacaggccgagttgcaggatgagcctaagcacgcaaactgctgcacatattgcccaaaatctttcaaaaagcccagcgacctggtgcgccacgtcagaatccacactggcgaaaaaccttataagtgtgatgagtgcggtaagagctttaccgtcaaaagcactctcgattgccacgtgaaaacgcataccgggcagaagctgtttagttgccatgtgtgtagcaacgctttctcgacaaaggggtccctgaaggtgcacatgagattgcataccggcgcaaaaccttttaaatgccctcattgtgagctgcgttttagaacctcaggaaggcggaagacacacatgcagttccactacaagcccgaccccaagaaggcgaggaagccaatgacgagaagcagctccgaaggtcttcaacctgttaatctgttgaactcaagctctactgacccaaatgtgttcatcatgaataatagcgtccttacagggcaattcgaccaaaacttgttgcagcctgggctcgtagggcaggcaatcctgcctgcctctgtgtctgccggaggcgatctcaccgtttcacttactgacgggtcattagccactctcgagggaatacagttgcagcttgccgcaaatctggtcggtcctaatgtacagattagcggtatcgacgcagcatcaatcaacaatatcactctgcagatcgatccaagcatcctgcaacaaactctgcaacaggggaacctgctagcacagcagctcaccggcgagcctggactggccccacagaacagtagcctgcagacctccgactccactgtacctgccagcgtggtaatccagccaattagtggattaagtctgcagcccacggtaacaagtgctaacttaactattgggccactctccgaacaggattccgtcctgacaactaatagtagcgggacacaggacttaacacaggttatgacctcacaggggttggtctcacccagcggcggtcctcatgagattacactcaccataaacaattcatccttgtctcaggtcctcgcgcaggcagcgggacctacggccacctccagtagtggctcacctcaagaaattactctgaccatatccggctctaggtccgtccagcactccgtggggccacaggagtgcggatccgtcgaggcattgtatctggagaattcttctgacaaaacgta

SEQ ID NO: 319063 - DNA, 4872 bp, Artificial Sequence
  derived and/or modified sequence
gcctggaaactacaaaggattgtgttaattttgtgtttaggaagaaagaggtaatgggtaggaatcaatgtaaacttattcataggccacaccaaaccaggaattcttgtcgtgattgcacttggtagagttaacacacgtgcacattacggaaacgttggtgaccaacaggcgtttcagcgagctttcgcacacctcatgggcctttgtgggctgctggagagatgttggctgcaccatgacccagatggagttttaacattgaatgcggagaacactaattatgcctatcaagttccaaacttccataaatgtgaaatctgtctactatcttttccaaaagaatcccagtttcaacgccacatgagggatcacgagcgaaatgacaagccacatcgatgtgaccagtgcccccaaacatttaatgttgaattcaacctgacacttcataaatgcacccacagcggggaagatcctacctgccctgtgtgtaacaagaaattctccagagtggctagtctcaaagcgcatattatgctacatgaaaaggaagagaatctcatctgttctgagtgtggggatgagtttactctgcagagtcagctggccgtgcacatggaggagcaccgccaggagctggctggaacccggcagcatgcctgcaaggcctgcaagaaagagttcgagacctcctcggagctgaaggaacacatgaagactcattacaaaattagggtatcaagtacaaggtcttataaccggaatatcgacagaagtggattcacgtattcgtgtccgcactgtggaaagacgtttcaaaagccaagccagttaacgcgacacattaggatacacacaggtgaaaggccgttcaaatgtagtgaatgtggaaaggcttttaaccagaagggggcactgcagacccacatgatcaagcacacaggtgaaaaaccccatgcctgtgccttctgtcctgccgccttctctcagaaagggaatcttcagtcgcacgtgcagcgagtccactcagaggtcaagaatggtcctacctataactgtacagaatgtagttgtgtatttaaaagtttaggcagcttaaacacgcatatcagcaagatgcatatgggtgggccacagaattcaacaagttctacagagactgctcatgttttaacggccacactttttcagacgttacctcttcaacagacggaagcccaagccacgtcggcctcaagccagccgagctcccaggcggtgagcgacgtcatccagcagctcctggagctctcagagccggcgccggtggagtcggggcagtccccgcagcctgggcagcagctgagcatcacagtgggcatcaaccaggacattttacagcaagccttagaaaacagtgggctgtcttcaattccagctgcagcacatcctaatgactcctgccatgccaagacctctgcaccacacgctcaaaacccagatgtttccagcgtttcaaatgagcagacggaccccacagacgcagagcaagaaaaagaacaggaaagcccggagaaactggataaaaaagaaaaaaaaatgataaagaagaagtcaccgtttctacctggctccatccgcgaggagaacggcgtgcgctggcatgtgtgtccctactgcgccaaggagttccgcaagcccagcgacctggtccgccacatccgcatccacacccacgagaagcccttcaagtgcccgcagtgcttccgcgccttcgccgtgaagagcacgctgacagcgcacatcaagacgcacaccggcatcaaggcgttcaagtgccagtactgcatgaagagcttctccacctctggcagcctcaaggtgcacattcgcctgcacacaggagttagaccttttgcttgtcctcactgtgacaaaaaatttcgaacctcaggccataggaagactcacattgcttcccactttaaacatacggaattaaggaaaatgaggcaccagcgtaaacctgcaaaggtccgtgttggcaagacgaatattccagtccctgatattcctttgcaggaaccaatcctcataactgacttaggtctcatccagcccattccaaaaaaccagtttttccaaagctatttcaataataattttgtcaatgaagcagatagaccatacaagtgtttttactgtcatcgtgcatataaaaaatcttgccaccttaaacaacacatcagatcccatacaggtgaaaaaccttttaaatgttctcagtgtggaagaggctttgtttctgcaggcgtgctcaaagcacacatcagaacacacacaggactgaaatctttcaagtgtctgatatgtaatggggctttcactactggtggcagcttacggcgacacatgggtatccacaacgaccttcgtccctatatgtgtccctattgccaaaaaacatttaagacttcactaaattgcaaaaagcacatgaaaacccacagatatgagcttgcccagcagctccaacagcatcagcaggcagcctcgatagatgacagcactgtagaccagcagagcatgcaggcctccactcaaatgcaggtggagatcgagagcgacgagctgccgcagacggcagaggtggtcgcagcgaaccccgaggccatgctggacctggagcctcagcatgtggtgggcacggaggaagcagggctgggccagcagttggcagatcagcccctggaagcagatgaagatgggtttgtggctccacaggaccctctgcgagggcacgtagaccagtttgaagagcagagccctgcgcaacagtccttcgaaccagcagggctaccccaaggttttacagtgactgatacgtaccatcagcagcctcagtttccacctgtccaacagctacaggattccagcacacttgagtctcaggccctctccacaagcttccaccagcagagcttgctgcaggctcccagctctgatgggatgaatgtaacaactcgcttgattcaggagtcatcccaagaggaactggacctgcaggcacaaggttcccagtttctggaggacaacgaggaccagagcaggcgctcttacaggtgtgactattgcaacaaaggctttaagaagtccagccacctgaagcagcatgtgcggtcgcacaccggggaaaagccctacaagtgcaagctctgtggacgcggctttgtttcctctggggtcctcaagtcccacgagaagacacacacaggagtgaaggcgttcagctgcagtgtgtgcaatgcttccttcaccaccaatggcagcctcacccggcacatggccacacatatgagcatgaagccttataagtgtccgttttgtgaggagggtttccgaactacagtgcattgtaaaaagcacatgaagagacaccaaacagtcccctctgctgtgtcagccactggagagacagaaggaggagacatttgtatggaggaagaggaagaacattctgacagaaatgcatcacggaagtctcgtcctgaggtcatcactttcacggaggaggagacagcccagttagccaagatccggccgcaggagagcgccacggtgtcagagaaggtcctggtgcagtccgcggcagaaaaggaccgcatcagtgagctgagggacaagcaggcggagctgcaggacgagcccaagcacgccaactgctgcacatactgccccaagagcttcaagaaacctagcgacctggtgaggcatgttcgaatccatactggagaaaagccatacaaatgtgatgaatgtggaaagagttttactgtgaaatccactctcgattgtcatgtgaagactcacacaggtcagaagctcttcagctgtcacgtctgcagcaacgccttctccacgaagggaagtctgaaggtccacatgcgcctgcacacgggagccaagcccttcaaatgcccgcattgcgagctgcgtttccgtacctcgggtagaagaaagacacacatgcagtttcattataaaccagacccaaagaaggccagaaagcctatgactcgaagctcatcggaaggactgcagcctgtaaacctcctcaactcctcctctactgacccaaacgtgtttatcatgaacaactctgttctaacaggacagtttgatcagaatctgctgcaaccaggactggtgggccaagctattctccctgcctctgtgtcagctgggggtgacctgaccgtgtctctgacagatgggagcctggctaccctagaaggcatccagttacagttggctgctaacttggttggaccaaatgtacagatttctggaatcgatgctgccagcattaataacattacgttgcagattgatccaagcattctgcagcagacgctacagcagggcaacctattggctcagcagctcacgggggagcctggcctggccccacagaacagctctctccagacatcggacagcacggtccctgccagtgttgtcatccagcccatctcaggcctgtccttacagcccacagtgacctctgcgaacctgaccataggcccgctgtctgagcaggattcagtgctgaccactaacagcagtgggacccaagacctcactcaagtgatgacttcgcaaggtctagtgtccccctccggcggtccccacgagatcaccctgaccattaacaactccagcctgagccaggtcctggcacaggccgctgggcccactgccacgtcttcctcggggtctccacaggaaattaccctgactatctccggttccaggtctgtgcagcacagtgtgggaccccaggagtgtggatctgtggaggcattgtatttggagaactccagcgacaagact

SEQ ID NO: 319064 - DNA, 8203 bp, Artificial Sequence
  derived and/or modified sequence
gcctggaaactacaaaggattgtgttaattttgtgtttaggaagaaagaggtaatgggtaggaatcaatgtaaacttattcataggccacaccaaaccaggaattcttgtcgtgattgcacttggtagagttaacacacgtgcacattacggaaacgttggtgaccaacaggcgtttcagcgagctttcgcacacctcatgggcctttgtgggctgctggagagatgttggctgcaccatgacccagatggagttttaacattgaatgcggagaacactaattatgcctatcaagttccaaacttccataaatgtgaaatctgtctactatcttttccaaaagaatcccagtttcaacgccacatgagggatcacgagcgaaatgacaagccacatcgatgtgaccagtgcccccaaacatttaatgttgaattcaacctgacacttcataaatgcacccacagcggggaagatcctacctgccctgtgtgtaacaagaaattctccagagtggctagtctcaaagcgcatattatgctacatgaaaaggaagagaatctcatctgttctgagtgtggggatgagtttactctgcagagtcagctggccgtgcacatggaggagcaccgccaggagctggctggaacccggcagcatgcctgcaaggcctgcaagaaagagttcgagacctcctcggagctgaaggaacacatgaagactcattacaaaattagggtatcaagtacaaggtcttataaccggaatatcgacagaagtggattcacgtattcgtgtccgcactgtggaaagacgtttcaaaagccaagccagttaacgcgacacattaggatacacacaggtgaaaggccgttcaaatgtagtgaatgtggaaaggcttttaaccagaagggggcactgcagacccacatgatcaagcacacaggtgaaaaaccccatgcctgtgccttctgtcctgccgccttctctcagaaagggaatcttcagtcgcacgtgcagcgagtccactcagaggtcaagaatggtcctacctataactgtacagaatgtagttgtgtatttaaaagtttaggcagcttaaacacgcatatcagcaagatgcatatgggtgggccacagaattcaacaagttctacagagactgctcatgttttaacggccacactttttcagacgttacctcttcaacagacggaagcccaagccacgtcggcctcaagccagccgagctcccaggcggtgagcgacgtcatccagcagctcctggagctctcagagccggcgccggtggagtcggggcagtccccgcagcctgggcagcagctgagcatcacagtgggcatcaaccaggacattttacagcaagccttagaaaacagtgggctgtcttcaattccagctgcagcacatcctaatgactcctgccatgccaagacctctgcaccacacgctcaaaacccagatgtttccagcgtttcaaatgagcagacggaccccacagacgcagagcaagaaaaagaacaggaaagcccggagaaactggataaaaaagaaaaaaaaatgataaagaagaagtcaccgtttctacctggctccatccgcgaggagaacggcgtgcgctggcatgtgtgtccctactgcgccaaggagttccgcaagcccagcgacctggtccgccacatccgcatccacacccacgagaagcccttcaagtgcccgcagtgcttccgcgccttcgccgtgaagagcacgctgacagcgcacatcaagacgcacaccggcatcaaggcgttcaagtgccagtactgcatgaagagcttctccacctctggcagcctcaaggtgcacattcgcctgcacacaggagttagaccttttgcttgtcctcactgtgacaaaaaatttcgaacctcaggccataggaagactcacattgcttcccactttaaacatacggaattaaggaaaatgaggcaccagcgtaaacctgcaaaggtccgtgttggcaagacgaatattccagtccctgatattcctttgcaggaaccaatcctcataactgacttaggtctcatccagcccattccaaaaaaccagtttttccaaagctatttcaataataattttgtcaatgaagcagatagaccatacaagtgtttttactgtcatcgtgcatataaaaaatcttgccaccttaaacaacacatcagatcccatacaggtgaaaaaccttttaaatgttctcagtgtggaagaggctttgtttctgcaggcgtgctcaaagcacacatcagaacacacacaggactgaaatctttcaagtgtctgatatgtaatggggctttcactactggtggcagcttacggcgacacatgggtatccacaacgaccttcgtccctatatgtgtccctattgccaaaaaacatttaagacttcactaaattgcaaaaagcacatgaaaacccacagatatgagcttgcccagcagctccaacagcatcagcaggcagcctcgatagatgacagcactgtagaccagcagagcatgcaggcctccactcaaatgcaggtggagatcgagagcgacgagctgccgcagacggcagaggtggtcgcagcgaaccccgaggccatgctggacctggagcctcagcatgtggtgggcacggaggaagcagggctgggccagcagttggcagatcagcccctggaagcagatgaagatgggtttgtggctccacaggaccctctgcgagggcacgtagaccagtttgaagagcagagccctgcgcaacagtccttcgaaccagcagggctaccccaaggttttacagtgactgatacgtaccatcagcagcctcagtttccacctgtccaacagctacaggattccagcacacttgagtctcaggccctctccacaagcttccaccagcagagcttgctgcaggctcccagctctgatgggatgaatgtaacaactcgcttgattcaggagtcatcccaagaggaactggacctgcaggcacaaggttcccagtttctggaggacaacgaggaccagagcaggcgctcttacaggtgtgactattgcaacaaaggctttaagaagtccagccacctgaagcagcatgtgcggtcgcacaccggggaaaagccctacaagtgcaagctctgtggacgcggctttgtttcctctggggtcctcaagtcccacgagaagacacacacaggagtgaaggcgttcagctgcagtgtgtgcaatgcttccttcaccaccaatggcagcctcacccggcacatggccacacatatgagcatgaagccttataagtgtccgttttgtgaggagggtttccgaactacagtgcattgtaaaaagcacatgaagagacaccaaacagtcccctctgctgtgtcagccactggagagacagaaggaggagacatttgtatggaggaagaggaagaacattctgacagaaatgcatcacggaagtctcgtcctgaggtcatcactttcacggaggaggagacagcccagttagccaagatccggccgcaggagagcgccacggtgtcagagaaggtcctggtgcagtccgcggcagaaaaggaccgcatcagtgagctgagggacaagcaggcggagctgcaggacgagcccaagcacgccaactgctgcacatactgccccaagagcttcaagaaacctagcgacctggtgaggcatgttcgaatccatactggagaaaagccatacaaatgtgatgaatgtggaaagagttttactgtgaaatccactctcgattgtcatgtgaagactcacacaggtcagaagctcttcagctgtcacgtctgcagcaacgccttctccacgaagggaagtctgaaggtccacatgcgcctgcacacgggagccaagcccttcaaatgcccgcattgcgagctgcgtttccgtacctcgggtagaagaaagacacacatgcagtttcattataaaccagacccaaagaaggccagaaagcctatgactcgaagctcatcggaaggactgcagcctgtaaacctcctcaactcctcctctactgacccaaacgtgtttatcatgaacaactctgttctaacaggacagtttgatcagaatctgctgcaaccaggactggtgggccaagctattctccctgcctctgtgtcagctgggggtgacctgaccgtgtctctgacagatgggagcctggctaccctagaaggcatccagttacagttggctgctaacttggttggaccaaatgtacagatttctggaatcgatgctgccagcattaataacattacgttgcagattgatccaagcattctgcagcagacgctacagcagggcaacctattggctcagcagctcacgggggagcctggcctggccccacagaacagctctctccagacatcggacagcacggtccctgccagtgttgtcatccagcccatctcaggcctgtccttacagcccacagtgacctctgcgaacctgaccataggcccgctgtctgagcaggattcagtgctgaccactaacagcagtgggacccaagacctcactcaagtgatgacttcgcaaggtctagtgtccccctccggcggtccccacgagatcaccctgaccattaacaactccagcctgagccaggtcctggcacaggccgctgggcccactgccacgtcttcctcggggtctccacaggaaattaccctgactatctccggttccaggtctgtgcagcacagtgtgggaccccaggagtgtggatctgtggaggcattgtatttggagaactccagcgacaaaacttaacactacaagcggaagccttccttcaacaacaccgatgtctccatcggccatctcgactcagaacctggtcatgtcctcgtcgggcgtgggaggtgacgctagtgtcacgctgacgctggccgatactcagggtatgctatctggaggcctggacactgtcacactcaacatcacctctcagggtcagcagttcccagcgctcctcacggatccctctctctcgggccagggtggagcaggctcgccgcaagtcatactagtgagccacacgccacagtcagcgtctgctgcttgtgaagaaatagcctaccaggtagctggcgtctctgggaacctggccccgggcaaccagccagagaaggagggccgggcgcaccagtgcctggagtgtgaccgcgccttctcatcggcggcggtgctcatgcaccacagcaaggaggtgcatggccgggagcgcatccacggctgccccgtgtgcaggaaggccttcaagcgcgccacgcacctcaaggagcacatgcagacacaccaggccggcccctctttgagctcccagaagccaagagtgtttaaatgtgacacttgtgagaaggcatttgccaaaccaagccagctggagcgccacagccgcatacatacaggggagcggccgttccattgcacgctttgtgagaaagccttcaaccagaagagtgcgctgcaggtgcacatgaagaagcacacgggggagcggccctacaagtgtgcctactgcgtcatgggcttcacgcagaagagcaacatgaagctgcacatgaagcgggcgcacagctatgctggagctctgcaggagtctgcaggtcacccggagcaggacggggaggagctgagccggaccctccacctggaggaggtggtgcaggaggccgccggcgagtggcaggccctcacccacgtcttctgatgcgagttggaagtacacctttaagaatgtttctgaagttacgttttgtgaagagcaaagcacttggaatctccgttttaaagcttcaagtgttaaaaatgctacaatagttttttatctataaaattatctaaagaatcattgtctttcagagactcataggaaaaaaaaactaggaaaagtgtcaccgcattgttctcttttgtctacaaatcactgaactcaggtactactgtaggcagtttcctcctcagtctcctccgtggctagtgtgtctagttcacgaagcaattaactgggtcttactatcattgtagtgtgatttctttgtattagcaaagacaaaaacgctaacattgaaaaagtatgtcagattttccttcatgtttctggttataagaagcatagcttacaaagcaagcgtaagattgaggcatgaagttcagaaaaaaaagtgttacaacacacagggaagttttttccactcttttctctgtgcattttgaaaattagtcaaaatggactcttttcagtctaccataagttaatataactgataccttgagagatggctggaccaattctctccatgacaaatgtttaatcattagttacaagaatgcagtatctggggcgtcaacatggggactcgagtaaacctgacccaccaataaggattcagctgtccacacgggctggcgacacacttaccgcatcaatctgtgttcaggtccagggttacataattgcagaagcacaagccatacatcgcaggtaggaaaccacagaaccgtctgcaaggagcaagcaacggtggccctgtccaccccagcaaataagaagcatatctgtagcttaaggccacgaatccgtaaaaaccccatgactttctcttcgtgcataaacagatgtatttttgatttcagggaattctttagtatcgtcaatggtgccacataaaacatgtcccaaaccaaatcccacccgtgctgggcagagtgcgtgcacgccattcctacagcattccaaagatggaaggttctttacttcatgttaatttttcctttgaaattatttatatgttctatatataaatacatatgtacatagatatatgggcctctgtgtggctgaacagtatattttgtaaatataagtactagtcctaattgcagaaagagcgtcagtttcacctccccacgagcacttcagatcagtattgtattcattttattcataaatggatatctttttcattgtcatataaagctgggttttatttttttttcctgaaaaataattgcctttattttctctcgttgcctccttggtttcagaagagagtagttttattataaatattgtatggactttgtatattaagagaggagctcatttcagattcctaaagaaatagacattttactgttattttgaaagggcatcttttgatttttttgttgttgttgttcacttttggcatatgtatataagtaatattgacggtgatatgaaaacttttgttatgtgaagatatttaagtcagaaaattgttaaataatattacttcttttccaaactgctttgtgtattgtatatttttttaagaaaaagaaaagccttatttgacttatgcttgtgatactggacttcttaccaatccggaggtttccttccttgaatgtcagtgtgtaaacctggctgtagccgcatatgcagaataactgtaattgtgctagagttttaaaggttctgcttttaatgcactttttattttataattttgtattgaaatattttagaaatgttgattaattttggtgaaaaaatatccccaaagtggaaattattggaattttaaacttttgttcttgctgggttatttattttgattttagcattaaatgtcatctcaggacatctctaaaaggggttgtttaattcctaattgtatagaaagctagtttggtgaattgtattggttaattgactgtttaaggccttaacaggtgaatctagagcctacttttattttggttaaagaaaaagaaaatatcaataattcaattttgtgtcttttctcaatttattagcaaacacaagacattttatgtattatttcgatttacttcctaattataaaagctgcttttttgcagaacattccttgaaaatataaggttttgaaaagacataattttacttgaatctttgtggggtacaggttgatctttatattttactggttgttttaaaaattctagaaaagagatttctaggcctcatgtataaccagggttttgaggataaagaactgtatttttagaactatctcatcatagcatatctgctttggaataactataaataaaagatgaagttagg

SEQ ID NO: 319065 - protein, 424 aa, Artificial Sequence
  derived and/or modified sequence
MNLDSIHRLIEETQIFQMQQSSIKSRGDMVAPASPPRDTCNTCFPLHGLQSHAAHNFCAHSYNTNKWDICEELRLRELEEVKARAAQMEKTMRWWSDCTANWREKWSKVRAERNSAREEGRQLRIKLEMAMKELSTLKKKQSLPPQKEALEAKVTQDLKLPGFVEESCEHTDQFQLSSQMHESIREYLVKRQFSTKEDTNNKEQGVVIDSLKLSEEMKPNLDGVDLFNNGGSGNGETKTGLRLKAINLPLENEVTEISALQVHLDEFQKILWKERDLSFKSLKIVNTDRLNAHSFGKRNRETGVGFVSVEVEFDILLGQHNDEMQELSGNIKEESKSQNSKDRVICELRAELERLQAENTSEWDKREILEREKQGLERENRRLKIQVKEMEELLDKKNRLSANSQSPDFKMSQIDLQEKNQDVK

SEQ ID NO: 319066 - DNA, 106 bp, Artificial Sequence
  derived and/or modified sequence
agaattacaaaccactgctcaacaaaataaaagagtacacaaacaaatggaagaatattccatgcttatggataggaagaatcaatattgtgaaaatggccatact

SEQ ID NO: 319067 - DNA, 1275 bp, Artificial Sequence
  derived and/or modified sequence
atgaacctggacagcatccacagactgatcgaggagacccagatcttccagatgcagcagagcagcatcaagagcagaggcgacatggtggcccccgccagcccccccagagacacctgcaacacctgcttccccctgcacggcctgcagagccacgccgcccacaacttctgcgcccacagctacaacaccaacaagtgggacatctgcgaggagctgagactgagagagctggaggaggtgaaggccagagccgcccagatggagaagaccatgagatggtggagcgactgcaccgccaactggagagagaagtggagcaaggtgagagccgagagaaacagcgccagagaggagggcagacagctgagaatcaagctggagatggccatgaaggagctgagcaccctgaagaagaagcagagcctgcccccccagaaggaggccctggaggccaaggtgacccaggacctgaagctgcccggcttcgtggaggagagctgcgagcacaccgaccagttccagctgagcagccagatgcacgagagcatcagagagtacctggtgaagagacagttcagcaccaaggaggacaccaacaacaaggagcagggcgtggtgatcgacagcctgaagctgagcgaggagatgaagcccaacctggacggcgtggacctgttcaacaacggcggcagcggcaacggcgagaccaagaccggcctgagactgaaggccatcaacctgcccctggagaacgaggtgaccgagatcagcgccctgcaggtgcacctggacgagttccagaagatcctgtggaaggagagagacctgagcttcaagagcctgaagatcgtgaacaccgacagactgaacgcccacagcttcggcaagagaaacagagagaccggcgtgggcttcgtgagcgtggaggtggagttcgacatcctgctgggccagcacaacgacgagatgcaggagctgagcggcaacatcaaggaggagagcaagagccagaacagcaaggacagagtgatctgcgagctgagagccgagctggagagactgcaggccgagaacaccagcgagtgggacaagagagagatcctggagagagagaagcagggcctggagagagagaacagaagactgaagatccaggtgaaggagatggaggagctgctggacaagaagaacagactgagcgccaacagccagagccccgacttcaagatgagccagatcgacctgcaggagaagaaccaggacgtgaagtag

SEQ ID NO: 319068 - DNA, 1392 bp, Artificial Sequence
  derived and/or modified sequence
aggactccagaactgtacggatgagaaaaggatgcaggaaattctgttgtttacacatgtggctgcaactgagacactggagcagcccagcaagcccagagggtcttaaaaataaatatgaatttagattccatacatcgattaattgaggaaacacagatcttccagatgcaacaatcatcaattaagtcacgcggcgacatggtggcacctgcctcaccccccagggatacctgtaatacctgcttcccacttcatgggctacaatctcatgctgctcacaatttctgtgctcactcatataacaccaacaaatgggatatttgtgaagaacttcgcctgcgggagcttgaagaagtcaaggccagagctgctcagatggaaaagaccatgcggtggtggtcggactgcactgccaactggagagaaaaatggagtaaagttcgagctgaaaggaacagtgccagggaggaaggaagacaactcagaataaaactagagatggcgatgaaagaattgagtacactgaaaaagaaacagagtttgccacctcagaaggaggcattagaagctaaagttacccaggatctgaagcttcctggcttcgtagaagaatcctgtgaacatacagaccaatttcaattgagttcacaaatgcatgagtctatcagagagtatttggtaaaaagacaattttctacaaaggaggacacaaataataaggaacaaggtgtggttattgattctctaaaattaagtgaggagatgaagcccaatctagatggtgttgatttattcaacaatggtggttctggaaacggtgaaacgaaaactgggctgagactgaaagcaataaatctgcctttggaaaatgaagtaactgaaatttcagctttgcaggtgcatttggatgaattccaaaaaatcttatggaaggaaagagatctaagtttcaaatcacttaaaattgttaatacagatagattgaatgcgcacagctttggaaaaagaaatagagagactggagtcggctttgtctctgtggaagtggaatttgacattcttcttggtcaacataatgatgaaatgcaagaactgtcaggcaatataaaggaagaatccaaatctcaaaacagcaaagacagagtgatttgtgagttaagagcagagctagagagattgcaagctgaaaatacctcggagtgggacaagagggaaatacttgaaagagaaaagcagggactggagagagaaaatagaaggctgaagatccaggtgaaagaaatggaagagcttttggataagaaaaatagattaagtgcaaactctcaaagtcctgatttcaagatgtcacaaattgatctgcaagaaaaaaaccaggatgtaaaataa

SEQ ID NO: 319069 - DNA, 1275 bp, Artificial Sequence
  derived and/or modified sequence
atgaatttggattccatccatcgcttgatcgaggagacccagatatttcagatgcagcaaagctccattaagtccaggggggacatggtcgcaccagcttctccacccagggatacctgcaacacctgctttcctctccacggcttgcagagccacgccgcacacaacttttgcgcccatagttacaacaccaacaaatgggatatttgtgaagaactgcgtttaagagagcttgaggaggtgaaggctagagctgcacaaatggagaagactatgcgttggtggtccgactgtacagccaactggcgggagaaatggagtaaggttcgagccgagaggaacagcgccagagaggagggccgacaactaagaatcaagttggaaatggccatgaaagagttgtctacgctgaaaaagaagcaatccttgcccccccagaaggaggccttagaggctaaagttactcaagatttgaagctccctgggttcgtcgaggagagctgtgagcataccgatcagttccagctctcgtcacagatgcacgaaagtatacgggaatacttggtgaagcggcaattcagcactaaagaagataccaataataaggagcaaggagtggttatcgactcgctgaagcttagtgaggagatgaagcccaacctggatggggtggatctctttaataacggcgggagtggcaacggggagacgaagacagggttacgcctgaaggctataaatcttcccctcgagaatgaggtgaccgagatttctgccttgcaggtccatctggacgagtttcaaaaaatcttatggaaggagcgggatttgtcattcaagtctctgaagatcgtaaatacggatcggctgaatgcacacagctttggcaaaagaaatcgtgaaactggcgtgggctttgttagcgtcgaagtcgagttcgatatactgctggggcagcataatgatgagatgcaggaattatctggaaatattaaagaggagtcaaagtctcagaacagcaaagatcgggtaatctgcgagctccgagcggagcttgaaaggctgcaggccgaaaacacatctgagtgggacaaacgtgagatactggaacgggagaagcaaggtctagaaagagaaaacagaagactgaaaatacaggtgaaggagatggaggagctgctggacaaaaagaatcgcctgtcggctaacagccagtctccagacttcaagatgtctcaaatcgatttgcaagaaaagaatcaagacgtaaaatag

SEQ ID NO: 319070 - DNA, 1275 bp, Artificial Sequence
  derived and/or modified sequence
atgaacctggacagcatccacaggctcatcgaggagacccagatcttccagatgcagcagagcagcatcaagagcagaggagacatggtggccccagccagccccccccgggacacctgcaacacctgcttccccctgcacggcctgcagagccatgctgcccacaacttctgtgcccacagctacaacaccaacaagtgggacatctgtgaggagctgcggctgcgggagctggaggaggtgaaggcccgggccgcccagatggagaagaccatgcgctggtggagcgactgcacagccaactggagggagaagtggagcaaggtgcgggcagagagaaattctgcccgggaggagggccggcagctgcgcatcaagctggagatggccatgaaggagctgagcaccctgaagaagaagcagagcctgcccccccagaaggaggccctggaggccaaggtgacccaggacctgaagctgcccggctttgtggaggagagctgtgagcacacagaccagttccagctgagcagccagatgcatgagagcatccgggagtacctggtgaagaggcagttcagcaccaaggaggacaccaacaacaaggagcagggcgtggtgattgacagcctgaagctgtctgaggagatgaagcccaacctggatggagtggacctcttcaacaatggaggcagcggaaatggagagaccaagacaggcctgcggctgaaggccatcaacctgcccctggagaatgaggtgacagagatcagcgccctgcaggtgcacctggatgagttccagaagatcctgtggaaggagcgggacctgtccttcaagagcctgaagatcgtgaacacagaccggctgaatgcccacagctttgggaagaggaaccgggagaccggggtgggctttgtgtctgtggaggtggagtttgacatcctgctgggccagcacaatgatgagatgcaggagctgagcggcaacatcaaggaggagagcaagagccagaacagcaaggacagagtcatctgtgagctgcgggcagagctggagcggctgcaggccgagaacaccagcgagtgggacaagcgggagatcctggagcgggagaagcagggcctggagagagaaaatagaaggctgaagatccaggtgaaggagatggaggagctgctggacaagaagaaccggctgagcgccaacagccagagcccagacttcaagatgagccagattgacctgcaggagaagaaccaggatgtgaagtag

SEQ ID NO: 319071 - DNA, 1275 bp, Artificial Sequence
  derived and/or modified sequence
atgaacctggacagcatccaccggctgatcgaggagacccagatcttccagatgcagcagagcagcatcaaatcacggggagatatggtggcgccagcttcacctccacgcgatacctgtaatacttgctttccactgcatggcctgcagtctcacgcagcccacaacttctgtgcccattcctacaacaccaacaaatgggacatatgcgaggagctcaggctgcgtgaactggaggaggttaaagcgcgagctgcacagatggaaaagacaatgaggtggtggtctgactgcacggctaactggcgagagaagtggtcaaaggttagggctgagaggaattcagcgcgcgaggaaggcaggcagcttaggatcaaattagagatggccatgaaagaactctctaccctcaagaagaaacaatcgctacccccacaaaaggaggctctcgaggccaaggtcacccaagatctcaagttacctggcttcgtggaagaaagctgcgagcacactgaccagtttcaattaagttcacagatgcacgaatccattcgcgagtatttagtgaagcgacaattcagcaccaaggaagacaccaataataaagagcagggagtggtcattgattctttgaaactgagcgaagagatgaaacctaatctggacggcgtggatctgtttaacaacggaggcagcggcaacggcgaaacgaagaccggcctgcgcctgaaggctataaacctgccactggagaatgaagttacggagattagcgcactacaggtccatctcgacgagttccagaagattctgtggaaggagagagacttatcctttaagtccctgaaaattgttaacaccgacagactgaatgcccattccttcgggaagagaaaccgcgagacaggtgtgggattcgttagcgtagaggtggagttcgatatccttctgggccagcataatgacgagatgcaggaacttagtggaaatatcaaggaagagagcaagagccagaattccaaagatcgagtgatctgcgagttgcgcgccgagttggagaggctgcaggcagagaacacgtccgagtgggacaaaagagaaattctggaacgggagaagcagggactcgaaagggagaacagaaggctcaagatccaagttaaggagatggaagagctgctggacaagaagaatcggctgtccgcgaattcccagtctccggattttaaaatgagccagattgatctacaggagaagaatcaagatgtgaagtag

SEQ ID NO: 319072 - DNA, 1275 bp, Artificial Sequence
  derived and/or modified sequence
atgaacctggactctattcatcgcctaattgaggagacccagatctttcaaatgcagcagagtagcattaagagtcggggtgatatggtagctccagccagtccccctagggatacctgcaacacatgctttccactgcacggccttcagagccacgcagcacacaatttttgtgctcattcttacaacaccaataagtgggacatctgcgaggaactcagactgagagaacttgaggaagtcaaagctagagcggcacagatggaaaaaacgatgcgctggtggtctgactgtaccgcgaattggagggagaagtggtcgaaggtgcgggctgagcgtaattccgcgcgagaggagggcagacagctccgcataaaacttgaaatggcaatgaaagagctgtcaacccttaaaaaaaaacaatccttgcctccccagaaagaggccctagaggccaaggtgactcaggacctcaaactgcccggattcgtcgaggaaagttgcgaacacacagatcagttccagctcagtagtcaaatgcacgagtctatcagagaatatctggttaagaggcaattcagcactaaagaagacaccaacaacaaagaacagggggtggtaatcgatagtctcaaattaagtgaagagatgaagcccaaccttgatggagttgatcttttcaataacgggggaagtgggaacggcgagacaaagacagggctgcgtctcaaagcgattaaccttccattagaaaatgaggtaacagagatctcggccctccaggtgcacttggatgaatttcagaaaatactctggaaagagcgagacctgagttttaaatccctgaagatcgtcaacaccgaccggctaaatgcacatagcttcgggaagcggaaccgcgaaaccggcgttggattcgtttccgttgaggtggagttcgacattcttctgggccagcataatgatgagatgcaggaactgagtggcaacatcaaagaggaaagcaaatcacagaactctaaggatcgtgtcatctgcgagctgagagccgaactcgagagactgcaggcagagaacacctctgaatgggataaaagagagatcctggagagggagaaacagggacttgaacgagagaatcgaagattaaagattcaggtgaaggagatggaggagctgctggataagaagaatcgcttgagcgctaattcccagagtcccgatttcaagatgtcccaaatcgacctgcaggagaaaaaccaggacgttaaatag

SEQ ID NO: 319073 - protein, 920 aa, Artificial Sequence
  derived and/or modified sequence
MSDPHSSPLLPEPLSSRYKLYEAEFTSPSWPSTSPDTHPALPLLEMPEEKDLRSSNEDSHIVKIEKLNERSKRKDDGVAHRDSAGQRCICLSKAVGYLTGDMKEYRIWLKDKHLALQFIDWVLRGTAQVMFINNPLSGLIIFIGLLIQNPWWTITGGLGTVVSTLTALALGQDRSAIASGLHGYNGMLVGLLMAVFSEKLDYYWWLLFPVTFTAMSCPVLSSALNSIFSKWDLPVFTLPFNIAVTLYLAATGHYNLFFPTTLVEPVSSVPNITWTEMEMPLLLQAIPVGVGQVYGCDNPWTGGVFLVALFISSPLICLHAAIGSIVGLLAALSVATPFETIYTGLWSYNCVLSCIAIGGMFYALTWQTHLLALICALFCAYMEAAISNIMSVVGVPPGTWAFCLATIIFLLLTTNNPAIFRLPLSKVTYPEANRIYYLTVKSGEEEKAPSGGGGEHPPTAGPKVEEGSEAVLSKHRSVFHIEWSSIRRRSKVFGKGEHQERQNKDPFPYRYRKPTVELLDLDTMEESSEIKVETNISKTSWIRSSMAASGKRVSKALSYITGEMKECGEGLKDKSPVFQFFDWVLRGTSQVMFVNNPLSGILIILGLFIQNPWWAISGCLGTIMSTLTALILSQDKSAIAAGFHGYNGVLVGLLMAVFSDKGDYYWWLLLPVIIMSMSCPILSSALGTIFSKWDLPVFTLPFNITVTLYLAATGHYNLFFPTTLLQPASAMPNITWSEVQVPLLLRAIPVGIGQVYGCDNPWTGGIFLIALFISSPLICLHAAIGSTMGMLAALTIATPFDSIYFGLCGFNSTLACIAIGGMFYVITWQTHLLAIACALFAAYLGAALANMLSVFGLPPCTWPFCLSALTFLLLTTNNPAIYKLPLSKVTYPEANRIYYLSQERNRRASIITKYQAYDVS

SEQ ID NO: 319074 - protein, 235 aa, Artificial Sequence
  derived and/or modified sequence
MSDPHSSPLLPEPLSSRYKLYEAEFTSPSWPSTSPDTHPALPLLEMPEEKDLRSSNEDSHIVKIEKLNERSKRKDDGVAHRDSAGQRCICLSKAVGYLTGDMKEYRIWLKDKHLALQFIDWVLRGTAQVMFINNPLSGLIIFIGLLIQNPWWTITGGLGTVVSTLTALALGQDRSAIASGLHGYNGMLVGLLMAVFSEKLDYYWWLLFPVTFTAMSWMETDFNWSKSGCWKHLLQ

SEQ ID NO: 319075 - DNA, 2763 bp, Artificial Sequence
  derived and/or modified sequence
atgagcgatccacactcttcccccttgctacccgaacccctcagcagccgctataagctgtatgaagccgaattcactagcccatcatggcccagcacctcaccagatacccatcctgcgttgcctctcctggagatgcctgaggagaaggatctgcgctcgagcaatgaggactcacatattgtgaagattgagaaactcaatgaacgcagcaaaaggaaggacgatggggtggctcatagagactccgcaggccagcgctgtatctgtctcagtaaggccgttgggtatttaacaggagacatgaaggaatacagaatttggctgaaagataagcacttggccctacagttcatcgactgggtcctgcgtggtaccgcacaagttatgttcatcaacaatccattgtcaggtcttattatcttcattggtctgctgatacagaacccttggtggacaattaccggtggactgggcactgttgtgagtacactgacagcactcgctctcggccaggatcgaagcgccatcgcatctggactacatgggtacaatggcatgcttgtaggattgctgatggccgtttttagtgagaagttagactattattggtggttgctgttccccgtcaccttcaccgccatgtcatgtccagtgctcagttcagccctgaactccattttctcgaaatgggacctcccagtgtttacactgcctttcaacatcgctgtcacactttacctcgcagcaacaggtcattataacttgttttttcctaccaccctcgtggaacctgtgtcctccgttcctaatataacctggaccgaaatggaaatgccgctactgcttcaggccattcccgtgggggtgggtcaggtctatgggtgtgacaacccttggacaggtggcgtgttcctggttgccctgtttatcagtagtccccttatatgcttgcacgctgcgattggtagcatagtaggtttgttggcagccttaagcgtcgccacacccttcgagacaatctacaccgggttatggtcgtataattgtgtactcagctgcattgccatcggcggcatgttctacgcgttgacatggcagacccaccttctcgctttgatctgcgccttattctgcgcgtacatggaggccgctatcagcaatattatgagcgtcgtcggagtaccccctggcacctgggccttctgtctggccaccatcatttttctgttactcaccaccaataatccggccatctttcgattgccgttaagtaaagtcacgtacccagaggccaaccgcatatattatctaacagttaaatccggggaggaggaaaaagccccatccggcggaggaggcgaacaccccccaaccgccggccccaaggttgaagaggggtccgaggcagtcctcagcaaacacaggagcgtgttccatatagaatggtcctccatccggagaagatctaaggtcttcggcaagggtgaacaccaggaacgccagaacaaggatcccttcccctaccggtatcggaagcctacagtcgagctgctggatctggatactatggaagagagctccgaaatcaaagtcgagacaaacatttccaagacaagctggatcagaagcagtatggcagcgtcaggcaagcgggtgtccaaggcgctaagctacattactggggagatgaaagaatgcggagaaggcttgaaggataagtcccctgtgtttcagttcttcgattgggtgctgagaggcacgtcccaggtgatgtttgttaacaatcccctgtctgggattctgattatcctcgggctcttcatccaaaatccgtggtgggcaatttctggctgcctgggcactattatgtctactctgacagcgctcatacttagccaggacaagtctgcaattgccgccggattccatggctataacggtgtcctggtgggcctactgatggcggtgttcagcgacaagggggactactactggtggctgctgcttcccgttataatcatgtctatgagctgtcctattctgtcatccgctttgggtacgatcttctccaagtgggatctgcctgttttcaccctgccattcaatatcaccgtcacactatacctcgcagctactggtcactataacctcttcttcccgaccaccctgctccagcccgcaagtgccatgccaaacataacttggtctgaagtgcaggttccactcctgttgagagcgatccctgtggggattggccaagtttatgggtgtgacaacccctggactggaggcatattcctgattgctctgttcattagttctcccttaatctgcctacacgctgcaataggcagcaccatggggatgctggccgccctaaccatcgccactcctttcgactcaatctatttcggcctctgtggattcaattctactcttgcctgcattgccattggagggatgttctacgtgatcacctggcagactcacctgctggctattgcatgtgcactgttcgcagcatacctcggcgccgccctcgccaacatgctatccgtgttcggtttgcctccttgcacgtggcccttttgcctctcagctctcactttcctcctccttaccacaaataacccagccatctacaagttacctctcagcaaggttacctacccggaagctaaccgcatctattacttgtctcaggaacgaaatcggcgtgcttccatcataaccaagtatcaggcatatgacgtatcttag

SEQ ID NO: 319076 - DNA, 2763 bp, Artificial Sequence
  derived and/or modified sequence
atgtccgaccctcatagttctcccttactgcctgaaccactgtcatcccgctacaagctttatgaagccgagttcacttccccttcttggcctagtacatcccccgacacccaccctgcattgccactcttggagatgcccgaagaaaaagaccttagaagcagtaatgaagatagccacatcgtgaagatcgagaaactgaacgagagatcgaaacgcaaagatgatggcgtagcccatagagactcagccgggcagagatgcatctgcctctctaaggctgttggttacctgactggcgatatgaaagaatatcgcatctggctcaaagacaaacacctggccttgcagttcatcgattgggtcctgcggggtacagcgcaggtgatgttcataaataatcccctgagcggcctgatcattttcatcgggttgcttattcagaatccatggtggaccattaccggcggactggggacggtggttagtaccttaactgcactcgcactcggccaggaccgaagtgccattgcaagcggtcttcacggttacaatggtatgctggttggccttctgatggcagtcttcagcgagaagcttgactattactggtggctgctatttccggttacatttacggccatgtcctgtccagttttatccagcgcactgaactccatcttctcgaagtgggacctgccggtgttcactctgccattcaacatcgccgtgaccctgtacctcgcggcaaccgggcactacaacctgttttttcccacaactctcgttgagcccgtctcctccgttccaaacatcacgtggacagagatggagatgccgctgctacttcaggcaatccctgtgggcgtggggcaggtgtatggatgcgacaatccttggactggcggtgtgttcctcgtcgccctttttatctcctcgccactcatttgtctgcatgccgctattggcagcatagttggtttgctagccgcactttccgtcgccacgcccttcgagactatctataccggtttgtggtcttacaattgtgttctgtcatgtatcgccatcgggggaatgttttacgcactgacctggcagacccatctgcttgctttgatttgtgcccttttttgcgcctatatggaagcagctatttccaacataatgtccgttgtcggtgtaccccctggaacttgggccttttgtctcgcaactataatttttctgctgttgaccaccaacaatcctgcgatcttccgcctccctttgtccaaagtcacatatccagaggccaacagaatttactacctcacagtgaaatcaggcgaggaggagaaagcccccagtggcgggggaggagaacatcctcctactgctggaccaaaggtcgaggaggggtctgaggccgttctgtctaaacatcggagcgtattccacatcgaatggtcgtcgattagaagacggtctaaggtgttcggcaagggtgagcaccaggaacgccaaaataaggatccatttccttatcgctaccggaagcccaccgtagagttactcgatctggatacaatggaagaatccagcgaaataaaggttgaaacaaacatcagcaagacgagctggattaggtctagtatggccgcaagcggaaagagggtgagtaaggccctgagctatatcacgggagaaatgaaggaatgtggcgagggcttgaaggacaaaagcccggtcttccaatttttcgattgggtgcttcgggggacaagccaggtaatgttcgtgaacaatcctctcagtggcattctcataattttgggccttttcattcagaatccctggtgggccatctccggatgtttgggaacaatcatgagtacacttactgctctgatattgtcccaagataaatccgctatcgctgctggctttcatggatacaatggcgtacttgtggggctgcttatggctgtattttcagataaaggcgattactactggtggttgttgttaccagtgatcatcatgtcgatgagttgcccgatcttgagttccgccctggggaccatttttagtaaatgggacctccccgtctttactttacctttcaacatcacggtgacactgtacctggcagcaactggccactataaccttttcttcccaactaccctgttacagcccgcaagcgctatgccaaatatcacatggtctgaagtgcaggtaccactgctgctgagggcaatccccgttgggatcggccaagtctatgggtgtgacaatccctggacaggagggattttcctgatcgccctgttcatttcatcccccctaatctgccttcacgcggcaattgggagcactatgggaatgctggctgcacttacgattgcaaccccctttgatagcatctacttcggtttgtgcggattcaacagcaccctggcatgcatcgccattggcggaatgttctacgtgatcacctggcaaactcacctgctcgcaattgcttgcgccttatttgcagcctatctgggtgcagctctggccaatatgctctctgtgttcgggttgccgccatgcacctggcctttttgtctcagcgctttaacgtttttgctcttgacaaccaataaccctgctatttacaaacttccgcttagcaaagttacctatcccgaggctaataggatctactatctcagccaggaaagaaacaggcgagcttccataattaccaagtaccaggcatacgatgtatcctag

SEQ ID NO: 319077 - DNA, 2763 bp, Artificial Sequence
  derived and/or modified sequence
atgtctgacccccacagcagccccctgctgcctgagcccctgagcagccgctacaagctgtatgaagctgagttcaccagccccagctggcccagcaccagcccagacacccacccagccctgcccctgctggagatgcctgaggagaaggacctgcggagcagcaatgaagacagccacatcgtgaagattgagaagctgaatgaaagaagcaagaggaaggatgatggagtggcccaccgggacagcgctggccagcgctgcatctgcctgagcaaggctgtgggctacctgactggagacatgaaggagtaccgcatctggctgaaggacaagcacctggccctgcagttcatcgactgggtgctgcggggcacagcccaggtgatgttcatcaacaaccccctgagcggcctcatcatcttcatcggcctgctgatccagaacccctggtggaccatcactggaggcctgggcaccgtggtgtccaccctgacagccctggccctgggccaggacagaagtgccatcgccagcggcctgcacggctacaacggcatgctggtgggcctgctgatggctgtgttttctgagaagctggactactactggtggctgctcttccctgtgaccttcaccgccatgagctgccctgtgctgagcagcgccctgaacagcatcttcagcaagtgggacctgcccgtcttcaccctgcccttcaacattgctgtgaccctgtacctggccgccaccggccactacaacctcttcttccccaccaccctggtggagcctgtgtcctctgtgcccaacatcacctggacagagatggagatgcccctgctgctgcaggccatccctgtgggcgtgggccaggtgtatggctgtgacaacccctggacaggaggagtcttcctggtggccctcttcatcagcagccccctcatctgcctgcacgccgccatcggcagcatcgtgggcctgctggccgccctgtctgtggccaccccatttgagaccatctacacaggcctgtggagctacaactgtgtgctgagctgcatcgccatcggcggcatgttctacgccctgacctggcagacccacctgctggccctgatctgtgccctcttctgtgcctacatggaggccgccatcagcaacatcatgtctgtggtgggcgtgcccccaggcacctgggccttctgcctggccaccatcatcttcctgctgctgaccaccaacaacccagccatcttccggctgcccctgagcaaggtgacctacccagaggccaaccgcatctactacctgactgtgaagagcggggaggaggagaaggcccccagcggcggcggcggggagcaccccccaacagctggccccaaggtggaggagggcagcgaggccgtgctgagcaagcacaggtctgtgttccacatcgagtggagcagcatcagaagaagaagcaaggtgtttggaaaaggagagcaccaggagcggcagaacaaggaccccttcccctaccgctacaggaagcccaccgtggagctgctggacctggacaccatggaggagagcagcgagatcaaggtggagaccaacatcagcaagacctcctggatccgcagctccatggccgccagcggcaagagggtgtccaaggccctgagctacatcactggagagatgaaggaatgtggggagggcctgaaggacaagagccctgtgttccagttctttgactgggtgctgcggggcaccagccaggtgatgtttgtgaacaaccccctgagcggcatcctgatcatcctgggcctcttcatccagaacccctggtgggccatcagcggctgcctgggcaccatcatgagcaccctgacagccctgatcctgagccaggacaagagcgccatcgctgctggcttccacggctacaatggagtgctggtgggcctgctgatggctgtgttcagtgacaagggggactactactggtggctgctgctgcctgtgatcatcatgtccatgagctgccccatcctgagcagcgccctgggcaccatcttcagcaagtgggacctgcccgtcttcaccctgcccttcaacatcaccgtgaccctgtacctggccgccaccggccactacaacctcttcttccccaccaccctgctgcagcctgccagcgccatgcccaacatcacctggagcgaggtgcaggtgcccctgctgctgcgggccatccctgtgggcatcggccaggtgtatggctgtgacaacccctggacaggaggcatcttcctgattgccctcttcatcagcagccccctcatctgcctgcacgccgccatcggcagcaccatgggcatgctggccgccctgaccatcgccaccccatttgacagcatctacttcggcctgtgtggcttcaacagcaccctggcctgcatcgccatcggcggcatgttctacgtgatcacctggcagacccacctgctggccatcgcctgtgccctgtttgctgcctacctgggcgccgccctggccaacatgctgtctgtgtttggcctgcccccctgcacctggcccttctgcctgagcgccctgaccttcctgctgctgaccaccaacaacccagccatctacaagctgcccctgagcaaggtgacctacccagaggccaaccgcatctactacctgagccaggagaggaacagaagagccagcatcatcaccaagtaccaggcctatgatgtgtcctag

SEQ ID NO: 319078 - DNA, 2763 bp, Artificial Sequence
  derived and/or modified sequence
atgagcgacccccacagcagccccctgctgcccgagcccctgagctcacgctataagttatatgaggccgaatttacaagccctagctggccctctacatctcctgacacacatcccgccctgcctctgctggaaatgcctgaggaaaaagacctgagatcttcaaacgaagactcacatatagtcaagattgaaaagctgaacgagcgctccaagcggaaagatgatggcgtcgctcatagggattctgccggccagaggtgcatttgcctctctaaggccgtcggttatctgaccggagatatgaaggagtatcgcatctggctcaaagacaagcatctcgcactacagttcatcgactgggtgctccgcggtacggcacaggtcatgttcattaacaatccattaagtgggttgatcatctttatcggcttgctcatacagaacccatggtggaccattacaggcggccttggcaccgtcgtatccactctgacagcgcttgcactggggcaggatcggtctgctattgctagcggtctgcatggttataacgggatgctggtggggctcttaatggccgtattctctgaaaaactggattattattggtggctgctgttccccgtaaccttcaccgcaatgtcttgcccagttctgagctcagccctgaacagcattttctcgaaatgggacctacctgttttcacactgccctttaatatagctgtaacactatatcttgcagccaccggccactataacttattcttccccacgaccttggtcgaaccagtttcaagtgttccaaatattacttggaccgaaatggagatgcccctcctgctgcaggccatccccgtaggtgtggggcaagtgtatggatgcgacaacccctggacggggggagtgttcctcgtagccctgttcataagcagtcccttgatttgtttgcatgcggctatcggatccattgtggggttactagcggcactgtcagtggccacacccttcgaaacaatctataccgggctgtggtcttacaattgcgtactgtcctgtatcgcgatcggagggatgttttacgccctcacctggcagacacacctgctggccctgatctgtgctttattttgtgcgtatatggaagcagccatttctaacattatgagcgtagtcggggtgcctcctggcacctgggcattttgtctggctacaatcatcttcctgttactcacaacaaataacccagctattttccgcctcccactttcgaaagtgacttacccagaggcaaataggatctattacctgactgtcaagagcggggaggaggagaaggcccccagcggaggagggggagagcatccaccaactgcaggacccaaggttgaggaaggttccgaggcggtgttgagtaagcacaggagtgtattccatatagagtggtcgtcaatccgcagacgaagtaaagtgttcggcaagggcgagcatcaggagcggcagaacaaggacccatttccctaccgatacaggaaacctactgttgaactactcgacttggacactatggaggaatccagcgagatcaaggtcgaaacaaatatatcaaagacttcttggattcgctcatccatggccgccagtgggaagcgggtgtctaaagcactcagttatatcactggagaaatgaaggagtgcggtgaagggctcaaagataagtcccctgtgttccagttctttgactgggttctcagaggtacgagtcaggtgatgtttgttaataaccccctcagcggaatacttattattttgggcctctttatacagaacccctggtgggcaatctctggatgcctgggcaccatcatgtctaccctgaccgcactgattttatctcaggataaatccgcaattgctgctgggttccacggctacaacggagttctggtaggattattaatggcggtcttctctgataaaggggattattattggtggttgctgttgcctgtaatcatcatgagtatgtcctgtcccattctctctagcgccttgggcaccatcttctcgaagtgggatttgcccgtatttacccttccatttaatatcacagtgacgctttatctcgctgcaacagggcattacaatctgttcttccctacaaccttactgcagcctgctagtgcaatgcccaatataacctggagcgaggtacaggtgcctctcctgctcagagccatccctgtcggtattggtcaggtctatggctgcgataacccttggaccggtggaatcttcttgatcgcactcttcattagtagtcccctcatatgcttgcatgccgccatcggttccacgatgggtatgctagccgccctgaccattgcgactcctttcgattccatttattttggtctgtgcgggttcaattctactttggcttgcatcgccattggcgggatgttttacgtcatcacatggcagacgcatctgttggccattgcctgcgctctcttcgctgcttacctgggcgccgcgctggctaacatgttgtcggtcttcgggctgccaccctgtacctggcccttctgcctgtctgcacttactttccttctacttacaactaacaaccctgccatatacaaactccctctgtccaaagtgacttaccccgaggccaacaggatatactacctgagccaggagaggaatcgccgggcatccattataacaaagtatcaggcttacgatgtgagctag

SEQ ID NO: 319079 - DNA, 2763 bp, Artificial Sequence
  derived and/or modified sequence
atgagcgacccccacagcagccccctgctgcccgagcccctgagctccagatataagctgtatgaggccgagtttacaagcccgtcatggccaagcacttcaccagatactcatccagccctacccttgttagaaatgccagaagaaaaggacttacgctcctctaatgaggacagtcacatcgtcaaaattgaaaagctgaacgagcggagcaaaagaaaagacgacggcgtggctcatcgcgactccgcaggacagagatgtatctgtttaagcaaggcagtcgggtacctgaccggggacatgaaagaatatcgcatttggttaaaggacaaacacctggctctacaattcattgattgggtgttgagaggaaccgcacaggttatgttcattaataacccactttccggtcttatcatcttcataggtctgcttatccagaatccttggtggaccataactgggggcctgggaacagtggtgtccactctcaccgctctggcgctgggccaggatcgctccgctatagcaagcgggctccacggttataatggaatgctcgtgggactacttatggccgttttctctgagaagctggactactactggtggctcctttttcctgtgacgtttaccgccatgagttgtcccgtgcttagtagtgctctgaatagcatattctccaaatgggatctgcctgtctttaccctgccttttaatatagccgtgacactgtatctcgccgctaccgggcactacaacctgttctttcctacaaccttggtggagcctgtgtcttccgtccctaatatcacatggactgaaatggagatgcctctcctgctccaagccatccctgtgggcgtgggacaggtttatgggtgtgataatccttggacagggggagtctttcttgtggcactttttattagcagtccgctcatctgtctccacgctgccatcggttccatcgttgggctgctggcagccctcagtgttgccactccttttgaaaccatctacactggtctgtggagttataattgtgtcctctcctgcattgccatcgggggcatgttttatgccctgacttggcagacccatcttttggcgctgatttgcgccttgttttgcgcctacatggaggccgctataagcaatattatgagtgtagtgggagtgcccccaggcacttgggctttttgcctggctaccattatttttctgttgctgacaacaaacaaccccgctatcttccggctgcctctgtcgaaagtgacttaccctgaggccaatcgaatctactacctgaccgtgaagagcggggaggaggagaaggcaccctccggcggcgggggggagcatccccctacagctggccctaaagtggaagagggaagtgaggccgtcctctccaagcatagatctgtgttccacatagaatggagctcaattcgcagaaggagtaaagtgttcggaaaaggggaacaccaggagcgtcagaataaggatccttttccctatagatacagaaaaccaaccgtggaactgctcgatttggacacaatggaggaaagtagcgaaatcaaagtcgaaacaaacatcagcaaaaccagttggatccggtccagcatggcagcaagcgggaagcgcgtgtctaaggctctgagttacatcacaggtgagatgaaggagtgcggagaggggcttaaagacaaatcccctgtgtttcaattctttgactgggtcctgaggggcacgtctcaagtgatgtttgtgaacaacccattatcagggatcttgatcattctggggcttttcatccagaatccttggtgggccatcagcggatgtctgggtactattatgtcaaccctgacagcccttatactgtcccaggacaaatccgctatagccgccggatttcacgggtataatggcgtgttagtgggcctgctgatggctgtgttctctgacaaaggagactactattggtggctgcttttgcctgtaattattatgtccatgtcatgccccattttatcgtcagctttgggtaccatctttagcaagtgggatctaccagtgttcacgttgccattcaatattacagtaaccctctacctagctgccacgggacattacaatcttttcttccctactacccttcttcagccggctagcgccatgccaaacattacctggtccgaggtccaggtccccttgctgctgcgcgccataccagtgggcattggacaggtgtatgggtgcgacaacccttggactggcggcatctttctgattgcgctgtttatttcttccccactcatctgcctgcacgctgctattggaagcaccatgggcatgctggccgccctgactatcgccactcccttcgattccatttacttcggactttgtggtttcaattctacccttgcctgtattgcaatcggagggatgttttatgtcatcacctggcagacacatcttctggccatcgcctgtgctttattcgccgcttatctgggcgccgctttagccaatatgcttagtgtgttcggtctgccgccttgcacttggcccttctgtctatccgccctgactttcctccttctgaccacgaataaccccgcgatttataagttgccactatccaaagtcacttaccccgaggcaaataggatttattatctaagccaggagcgaaaccgcagagccagcattataaccaagtaccaagcctatgacgtctcatag

SEQ ID NO: 319080 - DNA, 2763 bp, Artificial Sequence
  derived and/or modified sequence
atgagcgacccacactcttcgccactattacctgagcccttaagctctagatataagctttacgaagctgagttcacaagtccgtcttggccgagtacttctcccgatacccaccccgctcttcccttgttagaaatgcccgaagaaaaagacttacgaagctccaacgaagacagtcacatcgtaaagatagaaaaattgaatgaaagatcaaagcgcaaggacgatggcgtcgctcatcgagattctgctggccagaggtgcatatgtctgtctaaagccgttggttatctcaccggggacatgaaagagtatagaatctggttgaaggataaacacctggctctgcagttcattgactgggtcctgagaggaaccgctcaggtcatgttcatcaacaatcccctgtccggcttaatcatctttatagggctgctcattcagaacccttggtggaccataacagggggactcggtacggtggtcagcactcttactgcattggcactgggacaagaccggtcagctatcgcctcaggtcttcatggctataacggcatgctggtgggattgctcatggccgtcttcagtgaaaagctcgactactattggtggctccttttcccggtgacgttcacagcaatgtcttgtcctgtgttgagcagcgccctgaatagtatcttttctaaatgggacctccccgtgttcaccctcccctttaatattgcggtgacattgtacctggccgcaacagggcactataatctattctttccaacgacacttgtagaaccggtgtcttctgtgcccaatattacctggacggagatggagatgcccctacttttgcaggcaatacctgttggggtgggacaggtgtacggctgcgataacccttggactgggggagtgttcctagtcgcactttttatatcttctccacttatatgtttgcacgccgctataggatctattgtggggttgctggcggcactctctgtggccaccccattcgaaacaatttatacagggttatggagttacaattgtgtgctgtcttgcattgcaattggcggaatgttctatgctctgacctggcagacgcatcttctcgctttgatttgtgcactattctgtgcatacatggaggccgcaatctctaacatcatgagtgtggtgggagtcccccctggaacttgggctttctgtttagctaccatcattttcctgctcctcacaactaataatcccgctattttccgactgcccctttctaaggtgacctacccagaggcaaacagaatttactacctaactgtgaagagtggcgaggaggaaaaagccccatctggaggcggtggtgagcatcctcccacagccggaccaaaagttgaggagggttccgaagcagtgctgtcgaagcatagatcagtttttcacatcgagtggtcctcaatccgcagaagatctaaagtatttgggaaaggggaacatcaggaaaggcagaataaggacccattcccatataggtacagaaagcctacagttgagctgctggatctggataccatggaggagagttccgaaattaaggttgagacgaatattagcaagaccagttggattagaagctccatggctgctagtggcaaaagggtaagcaaggctttgtcttatatcacgggggagatgaaggagtgtggggagggcctgaaggataagtcgcctgtgttccagttttttgattgggttctgcggggaacaagtcaggtgatgttcgtgaataatcccttgtccggcatcctcatcattctcggcctcttcatacagaacccgtggtgggcaattagcggatgtttagggaccataatgagtacactcactgctctcatactgagtcaggataaatccgccatcgcagctggattccacgggtataacggcgtgttggttggtctgctcatggctgttttcagtgacaaaggagactactattggtggctgctcttacccgtgattattatgtccatgagctgtcctattctctccagtgctctcggaaccatcttctccaagtgggacttgcctgttttcaccctgccgttcaacattaccgttaccttgtaccttgcagccaccgggcactataatctcttcttccctaccacactattgcagcctgcgagtgcaatgcccaacatcacgtggtctgaggtccaggttcctttacttttacgggcaattcctgtgggaatcgggcaagtgtacggttgcgacaacccctggaccggtgggatcttcctgatcgctcttttcatatcttctccattgatctgcctccatgctgccatcggatcgactatggggatgttggcagcactcacaatagccacccctttcgattcaatctactttggactgtgcggatttaatagcactctggcatgcatcgcaatcgggggtatgttctacgtgatcacatggcagactcaccttctcgcaatcgcatgcgccctgttcgccgcataccttggcgctgcgctcgcaaacatgctttccgtatttggcctcccaccttgtacatggcccttctgcttaagcgctctcacattcctgctgctcacaacaaacaatccggctatttacaagctgcccctgtccaaagttacgtaccctgaggcaaaccgcatttattatttgtctcaggagcggaataggagagcttcaattataaccaaatatcaagcctacgatgttagttag

SEQ ID NO: 319081 - DNA, 2763 bp, Artificial Sequence
  derived and/or modified sequence
atgtctgacccacactcatcaccactgttaccagagcctctcagtagtagatacaagctgtatgaggccgagtttactagcccatcttggccgagtacgtctcctgatactcacccagctctaccactgctggagatgcctgaggaaaaggacttacgcagttctaacgaggactctcacattgtcaagattgagaaactgaacgaaaggtcaaagaggaaagacgacggcgttgcccatagggactcggcgggacagcgctgcatttgtttgagtaaagcagtagggtacttgacaggtgatatgaaggagtacagaatatggctgaaggacaagcacctggcactgcagttcattgactgggtcctcaggggtacagctcaggtgatgttcattaacaatcccctgagcggactaataatctttataggccttctgatccagaacccttggtggacgataaccgggggactggggacagtggtgtccactcttacagcccttgctctcggtcaagaccgatccgcgatcgcttcaggccttcatgggtataatggcatgctcgtagggttattaatggcagtgtttagtgaaaagctggactattactggtggctgctgtttcctgtcacttttacagccatgagctgcccagtcctttcatccgctctgaacagtatcttttctaagtgggacttgcctgtctttacactgccctttaacattgcagtgaccctgtacctggctgccaccgggcactacaatctgtttttcccgacaacactcgtggagccagtcagctccgttcctaacatcacatggacagagatggagatgccactactgctacaggcaatcccagtgggtgtgggacaagtctacggctgtgataatccatggacagggggagtgttcctggtggctcttttcatcagtagcccgctcatctgtttgcacgcggctatcggttcgatcgtcgggttgctcgccgcattaagtgtggctaccccctttgaaacaatatacacaggtctgtggtcatataattgcgttctgtcgtgtatagccattggcggtatgttttatgcattgacatggcaaacgcatttgcttgcactgatttgtgccttgttttgcgcctacatggaggcggctatttccaacatcatgtcagtcgtgggcgtccccccaggcacctgggccttttgcctcgctacgatcatcttcttgctgctgactacgaacaatccagcgatatttcggctgccactcagtaaagtgacctatcctgaggcgaatcgaatatactaccttaccgtaaagtcaggagaagaggagaaggcgccaagcggcggtggaggcgaacacccaccaaccgctggcccaaaagtggaggagggttctgaggccgtcctgtcaaaacatcggtcagtcttccatatcgaatggtcctccatcagacgacggagtaaagtgttcggaaaaggagaacatcaagagaggcaaaataaggacccctttccttacagatacaggaagcctactgttgaattgttagacctggatacaatggaagagtcaagcgaaattaaggtggagacaaatatctctaagacgtcttggattaggagctccatggccgctagcggtaagcgggtgtccaaggccctctcatatatcaccggggagatgaaagagtgtggagagggacttaaagacaaatccccggtttttcagtttttcgattgggtattacgcggaacatctcaggtgatgttcgtcaacaatcccctgagcggcatcctgatcatcctgggcctcttcatacagaatccttggtgggccatctctggctgtttgggaaccatcatgagtacactgacagctctcatcctgtcccaggacaaatctgctatcgctgcaggcttccatgggtataacggcgtgcttgttggcctgctgatggccgtcttttcagacaaaggtgactactattggtggctgctgctgcccgtcattattatgagcatgtcatgcccaattctcagcagcgccctgggtaccattttctctaaatgggatctgcccgtcttcactctcccattcaacattactgtcactctgtacctcgcagcgacaggacactataatcttttttttccaaccaccttgctgcagccagccagtgccatgccaaatatcacctggagtgaggttcaagtccctttgttgctccgcgcaatacccgttggcatcggccaggtttatgggtgtgacaacccttggaccggtggaatttttctcatagcattgtttatctcctcacctctgatctgcctgcatgcagccattggatctacgatgggcatgctggcagccctcaccatcgcgactccctttgacagtatttactttggcctgtgcgggtttaacagcaccctggcctgtatcgccattggtggcatgttctatgtgatcacctggcagacccatctcttagcgatcgcttgcgccctgttcgccgcttacctcggcgcagcgctcgcgaacatgctgagtgtcttcgggctgcctccatgcacctggccattttgtctgtcagccctgacctttttgctacttaccaccaataaccccgctatatataaactgccgttgtcaaaggtgacatacccggaggccaatcggatctattacctgtctcaggagagaaatcggagagcttccatcattacaaagtatcaggcgtacgatgtcagctag

SEQ ID NO: 319082 - DNA, 3540 bp, Artificial Sequence
  derived and/or modified sequence
gtaagctgcctccatcatcctaaaaaacgaccatgctgaaagagctcctctgtatttcttggcagaccctttccagttttcatcctgggtgtttctgaacaggaacatatctcattgaagtatttgcacctctacctacagacaaggaaaaggcttggagcacctccattcattgtgccaacaggacctgaatgaccgattgtttcttgcttactacttgtggtcaactaagtagagattcataagacctttatagaaccactgacaacactgtgaccaaggaaacttccatcgatagaagagtggctgtgacccgaaggaatgtctgacccccacagcagtcctctcctgccagagccactttccagcagatacaaactctacgaggcagagtttaccagcccgagctggccctcgacatccccggatactcacccagctctgcccctcctggaaatgcctgaagaaaaggatctccggtcttccaatgaagacagtcacattgtgaagatcgaaaagctcaatgaaaggagtaaaaggaaagacgacggggtggcccatcgggactcagcaggccaaaggtgcatctgcctctccaaagcagtgggctacctcacgggcgacatgaaggagtacaggatctggctgaaagacaagcaccttgccctccagttcatagactgggtcctgagagggaccgctcaggtgatgttcatcaacaatcctctcagcggcctcatcatcttcatagggctgctgatccagaatccctggtggacaatcactgggggcctggggacagtggtctcgaccttaacagctctcgccttgggccaagacaggtctgccattgcctcaggactccatgggtacaacgggatgctggtgggactgctgatggccgtgttctcggagaagttagactactactggtggcttctgtttcctgtgaccttcacagccatgtcctgcccagttctttctagtgccttgaattccatcttcagcaagtgggacctcccggtcttcactctgcccttcaacattgcagtcaccttgtaccttgcagccacaggccactacaacctcttcttccccacaacactggtagagcctgtgtcttcagtgcccaatatcacctggacagagatggaaatgcccctgctgttacaagccatccctgttggggtcggccaggtgtatggctgtgacaatccctggacaggcggcgtgttcctggtggctctgttcatctcctcgccactcatctgcttgcatgcagccattggctcaatcgtggggctgctagcagccctgtcagtggccacacccttcgagaccatctacacaggcctctggagctacaactgcgtcctctcctgcatcgccatcggaggcatgttctatgccctcacctggcagactcacctgctggccctcatctgtgccctgttctgtgcatacatggaagcagccatctccaacatcatgtcagtggtgggcgtgccaccaggcacctgggccttctgccttgccaccatcatcttcctgctcctgacgacaaacaacccagccatcttcagactcccactcagcaaagtcacctaccccgaggccaaccgcatctactacctgacagtgaaaagcggtgaagaagagaaggcccccagcggaggcggtggggagcatccacccacagcaggcccaaaggtggaggagggctcggaggctgtgctctccaagcacaggagtgtatttcacatcgagtggtcatccattcggaggaggagcaaagtgtttggaaaaggcgaacaccaggaaagacaaaacaaagacccatttccctatcgataccggaagcccacagtcgagctgcttgatctggacaccatggaggagagctctgagataaaagtggaaacaaacatttccaagacatcctggattcggagttccatggctgccagtgggaaaagggtcagcaaagccctcagctacatcacaggagagatgaaggagtgtggagagggacttaaagacaagtccccagtgttccagttctttgactgggtcctccgaggcacatctcaagtgatgtttgtgaacaaccccctcagcggcatcctcatcatcctcggcctcttcatccagaacccctggtgggcgatctcaggctgcctgggtaccatcatgtccaccttgacagccctcatcctgagtcaggacaagtcggccatcgctgcaggatttcacggctacaatggggtgctggtggggctgctgatggccgtgttctcagacaaaggtgactactactggtggctgttgctacccgtcatcatcatgtccatgtcttgccccatcctctccagtgccctgggtaccatcttcagcaagtgggacctcccagtcttcacactgcccttcaatatcactgtgactttgtacctggcagccacgggccactacaaccttttcttccccacaacgctgctgcagcctgcatccgccatgcccaacatcacctggtcagaggtccaagtgcccttgcttttgagagccatccccgttggaattggccaagtgtacggctgtgataacccctggactggaggcatcttcctcatagctctgttcatatcctcacctctcatttgcttgcatgcagcaattggatccaccatggggatgctagcagcactcactattgcgacgccctttgactccatctacttcggcctgtgtggcttcaacagcaccctcgcatgcatagcgataggaggcatgttctacgtcatcacctggcagacgcacctcctcgccatcgcctgcgcactgtttgctgcctacctgggtgctgccctggctaacatgttatctgtgtttggattgccgccctgcacttggcccttctgtctctcagctctcaccttcctgctcctgacgaccaataaccccgccatctacaagctcccgctcagcaaagtcacctacccagaggccaaccgcatctactacctgtcccaggagagaaacagaagggcatcaatcataacaaagtatcaggcctacgatgtctcctaagtttccctgtctaaaacacatcagtgtaaattcaggcttcagcacgccgtccagatccccaggataagagaccacttagccttccctttggtctgttctgtgactctctccccaaacacaaagaagcgtgtatgtagtcaccattccagaacctctcttttctaagatgcacaacacttatcaaagatatgtttagtttagactttatacccttagctttcccataagagctccctttgtggggaacttgccctcttctgcgaaataagcctcatccttaaagagaagtcaccggccgggcacggtggctcacgcctgtaatcccagcactttgggaggccgaggcgggtggatcacgaggtcaggagatcgagaccatcctggcgaacatggtgagaccccatctctactaaaaatacaaaaaattagccaggcatggtggcgggcacctgtagt

SEQ ID NO: 319083 - DNA, 4167 bp, Artificial Sequence
  derived and/or modified sequence
ttttttttttttttttgagacacagtttgctctgtcacccaggctggagtacattggcactatcttggctcactgcaacctccacctcccaggttcaagagattcttctgtctcagcctcccagtagctaggactacaagtgtgtgccaccacaccctgctaatttttgtatttttagtagagacagggtttcaccacattggccaggctggtctcgaacttctgacgtcaagtgatccacccgactcggcctctcaaagtgctgggattacaggcgtgggccgccgcacccggccatttgcttttgattttactggctcataggtggaagggacttgccttgcctcagatgaaactttggactttgactttcaagttaatactggaataagttaagactttgggggactgttgctaaggcacaattttgttttgaaatgtataaagaacataatatctgggaggggccaggggcagaatgatatggtttggctctgtgtccacacctgaatatcatctcaaattgtaatcccagtaatccccatatgttgagggcaggacccagggcaaggtgactggatcatgggagcggtttcccccatgctgttctcgtgatagtgagtgaattctcacaagatctgatggttttataagtgtttggcaagttcctgctccacaccatctctctcttctgccgccatttgagaaggtccaagtttgcttccccttcgccttccaccatgactgtaagtttcctgaggcctccccagcaatgtggaagttccatcgatagaagagtggctgtgacccgaaggaatgtctgacccccacagcagtcctctcctgccagagccactttccagcagatacaaactctacgaggcagagtttaccagcccgagctggccctcgacatccccggatactcacccagctctgcccctcctggaaatgcctgaagaaaaggatctccggtcttccaatgaagacagtcacattgtgaagatcgaaaagctcaatgaaaggagtaaaaggaaagacgacggggtggcccatcgggactcagcaggccaaaggtgcatctgcctctccaaagcagtgggctacctcacgggcgacatgaaggagtacaggatctggctgaaagacaagcaccttgccctccagttcatagactgggtcctgagagggaccgctcaggtgatgttcatcaacaatcctctcagcggcctcatcatcttcatagggctgctgatccagaatccctggtggacaatcactgggggcctggggacagtggtctcgaccttaacagctctcgccttgggccaagacaggtctgccattgcctcaggactccatgggtacaacgggatgctggtgggactgctgatggccgtgttctcggagaagttagactactactggtggcttctgtttcctgtgaccttcacagccatgtcctgcccagttctttctagtgccttgaattccatcttcagcaagtgggacctcccggtcttcactctgcccttcaacattgcagtcaccttgtaccttgcagccacaggccactacaacctcttcttccccacaacactggtagagcctgtgtcttcagtgcccaatatcacctggacagagatggaaatgcccctgctgttacaagccatccctgttggggtcggccaggtgtatggctgtgacaatccctggacaggcggcgtgttcctggtggctctgttcatctcctcgccactcatctgcttgcatgcagccattggctcaatcgtggggctgctagcagccctgtcagtggccacacccttcgagaccatctacacaggcctctggagctacaactgcgtcctctcctgcatcgccatcggaggcatgttctatgccctcacctggcagactcacctgctggccctcatctgtgccctgttctgtgcatacatggaagcagccatctccaacatcatgtcagtggtgggcgtgccaccaggcacctgggccttctgccttgccaccatcatcttcctgctcctgacgacaaacaacccagccatcttcagactcccactcagcaaagtcacctaccccgaggccaaccgcatctactacctgacagtgaaaagcggtgaagaagagaaggcccccagcggaggcggtggggagcatccacccacagcaggcccaaaggtggaggagggctcggaggctgtgctctccaagcacaggagtgtatttcacatcgagtggtcatccattcggaggaggagcaaagtgtttggaaaaggcgaacaccaggaaagacaaaacaaagacccatttccctatcgataccggaagcccacagtcgagctgcttgatctggacaccatggaggagagctctgagataaaagtggaaacaaacatttccaagacatcctggattcggagttccatggctgccagtgggaaaagggtcagcaaagccctcagctacatcacaggagagatgaaggagtgtggagagggacttaaagacaagtccccagtgttccagttctttgactgggtcctccgaggcacatctcaagtgatgtttgtgaacaaccccctcagcggcatcctcatcatcctcggcctcttcatccagaacccctggtgggcgatctcaggctgcctgggtaccatcatgtccaccttgacagccctcatcctgagtcaggacaagtcggccatcgctgcaggatttcacggctacaatggggtgctggtggggctgctgatggccgtgttctcagacaaaggtgactactactggtggctgttgctacccgtcatcatcatgtccatgtcttgccccatcctctccagtgccctgggtaccatcttcagcaagtgggacctcccagtcttcacactgcccttcaatatcactgtgactttgtacctggcagccacgggccactacaaccttttcttccccacaacgctgctgcagcctgcatccgccatgcccaacatcacctggtcagaggtccaagtgcccttgcttttgagagccatccccgttggaattggccaagtgtacggctgtgataacccctggactggaggcatcttcctcatagctctgttcatatcctcacctctcatttgcttgcatgcagcaattggatccaccatggggatgctagcagcactcactattgcgacgccctttgactccatctacttcggcctgtgtggcttcaacagcaccctcgcatgcatagcgataggaggcatgttctacgtcatcacctggcagacgcacctcctcgccatcgcctgcgcactgtttgctgcctacctgggtgctgccctggctaacatgttatctgtgtttggattgccgccctgcacttggcccttctgtctctcagctctcaccttcctgctcctgacgaccaataaccccgccatctacaagctcccgctcagcaaagtcacctacccagaggccaaccgcatctactacctgtcccaggagagaaacagaagggcatcaatcataacaaagtatcaggcctacgatgtctcctaagtttccctgtctaaaacacatcagtgtaaattcaggcttcagcacgccgtccagatccccaggataagagaccacttagccttccctttggtctgttctgtgactctctccccaaacacaaagaagcgtgtatgtagtcaccattccagaacctctcttttctaagatgcacaacacttatcaaagatatgtttagtttagactttatacccttagctttcccataagagctccctttgtggggaacttgccctcttctgcgaaataagcctcatccttaaagagaagtcaccggccgggcacggtggctcacgcctgtaatcccagcactttgggaggccgaggcgggtggatcacgaggtcaggagatcgagaccatcctggcgaacatggtgagaccccatctctactaaaaatacaaaaaattagccaggcatggtggcgggcacctgtagtcccagctacttgggaggctgaggcaggagaatggcgtgaacccgggaggtggagcttgcagtgagccaagatcacgccactgcactccagcctgggcaacggagtgagactctgtctcaaaaaaaaaaaaaa

SEQ ID NO: 319084 - DNA, 1729 bp, Artificial Sequence
  derived and/or modified sequence
atctctctcttctgccgccatttgagaaggtccaagtttgcttccccttcgccttccaccatgacttccatcgatagaagagtggctgtgacccgaaggaatgtctgacccccacagcagtcctctcctgccagagccactttccagcagatacaaactctacgaggcagagtttaccagcccgagctggccctcgacatccccggatactcacccagctctgcccctcctggaaatgcctgaagaaaaggatctccggtcttccaatgaagacagtcacattgtgaagatcgaaaagctcaatgaaaggagtaaaaggaaagacgacggggtggcccatcgggactcagcaggccaaaggtgcatctgcctctccaaagcagtgggctacctcacgggcgacatgaaggagtacaggatctggctgaaagacaagcaccttgccctccagttcatagactgggtcctgagagggaccgctcaggtgatgttcatcaacaatcctctcagcggcctcatcatcttcatagggctgctgatccagaatccctggtggacaatcactgggggcctggggacagtggtctcgaccttaacagctctcgccttgggccaagacaggtctgccattgcctcaggactccatgggtacaacgggatgctggtgggactgctgatggccgtgttctcggagaagttagactactactggtggcttctgtttcctgtgaccttcacagccatgtcctggatggagacggattttaactggagtaagagtggatgctggaagcatctgctacaataatccacaattgtctgctacaaaaccccacagagatgacagtgtttagattagagtgatatccatgaacatgccacaggccactacaacctcttcttccccacaacactggtagagcctgtgtcttcagtgcccaatatcacctggacagagatggaaatgcccctgctgttacaagccatccctgttggggtcggccaggtgtatggctgtgacaatccctggacaggcggcgtgttcctggtggctctgttcatctcctcgccactcatctgcttgcatgcagccattggctcaatcgtggggctgctagcagccctgtcagtggccacacccttcgagaccatctacacaggcctctggagctacaactgcgtcctctcctgcatcgccatcggaggcatgttctatgccctcacctggcagactcacctgctggccctcatctgtgccctgttctgtgcatacatggaagcagccatctccaacatcatgtcagtggtgggcgtgccaccaggcacctgggccttctgccttgccaccatcatcttcctgctcctgacgacaaacaacccagccatcttcagactcccactcagcaaagtcacctaccccgaggccaaccgcatctactacctgacagtgaaaagcggtgaagaagagaaggcccccagcggtgaatagccatgttcggggaagaaacgctctttgcctgacctgatgtcctctccctgtgttctctgctctggttcaatcagttgcagcactcaccttctttgcctctccttgcacctgtgtagaaccaagcacacctgtaactttctttccctgaagctgattttcattctctgccagaatctccataactatctattgtgcgacattaagggatgttggtattacagtaaaatttccggagttagc

SEQ ID NO: 319085 - DNA, 2763 bp, Artificial Sequence
  derived and/or modified sequence
atgagcgacccccacagcagccccctgctgcccgagcccctgagcagcagatacaagctgtacgaggccgagttcaccagccccagctggcccagcaccagccccgacacccaccccgccctgcccctgctggagatgcccgaggagaaggacctgagaagcagcaacgaggacagccacatcgtgaagatcgagaagctgaacgagagaagcaagagaaaggacgacggcgtggcccacagagacagcgccggccagagatgcatctgcctgagcaaggccgtgggctacctgaccggcgacatgaaggagtacagaatctggctgaaggacaagcacctggccctgcagttcatcgactgggtgctgagaggcaccgcccaggtgatgttcatcaacaaccccctgagcggcctgatcatcttcatcggcctgctgatccagaacccctggtggaccatcaccggcggcctgggcaccgtggtgagcaccctgaccgccctggccctgggccaggacagaagcgccatcgccagcggcctgcacggctacaacggcatgctggtgggcctgctgatggccgtgttcagcgagaagctggactactactggtggctgctgttccccgtgaccttcaccgccatgagctgccccgtgctgagcagcgccctgaacagcatcttcagcaagtgggacctgcccgtgttcaccctgcccttcaacatcgccgtgaccctgtacctggccgccaccggccactacaacctgttcttccccaccaccctggtggagcccgtgagcagcgtgcccaacatcacctggaccgagatggagatgcccctgctgctgcaggccatccccgtgggcgtgggccaggtgtacggctgcgacaacccctggaccggcggcgtgttcctggtggccctgttcatcagcagccccctgatctgcctgcacgccgccatcggcagcatcgtgggcctgctggccgccctgagcgtggccacccccttcgagaccatctacaccggcctgtggagctacaactgcgtgctgagctgcatcgccatcggcggcatgttctacgccctgacctggcagacccacctgctggccctgatctgcgccctgttctgcgcctacatggaggccgccatcagcaacatcatgagcgtggtgggcgtgccccccggcacctgggccttctgcctggccaccatcatcttcctgctgctgaccaccaacaaccccgccatcttcagactgcccctgagcaaggtgacctaccccgaggccaacagaatctactacctgaccgtgaagagcggcgaggaggagaaggcccccagcggcggcggcggcgagcacccccccaccgccggccccaaggtggaggagggcagcgaggccgtgctgagcaagcacagaagcgtgttccacatcgagtggagcagcatcagaagaagaagcaaggtgttcggcaagggcgagcaccaggagagacagaacaaggaccccttcccctacagatacagaaagcccaccgtggagctgctggacctggacaccatggaggagagcagcgagatcaaggtggagaccaacatcagcaagaccagctggatcagaagcagcatggccgccagcggcaagagagtgagcaaggccctgagctacatcaccggcgagatgaaggagtgcggcgagggcctgaaggacaagagccccgtgttccagttcttcgactgggtgctgagaggcaccagccaggtgatgttcgtgaacaaccccctgagcggcatcctgatcatcctgggcctgttcatccagaacccctggtgggccatcagcggctgcctgggcaccatcatgagcaccctgaccgccctgatcctgagccaggacaagagcgccatcgccgccggcttccacggctacaacggcgtgctggtgggcctgctgatggccgtgttcagcgacaagggcgactactactggtggctgctgctgcccgtgatcatcatgagcatgagctgccccatcctgagcagcgccctgggcaccatcttcagcaagtgggacctgcccgtgttcaccctgcccttcaacatcaccgtgaccctgtacctggccgccaccggccactacaacctgttcttccccaccaccctgctgcagcccgccagcgccatgcccaacatcacctggagcgaggtgcaggtgcccctgctgctgagagccatccccgtgggcatcggccaggtgtacggctgcgacaacccctggaccggcggcatcttcctgatcgccctgttcatcagcagccccctgatctgcctgcacgccgccatcggcagcaccatgggcatgctggccgccctgaccatcgccacccccttcgacagcatctacttcggcctgtgcggcttcaacagcaccctggcctgcatcgccatcggcggcatgttctacgtgatcacctggcagacccacctgctggccatcgcctgcgccctgttcgccgcctacctgggcgccgccctggccaacatgctgagcgtgttcggcctgcccccctgcacctggcccttctgcctgagcgccctgaccttcctgctgctgaccaccaacaaccccgccatctacaagctgcccctgagcaaggtgacctaccccgaggccaacagaatctactacctgagccaggagagaaacagaagagccagcatcatcaccaagtaccaggcctacgacgtgagctag

SEQ ID NO: 319086 - DNA, 708 bp, Artificial Sequence
  derived and/or modified sequence
atgtcggatccgcattcaagcccactgcttccggagccactttcctcacgatacaaattatacgaagcggaattcaccagccccagttggccctctacgagcccggacacacacccagctctgcccctgcttgagatgcctgaagaaaaagatctgcgcagtagcaatgaggatagtcatatcgtgaagatcgaaaagctaaacgaacggagtaagcgcaaggatgatggggtcgctcaccgcgacagtgccgggcagcgatgcatttgtctctccaaagcagtcggttatctgacaggcgacatgaaggagtacagaatctggctgaaagataaacacctggctctccagttcattgactgggtactgcggggtacagctcaagtgatgtttattaataatccgctgtcgggactaattatcttcattggtctgctgattcagaatccttggtggactattacaggtggtctgggcacagtggtgagcacactgacagctctggctctcgggcaggatcggagcgccatcgcatcgggcttgcatggatacaacgggatgttggtcggtctcctgatggccgtcttcagtgaaaagctggactattattggtggctgctgttcccagtgacatttactgcaatgagctggatggagacagacttcaactggtctaagtctggttgttggaaacacctgctacagtag

SEQ ID NO: 319087 - DNA, 708 bp, Artificial Sequence
  derived and/or modified sequence
atgtctgacccccacagcagccccctgctgcctgagcccctgagcagccgctacaagctgtatgaagctgagttcaccagccccagctggcccagcaccagcccagacacccacccagccctgcccctgctggagatgcctgaggagaaggacctgcggagcagcaatgaagacagccacatcgtgaagattgagaagctgaatgaaagaagcaagaggaaggatgatggagtggcccaccgggacagcgctggccagcgctgcatctgcctgagcaaggctgtgggctacctgactggagacatgaaggagtaccgcatctggctgaaggacaagcacctggccctgcagttcatcgactgggtgctgcggggcacagcccaggtgatgttcatcaacaaccccctgagcggcctcatcatcttcatcggcctgctgatccagaacccctggtggaccatcactggaggcctgggcaccgtggtgtccaccctgacagccctggccctgggccaggacagaagtgccatcgccagcggcctgcacggctacaacggcatgctggtgggcctgctgatggctgtgttttctgagaagctggactactactggtggctgctcttccctgtgaccttcaccgccatgtcctggatggagacagacttcaactggagcaagagcggctgctggaagcacctgctgcagtag

SEQ ID NO: 319088 - DNA, 708 bp, Artificial Sequence
  derived and/or modified sequence
atgagcgacccccacagcagccccctgctgcccgagcccctgagcagccgatataagctttatgaagccgaattcacatcccccagctggcctagcacgtccccagacacacaccctgccctgccgctgttggagatgcctgaagaaaaggatctgcgctcttctaacgaagactctcacatcgttaaaatcgaaaagctgaatgagcggagtaagcggaaagatgatggtgttgctcaccgcgacagtgccggccagagatgtatatgtctttctaaggcagtagggtatcttacaggtgatatgaaagaatacagaatttggctcaaggataagcacttggctctgcaattcatcgactgggtacttaggggcaccgcacaggttatgttcatcaacaatccgttgtccggcttaatcattttcattggcctgttaatccagaacccatggtggactattacaggaggcctcgggaccgtggtaagtaccttaaccgctcttgccctgggccaagaccgctcggccatcgcgtccggcctgcacggatacaatggcatgctggtagggctgcttatggccgtgttctctgaaaaactcgactattactggtggcttttatttcccgtgacctttaccgccatgtcttggatggagacagattttaactggtccaagagcgggtgctggaagcatttactccagtag

SEQ ID NO: 319089 - DNA, 708 bp, Artificial Sequence
  derived and/or modified sequence
atgtccgacccccattcatctcctcttctccccgagccgttatccagtcgttataagctctatgaagctgaatttacatccccctcatggccctcaaccagccctgacacacaccctgccctacctctgctggaaatgcctgaagagaaggacctgcggtcgtcaaatgaggactcccacatagtcaaaatcgaaaaattgaacgagagaagtaagaggaaggatgacggcgtcgcccatcgtgattctgcaggacaaaggtgtatatgtctgtctaaggcagtgggttacctgacaggcgatatgaaggagtacaggatctggctgaaggataagcacttggccctgcaattcatagactgggtgctacgcggaacagctcaagtcatgttcattaacaaccctttatcagggctgattatttttatcggcctgttaattcagaatccatggtggacaatcacaggtgggcttgggaccgtggtgagcacattgactgccctggctcttgggcaagaccggtcagccatcgcctctgggctccacggttacaacggaatgttagtaggcttgttaatggccgtcttctccgagaaattagattactactggtggctgctcttcccggtcaccttcaccgctatgagttggatggagacagacttcaattggtcaaagtcaggatgttggaagcatctcctgcagtag

SEQ ID NO: 319090 - DNA, 708 bp, Artificial Sequence
  derived and/or modified sequence
atgagcgacccccacagcagccccctgctgcccgagcccctgagcagcagatacaagctgtacgaggccgagttcaccagccccagctggcccagcaccagccccgacacccaccccgccctgcccctgctggagatgcccgaggagaaggacctgagaagcagcaacgaggacagccacatcgtgaagatcgagaagctgaacgagagaagcaagagaaaggacgacggcgtggcccacagagacagcgccggccagagatgcatctgcctgagcaaggccgtgggctacctgaccggcgacatgaaggagtacagaatctggctgaaggacaagcacctggccctgcagttcatcgactgggtgctgagaggcaccgcccaggtgatgttcatcaacaaccccctgagcggcctgatcatcttcatcggcctgctgatccagaacccctggtggaccatcaccggcggcctgggcaccgtggtgagcaccctgaccgccctggccctgggccaggacagaagcgccatcgccagcggcctgcacggctacaacggcatgctggtgggcctgctgatggccgtgttcagcgagaagctggactactactggtggctgctgttccccgtgaccttcaccgccatgagctggatggagaccgacttcaactggagcaagagcggctgctggaagcacctgctgcagtag

SEQ ID NO: 319091 - protein, 194 aa, Artificial Sequence
  derived and/or modified sequence
MRELAAVVSRDIYLHNPNIKWNDIIGLDAAKQLVKEAVVYPIRYPQLFTGILSPWKGLLLYGPPGTGKTLLAKAVATECKTTFFNISASTIVSKWRGDSEKLVRVLFELARYHAPSTIFLDELESVMSQRGTASGGEHEGSLRMKTELLVQMDGLARSEDLVFVLAASNLPCLKAIALQPGDRARLRLKKKKCT

SEQ ID NO: 319092 - DNA, 585 bp, Artificial Sequence
  derived and/or modified sequence
atgagagagctggccgccgtggtgagcagagacatctacctgcacaaccccaacatcaagtggaacgacatcatcggcctggacgccgccaagcagctggtgaaggaggccgtggtgtaccccatcagatacccccagctgttcaccggcatcctgagcccctggaagggcctgctgctgtacggcccccccggcaccggcaagaccctgctggccaaggccgtggccaccgagtgcaagaccaccttcttcaacatcagcgccagcaccatcgtgagcaagtggagaggcgacagcgagaagctggtgagagtgctgttcgagctggccagataccacgcccccagcaccatcttcctggacgagctggagagcgtgatgagccagagaggcaccgccagcggcggcgagcacgagggcagcctgagaatgaagaccgagctgctggtgcagatggacggcctggccagaagcgaggacctggtgttcgtgctggccgccagcaacctgccctgcctgaaggccatcgccctgcagcccggcgacagagccagactgagactgaagaagaagaagtgcacctag

SEQ ID NO: 319093 - DNA, 585 bp, Artificial Sequence
  derived and/or modified sequence
atgagagagctggccgctgtggttagccgggatatataccttcataaccctaacatcaagtggaacgacattatcgggctcgacgccgcgaagcaactggtgaaggaggcagtggtgtatcccattaggtacccacagctgttcaccggaatcctttctccttggaaggggctcttgctttatgggcccccaggtaccgggaaaacacttctcgccaaagcggtggcgactgagtgcaagactactttttttaatatatctgcctcaacaatcgttagcaagtggcgcggcgacagcgagaagctggtgcgagtcttgtttgagctggcaaggtatcacgcccctagtacaattttcctggatgagctggaaagcgtgatgagtcagcggggaaccgcaagtggcggcgaacacgaaggaagtctgcgaatgaaaaccgagctgctggttcaaatggacgggcttgcacggtccgaggatctggttttcgtgctggcggcatctaacctcccctgtctgaaggctatcgcactgcagccgggggatagagcaaggttgaggttgaaaaagaaaaagtgtacatag

SEQ ID NO: 319094 - DNA, 585 bp, Artificial Sequence
  derived and/or modified sequence
atgagggagctggccgctgtggtgtcccgggacatctacctgcacaaccccaacatcaagtggaatgacatcatcggcctggatgctgccaagcagctggtgaaggaggccgtggtgtaccccatccgctacccccagctgttcaccggcatcctgagcccctggaagggcctgctgctgtatggccccccaggcaccgggaagaccctgctggccaaggctgtggccacagagtgcaagaccaccttcttcaacatcagcgccagcaccatcgtgtccaagtggaggggggacagcgagaagctggtgcgggtgctgtttgagctggcccgctaccacgcccccagcaccatcttcctggatgagctggagagcgtgatgagccagaggggcacagccagcggcggggagcacgagggcagcctgaggatgaagacagagctgctggtgcagatggatggcctggcccggtctgaggacctggtgtttgtgctggccgccagcaacctgccctgcctgaaggccatcgccctgcagcccggggaccgggcccggctgcggctgaagaagaagaagtgcacctag

SEQ ID NO: 319095 - DNA, 585 bp, Artificial Sequence
  derived and/or modified sequence
atgcgggagctggccgccgtggtgagccgggacatctacctgcacaaccccaacatcaaatggaacgacatcattggactcgatgcagcaaagcagctggtgaaagaggctgtcgtgtacccgataagataccctcagctcttcaccggtattctgtccccatggaaggggctgttgctgtacggacctcctggaacgggcaagacactgctggcaaaagcagtagctactgagtgtaagaccacattcttcaacatctccgctagtactatcgtatccaagtggagaggcgattccgagaaattggtgcgggtgctcttcgagctcgcccgataccacgccccctccacaatctttctggacgagctcgaatctgtgatgtcacagcgaggcaccgcctctgggggggaacacgagggcagcctccggatgaagactgaactcttggtgcaaatggacggactggctcggtcagaggacctggtcttcgttcttgcggccagtaatctgccatgcctaaaggctattgccctccagccgggtgatcgggcaaggcttaggttgaaaaagaaaaagtgcacgtag

SEQ ID NO: 319096 - DNA, 585 bp, Artificial Sequence
  derived and/or modified sequence
atgagagagctggccgcagttgtgagccgtgacatttacctgcataatccgaacattaaatggaacgatattattggtctagacgctgctaagcagcttgtaaaagaagccgtggtgtaccccatcagatatcctcagcttttcactggtatcctgtccccttggaaaggcctgctgctgtacggcccacctggcaccggaaagactctgttagctaaggcggttgctaccgagtgcaaaaccactttctttaacatctctgcctcaaccatagtcagcaaatggaggggggactccgagaagctagttagagtgctctttgagttagccagataccatgccccatcgaccatctttttggatgagcttgaaagtgtcatgagtcagcgaggtaccgcctccggtggtgaacacgaaggaagcctacgcatgaagactgagcttcttgtgcagatggacggcctggctaggtcagaagacctggtattcgtgcttgctgcttctaacctcccctgtctgaaagctatagctctgcagcctggtgacagagccaggcttcgattgaagaagaagaagtgtacctag

SEQ ID NO: 319097 - DNA, 1280 bp, Artificial Sequence
  derived and/or modified sequence
agtaactgactacttttctcccttctctagggtcctagcacagtgtctgatggagctttcctaccagaccctgaaattcacgcatcaggcgcgggaagcggtatatcgatacagcaaatgctttggagcaagaaactaaactggggttacgacggtttgaagtttgtgacaacattgatcttgaaactattttgatggaatatgagagttattattttgtaaaatttcagaaataccccaaaattgtcaaaaagtcatcagacacagcagaaaataatttaccgcaaagaagtagagggaagaccagaaggatgatgaacgacagttgtcaaaatcttcccaagatcaatcagcagaggccccggtccaaaaccacagcggggaagacaggggacaccaaatcgctcaataaggagcatcctaatcaggaggtagttgataacactcgcctggaaagtgccaacttcggcctacatatatcaagaatccgtaaagacagtggagaggaaaatgcccacccacgaagaggccaaatcattgacttccaagggctgctcacagatgccatcaagggagcaaccagtgaacttgccttgaacaccttcgaccataatccagacccctcagaacgactgctgaaacctctgagtgcatttattggcatgaacagtgagatgcgagaattggcagccgtggtgagccgggacatttatctccataatccaaacataaagtggaatgacattattggacttgatgcagccaagcagttagtcaaagaagctgttgtgtatcctataaggtatccacagctatttacaggaattctttctccctggaaaggactactgctgtacggccctccaggtacaggaaagactttactggccaaagctgtggccactgaatgtaaaacaaccttctttaacatttctgcatccaccattgtcagcaaatggagaggggattcagaaaaactcgttcgggtgttatttgagcttgcccgctaccacgccccatccacgatcttcctggacgagctggagtcggtgatgagtcagagaggcacagcttctgggggagaacatgaaggaagcctgcggatgaagacagagttactggtgcagatggatgggctggcacgctcagaagatctcgtatttgtcttagcagcttctaacctgccgtgcttgaaagccattgcactccagcctggcgacagagcaagactccgtctcaaaaaaaaaaaatgtactagtccattttcatgctgctggtga

SEQ ID NO: 319098 - DNA, 2033 bp, Artificial Sequence
  derived and/or modified sequence
cccgactccgagctgtccccgctcccggcgcggcgctccgctctcagccacctcacggctgccaggagtgcgcgggagtttgccccggagcgcggggaagtttcctccgaagctgcgctcctggaacagcagcacctgcaagcgcccggcagcggcccgcgaggttactttatggaattgggctcttagagaacaagaaaagactgaagttttacgggaaaacaaatcatgtggtcttcagattctgaaataaggagaaatgcagccatctgaaatggtcatgaaccccaaacaagtcttcctctctgtgctgatatttggagtagctgggctactcctcttcatgtatttgcaagtctggattgaagaacaacatacagggagagtggagaagagaagagaacaaaaagtaacttcaggatggggaccagtgaagtacttgcggcctgtacccagaatcaaaccccaagtttcacatgcctgaggatgtacgagaaaaaaaggaaaatcttctactcaattctgagagatctactaggctcttaacaaagaccagtcattcacaaggaggggatcaagctttaagtaagtccacagggtcaccaacagagaagttgattgaaaaacgtcaaggagctaagactgtttttaacaagttcagcaacatgaattggccagtggacattcaccctttaaacaaaagtttagtcaaagataataaatggaagaaaactgaggagacccaagagaaacgaaggtctttccttcaggagttttgcaagaaatacggtggggtgagtcatcatcagtcacatctttttcatacagtatccagaatctatgtagaagataaacacaaaatcttatattgtgaggtacctaaggctggctgttccaattggaaaagaattctgatggtactaaatggattggcttcctctgcatacaacatctcccacaatgctgtccactacgggaagcatttgaagaagctagatagctttgacctaaaagggatatatacccgcttaaatacttacaccaaagctgtgtttgttcgtgatcccatggaaagattagtatcagcctttagggacaaatttgaacaccccaatagttattaccatccagtattcggaaaggcaattatcaagaaatatcgaccaaatgcctgtgaagaagcattaattaatggatctggagtcaagttcaaagagtttatccactacttgctggattcccaccgtccagtaggaatggacattcactgggaaaaggtcagcaaactctgctatccgtgtttgatcaactatgattttgtagggaaatttgagactttggaagaagatgccaattactttttacagatgatcggtgctccaaaggagctgaaatttcccaactttaaggataggcactcttccgatgaaagaaccaatgctcaagtcgtgagacagtatttaaaggatctgactagaactgagagacaattaatctatgacttttattacttggactatttaatgtttaattatacaactccatttttgtagtttgcattcattttctaaaaccctgtatatacttaatgatgataagttcaaatcagctgtaatttttctataattctctgtatgacagaaatttaaccaagtgcagttgtcttgatttaatgtagatttttaccaaatagtatgacaccaattggcacaaagttataggaaaatcacctacaggagatgtaaacaacttgagttgctctaaaatgtttggaaaagagctgcttttgcattatgaattatattgttgaagcaataacctagccagctgttgcattagctaaagcagcctcttgcaatggtaggaaaaaaggatctcaaatagcatgagtgtatgtctatatcctgaaatttattgtctaaaatgcatgaatatatttttagcagtctgtggcatattaatcaaactgttgaattgttttcttacaccctggaaatctttctatcaactataatgataaatccattttgaag

SEQ ID NO: 319099 - protein, 196 aa, Artificial Sequence
  derived and/or modified sequence
MDQRQRRILGQPLSIPTSQPKQKRTSMISFFSKVSWKLRFQKREPLKNVFFILAERARDPSAKKRHMAMRNLGTMAYEAPDKVRKYKKIVLDLLVYGLYDPVNLEVIHESMKTLTVVLGKIQGKGLGSFFIDITLQTRTLLDDACKTTFQACSPYLKLKEEYSFQSEEDQRNTKLYQQLSHYHPEILQFFYANKIL

SEQ ID NO: 319100 - DNA, 591 bp, Artificial Sequence
  derived and/or modified sequence
atggaccaacgccaaaggaggattcttggccagcctctgagtattcccacatcccaacccaaacagaaacgcacctccatgatttctttcttcagcaaagtctcgtggaagttacggttccagaagcgtgagccattaaagaatgtgttctttattctagcagagagagcgcgggatccatccgcgaagaagaggcacatggcaatgaggaacctgggcaccatggcttacgaggcaccggacaaagtgaggaagtataagaagattgtgctcgatctgctggtgtacggcctttatgaccctgtcaatctggaggttatccatgagagcatgaagacactcacggtggtccttggaaaaatacagggaaaaggtctgggtagctttttcattgacataactctgcagaccaggaccctgctggatgatgcatgtaaaaccacatttcaggcctgctctccctatttaaagctcaaggaggagtacagcttccagagtgaagaagatcagcgcaacacgaagctatatcagcagctgagtcattaccaccctgagattttacagtttttctacgcgaacaagattctctag

SEQ ID NO: 319101 - DNA, 591 bp, Artificial Sequence
  derived and/or modified sequence
atggaccagagacagaggcgaattttgggtcaacccctcagtatcccgacatcccagccaaaacaaaagagaacttcaatgatctcattctttagcaaagtgagctggaaactacggtttcagaaacgagagcctttgaaaaatgttttctttatcttggctgaaagagccagagaccccagcgcaaaaaagcgacacatggctatgcgaaacttgggaacaatggcttacgaggcccctgacaaggtaagaaaatataagaaaatcgtgcttgacctcctcgtatatgggctctatgatccagtaaatttagaagtgattcatgagagcatgaagacacttaccgtggttttgggaaaaattcagggcaagggcctgggatctttttttatcgatatcacactccagacgcggaccctcctggacgatgcttgtaagacaaccttccaggcctgcagtccctatctgaagctgaaggaggagtatagtttccagtccgaggaagatcaaagaaatactaagctttatcagcagctgtctcactatcatcccgagattctgcaattcttttacgcaaacaagatattatag

SEQ ID NO: 319102 - DNA, 591 bp, Artificial Sequence
  derived and/or modified sequence
atggaccagaggcagaggcgcatcctgggccagcccctgagcatccccaccagccagcccaagcagaagaggacctccatgatctccttcttcagcaaggtgtcctggaagctgcgcttccagaagcgggagcccctgaagaatgtgttcttcatcctggccgagcgggcccgggaccccagcgccaagaagaggcacatggccatgaggaacctgggcaccatggcctatgaggccccagacaaggtgaggaagtacaagaagatcgtgctggacctgctggtgtatggcctgtatgaccctgtgaacctggaggtgatccacgagagcatgaagaccctgactgtggtgctgggcaagatccagggcaagggcctgggcagcttcttcatcgacatcaccctgcagaccaggaccctgctggatgatgcctgcaagaccaccttccaggcctgcagcccctacctgaagctgaaggaggagtacagcttccagagcgaggaggaccagaggaacaccaagctgtaccagcagctgagccactaccaccctgagatcctgcagttcttctacgccaacaagatcctgtag

SEQ ID NO: 319103 - DNA, 4887 bp, Artificial Sequence
  derived and/or modified sequence
attcatattcacccttcatgaggatgagcacagagcaagaagctagccacgctgggctcctcattgcctagctcagttccatggaccaaagacagaggagaatcctgggccagcccctttccatccctacttcccagcccaagcagaaaaggacatcaatgatatctttcttttccaaggtctcttggaaactgaggttccagaagcgggagcctctgaagaatgtgtttttcatcttggcagaaagagctcgggaccccagtgctaaaaagcgtcacatggcaatgagaaacttgggaaccatggcctatgaagcccctgacaaggtgagaaagtataagaaaattgtcctcgacctgctggtgtatggactgtatgaccctgtgaatttggaagtcatccatgagagtatgaagactctgaccgtcgttctgggcaagatccaggggaaaggtttgggttccttcttcatagatatcacccttcagaccaggactttattagatgacgcttgcaaaacaacatttcaagcctgttctccatatctgaaactaaaggaggaatacagcttccagagtgaagaagatcaaaggaacactaagctctaccagcagctgagccactatcatccagagatcctgcagttcttctacgcaaataaaattctgtaagcgcagagcagcagggaaatggttctgtatgagtgcattgctgagccatcatgttcccctgttttatctcactggatgcctcttctcactgcttgcctcttgggattgtaatgggaaagagggtgctgggagagcaatcaaaggcaaaaataatacatggaattgtatgattttatctaaagtaaaattctagactgctttcacttatttcatttcctccccatacaaatttgatgagcaggtacacactttctttaaaacattccaagtgtatatagattcagtgcttatttctcagctttttctttcttaagttcatctctgtcacctagcttttatttttaatactcaatttctgaggcttaggagaatacttgttaccttaagcgtttttttgtttttttgttgttgttgttttgtttttttttagtgtatttgctattgatactttgctattgatacctttacttgccaagatttatttaaagttggccaagataccaagaaggtggcttgcaggggcatctttggcttctcataattttaaacagtcattgctttcaagatcatgctaaacaagaattaatagagagaaaaaaatctataaagcatgtgttgaaaatcctcaggctcatgataacttacgggataacaatagtaggtaacaccgagtgcttacaattcagtgggcacggtcaaagtgctttttgtaagttctatttaatacttgcgacaaccctgagatagtaagtattattattgttctcattttatagatgagaaagctaacacatagggaaattaggtaactttccccagataactcagtaaacagtggagctggaattcaaacatgtacggtctgacttcttgagcccatactcaataatcatgccatcctgcctttccatggaataactgatggatggttagaaatgttaaaaacaaagcaaatgcaaacatctctgcttctgctcctctactaagcccagttaacttttgattttatatgtactaagtatacatttttattaatttatgtgagctgagtgtttttattaattactttttggctattaatgtcaattattttggtgatcaatcctagttatccaaggagtcacatcactcgtaaaaattacaagaaaaatctctaagtccctctcaccctccctctaaccagattgcatcccaagcttctatagaaactctggtaccacccctgaattcagtatccaggccacacccggagcgttttgttcaagacaatttaaaacacgggggattataaaagctatagctggatcttaagtggcattctgagaatgaggaactcaattttctgctgtagctcccagggacagggtggtgtgacacagatgcggggatgaggagagacctaggcgagatgaggatgtgggagatggcagacagagtggcaagtgccaggcaggaatggattttcttccttcctgttctgaatctgaagaacatgacagcaagagattttaggagggacacaggctcacgagcaaatgggtggttctgagctgtaagccccctgcccctccctagcacccactccccggatgctggcctctttgaaattttgttgcaaggttggtttaaacttgatgcagttccattaagtgatcagtgagtggtctgagaaatggctgcatgtggctggcattcaaaaaggtggggatagggtgagatgggtggggttacgtgctctggagtagaaaaacctatgcagttaatgtccctctgtcggttaaaattgtggaagatgcggttggattatttgactttaagattcaatggtaggcttttattttggtggcccccaatgagtcatgcctcctgatactcatgtctttatttagtcccttctgtttgaatctgggctgcctttgtgacttgctttaatcaggagattgtgataaatggcactgtgccgggcatagaaaccctggcagtttcctcgtttgaattgtgggggaagccagctgccacataaggagttgaactaccaggaacaaatgagagtgcctgagatcaccatgtgaaggagaacggagacacccaacccacagcagagtctgaggcccggacacatgacacaagttgtcccttccagccagacccgagctgttgaagctactccagctgacaccatacggaaaagagacgagcgtctccatcaagcctgtgtcagttgcagaagcatgaacaaagaatcaaatgattgttgttttaagtcattaacctttgggataatttgtcacactgcaataagtaaccagagaagattccttattattaactgttgtcttggctaattttgttttgctcttcataagtcctctttgagtttaaattctatttccagaaatttatgttatcatgaaatttggtggcaagagcaagggactatgtttttttgtttgtttgtttctgtttctcaccatacctaccacagagcctggccatgtgattaaggaacatttgctgaatgactaaatgattccaaattgtagagggaataaagtccaatgtccagtctgccatttcaggctttcaaccttcgttttcttctgttactctctttgcttcagacaagtttgggtcctttctcttctctcaacatgtcttgttctcctataccccctcacctttgctcagtctgctatttctgtgttgagtcccctccctgctcacctgtacacacccacctggaatcacatgcacacacacacacacacatttcacgtgtatctcttatctgtactccaatgcctaggtcaaagtcctgatccccccaatcaggggagagctcaagtctctgaattcccagaacattctagcaatattataccacttatatcttatctgaaaagtttttttttgtatatggctttatgtttttttttttatcctgttagattgaaactacagaaggcagggctgtatcttgtacatcattgtatctccccggtgactgcaaaagtactctgtaaatgaatgttgattagggggaaaaatgtcagaaagtcatctgaagctgtcattccttactgggaggagcccattttgacaaatgagggtcaccaatttcattccttataaccaatgtacaggttacttttatgcttgtgcatttcaagtttccccttccccacgtttatctgaatgccaacccaaaggtaatgttttgacatttcttaattttgaacattaattttgaaccttattgagcagttgaatgaaagaaagaaaaaaggaatgttcaagtgccccgaccctcatgctaagtgcccagggtagagctttgcttggtccctgtgtctctggtgctcatgagataggtctttctttctttatttttatttttgagatggagcctcactctgtcacccaggctggagtgcaatgacacgatctcggctcactgcaacctccacctcctgggttcaagcgattctcctgtctcagcctcctgagtagctgggattacaggtgcctgccaccatggctggctaatttttgtgtttttagtagagacggggtttcaccatgttggccaggctggtctcaaactcctgacctcaagtgatctgctcaccttggtctcccaaagtgctgggattacaggcgtgagccaccgctcctggctgagataggtctttcttaaaggggagagggaagtggtggagagagaggagagaaaatgacaaaggaggaggctgagaatctaacaggtgtgaccaattctgctactgaatgagagcagaagcctgtgaacttccagttaatagaccacttaattgggggaacgcttcacacgttataaaaaagcactagaatgttttgaaagcgagaaacaacagctgtgtagggtagctagcagttagtgttgtacagaagacagatatttgtgcatttctgcattttctaagtttgctgcaatgagcatgtattactttcatagttataaaacacatgcaaaatgcccttttaaaatgaaaaaaaagtccatgagtgtaagtgatatatatgctttggaaagcctgggacggtcattgtttactctcaatagtatgtgtttgcctttgtctttttgagacattttgttttaatctgttgatgacaataacctgttgataatataacttgataacaaataaaatgacttatgattgattatcatttt

SEQ ID NO: 319104 - DNA, 866 bp, Artificial Sequence
  derived and/or modified sequence
atattcacccttcatgaggatgagcacagagcaagaagctagccacgctgggctcctcattgcctagctcagttccatggaccaaagacagaggagaatcctgggccagcccctttccatccctacttcccagcccaagcagaaaaggacatcaatgatatctttcttttccaaggtctcttggaaactgaggttccagaagcgggagcctctgaagaatgtgtttttcatcttggcagaaagagctcgggaccccagtgctaaaaagcgtcacatggcaatgagaaacttgggaaccatggcctatgaagcccctgacaaggtgagaaagtataagaaaattgtcctcgacctgctggtgtatggactgtatgaccctgtgaatttggaagtcatccatgagagtatgaagactctgaccgtcgttctgggcaagatccaggggaaaggtttgggttccttcttcatagatatcacccttcagaccaggactttattagatgacgcttgcaaaacaacatttcaagcctgttctccatatctgaaactaaaggaggaatacagcttccagagtgaagaagatcaaaggaacactaagctctaccagcagctgagccactatcatccagagatcctgcagttcttctacgcaaataaaattctgtaagcgcagagcagcagggaaatggttctgtatgagtgcattgctgagccatcatgttcccctgttttatctcactggatgcctcttctcactgcttgcctcttgggattgtaatgggaaagagggtgctgggagagcaatcaaaggcaaaaataatacatggaattgtatgattttatctaaagtaaaattctagactgct

SEQ ID NO: 319105 - DNA, 591 bp, Artificial Sequence
  derived and/or modified sequence
atggaccagcggcagcggcggatcctgggccagcccctgagcatccccacctcccaaccaaagcagaagagaactagtatgataagtttctttagcaaagtgtcctggaagcttcgctttcagaaacgggagcctcttaaaaacgtctttttcattctggcggagcgagctagagacccatccgccaagaagagacacatggctatgcgcaatctcgggaccatggcgtatgaggcacccgacaaagtcaggaagtacaagaagatcgtgcttgatttgcttgtctatggcctttacgaccctgttaatctggaggttatacatgaatctatgaaaacccttacagtggtcctgggtaagatacagggcaaaggactcgggtccttttttattgacatcactctgcagacaagaacactgctggatgacgcctgcaaaactaccttccaagcgtgcagtccatatttaaaacttaaggaggagtactccttccagtcggaagaggaccagaggaacactaaactctatcaacagctttctcactatcatcccgaaatcctccagttcttctatgcaaataaaatcctgtag

SEQ ID NO: 319106 - DNA, 591 bp, Artificial Sequence
  derived and/or modified sequence
atggaccagcggcagcggcggatcctgggccagcccctgagcatccctacttcacagcccaagcagaagagaaccagtatgataagtttctttagcaaagtgtcttggaaactgcgcttccagaaacgagagcccttgaagaacgtcttctttattctggccgagcgggctagggatccatccgccaagaagaggcacatggccatgagaaacttaggaaccatggcatatgaagctccagacaaagtgcgcaagtacaaaaagatcgtactcgatctcctcgtttatggtctgtatgatccagtgaacctggaggtaattcatgagagcatgaagaccctgactgtagtattaggaaagattcaaggcaaaggtttagggtcttttttcattgatataaccctgcagaccaggaccttactcgacgatgcctgtaagaccacctttcaagcatgtagtccgtatctcaagttaaaagaggaatactcctttcagtccgaagaggatcagcggaacacaaagctgtaccagcaacttagccactaccatcctgagatactgcagtttttctatgcaaataaaattctatag

SEQ ID NO: 319107 - DNA, 591 bp, Artificial Sequence
  derived and/or modified sequence
atggatcagcgccagagaaggatcctgggccagccactttctatacccaccagccagcctaagcagaagagaacttctatgatttcctttttttccaaagtctcttggaagttgcggtttcagaaacgggaacccttgaaaaacgtgttttttattctggccgagcgcgctcgagatccgtcagctaagaagagacacatggcgatgcggaatttagggacaatggcttatgaggctcctgacaaggttcggaagtataagaagatcgtactggacttgctggtgtacggcttgtacgacccagtgaatttggaggtgatccacgagagcatgaaaacgttgacagtagtgctgggcaaaattcagggaaagggtcttggatctttttttatcgatatcaccctccaaaccaggactctcctagatgatgcctgcaagacaacattccaggcatgttccccttatttaaaattgaaggaagaatattctttccaaagtgaagaggatcaacggaacacaaaactgtaccagcagttaagccactatcacccagaaatcttgcaatttttctacgctaacaaaatactgtag

SEQ ID NO: 319108 - DNA, 591 bp, Artificial Sequence
  derived and/or modified sequence
atggaccaacgtcagcgcaggattctaggtcagcctctgtccatccctactagccagccaaaacagaagcgcactagtatgattagtttcttttcaaaggttagttggaagctgagatttcagaaacgggagccacttaagaatgtgtttttcatcctggctgaacgcgcacgcgacccatcagctaaaaagcgtcatatggccatgcgaaacctaggaaccatggcatatgaagcacctgataaagttcgcaaatacaagaaaatagtgctagatctgttagtgtacggtttatacgatcctgtgaatctggaggtgatacacgagtcgatgaaaacactgactgttgtcctgggtaaaatacaggggaaaggactggggagcttcttcatcgacataaccttacagactcggaccctcctcgatgatgcgtgtaaaacaacatttcaggcctgttccccctatttgaaactgaaagaggaatacagttttcagtccgaagaggatcagcgcaatactaagctgtaccaacaactgagccactatcaccctgagatcctgcagttcttttacgccaacaaaatcctatag

SEQ ID NO: 319109 - DNA, 591 bp, Artificial Sequence
  derived and/or modified sequence
atggaccagagacagagaagaatcctgggccagcccctgagcatccccaccagccagcccaagcagaagagaaccagcatgatcagcttcttcagcaaggtgagctggaagctgagattccagaagagagagcccctgaagaacgtgttcttcatcctggccgagagagccagagaccccagcgccaagaagagacacatggccatgagaaacctgggcaccatggcctacgaggcccccgacaaggtgagaaagtacaagaagatcgtgctggacctgctggtgtacggcctgtacgaccccgtgaacctggaggtgatccacgagagcatgaagaccctgaccgtggtgctgggcaagatccagggcaagggcctgggcagcttcttcatcgacatcaccctgcagaccagaaccctgctggacgacgcctgcaagaccaccttccaggcctgcagcccctacctgaagctgaaggaggagtacagcttccagagcgaggaggaccagagaaacaccaagctgtaccagcagctgagccactaccaccccgagatcctgcagttcttctacgccaacaagatcctgtag

SEQ ID NO: 319110 - protein, 155 aa, Artificial Sequence
  derived and/or modified sequence
MIPDVISALLLLAAAGCLPFNDSQFNPDGYFWAIIHLLCVGAYKILQKSQKPSALSDIDQQYLNYIFSVVLLAFASHPTGDLFSVLDFPFLYFYRFHGSCCASGFLGFFLMFSTVKLKNLLAPGQCAAWIFFAKIITAGLSILLFDAILTSATTG

SEQ ID NO: 319111 - DNA, 829 bp, Artificial Sequence
  derived and/or modified sequence
gatgtgcgtgaggaggtctctggtcggcctcaccttttgtacctgctacctggcttcttacctcacgaacaagtatgtgctgtctgtcttgaaatttacctaccctacattattccaagggtggcagacgctcattggtggacttttgcttcatgtgtcctggaaactgggctgggtagagatcaacagcagttcaagatctcatgttcttgtgtggcttcctgcttcagtgctgtttgtgggtataatctatgctgggtccagagcattgtccagactggccattcctgtgtttctcactttgcataatgtagctgaagttatcatctgtgggtaccagaagtgttttcagaaagagaaaacatctcctgcaaagatctgtagtgccctcctcctcctggccgcagcaggatgccttcccttcaatgactcccagtttaatccagatggatatttttgggctataattcacttactctgtgtagtgacattgaccagcaatacttaaactatatattcagtgtggtgctcctggcatttgcatctcatcccacaggtgatctcttcagcgtcctggacttcccattcctgtacttctacagattccatggtagctgctgtgccagtggatttttgggattctttctcatgttcagtacagtgaagctaaaaaaccttctggccccagggcagtgtgcagcctggattttctttgctaagataatcacagctggcttatcaatattgctgtttgatgcgatcctgaccagtgcaaccacgggatgcctcctgctcggtgcgcttggagaggccttgctggttttctcag

SEQ ID NO: 319112 - protein, 168 aa, Artificial Sequence [sequence omitted]

SEQ ID NO: 319113 - protein, 380 aa, Artificial Sequence
  derived and/or modified sequence
MASLAAANAEFCFNLFREMDDNQGNGNVFFSSLSLFAALALVRLGAQDDSLSQIDKLLHVNTASGYGNSSNSQSGLQSQLKRVFSDINASHKDYDLSIVNGLFAEKVYGFHKDYIECAEKLYDAKVERVDFTNHLEDTRRNINKWVENETHGKIKNVIGEGGISSSAVMVLVNAVYFKGKWQSAFTKSETINCHFKSPKCSGKAVAMMHQERKFNLSVIEDPSMKILELRYNGGINMYVLLPENDLSEIENKLTFQNLMEWTNPRRMTSKYVEVFFPQFKIEKNYEMKQYLRALGLKDIFDESKADLSGIASGGRLYISRMMHKSYIEVTEEGTEATAATGSNIVEKQLPQSTLFRADHPFLFVIRKDDIILFSGKVSCP

SEQ ID NO: 319114 - protein, 128 aa, Artificial Sequence
  derived and/or modified sequence
MASLAAANAEFCFNLFREMDDNQGNGNVFFSSLSLFAALALVRLGAQDDSLSQIDKLLHVNTASGYGNSSNSQSGLQSQLKRVFSDINASHKDYDLSIVNGLFAEKVYGFHKDYIECAEKLYDAKVER

SEQ ID NO: 319115 - protein, 165 aa, Artificial Sequence
  derived and/or modified sequence
MASLAAANAEFCFNLFREMDDNQGNGNVFFSSLSLFAALALVRLGAQDDSLSQIDKLLHVNTASGYGNSSNSQSGLQSQLKRVFSDINASHKDYDLSIVNGLFAEKVYGFHKDYIECAEKLYDAKVERVDFTNHLEDTRRNINKWVENETHGKIKNVIGEGGISS

SEQ ID NO: 319116 - DNA, 1143 bp, Artificial Sequence
  derived and/or modified sequence
atggcgtccctcgccgccgctaacgccgaattctgctttaacctattccgggagatggacgataatcagggcaatggcaacgtgttcttctcttctcttagcctttttgccgcactggcactggtgcggctcggggcccaggacgacagtttatcccagattgataagcttctgcatgtcaacacagcctctggctatgggaacagttccaatagccagtccggcctgcagtcccagctcaagcgagtgttctcagatatcaatgcctctcacaaggactatgacctatcaatcgtgaacgggctgtttgccgaaaaggtgtacggatttcacaaggactacatcgaatgcgccgagaagctttacgacgctaaggtcgaacgtgtagatttcaccaatcatctagaagacacacggcggaacatcaataagtgggtggaaaatgaaacacacgggaagatcaaaaacgttattggagaaggaggtatcagcagcagtgccgttatggtgctcgtcaatgcggtttatttcaaaggaaagtggcagtctgcattcacaaaatcagagacaatcaactgccacttcaaatctccaaagtgttctggaaaagccgtggctatgatgcatcaggagagaaaatttaacctgtctgtgatcgaggaccctagtatgaagatccttgaactcagatataatggaggcatcaatatgtacgtgttactgccggagaatgacttatccgagatcgagaataagctgacttttcagaacctgatggaatggactaatcctcgccggatgacttctaagtacgtggaagtgttttttcctcagttcaaaatcgagaagaattacgaaatgaagcagtatctgagggccttgggactgaaagacatttttgacgaatctaaagccgacctgtccgggattgcttcaggcgggaggctttatatcagtcggatgatgcacaaaagctatatcgaagtcacagaggaagggaccgaggcaactgccgctacaggttctaatatagtggaaaagcaactgcctcaatcaaccctgtttagagcggatcacccattcctctttgtcattcgcaaagatgacattattctgtttagtgggaaggtgagctgtccatag

SEQ ID NO: 319117 - DNA, 1143 bp, Artificial Sequence
  derived and/or modified sequence
atggcaagtctcgccgcagccaatgctgaattttgttttaacctttttcgagaaatggatgataatcaagggaatggcaatgtgtttttctcttctcttagcttgtttgcagcactggcacttgttagactgggtgctcaggatgactcattatctcagatcgataagctactacacgtgaacactgcctccggctatggtaactcctctaactcgcagtctggattacaatcccaattgaaaagggtgttttcggatatcaacgcatcacataaggactatgacctgagcattgtaaatggccttttcgccgaaaaagtgtatgggtttcataaggattacatcgaatgtgccgaaaagctctacgacgccaaagtggagcgagtcgacttcaccaaccacctagaggacacccgaaggaatatcaacaaatgggtggagaacgaaacacacggcaaaatcaagaatgtaatcggcgagggaggcatatccagctcagctgtgatggtccttgtgaacgcagtgtattttaaaggaaaatggcagtccgcatttacgaaaagtgaaacaatcaactgtcacttcaaatcacccaagtgctcagggaaagctgtcgcaatgatgcatcaagaacggaaattcaatcttagtgttatcgaagatccgagcatgaagatcctggaacttagatacaatggcggtattaatatgtatgtgctgctacccgagaacgatctgtccgaaatagagaacaaacttaccttccagaacctgatggaatggacaaacccccgcaggatgacgtcaaagtatgtggaagtcttctttccacaatttaaaatcgaaaaaaattacgagatgaagcagtacctccgcgccctgggactgaaagacatcttcgatgaatccaaggcggacttatccggaatagccagcggagggagactgtacatctccaggatgatgcataaatcctacattgaagttactgaggaagggacagaggctacagccgccaccggctctaacattgtggagaagcagctgcctcaaagtactctattccgggcagaccatccattcctcttcgtgattcggaaggacgatataatcttgttcagtgggaaggtcagttgtccgtag

SEQ ID NO: 319118 - DNA, 387 bp, Artificial Sequence
  derived and/or modified sequence
atggcttcccttgccgcagctaatgccgaattctgctttaacctcttcagagagatggacgataatcaaggcaacgggaatgtatttttcagttcattatctctattcgcagccctggctctggtgagactgggcgcccaagatgacagccttagtcagattgataaactgttgcacgtaaacaccgcctcgggatacggtaacagttcaaatagccagtctggtctccagtcgcagttgaaaagggttttttccgacatcaatgccagccacaaggattatgacctgagcatcgtgaacgggctatttgccgaaaaagtgtacggctttcataaggattatatcgagtgtgcggaaaaactttacgatgcgaaagtggagagatag

SEQ ID NO: 319119 - DNA, 387 bp, Artificial Sequence
  derived and/or modified sequence
atggcatccttggctgcagccaatgctgaattttgcttcaacttgttcagggagatggatgataaccaggggaatggcaatgtgtttttttcttccctctcactgttcgccgctctggcgttagttcggctcggcgcacaagatgatagtttgtcccagatcgataagcttttgcacgtgaatacggctagtggctacgggaacagctccaattcacaatcaggactgcagagccagcttaaacgtgtattctcggatatcaacgcctctcacaaggactatgacctatctatcgtcaacggattatttgccgaaaaagtctacggttttcataaagattacattgaatgtgcagaaaaactttacgatgctaaggtggagcgatag

SEQ ID NO: 319120 - DNA, 498 bp, Artificial Sequence
  derived and/or modified sequence
atggcctctctggcagcggcaaacgcggaattttgctttaacctgtttcgagaaatggatgacaaccagggcaatgggaatgtctttttcagttccctgtccctgttcgccgccctggcactggtgcggctgggggcccaagacgactccctcagccagatcgacaaactacttcatgttaacacagcatccgggtacggcaacagttcaaactcgcagtcgggcctgcagtcccagcttaaacgagtcttctctgacattaatgccagccataaggattacgatctgtcgatcgtgaacggcctgtttgcagaaaaagtatacggcttccacaaagactatatcgaatgcgctgaaaagctttacgatgccaaggttgaacgcgttgacttcacaaatcaccttgaagacacaaggcggaatataaacaaatgggtggagaacgagacccacggaaaaatcaaaaacgtcataggggagggcggaatcagtagctag

SEQ ID NO: 319121 - DNA, 1143 bp, Artificial Sequence
  derived and/or modified sequence
atggcctcactggccgctgcaaacgctgaattctgctttaatctgtttagagaaatggatgacaaccaggggaacgggaatgtctttttctcttcattgagcctctttgctgcgctggcgctggtgaggcttggcgcccaggatgatagtctcagtcaaattgacaaacttctgcacgtcaacacagcctctggatatggaaactctagcaactctcagtcagggctgcaatctcagctcaaacgggtcttttctgatataaacgctagtcataaagattacgatctatcaatcgtgaacggattgtttgcagaaaaagtgtacggcttccataaagattacattgagtgcgcggaaaaactgtacgacgccaaggtggagagggtggacttcactaaccaccttgaagacactcgtcgtaacatcaataagtgggttgaaaatgagactcatgggaagatcaagaacgtgatcggagagggaggaataagctcctctgccgtgatggtgctggtgaacgccgtgtattttaagggtaagtggcaaagtgccttcacaaagtccgagacaattaactgtcatttcaaatccccaaaatgctctggtaaagcagtagcgatgatgcatcaagagcggaaattcaacctgtctgtgattgaagatccttcaatgaagattctcgagctccgatacaacggcggcatcaatatgtacgtcctcctgcctgaaaatgacttgtcagagatcgagaacaagctgaccttccagaacctcatggaatggactaatcctaggaggatgacttccaagtatgtggaggtcttcttcccccaattcaagatcgagaagaactacgaaatgaaacagtaccttagggcactgggcctgaaagacatcttcgatgagtctaaagctgatctttcagggattgcgtcaggaggtcgcctgtatatctcaaggatgatgcacaagagctacatcgaggtgactgaagagggcaccgaggctacagccgcgacaggctctaatatcgtggaaaagcaactgccccagagcacactgtttcgcgcagaccacccatttctttttgtcatcagaaaagacgacatcatccttttcagcggcaaagtttcatgcccctag

SEQ ID NO: 319122 - DNA, 1143 bp, Artificial Sequence
  derived and/or modified sequence
atggccagcctggccgccgccaatgctgagttctgcttcaacctcttccgggagatggatgacaaccagggcaatggaaatgtgttcttcagcagcctgagcctgtttgctgccctggccctggtgcggctgggcgcccaggatgacagcctgagccagattgacaagctgctgcacgtgaacacagccagcggctacggcaacagcagcaacagccagagcggcctgcagagccagctgaagagggtcttcagtgacatcaatgccagccacaaggactatgacctgagcatcgtgaatggcctgtttgctgagaaggtgtatggcttccacaaggactacattgaatgtgccgagaagctgtatgatgccaaggtggagcgggtggacttcaccaaccacctggaggacaccaggaggaacatcaacaagtgggtggagaatgagacccacggcaagatcaagaatgtcatcggggagggcggcatcagcagcagcgctgtgatggtgctggtgaatgctgtgtacttcaagggcaagtggcagagcgccttcaccaagtctgagaccatcaactgccacttcaagagccccaagtgcagcggcaaggctgtggccatgatgcaccaggagaggaagttcaacctgtctgtgattgaggaccccagcatgaagatcctggagctgcgctacaacggcggcatcaacatgtatgtgctgctgcctgaaaatgacctgtctgaaattgagaacaagctgaccttccagaacctgatggagtggaccaaccccaggaggatgaccagcaaatatgtggaggtgttcttcccccagttcaagattgagaagaactatgagatgaagcagtacctgcgggccctgggcctgaaggacatctttgatgagagcaaggctgacctgagcggcatcgccagcggcggccgcctgtacatcagcaggatgatgcacaagagctacatcgaggtgacagaggagggcacagaggccacagctgccaccggcagcaacatcgtggagaagcagctgccccagagcaccctcttccgggctgaccaccccttcctgtttgtgatcaggaaggatgacatcatcctcttcagcggcaaggtgtcctgcccctag

SEQ ID NO: 319123 - DNA, 387 bp, Artificial Sequence
  derived and/or modified sequence
atggccagcctggccgccgccaatgctgagttctgcttcaacctcttccgggagatggatgacaaccagggcaatggaaatgtgttcttcagcagcctgagcctgtttgctgccctggccctggtgcggctgggcgcccaggatgacagcctgagccagattgacaagctgctgcacgtgaacacagccagcggctacggcaacagcagcaacagccagagcggcctgcagagccagctgaagagggtcttcagtgacatcaatgccagccacaaggactatgacctgagcatcgtgaatggcctgtttgctgagaaggtgtatggcttccacaaggactacattgaatgtgccgagaagctgtatgatgccaaggtggagaggtag

SEQ ID NO: 319124 - DNA, 498 bp, Artificial Sequence
  derived and/or modified sequence
atggccagcctggccgccgccaatgctgagttctgcttcaacctcttccgggagatggatgacaaccagggcaatggaaatgtgttcttcagcagcctgagcctgtttgctgccctggccctggtgcggctgggcgcccaggatgacagcctgagccagattgacaagctgctgcacgtgaacacagccagcggctacggcaacagcagcaacagccagagcggcctgcagagccagctgaagagggtcttcagtgacatcaatgccagccacaaggactatgacctgagcatcgtgaatggcctgtttgctgagaaggtgtatggcttccacaaggactacattgaatgtgccgagaagctgtatgatgccaaggtggagcgggtggacttcaccaaccacctggaggacaccaggaggaacatcaacaagtgggtggagaatgagacccacggcaagatcaagaatgtcatcggggagggcggcatcagcagctag

SEQ ID NO: 319125 - DNA, 1143 bp, Artificial Sequence
  derived and/or modified sequence
atggccagcctggccgccgccaacgccgagttctgcttcaacctgttccgtgaaatggacgacaatcaggggaacggcaatgtattctttagcagcctgtcactgtttgccgccctggccttggtgaggctcggggcccaggacgacagcctgtcacagattgacaagttgctccatgtcaatacagctagcggctatgggaattcttccaactctcaaagcggcctgcagagtcagcttaaacgagtgttcagcgatattaacgccagccataaggattatgacctgtcaatagtcaatggcctctttgctgagaaagtgtatgggttccataaggactatattgaatgtgccgaaaagctctacgacgcaaaagtcgagagggtcgatttcaccaatcaccttgaggacacccgaagaaacatcaataaatgggtcgaaaacgagactcatggcaagatcaagaacgtgatcggggaggggggaataagcagttctgctgttatggtcctcgtcaatgcggtgtactttaagggaaagtggcagagcgccttcaccaaaagcgagaccatcaactgtcactttaagagccctaagtgcagcggtaaggccgtcgcgatgatgcatcaggagagaaaatttaatctgagtgtaattgaggatccatcaatgaaaattctcgagctccgttacaacggtggcatcaatatgtacgtgctattgcccgaaaacgacctgtcagagatcgagaacaagctgactttccagaatctcatggaatggacaaatccccgccgtatgacctccaagtacgttgaggtgtttttcccacagtttaaaattgagaagaactatgagatgaagcagtatctgagagcactcgggttgaaggacattttcgatgagtcaaaggcggatctttctggaatagcatctggaggacgcctttatatctcaaggatgatgcacaagagctacatcgaagtgaccgaggagggcaccgaggccaccgccgctactgggtctaacatagtggagaaacaattgccgcagtcgactctcttcagggctgaccatccttttttatttgtgatccgaaaggacgatatcatattgttcagcgggaaggttagctgcccttag

SEQ ID NO: 319126 - DNA, 1143 bp, Artificial Sequence
  derived and/or modified sequence
atggccagcctggccgccgccaacgccgagttctgcttcaacctgtttcgagagatggacgacaatcagggaaatgggaatgtattctttagcagtttgagtctgtttgctgccttggcgctggtaagactcggtgcacaggatgattcgttgtcacagattgacaaactgttacacgtcaatacggccagcggatacggaaattcatccaactctcagtcaggtctccagtctcagctgaaacgggtgttctccgacataaatgcatcacataaggactacgatctcagcattgtgaatggcctgtttgctgagaaggtttatggatttcacaaggactatatagagtgcgctgagaaactttatgatgcgaaggtcgagagggttgatttcacaaatcacctcgaggatacacgccgaaatatcaacaaatgggtggagaacgagactcatggaaagattaaaaatgtgattggtgagggggggatctctagctccgcagttatggtccttgtcaacgctgtctattttaaaggcaagtggcagtcggctttcactaaaagtgaaaccattaactgtcacttcaagagccctaaatgttctgggaaggccgtggcgatgatgcatcaggagagaaaattcaacttgagcgtaatcgaggacccttctatgaagattctcgaactccgctataatggtggaataaacatgtacgttttgctcccagaaaatgacctgtctgagatcgagaacaaactgacctttcaaaacctgatggagtggacgaatcctagacggatgaccagtaagtacgtcgaggtatttttcccacaatttaagatagagaagaactatgaaatgaagcagtatctccgcgctctgggattgaaagacattttcgacgagagcaaagccgatctcagtggtatcgcatctggcgggaggttgtatattagcaggatgatgcacaagtcttacattgaagtgaccgaagagggcactgaggcaacagcagctaccggatccaacatcgttgagaaacagctgcctcagtccaccttgttcagagccgatcatcccttcttgtttgtaatccgcaaggacgatattattctttttagcgggaaagtctcatgtccttag

SEQ ID NO: 319127 - DNA, 387 bp, Artificial Sequence
  derived and/or modified sequence
atggccagcctggccgccgccaacgccgagttctgcttcaacctgtttcgggagatggatgataaccaagggaatggcaatgtgtttttctcctcattgagcctttttgcagccctggcactcgttaggctcggggcacaggatgactccttatcccaaatcgataagttgctgcacgtgaatacagcctccgggtacgggaacagtagtaacagccagtcaggccttcagagccagttaaagcgggtcttctccgacattaatgcatctcacaaggattacgacctgagtattgtgaacggactattcgctgagaaagtctacggcttccataaggattatatcgagtgtgcagagaaactatacgacgcaaaagtggaaaggtag

SEQ ID NO: 319128 - DNA, 387 bp, Artificial Sequence
  derived and/or modified sequence
atggccagcctggccgccgccaacgccgagttctgcttcaacctgtttagggagatggatgataatcaggggaacggtaacgtcttttttagctctctctcgctttttgctgcccttgctctggtgcgcctgggagcacaggacgactcgctgtctcagattgacaaactgctgcacgtgaacactgccagtggctatggcaattcgtctaactctcagtcagggttgcaaagccaattaaagagagtttttagcgacatcaatgcatcccacaaggactatgatctgtctatcgtgaatggactgtttgccgagaaggtttatggctttcataaggactacatcgaatgtgcggaaaagctttacgacgcgaaggtcgaacgttag

SEQ ID NO: 319129 - DNA, 498 bp, Artificial Sequence
  derived and/or modified sequence
atggccagcctggccgccgccaacgccgagttctgcttcaacctgttcagggaaatggacgacaaccagggtaacgggaacgtcttcttcagctctctatctctctttgctgccctcgctttagtgaggcttggggcacaggacgatagtttatcccaaatcgacaaacttctgcatgttaatacagccagtggatacgggaattcatccaacagtcagtctggtctccagtcccaacttaagagggtcttcagcgatattaacgcaagtcacaaagactacgatctgtctattgtcaacggattgttcgctgaaaaggtatacggatttcacaaggattacatcgaatgtgccgagaaattatacgatgcaaaggtggaacgcgtagattttacaaaccatctagaggatacgagaaggaacatcaacaagtgggttgaaaacgaaacccacgggaaaataaaaaatgtcatcggtgaaggcggaatcagtagttag

SEQ ID NO: 319130 - DNA, 1143 bp, Artificial Sequence
  derived and/or modified sequence
atggccagcctggccgccgccaacgccgagttctgcttcaacctgttccgggaaatggacgacaaccagggaaatggaaatgtttttttttctagcttgagcctcttcgccgcgttagccctggtgcgtttgggggcccaagacgactccttgagccagatcgataagctgctgcacgtgaataccgcgagcgggtatgggaactcgtcgaacagtcagtccggtctgcagtcccagcttaagcgtgtgttcagtgatattaatgccagccacaaggattacgatctgtctatagtgaacggcctgttcgccgagaaggtttacggattccataaggattatattgagtgcgctgagaaactgtacgatgccaaggtagagcgcgtggattttactaatcatttagaagacacccgcaggaacatcaacaaatgggtcgagaatgagacacatggcaagatcaaaaacgttatcggggagggcggtataagctcttccgctgtcatggtgttagtgaacgccgtgtacttcaaggggaagtggcagtctgccttcacaaaaagcgagacaattaattgtcacttcaaatcccccaagtgttccggcaaagcggtagccatgatgcaccaggagcggaagttcaacctttccgtcattgaagacccctcgatgaagatccttgaattgaggtataatggggggattaatatgtacgtgctgttaccggagaacgatctatcagaaatcgaaaataagcttaccttccagaacttgatggagtggacgaatcccagaaggatgacgagtaagtatgttgaagtcttcttccctcagttcaagatcgaaaagaactacgaaatgaaacagtacctacgagcgctggggctcaaggacatctttgatgagtctaaagcagaccttagtgggattgcatccgggggcagactctatatttctcgcatgatgcataaatcctatatcgaggtgaccgaagagggcacagaggccacagctgccactggttccaatattgtggagaagcagctccctcagtcaacactgtttcgcgctgaccacccgtttctgttcgtgataagaaaagatgatatcatcttgttctccgggaaggtcagctgtccgtag

SEQ ID NO: 319131 - DNA, 1143 bp, Artificial Sequence
  derived and/or modified sequence
atggcgtctctggcagcggctaatgcagaattttgtttcaacttattcagggagatggacgacaaccagggaaatggaaacgtgttcttctcctctctcagtctcttcgccgcactagctttggtgcggctgggcgctcaggacgactccctgtcacagatcgacaaactcctgcacgtgaacaccgcatctggttacggtaacagctctaactctcagtccggcctgcagtctcagctcaaacgcgtgttctccgatatcaacgccagtcacaaagattacgatttgagcatcgtgaacggactatttgccgagaaagtgtatggcttccataaagattacatagaatgcgcagaaaagctctacgacgccaaagtggagcgtgtggacttcacaaaccacctagaggatacacgaagaaacatcaacaaatgggtggagaatgagacccacggcaagatcaaaaatgtgattggggaaggcggaatctctagctctgctgtaatggtccttgtgaacgcagtgtacttcaaaggcaagtggcagagtgcattcactaaaagtgagacgataaattgccattttaagagccccaagtgcagcgggaaggccgtcgccatgatgcaccaggaacgaaagtttaatcttagcgttattgaggaccccagcatgaaaatcctggagctaaggtacaatgggggtattaatatgtacgtcctacttcccgaaaatgatttatctgagattgaaaataagctgacatttcagaatctcatggagtggacgaatccaaggcgaatgacctcaaaatacgtcgaggtgttcttcccacagttcaaaatcgaaaaaaactacgagatgaagcagtatctgagggcactgggcctgaaggacatttttgacgaaagcaaggccgacctgtccggaatcgcctctggtgggcgtctgtatatctccaggatgatgcacaagtcctatattgaagtgaccgaagaggggacagaagctacggccgctactggctctaatatcgtggaaaagcaactgccccagtccaccctgttcagagccgaccacccttttctttttgtgattcgcaaggatgacatcattcttttctcagggaaagtcagttgtccctag

SEQ ID NO: 319132 - DNA, 1143 bp, Artificial Sequence
  derived and/or modified sequence
atggccagcttggcggcagcgaacgcggagttttgctttaacctgtttagggaaatggatgataatcagggtaacggcaatgtcttttttagttctctcagcctgtttgctgctctggcgttggtgcgcctgggagctcaggacgacagcttatcccagatcgacaaactgcttcatgtaaacaccgccagtggctatggaaactcgtctaacagccagtccgggctgcagagtcagctcaagcgagtattctccgacattaatgcgtcccacaaagactacgatctgtctatcgtaaacggcctgttcgcagagaaggtgtacggattccataaagactatatcgaatgcgcggagaaattatacgacgctaaagtggagagggtagacttcactaatcatcttgaggacacccgaaggaacatcaacaagtgggtcgagaacgagacccatggtaagataaagaacgttatcggtgaggggggaatttcttcatcggccgtaatggttctggtgaatgccgtgtattttaagggtaaatggcagagtgccttcaccaagagcgaaacaatcaactgtcacttcaaatcccctaaatgctctggaaaagcagtggcgatgatgcaccaggaacgaaaatttaacctcagtgtgatagaggatcccagcatgaaaattctcgagctgcgatacaatggagggattaatatgtacgtgctcctgcccgagaatgatctgtcagagatagagaacaaactgacctttcagaacctgatggagtggactaacccccgacggatgactagtaagtacgtcgaagtcttttttccgcagtttaagatcgaaaaaaactacgaaatgaaacagtacctgagagctttaggtttgaaagacatatttgatgaaagcaaagccgacctgagcggcattgctagcggagggaggctgtacattagccggatgatgcacaaatcatacatcgaggtgacagaggagggaacagaagccacagcagctactgggtctaatattgtcgaaaaacaattgccacagtctacgctgtttcgagccgaccatccctttctgtttgtgattcgcaaagacgatatcatcctgtttagtggaaaggtcagctgtccttag

SEQ ID NO: 319133 - DNA, 387 bp, Artificial Sequence
  derived and/or modified sequence
atggcctccctcgcggctgccaacgctgagttttgtttcaacctgttcagggagatggacgataaccaaggaaacggaaacgttttttttagctcattgtccctttttgccgctctggcgttggttcggcttggggcacaggatgactctctgtcccagattgacaagctgttacatgtgaacactgcaagtggttacgggaattctagtaacagccagtccggcctgcagtcacagttaaagcgcgtgtttagcgacatcaacgctagtcacaaagattacgatctcagtatcgttaatgggttattcgcggaaaaggtgtatggcttccataaagactacatcgaatgtgccgagaagctgtacgatgccaaggtggagcgctag

SEQ ID NO: 319134 - DNA, 387 bp, Artificial Sequence
  derived and/or modified sequence
atggcctctctggccgctgcaaatgccgagttctgttttaatttattcagggaaatggatgacaaccagggaaatgggaacgtctttttttctagtttaagtctgttcgctgctctggctttggttcgtcttggcgctcaggatgactcgctctcccagattgataagctgcttcatgtgaatacggcatcaggctacgggaatagtagcaactcgcagtcaggccttcagagtcagctaaagagagtgttctcagatatcaatgccagccataaggattacgacctgtcaatcgtgaatggtttgttcgcggagaaagtgtacggttttcataaggactacatcgaatgcgccgaaaaactctacgatgctaaggtggaacgctag

SEQ ID NO: 319135 - DNA, 498 bp, Artificial Sequence
  derived and/or modified sequence
atggctagtttggctgccgcaaatgctgaattctgcttcaacctctttagggaaatggatgataaccaaggaaacggcaacgtgttcttctcttctctttcacttttcgctgctctggccctggtgcgccttggagcgcaggacgacagcctctctcaaattgataaattgctgcatgtcaataccgcctcaggttacgggaactcatccaactcacagagcggactgcagagccagttgaaacgcgttttctccgacatcaacgccagtcacaaggactacgacttaagcatcgtcaatgggctgttcgctgagaaggtttacggttttcataaagactatatcgaatgcgcagaaaaattgtacgatgccaaggtggagcgcgtggattttactaaccacctggaggacacaaggcgcaatattaacaagtgggtggaaaacgagacccacgggaaaatcaagaacgtcatcggagaaggaggcattagtagttag

SEQ ID NO: 319136 - DNA, 1143 bp, Artificial Sequence
  derived and/or modified sequence
atggctagtttggctgcggcaaatgcagaattctgttttaaccttttccgagaaatggacgacaatcagggtaacggtaatgtctttttttcatcgctgtccttgttcgccgctctcgcattagtgcgcctgggtgcccaggatgattctttgtcacagattgacaagctgctgcacgtgaatacggccagcgggtacggaaactcttctaattctcagagcggactgcagtcgcagctcaagcgcgtgttcagtgacattaatgctagtcataaggactacgacctgagcatcgtgaatggtctgttcgccgagaaggtttatggatttcacaaggactacattgaatgcgccgaaaaactttatgatgcaaaagtcgagagggtagatttcaccaatcacctcgaagatacacggagaaacattaataagtgggttgaaaacgagacgcacggcaagattaaaaatgtgattggggagggtgggatcagttcttcggcagtgatggttctggttaatgccgtgtatttcaaagggaagtggcaatctgcattcactaagtccgagacaatcaactgccatttcaaatctccgaagtgtagtggaaaagctgtggcaatgatgcaccaggagcggaagttcaatctgtccgtgatcgaggaccctagcatgaagatcctagagctgcggtataatggcggaatcaacatgtacgtcctcctccctgagaacgacctctctgaaatcgaaaacaagctcactttccagaacctgatggaatggacgaaccccaggcggatgacaagcaagtacgttgaggttttcttcccccagtttaagatcgagaagaactatgaaatgaaacagtatctgagagctctggggctgaaagatattttcgatgagtccaaggcagacttgtctgggatcgcatccgggggtaggctctacattagccggatgatgcacaagtcgtatattgaggtgactgaagaagggactgaggctactgctgccaccggatccaatattgtggaaaaacagctgcctcagagtactctgttccgagctgaccaccccttcctcttcgttatacgcaaagatgatatcatacttttttccgggaaggtgagctgcccttag

SEQ ID NO: 319137 - DNA, 1973 bp, Artificial Sequence
  derived and/or modified sequence
gagtgagaagtcttaggaggtaggaggcaggaggaactgaagcccagctgtgaaggccgcagactgcagtgagaggaggctgcactccattttgcaatggcctcccttgctgcagcaaatgcagagttttgcttcaacctgttcagagagatggatgacaatcaaggaaatggaaatgtgttcttttcctctctgagcctcttcgctgccctggccctggtccgcttgggcgctcaagatgactccctctctcagattgataagttgcttcatgttaacactgcctcaggatatggaaactcttctaatagtcagtcagggctccagtctcaactgaaaagagttttttctgatataaatgcatcccacaaggattatgatctcagcattgtgaatgggctttttgctgaaaaagtgtatggctttcataaggactacattgagtgtgccgaaaaattatacgatgccaaagtggagcgagttgactttacgaatcatttagaagacactagacgtaatattaataagtgggttgaaaatgaaacacatggcaaaatcaagaacgtgattggtgaaggtggcataagctcatctgctgtaatggtgctggtgaatgctgtgtacttcaaaggcaagtggcaatcagccttcaccaagagcgaaaccataaattgccatttcaaatctcccaagtgctctgggaaggcagtcgccatgatgcatcaggaacggaagttcaatttgtctgttattgaggacccatcaatgaagattcttgagctcagatacaatggtggcataaacatgtacgttctgctgcctgagaatgacctctctgaaattgaaaacaaactgacctttcagaatctaatggaatggaccaatccaaggcgaatgacctctaagtatgttgaggtattttttcctcagttcaagatagagaagaattatgaaatgaaacaatatttgagagccctagggctgaaagatatctttgatgaatccaaagcagatctctctgggattgcttcggggggtcgtctgtatatatcaaggatgatgcacaaatcttacatagaggtcactgaggagggcaccgaggctactgctgccacaggaagtaatattgtagaaaagcaactccctcagtccacgctgtttagagctgaccacccattcctatttgttatcaggaaggatgacatcatcttattcagtggcaaagtttcttgcccttgaaaatccaattggtttctgttatagcagtccccacaacatcaaagaaccaccacaagtcaatagatttgagtttaattggaaaaatgtggtgtttcctttgagtttatttcttcctaacattggtcagcagatgacactggtgacttgacccttcctagacacctggttgattgtcctgatccctgctcttagcattctaccaccatgtgtctcacccatttctaatttcattgtctttcttcccacgctcatttctatcattctcccccatgacccgtctggaaattatggagagtgctcaactggtaaggagaacgtagaagtagccctagggatcctttttgaaactctacagttatcgcagatattctagcttcattgtaagcaatctaggaaataagccctgctgctttctagaaataagtgtgaaggataaattttctttgttgacctatgaagattttagagtttaccttcatatgtttgattttaaatcagtgtataatctagatggtaaaaaatgtgaaattgggattagggaccaaccaaaatatttcattaatgctttcaattgacaaattttggtctttctttgataagacaatatgtacatagttttttcaaatattaaagatcttttaactgttggcagttgttatctacagaatcatatctcatatgctgtgtagtttataagttttttctctatttatcagaataaagaaatacaacat

SEQ ID NO: 319138 - DNA, 2203 bp, Artificial Sequence
  derived and/or modified sequence
gtctactcatcaataagcagctgcctgtgcagagtgcaggctgcacctttggacagcctttaaaactgaattctcagaattttagaacaaatttttgtctagaaatgctgactttggttcattaggtagtggtaaaacaggctcccttcgaagctctccttcatcaccttcctaagtgcatgggggaaaatacctagggctcaacagtcttgagaagtgtggaaacattttctttgtgagtgagaacagatcacctagagaaaggagaccagattcccatcactgcttctgggtatcagatgctagcgctgcactccattttgcaatggcctcccttgctgcagcaaatgcagagttttgcttcaacctgttcagagagatggatgacaatcaaggaaatggaaatgtgttcttttcctctctgagcctcttcgctgccctggccctggtccgcttgggcgctcaagatgactccctctctcagattgataagttgcttcatgttaacactgcctcaggatatggaaactcttctaatagtcagtcagggctccagtctcaactgaaaagagttttttctgatataaatgcatcccacaaggattatgatctcagcattgtgaatgggctttttgctgaaaaagtgtatggctttcataaggactacattgagtgtgccgaaaaattatacgatgccaaagtggagcgagttgactttacgaatcatttagaagacactagacgtaatattaataagtgggttgaaaatgaaacacatggcaaaatcaagaacgtgattggtgaaggtggcataagctcatctgctgtaatggtgctggtgaatgctgtgtacttcaaaggcaagtggcaatcagccttcaccaagagcgaaaccataaattgccatttcaaatctcccaagtgctctgggaaggcagtcgccatgatgcatcaggaacggaagttcaatttgtctgttattgaggacccatcaatgaagattcttgagctcagatacaatggtggcataaacatgtacgttctgctgcctgagaatgacctctctgaaattgaaaacaaactgacctttcagaatctaatggaatggaccaatccaaggcgaatgacctctaagtatgttgaggtattttttcctcagttcaagatagagaagaattatgaaatgaaacaatatttgagagccctagggctgaaagatatctttgatgaatccaaagcagatctctctgggattgcttcggggggtcgtctgtatatatcaaggatgatgcacaaatcttacatagaggtcactgaggagggcaccgaggctactgctgccacaggaagtaatattgtagaaaagcaactccctcagtccacgctgtttagagctgaccacccattcctatttgttatcaggaaggatgacatcatcttattcagtggcaaagtttcttgcccttgaaaatccaattggtttctgttatagcagtccccacaacatcaaagaaccaccacaagtcaatagatttgagtttaattggaaaaatgtggtgtttcctttgagtttatttcttcctaacattggtcagcagatgacactggtgacttgacccttcctagacacctggttgattgtcctgatccctgctcttagcattctaccaccatgtgtctcacccatttctaatttcattgtctttcttcccacgctcatttctatcattctcccccatgacccgtctggaaattatggagagtgctcaactggtaaggagaacgtagaagtagccctagggatcctttttgaaactctacagttatcgcagatattctagcttcattgtaagcaatctaggaaataagccctgctgctttctagaaataagtgtgaaggataaattttctttgttgacctatgaagattttagagtttaccttcatatgtttgattttaaatcagtgtataatctagatggtaaaaaatgtgaaattgggattagggaccaaccaaaatatttcattaatgctttcaattgacaaattttggtctttctttgataagacaatatgtacatagttttttcaaatattaaagatcttttaactgttggcagttgttatctacagaatcatatctcatatgctgtgtagtttataagttttttctctatttatcagaataaagaaatacaacata

SEQ ID NO: 319139 - DNA, 587 bp, Artificial Sequence
  derived and/or modified sequence
tcagtgctgtcaccagtgctgctgctgtcatcaacctctcccttgggagttgagccaaagggaagtcttgggaattttccctgaaccttggtataggtgtgctgggaggagtgagaagtcttaggaggtaggaggcaggaggaactgaagcccagctgtgaaggccgcagactgcagtgagaggaggctgcactccattttgcaatggcctcccttgctgcagcaaatgcagagttttgcttcaacctgttcagagagatggatgacaatcaaggaaatggaaatgtgttcttttcctctctgagcctcttcgctgccctggccctggtccgcttgggcgctcaagatgactccctctctcagattgataagttgcttcatgttaacactgcctcaggatatggaaactcttctaatagtcagtcagggctccagtctcaactgaaaagagttttttctgatataaatgcatcccacaaggattatgatctcagcattgtgaatgggctttttgctgaaaaagtgtatggctttcataaggactacattgagtgtgccgaaaaattatacgatgccaaagtggagcg

SEQ ID NO: 319140 - DNA, 560 bp, Artificial Sequence
  derived and/or modified sequence
attaaactcatcacacaacatccagatcggataatggtcctcttgtctgcttctccaccttacagcttgtctatgactgatttaagtggtgtcatgggagaatggcatgggaatcggatgccagctgaaaaatttgtgttccatctttgaagagataagctgcactccattttgcaatggcctcccttgctgcagcaaatgcagagttttgcttcaacctgttcagagagatggatgacaatcaaggaaatggaaatgtgttcttttcctctctgagcctcttcgctgccctggccctggtccgcttgggcgctcaagatgactccctctctcagattgataagttgcttcatgttaacactgcctcaggatatggaaactcttctaatagtcagtcagggctccagtctcaactgaaaagagttttttctgatataaatgcatcccacaaggattatgatctcagcattgtgaatgggctttttgctgaaaaagtgtatggctttcataaggactacattgagtgtgccgaaaaattatacgatgccaaagtggagcga

SEQ ID NO: 319141 - DNA, 561 bp, Artificial Sequence
  derived and/or modified sequence
tttcagactcacccaaccagcggccaacttcctctatgaagacagtaaggctgcactccattttgcaatggcctcccttgctgcagcaaatgcagagttttgcttcaacctgttcagagagatggatgacaatcaaggaaatggaaatgtgttcttttcctctctgagcctcttcgctgccctggccctggtccgcttgggcgctcaagatgactccctctctcagattgataagttgcttcatgttaacactgcctcaggatatggaaactcttctaatagtcagtcagggctccagtctcaactgaaaagagttttttctgatataaatgcatcccacaaggattatgatctcagcattgtgaatgggctttttgctgaaaaagtgtatggctttcataaggactacattgagtgtgccgaaaaattatacgatgccaaagtggagcgagttgactttacgaatcatttagaagacactagacgtaatattaataagtgggttgaaaatgaaacacatggcaaaatcaagaacgtgattggtgaaggtggcataagctc

SEQ ID NO: 319142 - DNA, 1507 bp, Artificial Sequence
  derived and/or modified sequence
cagactcacccaaccagcggccaacttcctctatgaagacagtaaggctgcactccattttgcaatggcctcccttgctgcagcaaatgcagagttttgcttcaacctgttcagagagatggatgacaatcaaggaaatggaaatgtgttcttttcctctctgagcctcttcgctgccctggccctggtccgcttgggcgctcaagatgactccctctctcagattgataagttgcttcatgttaacactgcctcaggatatggaaactcttctaatagtcagtcagggctccagtctcaactgaaaagagttttttctgatataaatgcatcccacaaggattatgatctcagcattgtgaatgggctttttgctgaaaaagtgtatggctttcataaggactacattgagtgtgccgaaaaattatacgatgccaaagtggagcgagttgactttacgaatcatttagaagacactagacgtaatattaataagtgggttgaaaatgaaacacatggcaaaatcaagaacgtgattggtgaaggtggcataagctcatctgctgtaatggtgctggtgaatgctgtgtacttcaaaggcaagtggcaatcagccttcaccaagagcgaaaccataaattgccatttcaaatctcccaagtgctctgggaaggcagtcgccatgatgcatcaggaacggaagttcaatttgtctgttattgaggacccatcaatgaagattcttgagctcagatacaatggtggcataaacatgtacgttctgctgcctgagaatgacctctctgaaattgaaaacaaactgacctttcagaatctaatggaatggaccaatccaaggcgaatgacctctaagtatgttgaggtattttttcctcagttcaagatagagaagaattatgaaatgaaacaatatttgagagccctagggctgaaagatatctttgatgaatccaaagcagatctctctgggattgcttcggggggtcgtctgtatatatcaaggatgatgcacaaatcttacatagaggtcactgaggagggcaccgaggctactgctgccacaggaagtaatattgtagaaaagcaactccctcagtccacgctgtttagagctgaccacccattcctatttgttatcaggaaggatgacatcatcttattcagtggcaaagtttcttgcccttgaaaatccaattggtttctgttatagcagtccccacaacatcaaagaaccaccacaagtcaatagatttgagtttaattggaaaaatgtggtgtttcctttgagtttatttcttcctaacattggtcagcagatgacactggtgacttgacccttcctagacacctggttgattgtcctgatccctgctcttagcattctaccaccatgtgtctcacccatttctaatttcattgtctttcttcccacgctcatttctatcattctcccccatgacccgtctggaaattatggagagtgctc

SEQ ID NO: 319143 - DNA, 1143 bp, Artificial Sequence
  derived and/or modified sequence
atggccagcctggccgccgccaacgccgagttctgcttcaacctgttcagagagatggacgacaaccagggcaacggcaacgtgttcttcagcagcctgagcctgttcgccgccctggccctggtgagactgggcgcccaggacgacagcctgagccagatcgacaagctgctgcacgtgaacaccgccagcggctacggcaacagcagcaacagccagagcggcctgcagagccagctgaagagagtgttcagcgacatcaacgccagccacaaggactacgacctgagcatcgtgaacggcctgttcgccgagaaggtgtacggcttccacaaggactacatcgagtgcgccgagaagctgtacgacgccaaggtggagagagtggacttcaccaaccacctggaggacaccagaagaaacatcaacaagtgggtggagaacgagacccacggcaagatcaagaacgtgatcggcgagggcggcatcagcagcagcgccgtgatggtgctggtgaacgccgtgtacttcaagggcaagtggcagagcgccttcaccaagagcgagaccatcaactgccacttcaagagccccaagtgcagcggcaaggccgtggccatgatgcaccaggagagaaagttcaacctgagcgtgatcgaggaccccagcatgaagatcctggagctgagatacaacggcggcatcaacatgtacgtgctgctgcccgagaacgacctgagcgagatcgagaacaagctgaccttccagaacctgatggagtggaccaaccccagaagaatgaccagcaagtacgtggaggtgttcttcccccagttcaagatcgagaagaactacgagatgaagcagtacctgagagccctgggcctgaaggacatcttcgacgagagcaaggccgacctgagcggcatcgccagcggcggcagactgtacatcagcagaatgatgcacaagagctacatcgaggtgaccgaggagggcaccgaggccaccgccgccaccggcagcaacatcgtggagaagcagctgccccagagcaccctgttcagagccgaccaccccttcctgttcgtgatcagaaaggacgacatcatcctgttcagcggcaaggtgagctgcccctag

SEQ ID NO: 319144 - DNA, 387 bp, Artificial Sequence
  derived and/or modified sequence
atggccagcctggccgccgccaacgccgagttctgcttcaacctgttcagagagatggacgacaaccagggcaacggcaacgtgttcttcagcagcctgagcctgttcgccgccctggccctggtgagactgggcgcccaggacgacagcctgagccagatcgacaagctgctgcacgtgaacaccgccagcggctacggcaacagcagcaacagccagagcggcctgcagagccagctgaagagagtgttcagcgacatcaacgccagccacaaggactacgacctgagcatcgtgaacggcctgttcgccgagaaggtgtacggcttccacaaggactacatcgagtgcgccgagaagctgtacgacgccaaggtggagagatag

SEQ ID NO: 319145 - DNA, 498 bp, Artificial Sequence
  derived and/or modified sequence
atggccagcctggccgccgccaacgccgagttctgcttcaacctgttcagagagatggacgacaaccagggcaacggcaacgtgttcttcagcagcctgagcctgttcgccgccctggccctggtgagactgggcgcccaggacgacagcctgagccagatcgacaagctgctgcacgtgaacaccgccagcggctacggcaacagcagcaacagccagagcggcctgcagagccagctgaagagagtgttcagcgacatcaacgccagccacaaggactacgacctgagcatcgtgaacggcctgttcgccgagaaggtgtacggcttccacaaggactacatcgagtgcgccgagaagctgtacgacgccaaggtggagagagtggacttcaccaaccacctggaggacaccagaagaaacatcaacaagtgggtggagaacgagacccacggcaagatcaagaacgtgatcggcgagggcggcatcagcagctag

SEQ ID NO: 319146 - protein, 353 aa, Artificial Sequence
  derived and/or modified sequence
MGDSNSDGKTGLEQDEQPLNLSDSPLSAQLTSEYRIDDHNSNGKNKYKNLLISDLKMEREARENGSKSPAHSYSSYDSGKNESVDRGAEDLSLNRGDEDEDDHEDHDDSEKVNETDGVEAERLKAFNMFVRLFVDENLDRMVPISKQPKEKIQAIIDSCRRQFPEYQERARKRIRTYLKSCRRMKRSGFEMSRPIPSHLTSAVAESILASACESESRNAAKRMRLERQQDESAPADKQCKPEATQATYSTSAVPGSQDVLYINGNGTYSYHSYRGLGGGLLNLNDASSSGPTDLSMKRQLATSSGSSSSSNSRPQLSPTEINAVRQLVAGYRESAAFLLRSADELENLILQQN

SEQ ID NO: 319147 - protein, 75 aa, Artificial Sequence
  derived and/or modified sequence
MDRNREAEMELRRGPSPTRAGRGHEVDGDKATCHTCCICGKSFPFQSSLSQHMRKHTGEKPYKCPYCDHRASQKG

SEQ ID NO: 319148 - DNA, 482 bp, Artificial Sequence
  derived and/or modified sequence
aagtcacaaaaggaactttagtggggatcctacttacacatacagcagaaaggcattgcccccgtcagcctgccatgcagtttcgaatcttgattgaaggtgctggctgccagctgctgcgccccccatgtagaaggtgcacctcctgggagcaggcacgtcttttggctcttctgaccatggagagataggacggtccctgcagcccgcgcgacagaaagctgtgccgccaccaccggccgcgcccgtccttcggatggatcgcaacagagaggccgagatggagctgaggcgaggccccagccccaccagggccggccggggccacgaggtggatggggacaaggctacctgccacacctgctgcatctgcggcaagagcttccccttccagagctcgctttcgcagcacatgcgcaagcacacgggcgagaagccctacaagtgtccctactgcgaccaccgggcttcccagaagggca

SEQ ID NO: 319149 - DNA, 399 bp, Artificial Sequence
  derived and/or modified sequence
atgagccagccctggctgtacagccagtgcatcatcagcggcaagcccagcgaggaggccgccggcgagaacggcagcatcagcgccgccctgagacccctgctgctggtggccgacgtgcccgtgctgggctacctgtgccccagcagcgtgagcagcggcgtgtgcgaggccaagctgctgggctggggcctgggcggcgtgagcgccgcccccgaggccaagaccaaggccgaggccgaggccgaggccgaggccaccctggtgagaagaaagctgcaggtggagaagctggtggacagagacctggacctgaccgtgatcctgatggtgcccatgcccagcgccagaagaccccccgccctggccaccaccggcagctgcagcccccccggctag

SEQ ID NO: 319150 - protein, 299 aa, Artificial Sequence
  derived and/or modified sequence
MVEKEEAGGGISEEEAAQYDRQIRLWGLEAQKRLRASRVLLVGLKGLGAEIAKNLILAGVKGLTMLDHEQVTPEDPGAQFLIRTGSVGRNRAEASLERAQNLNPMVDVKVDTEDIEKKPESFFTQFDAVCLTCCSRDVIVKVDQICHKNSIKFFTGDVFGYHGYTFANLGEHEFVEEKTKVAKVSQGVEDGPDTKRAKLDSSETTMVKKKVVFCPVKEALEVDWSSEKAKAALKRTTSDYFLLQELFPRIVERVYAQRHPRSTERTHAKMLIPFLTKEKPGFLGEMAVSRSGVGKLQCS

SEQ ID NO: 319151 - DNA, 900 bp, Artificial Sequence
  derived and/or modified sequence
atggtggagaaggaggaggccggcggcggcatcagcgaggaggaggccgcccagtacgacagacagatcagactgtggggcctggaggcccagaagagactgagagccagcagagtgctgctggtgggcctgaagggcctgggcgccgagatcgccaagaacctgatcctggccggcgtgaagggcctgaccatgctggaccacgagcaggtgacccccgaggaccccggcgcccagttcctgatcagaaccggcagcgtgggcagaaacagagccgaggccagcctggagagagcccagaacctgaaccccatggtggacgtgaaggtggacaccgaggacatcgagaagaagcccgagagcttcttcacccagttcgacgccgtgtgcctgacctgctgcagcagagacgtgatcgtgaaggtggaccagatctgccacaagaacagcatcaagttcttcaccggcgacgtgttcggctaccacggctacaccttcgccaacctgggcgagcacgagttcgtggaggagaagaccaaggtggccaaggtgagccagggcgtggaggacggccccgacaccaagagagccaagctggacagcagcgagaccaccatggtgaagaagaaggtggtgttctgccccgtgaaggaggccctggaggtggactggagcagcgagaaggccaaggccgccctgaagagaaccaccagcgactacttcctgctgcaggagctgttccccagaatcgtggagagagtgtacgcccagagacaccccagaagcaccgagagaacccacgccaagatgctgatccccttcctgaccaaggagaagcccggcttcctgggcgagatggccgtgagcagaagcggcgtgggcaagctgcagtgcagctag

SEQ ID NO: 319152 - DNA, 900 bp, Artificial Sequence
  derived and/or modified sequence
atggttgaaaaggaagaggccggcggaggcatctcagaggaggaggccgcacagtacgaccgccagatacgcctgtgggggttagaagcccagaagcggctgcgagctagtcgcgtcttgctcgtgggcctgaaaggcctgggggccgagattgccaagaacctgattttagctggggtaaagggactgaccatgctggaccacgaacaggttacaccggaggatccaggggcccagtttcttattagaaccggttcagtgggaagaaatagggctgaggcctccctcgagagagcccagaatcttaatcccatggtcgacgtgaaggtggacactgaagatatcgaaaaaaaaccagagtcattcttcacacagttcgacgcagtgtgtctaacctgctgttctcgcgacgtcatcgtaaaagtggaccagatttgccacaagaatagcattaagtttttcaccggcgatgtgtttggttaccatggttacaccttcgctaatctcggcgagcacgaattcgtggaggagaagactaaagtggccaaggtgagtcagggcgtggaggacggccccgataccaaaagggccaagctagacagctccgaaacaaccatggtgaagaagaaggttgtgttttgcccggtaaaggaagctctagaagtggactggtcctcagagaaagctaaggccgcccttaaaaggaccaccagcgattattttctcctgcaagagctgtttcctcgtattgtggaaagggtgtatgcacagagacacccgagatccacggaaagaacccacgctaaaatgcttatcccttttttaacaaaagagaagcccgggtttctcggagaaatggcggtttctagatcaggagtggggaagctacagtgcagctag

SEQ ID NO: 319153 - DNA, 900 bp, Artificial Sequence
  derived and/or modified sequence
atggtggagaaggaggaggccggcggcggcatcagcgaggaggaggccgcccagtatgaccggcagatccggctgtggggcctggaggcccagaagaggctgcgggccagccgggtgctgctggtgggcctgaagggcctgggcgctgagatcgccaagaacctgatcctggccggcgtgaagggcctgaccatgctggaccacgagcaggtgaccccagaggaccccggggcccagttcctgatcagaacaggctctgtgggcaggaacagagctgaggccagcctggagcgggcccagaacctgaaccccatggtggatgtgaaggtggacacagaagatattgagaagaagccagagagcttcttcacccagtttgatgctgtgtgcctgacctgctgcagcagagatgtgattgtgaaggtggaccagatctgccacaagaacagcatcaagttcttcaccggagatgtgtttggctaccacggctacacctttgccaacctgggggagcacgagtttgtggaggagaagaccaaggtggccaaggtgtcccagggcgtggaggatggccctgacaccaagagggccaagctggacagcagcgagaccaccatggtgaagaagaaggtggtgttctgccctgtgaaggaggccctggaggtggactggagcagcgagaaggccaaggccgccctgaagaggaccaccagtgactacttcctgctgcaggagctgttcccccgcatcgtggagcgggtgtatgcccagaggcaccccaggagcacagagaggacccacgccaagatgctgatccccttcctgaccaaggagaagccaggcttcctgggggagatggctgtgagccgctctggagtgggcaagctgcagtgcagctag

SEQ ID NO: 319154 - DNA, 900 bp, Artificial Sequence
  derived and/or modified sequence
atggtggagaaggaggaggccggcggcggcatcagcgaggaggaggcagcccagtacgataggcaaattaggctctggggcttggaggcccaaaaacggcttcgcgccagtagggtactgctcgttggtttgaaggggctaggggccgaaattgcaaagaacctgatactcgcgggagtaaaaggattgactatgttggaccatgaacaggtgacaccagaagaccccggggcccagtttctgatacggaccggttctgtcgggcgcaaccgggcagaggcttcactagagcgagctcagaatcttaaccccatggtggatgtgaaggtggacaccgaggacatagagaagaagccagaatccttctttactcagttcgacgccgtatgcttaacttgttgctccagggacgtgattgtaaaagtggaccagatatgtcataagaactcaataaaattcttcaccggggacgtgttcggataccacgggtacacattcgctaacttaggcgagcacgagttcgtggaagaaaagaccaaagttgccaaggtcagccagggggtggaggatggcccggacaccaagcgggctaagctagactcctctgaaaccactatggtgaaaaagaaggtagtcttctgcccggtcaaggaagccttggaggtcgactggtcctccgagaaggccaaggccgccctcaaaaggaccacgagtgactattttctcctgcaggagctctttccccggattgtcgagagagtgtacgcccagcggcatcctcggagcacagaacgtacacacgcgaaaatgctaatcccattcctaactaaggaaaagcctgggttcctgggcgaaatggccgtgtcacggagcggcgtcggcaaactgcagtgctcatag

SEQ ID NO: 319155 - DNA, 900 bp, Artificial Sequence
  derived and/or modified sequence
atggttgaaaaagaggaggcaggcggaggcattagcgaagaggaggccgcacaatacgatcgtcagattagactctggggtcttgaggcgcaaaaacggctgagagccagtcgggtgctgctagtgggcctgaaaggtctgggggctgagattgctaagaacctgattctggctggtgttaaaggactaacaatgctggatcacgagcaggtgacacccgaggacccaggagcacagttcctgattcgcaccggttcagtgggtcgcaaccgggcagaggcctctttggagagagcccagaatctcaatcctatggtcgatgtgaaggtggacaccgaagacatcgagaagaagcctgagtccttttttacgcagttcgacgctgtgtgcctcacttgttgctcacgggatgtgattgtcaaagtggatcaaatctgccataaaaattccatcaaattttttaccggcgatgtgttcggatatcacggctacacatttgccaacctgggcgagcacgaattcgtagaggaaaagactaaggtagcgaaggtttcccagggagtggaagatgggccagacaccaagcgcgcaaaacttgatagttcagagacaaccatggtcaaaaaaaaggtcgtcttctgtcccgttaaggaagccctggaagttgactggagcagcgagaaggctaaggcagccctaaagagaacaacctcggattacttcctgctgcaggagctgtttccccgaatcgtagaacgtgtgtatgcccagcgacatccaagaagcaccgagcgcacccacgctaaaatgctcattccatttttgaccaaggaaaaacccggtttcttgggtgagatggctgtcagtaggagcggcgtcgggaaattgcagtgttcctag

SEQ ID NO: 319156 - DNA, 2210 bp, Artificial Sequence
  derived and/or modified sequence
gtaggtggcgcgcgggtccggcgggcggttggcttgagcgggaccggagctgaggcaggaagagccggcgccatggtggagaaggaggaggctggcggcggcattagcgaggaggaggcggcacagtatgaccggcagatccgcctgtggggactggaggcccagaaacggctgcgggcctctcgggtgcttcttgtcggcttgaaaggacttggggctgaaattgccaagaatctcatcttggcaggagtgaaaggactgaccatgctggatcacgaacaggtaactccagaagatcccggagctcagttcttgattcgtactgggtctgttggccgaaatagggctgaagcctctttggagcgagctcagaatctcaaccccatggtggatgtgaaggtggacactgaggatatagagaagaaaccagagtcatttttcactcaattcgatgctgtgtgtctgacttgctgctccagggatgtcatagttaaagttgaccagatctgtcacaaaaatagcatcaagttctttacaggagatgtttttggctaccatggatacacatttgccaatctaggagagcatgagtttgtagaggagaaaactaaagttgccaaagttagccaaggagtagaagatgggcccgacaccaagagagcaaaacttgattcttctgagacaacgatggtcaaaaagaaggtggtcttctgccctgttaaagaagccctggaggtggactggagcagtgagaaagcaaaggctgctctgaagcgcacgacctccgactactttctccttcaagaattgtttcctagaattgttgagagggtttatgcccagagacatcccagaagcactgaacgcactcatgccaagatgttaatacctttcctcactaaagagaaaccagggttccttggagaaatggctgtttccagatctggggtaggaaaattacagtgctcttaaagttccgtacagataaaggaagagatcccagttctgatacatatgaggaagattctgagttgttgctccagatacgaaatgatgtgcttgactcactgggtattagtcctgacctgcttcctgaggactttgtcaggtactgcttctccgagatggccccagtgtgtgcggtggttggagggattttggcacaggaaattgtgaaggccctgtctcagcgggaccctcctcacaacaacttcttcttcttcgatggcatgaaggggaatgggattgtggagtgccttggccccaagtgaactcaagatttggcagccccagagatgccaactgcagcatgcccacctgtattccctgtccccttccttcatgaaggcatctccaggcaaggaaaactgaagtcattggcccgatacaaaacatttcctgcaacgaaggaggtggtgccgacgtgctgcttcccatcaccagcagctgctcgacaaggggcgcagggtggctgtctttgttccagcactgttcaggctgcctgtcatcccgggcctgccagctcccctgagtgatgagcacttccaagcacccctctgccctttctctgtccttatgctgtcccggcctcgccagccctctggggcattgtgggagatgcctgccaggaatgagcaagctctgttgctcgggagcctcttgtcaccttcttggacttattccccacctgataccttatagagaaaagtgtgaattcaggtggagagtaggcccaggccccatgaggcaccagtggaagcacagctccaagttcagacaggtgcccttagagaggaaaaccatgacaggcaaatgcatttcctctggagtttgagaccctgacaaacaacaggtggcatctggtgtgctgttcttgagttttcgtttaggattagttgagttccagctgggttttgggagaaaggagatgctaccaagtcttggatgttagggcgagaccctgcaagttgagtattagagagcttgtctttcaaggcaggttcctggggcttcagggctaggagggaggagcctgcccttttaacagaaccccagtcacatgcggctcaagtcactcagaggctgttgcatttcagggctatgttggtcctttgtttacctcctaaaccacagctgtttgtgtttcacatatgttgtgaattttccttggttctttttaaaggaatgataataaagttacttgctttagg

SEQ ID NO: 319157 - protein, 652 aa, Artificial Sequence
  derived and/or modified sequence
MASRLPTAWSCEPVTFEDVTLGFTPEEWGLLDLKQKSLYREVMLENYRNLVSVEHQLSKPDVVSQLEEAEDFWPVERGIPQDTIPEYPELQLDPKLDPLPAESPLMNIEVVEVLTLNQEVAGPRNAQIQALYAEDGSLSADAPSEQVQQQGKHPGDPEAARQRFRQFRYKDMTGPRELDQLRELCHQWLQPKARSKEQILELLVLEQFLGALPVKLRTWVESQHPENCQEVVALVEGVTWMSEEEVLPAGQPAEGTTCCLEVTAQQEEKQEDAAICPVTVLPEEPVTFQDVAVDFSREEWGLLGPTQRTEYRDVMLETFGHLVSVGWETTLENKELAPNSDIPEEEPAPSLKVQESSRDCALSSTLEDTLQGGVQEVQDTVLKQMESAQEKDLPQKKHFDNRESQANSGALDTNQVSLQKIDNPESQANSGALDTNQVLLHKIPPRKRLRKRDSQVKSMKHNSRVKIHQKSCERQKAKEGNGCRKTFSRSTKQITFIRIHKGSQVCRCSECGKIFRNPRYFSVHKKIHTGERPYVCQDCGKGFVQSSSLTQHQRVHSGERPFECQECGRTFNDRSAISQHLRTHTGAKPYKCQDCGKAFRQSSHLIRHQRTHTGERPYACNKCGKAFTQSSHLIGHQRTHNRTKRKKKQPTS

SEQ ID NO: 319158 - DNA, 2538 bp, Artificial Sequence
  derived and/or modified sequence
cgcccccaccgccacccaaccaagcatcacccattccagcacttccggcctgacccctgtccagcgcctttcctttctccagcttctgctctgccccaagagtggtcgccttcgtggcagggcacgactctctcccagctcgggtcgccgcccacattagtgtggggccctgcggcctagcgtccctcaccagaggcctccccttgcctagctggaccgccgagggacatcgacgagtatcctcctcctgctgtccccggcttcgcctgccgcccctaaccggccagtcaagatggccgccgctgggtgaggcaagctggcgcgccgcgggggcgtctgggagttgtagttcgggacggcgggctgacgcacttcgccgccggccgacgggcgccattgtgcggcgcgcgccggagtatcctgagctccagctggaccctaaattggatcctcttcctgctgagagtcccctaatgaacattgaggttgttgaggtcctcacactgaaccaggaggtggctggtccccggaatgcccagatccaggccctatatgctgaagatggaagcctgagtgcagatgcccccagtgagcaggtccaacagcagggcaagcatccaggtgaccctgaggccgcgcgccagaggttccggcagttccgttataaggacatgacaggtccccgggaggccctggaccagctccgagagctgtgtcaccagtggctacagcctaaggcacgctccaaggagcagatcctggagctgctggtgctggagcagttcctaggtgcactgcctgtgaagctccggacatgggtggaatcgcagcacccagagaactgccaagaggtggtggccctggtagagggtgtgacctggatgtctgaggaggaagtacttcctgcaggacaacctgccgagggcaccacctgctgcctcgaggtcactgcccagcaggaggagaagcaggaggatgcagccatctgcccagtgacagtgctccctgaggagccagtgaccttccaggatgtggctgtggacttcagccgggaggagtgggggctgctgggcccgacacagaggaccgagtaccgcgatgtgatgctggagacctttgggcacctggtctctgtggggtgggagactacactggaaaataaagagttagctccaaattctgacattcctgaggaagaaccagcccccagcctgaaagtacaagaatcctcaagggattgtgccttgtcctctacattagaagataccttgcagggtggggtccaggaagtccaagacacagtgttgaagcagatggagtctgctcaggaaaaagaccttcctcagaagaagcactttgacaaccgtgagtcccaggcaaacagtggtgctcttgacacaaaccaagtttcgctccagaaaattgacaaccctgagtcccaggcaaacagtggcgctcttgacacaaaccaagttttgctccacaaaattcctcctagaaaacgattgcgcaaacgtgactcacaagttaaaagtatgaaacataattcacgtgtaaaaattcatcagaagagctgtgaaaggcaaaaggccaaggaaggcaatggttgtaggaaaaccttcagtcggagtactaaacagattacgtttataagaattcacaaggggagccaagtttgccgatgcagtgaatgtggtaaaatattccggaacccaagatacttttctgtgcataagaaaatccataccggagagaggccctatgtgtgtcaagactgtgggaaaggatttgttcagagctcttccctcacacagcatcagagagttcattctggagagagaccatttgaatgtcaggagtgtgggaggaccttcaatgatcgctcagccatctcccagcacctgaggactcacactggcgctaagccctacaagtgtcaggactgtggaaaagccttccgccagagctcccacctcatcagacatcagaggactcacaccggggagcgcccatatgcatgcaacaaatgtggaaaggccttcacccagagctcacaccttattgggcaccagagaacccacaataggacaaagcgaaagaagaaacagcctacctcatagctctcaagccagttgaagaaaccttgccttttcagcttgaccctgcaatataacatgcacaggcctgcttgtgaatcaggactgaatgtgaaagggaagtattgagtgaggacattcccaaaaccaaaggacaactgaggagactgcccagcacataatgaataaataagaaaatgagtgaggagttattaacatcatttggaaaaaagatttcccattcacttgatattgtttgttcactcatttagtcattaaaagtgagattaataaaatctgaaaatgttatataataactttaaaaagccaggtaattaataatctgcactgatattacatccacagtaccacagtatttatgtgtatgaattaaggattaaaagataatgtggataaataaactattgatctatgtctgtgt

SEQ ID NO: 319159 - DNA, 1959 bp, Artificial Sequence
  derived and/or modified sequence
atggccagcagactgcccaccgcctggagctgcgagcccgtgaccttcgaggacgtgaccctgggcttcacccccgaggagtggggcctgctggacctgaagcagaagagcctgtacagagaggtgatgctggagaactacagaaacctggtgagcgtggagcaccagctgagcaagcccgacgtggtgagccagctggaggaggccgaggacttctggcccgtggagagaggcatcccccaggacaccatccccgagtaccccgagctgcagctggaccccaagctggaccccctgcccgccgagagccccctgatgaacatcgaggtggtggaggtgctgaccctgaaccaggaggtggccggccccagaaacgcccagatccaggccctgtacgccgaggacggcagcctgagcgccgacgcccccagcgagcaggtgcagcagcagggcaagcaccccggcgaccccgaggccgccagacagagattcagacagttcagatacaaggacatgaccggccccagagagctggaccagctgagagagctgtgccaccagtggctgcagcccaaggccagaagcaaggagcagatcctggagctgctggtgctggagcagttcctgggcgccctgcccgtgaagctgagaacctgggtggagagccagcaccccgagaactgccaggaggtggtggccctggtggagggcgtgacctggatgagcgaggaggaggtgctgcccgccggccagcccgccgagggcaccacctgctgcctggaggtgaccgcccagcaggaggagaagcaggaggacgccgccatctgccccgtgaccgtgctgcccgaggagcccgtgaccttccaggacgtggccgtggacttcagcagagaggagtggggcctgctgggccccacccagagaaccgagtacagagacgtgatgctggagaccttcggccacctggtgagcgtgggctgggagaccaccctggagaacaaggagctggcccccaacagcgacatccccgaggaggagcccgcccccagcctgaaggtgcaggagagcagcagagactgcgccctgagcagcaccctggaggacaccctgcagggcggcgtgcaggaggtgcaggacaccgtgctgaagcagatggagagcgcccaggagaaggacctgccccagaagaagcacttcgacaacagagagagccaggccaacagcggcgccctggacaccaaccaggtgagcctgcagaagatcgacaaccccgagagccaggccaacagcggcgccctggacaccaaccaggtgctgctgcacaagatcccccccagaaagagactgagaaagagagacagccaggtgaagagcatgaagcacaacagcagagtgaagatccaccagaagagctgcgagagacagaaggccaaggagggcaacggctgcagaaagaccttcagcagaagcaccaagcagatcaccttcatcagaatccacaagggcagccaggtgtgcagatgcagcgagtgcggcaagatcttcagaaaccccagatacttcagcgtgcacaagaagatccacaccggcgagagaccctacgtgtgccaggactgcggcaagggcttcgtgcagagcagcagcctgacccagcaccagagagtgcacagcggcgagagacccttcgagtgccaggagtgcggcagaaccttcaacgacagaagcgccatcagccagcacctgagaacccacaccggcgccaagccctacaagtgccaggactgcggcaaggccttcagacagagcagccacctgatcagacaccagagaacccacaccggcgagagaccctacgcctgcaacaagtgcggcaaggccttcacccagagcagccacctgatcggccaccagagaacccacaacagaaccaagagaaagaagaagcagcccaccagctag

SEQ ID NO: 319160 - DNA, 1959 bp, Artificial Sequence
  derived and/or modified sequence
atggcgtcacgcctgccaactgcttggtcctgtgagcccgtgaccttcgaggatgtgacgctcggattcactcctgaagaatggggtctattagacctcaagcaaaaatccctgtatcgggaggtgatgcttgagaactatagaaatctcgtgtccgtggagcaccagctgtccaagcctgatgtcgtatcccaactggaggaggctgaggatttctggccggtcgaacgcggcattccccaggacactattcctgagtatcctgaattacaattggatcctaaactggaccctctgcccgcagaatcccctttaatgaacatcgaagtggtggaggtgctgaccctgaatcaggaggtagccggacctcgcaacgcccaaatacaggccctctacgcggaagatgggtcactgagcgcagacgctccgtctgaacaggtccagcaacagggaaagcacccaggggacccagaggctgcccgacaacggtttcgacaattcagatataaagacatgaccgggccacgggagttggatcaacttcgcgagctctgtcaccagtggttgcagcccaaagccagatctaaagagcagatcttggagctcctggtactggaacaattcctgggcgcgctcccagtgaaattgagaacttgggtagaatctcagcaccctgagaattgtcaggaggtggtggctctcgtggaaggtgtcacctggatgtcagaggaagaggtgctgcccgcaggccaacccgctgaaggaacaacctgttgccttgaggtgactgctcagcaagaggagaagcaggaagacgccgctatctgccctgttacggtgctacccgaggagcccgtgactttccaagacgtcgcagtcgacttttctagggaagaatggggactgttaggccccacacaaaggaccgagtatagggacgtcatgctggagacgttcggccacttggtgtccgtgggctgggagacaaccctggagaataaggagcttgcccccaactccgacattcctgaagaggaaccagcgccgagcctgaaggtgcaagagtcgtcccgcgattgcgccctgagcagtactctggaggacacactgcagggaggtgtccaagaagtccaggacacagtgctgaaacagatggagagcgctcaggaaaaggacctgccccagaagaaacatttcgataatcgggagagccaggctaatagcggcgctctggacactaaccaggtatctctgcaaaaaattgacaatcctgaatctcaagccaatagtggtgcacttgatacaaatcaggtgttacttcataagattcccccccgcaaaaggttgcgaaagagggattctcaggtaaaatcaatgaagcataactctcgcgtgaagattcaccagaaaagctgcgaaaggcagaaggcaaaggaagggaatgggtgtaggaagaccttttccaggtccactaagcagatcacttttattaggattcacaagggttctcaggtgtgtaggtgttccgagtgtgggaaaatatttcggaatccaaggtatttttcggtccacaagaaaatccatactggggaaaggccatatgtgtgccaagactgtggcaaaggttttgtgcagtccagcagtcttactcagcaccaaagggtacacagtggcgagagaccgttcgaatgccaggaatgcggtaggacttttaatgacagaagtgccatcagccagcatctgcgcacacacaccggtgcaaagccttacaaatgccaagactgcggcaaagcgttcagacaatctagccatctgatacgccaccagaggacccatacaggggaacggccttatgcttgcaataagtgcggcaaggcgtttacgcagtccagccacctgatcggccaccaaagaactcataatcggaccaaaaggaagaagaagcagccgaccagctag

SEQ ID NO: 319161 - DNA, 1959 bp, Artificial Sequence
  derived and/or modified sequence
atggccagccggctgcccacagcctggagctgtgagcctgtgacctttgaagatgtgaccctgggcttcaccccagaggagtggggcctgctggacctgaagcagaagagcctgtaccgggaggtgatgctggagaactacagaaacctggtgtctgtggagcaccagctgagcaagccagatgtggtgtcccagctggaggaggccgaggacttctggcctgtggagcggggcatcccccaggacaccatccctgagtacccagagctgcagctggaccccaagctggaccccctgcctgctgagagccccctgatgaacatcgaggtggtggaggtgctgaccctgaaccaggaggtggccggccccagaaatgcccagatccaggccctgtatgcagaagatggcagcctgtctgcagatgcccccagcgagcaggtgcagcagcagggcaagcaccctggggaccctgaggccgcccggcagcgcttccggcagttccgctacaaggacatgacaggcccccgggagctggaccagctgcgggagctgtgccaccagtggctgcagcccaaggcccggagcaaggagcagatcctggagctgctggtgctggagcagttcctgggcgccctgcctgtgaagctgcggacctgggtggagagccagcaccctgagaactgccaggaggtggtggccctggtggagggcgtgacctggatgtctgaggaggaggtgctgcctgctggccagcctgctgagggcaccacctgctgcctggaggtgacagcccagcaggaggagaagcaggaggatgctgccatctgccctgtgacagtgctgcctgaggagcctgtgaccttccaggatgtggccgtggacttcagccgggaggagtggggcctgctgggccccacccagaggacagagtacagagatgtgatgctggagaccttcggccacctggtgtctgtgggctgggagaccaccctggagaacaaggagctggcccccaacagcgacatccctgaggaggagcccgcccccagcctgaaggtgcaggagagcagccgggactgtgccctgagcagcaccctggaggacaccctgcagggcggcgtgcaggaggtgcaggacacagtgctgaagcagatggagagcgcccaggagaaggacctgccccagaagaagcactttgacaaccgggagagccaggccaacagcggggccctggacaccaaccaggtgtccctgcagaagattgacaaccctgagagccaggccaacagcggggccctggacaccaaccaggtgctgctgcacaagatcccccccaggaagaggctgaggaagagggacagccaggtgaagtccatgaagcacaacagccgggtgaagatccaccagaagagctgtgagcggcagaaggccaaggagggcaatggctgcaggaagaccttcagccgcagcaccaagcagatcaccttcatccgcatccacaagggcagccaggtgtgccgctgcagtgaatgtgggaagatcttcaggaacccccgctacttctctgtgcacaagaagatccacactggagagcggccctacgtgtgccaggactgtgggaaaggatttgtgcagagcagcagcctgacccagcaccagagggtgcacagcggggagcggccctttgagtgccaggagtgtggccgcaccttcaatgacagaagtgccatcagccagcacctgcggacccacactggagccaagccctacaagtgccaggactgtgggaaggccttccggcagagcagccacctgatccgccaccagaggacccacactggagagcggccctatgcctgcaacaagtgtgggaaggccttcacccagagcagccacctgattggccaccagaggacccacaacagaaccaagaggaagaagaagcagcccaccagctag

SEQ ID NO: 319162 - DNA, 1959 bp, Artificial Sequence
  derived and/or modified sequence
atggccagccggctgcccaccgcctggagctgcgagcccgtgaccttcgaagacgtgacgctgggatttacccctgaggagtgggggctgctggatctgaaacagaagagcctgtaccgtgaagttatgctagagaactatcgcaacttagtctctgtggaacaccagctcagcaagcctgacgtcgtcagtcagctcgaagaggcggaagacttctggcctgttgaacgtggcatccctcaggatacaatacccgagtatcccgaactccagctggatccaaaactcgaccctctgcctgcggaaagcccactgatgaatatcgaagtggttgaagtgttaacactgaatcaagaagtagccggcccacgcaacgcacaaattcaggctctttatgccgaagacggttcacttagcgccgatgctccaagtgagcaggtgcagcaacagggcaagcacccaggagatcccgaggctgcccgccagcggttcaggcagtttcgctacaaagatatgacaggccctcgggagctggaccagctgcgtgagctttgtcatcaatggctacagcccaaggccaggtcaaaagagcaaattctggagctgctcgtgttggagcaattcctcggggcactgcccgtaaaactgaggacatgggtcgaatctcagcatcccgaaaactgtcaggaagtggtggctctggtagaaggagttacatggatgagcgaagaagaagttctgcctgccggccagccagcggaaggtaccacatgttgcctggaagtgaccgcccagcaagaagagaagcaggaggatgccgctatttgcccagtaacggttctgcccgaagagccagtgacattccaggatgtcgccgtcgatttcagcagggaggaatggggcttgctgggaccaacccagaggacggagtatcgtgatgttatgctggagacattcggccaccttgtgtcggtcggatgggaaaccaccctggagaacaaggaactggcacctaatagcgatatccccgaggaggagccggctcctagcttaaaagtgcaggaaagtagtcgcgattgtgctctatcatccaccctggaagacaccctccagggcggcgtccaagaggtccaggacacagtgctcaagcagatggaatccgcgcaggaaaaggacttaccgcaaaagaagcatttcgacaatcgcgagagccaggcaaactcaggtgcactcgacaccaaccaagtgagcctgcagaaaatcgacaaccctgagagccaggccaattcgggcgcgctggacactaaccaggtgctgctgcataagattccccctaggaaaagactcaggaagcgcgattctcaggtgaaaagcatgaagcacaattctagagtcaaaatccatcagaagtcctgtgagcgccagaaagcaaaggagggcaacggctgtagaaagacattcagcaggtcaaccaagcagattacctttataaggatccataaagggtcccaggtttgccggtgtagtgaatgtggcaagatcttcaggaatcccaggtacttctccgtacacaaaaaaatccacactggagaacgcccttacgtgtgtcaggattgtggaaagggtttcgtccaatcgtccagcttgactcagcatcagcgggtccatagtggtgagaggcctttcgagtgtcaggagtgtggtcggacatttaatgataggagcgccatctctcagcatctgagaactcacactggtgccaagccatacaagtgccaggattgcggcaaagcttttagacagagcagtcatctaattcgacaccagcggacccatacaggggaacgcccatacgcatgtaataagtgcggaaaggcgtttactcaatcaagccatctgattgggcatcaaaggacccacaacagaaccaaaagaaaaaagaagcaaccgacctcctag

SEQ ID NO: 319163 - DNA, 1959 bp, Artificial Sequence
  derived and/or modified sequence
atggcctcgcgtctccctacagcttggtcgtgcgagcccgtgacatttgaggacgtgaccctgggctttacaccagaagagtggggcctgctcgacctcaagcagaagtcgttatatcgcgaggtgatgctcgagaactacaggaatctggtatccgtggagcaccagctctcaaaacccgacgtggtgagccaactggaggaggccgaagacttctggcctgtcgagcggggaatcccccaggacacaatcccagagtaccctgagttgcagctggaccccaaactcgaccctcttcccgctgaaagcccactgatgaacatcgaggtcgtcgaggtgctaactctcaaccaggaagtcgctggaccccgtaatgctcagattcaggccttgtacgccgaagacggatcccttagcgccgacgccccttcagaacaggtccagcaacaaggaaagcatcccggagatcctgaagctgctcgccagcggtttcgacaattcaggtacaaagacatgacggggccaagggagcttgatcagctgagagagctgtgtcaccagtggctgcagccaaaagccagaagtaaagaacaaatactagagctgttggtcctggagcaatttttgggcgcattgcccgtaaaactcagaacgtgggttgaatctcagcacccggagaactgccaggaagtcgtcgctctggtcgagggggtaacgtggatgtccgaggaggaggttttgccagctggacagccagctgaggggacaacatgctgcttagaggtcaccgcccaacaggaggagaagcaggaggacgccgcaatttgccctgtgacagtgcttcccgaagaacctgtgacttttcaggatgttgccgtggacttcagccgtgaggagtggggtctgctcggccctacgcagcgtacagagtaccgggatgtaatgctggagacgtttggtcatctcgtctccgtcggctgggaaacgacactggagaacaaggagctggcacccaatagcgacattcccgaagaagagcctgcccctagcctgaaggtgcaggagtctagtcgagattgtgctttaagtagtaccctggaggacactctgcagggcggagtacaggaagtgcaggacactgtcttgaaacaaatggagagcgcccaagaaaaagatctacctcagaagaagcactttgataatcgcgaaagccaagctaacagtggggcactggacacaaatcaggtgtcactccagaagattgacaaccctgaatcccaggccaattctggtgcattagacaccaatcaggtgctcctgcacaagattcctcctaggaagaggcttagaaagcgagactctcaggttaagagcatgaagcacaattccagagtgaagattcatcagaaatcttgcgagcgccagaaggcgaaggaaggaaatggctgtagaaaaactttttccaggagcactaagcaaattactttcatcagaatccacaagggctcacaagtctgtagatgcagcgaatgcggcaagatttttagaaacccccgatacttttcagtacacaagaagattcacaccggggagcggccttacgtgtgccaggattgcggcaaggggtttgtgcagagctcatctcttacccagcaccagcgtgtccactccggggagcgcccatttgagtgtcaagaatgcggcagaacctttaatgacagaagcgccatttcccaacacttgcgtacccataccggcgcaaagccgtacaagtgccaggactgtggcaaggcctttagacagagtagccatttgatccggcaccagcggacccacacaggagaaaggccttacgcatgtaacaaatgtggtaaggcttttacccagtcctcacatctaattggacaccagcgaactcataaccgcactaaacgaaagaagaaacaaccgacaagctag

SEQ ID NO: 319164 - DNA, 2836 bp, Artificial Sequence
  derived and/or modified sequence
cgcccccaccgccacccaaccaagcatcacccattccagcacttccggcctgacccctgtccagcgcctttcctttctccagcttctgctctgccccaagagtggtcgccttcgtggcagggcacgactctctcccagctcgggtcgccgcccacattagtgtggggccctgcggcctagcgtccctcaccagaggcctccccttgcctagctggaccgccgagggacatcgacgagtatcctcctcctgctgtccccggcttcgcctgccgcccctaaccggccagtcaagatggccgccgctgggtgaggcaagctggcgcgccgcgggggcgtctgggagttgtagttcgggacggcgggctgacgcacttcgccgccggccgacgggcgccattgtgcggcgcgcgccgggactctgcccacttccaccagagacacattgagaaggaggaaactatggcctccaggcttccgacggcctggtcctgtgaaccagtgacctttgaagatgtaacactgggttttaccccggaagagtggggactgctggacctcaaacagaagtccctgtacagggaagtgatgctggagaactacaggaacctggtctcagtggaacatcagctttccaaaccagatgtggtatctcagttagaggaggcagaagatttctggccagtggagagaggaattcctcaagacaccattccagagtatcctgagctccagctggaccctaaattggatcctcttcctgctgagagtcccctaatgaacattgaggttgttgaggtcctcacactgaaccaggaggtggctggtccccggaatgcccagatccaggccctatatgctgaagatggaagcctgagtgcagatgcccccagtgagcaggtccaacagcagggcaagcatccaggtgaccctgaggccgcgcgccagaggttccggcagttccgttataaggacatgacaggtccccgggagctggaccagctccgagagctgtgtcaccagtggctacagcctaaggcacgctccaaggagcagatcctggagctgctggtgctggagcagttcctaggtgcactgcctgtgaagctccggacatgggtggaatcgcagcacccagagaactgccaagaggtggtggccctggtagagggtgtgacctggatgtctgaggaggaagtacttcctgcaggacaacctgccgagggcaccacctgctgcctcgaggtcactgcccagcaggaggagaagcaggaggatgcagccatctgcccagtgacagtgctccctgaggagccagtgaccttccaggatgtggctgtggacttcagccgggaggagtgggggctgctgggcccgacacagaggaccgagtaccgcgatgtgatgctggagacctttgggcacctggtctctgtggggtgggagactacactggaaaataaagagttagctccaaattctgacattcctgaggaagaaccagcccccagcctgaaagtacaagaatcctcaagggattgtgccttgtcctctacattagaagataccttgcagggtggggtccaggaagtccaagacacagtgttgaagcagatggagtctgctcaggaaaaagaccttcctcagaagaagcactttgacaaccgtgagtcccaggcaaacagtggtgctcttgacacaaaccaagtttcgctccagaaaattgacaaccctgagtcccaggcaaacagtggcgctcttgacacaaaccaagttttgctccacaaaattcctcctagaaaacgattgcgcaaacgtgactcacaagttaaaagtatgaaacataattcacgtgtaaaaattcatcagaagagctgtgaaaggcaaaaggccaaggaaggcaatggttgtaggaaaaccttcagtcggagtactaaacagattacgtttataagaattcacaaggggagccaagtttgccgatgcagtgaatgtggtaaaatattccggaacccaagatacttttctgtgcataagaaaatccataccggagagaggccctatgtgtgtcaagactgtgggaaaggatttgttcagagctcttccctcacacagcatcagagagttcattctggagagagaccatttgaatgtcaggagtgtgggaggaccttcaatgatcgctcagccatctcccagcacctgaggactcacactggcgctaagccctacaagtgtcaggactgtggaaaagccttccgccagagctcccacctcatcagacatcagaggactcacaccggggagcgcccatatgcatgcaacaaatgtggaaaggccttcacccagagctcacaccttattgggcaccagagaacccacaataggacaaagcgaaagaagaaacagcctacctcatagctctcaagccagttgaagaaaccttgccttttcagcttgaccctgcaatataacatgcacaggcctgcttgtgaatcaggactgaatgtgaaagggaagtattgagtgaggacattcccaaaaccaaaggacaactgaggagactgcccagcacataatgaataaataagaaaatgagtgaggagttattaacatcatttggaaaaaagatttcccattcacttgatattgtttgttcactcatttagtcattaaaagtgagattaataaaatctgaaaatgttatataataactttaaaaagccaggtaattaataatctgcactgatattacatccacagtaccacagtatttatgtgtatgaattaaggattaaaagataatgtggataaataaactattgatctatgtctgtgt

SEQ ID NO: 319165 - DNA, 2535 bp, Artificial Sequence
  derived and/or modified sequence
cgcccccaccgccacccaaccaagcatcacccattccagcacttccggcctgacccctgtccagcgcctttcctttctccagcttctgctctgccccaagagtggtcgccttcgtggcagggcacgactctctcccagctcgggtcgccgcccacattagtgtggggccctgcggcctagcgtccctcaccagaggcctccccttgcctagctggaccgccgagggacatcgacgagtatcctcctcctgctgtccccggcttcgcctgccgcccctaaccggccagtcaagatggccgccgctgggtgaggcaagctggcgcgccgcgggggcgtctgggagttgtagttcgggacggcgggctgacgcacttcgccgccggccgacgggcgccattgtgcggcgcgcgccggagtatcctgagctccagctggaccctaaattggatcctcttcctgctgagagtcccctaatgaacattgaggttgttgaggtcctcacactgaaccaggaggtggctggtccccggaatgcccagatccaggccctatatgctgaagatggaagcctgagtgcagatgcccccagtgagcaggtccaacagcagggcaagcatccaggtgaccctgaggccgcgcgccagaggttccggcagttccgttataaggacatgacaggtccccgggagctggaccagctccgagagctgtgtcaccagtggctacagcctaaggcacgctccaaggagcagatcctggagctgctggtgctggagcagttcctaggtgcactgcctgtgaagctccggacatgggtggaatcgcagcacccagagaactgccaagaggtggtggccctggtagagggtgtgacctggatgtctgaggaggaagtacttcctgcaggacaacctgccgagggcaccacctgctgcctcgaggtcactgcccagcaggaggagaagcaggaggatgcagccatctgcccagtgacagtgctccctgaggagccagtgaccttccaggatgtggctgtggacttcagccgggaggagtgggggctgctgggcccgacacagaggaccgagtaccgcgatgtgatgctggagacctttgggcacctggtctctgtggggtgggagactacactggaaaataaagagttagctccaaattctgacattcctgaggaagaaccagcccccagcctgaaagtacaagaatcctcaagggattgtgccttgtcctctacattagaagataccttgcagggtggggtccaggaagtccaagacacagtgttgaagcagatggagtctgctcaggaaaaagaccttcctcagaagaagcactttgacaaccgtgagtcccaggcaaacagtggtgctcttgacacaaaccaagtttcgctccagaaaattgacaaccctgagtcccaggcaaacagtggcgctcttgacacaaaccaagttttgctccacaaaattcctcctagaaaacgattgcgcaaacgtgactcacaagttaaaagtatgaaacataattcacgtgtaaaaattcatcagaagagctgtgaaaggcaaaaggccaaggaaggcaatggttgtaggaaaaccttcagtcggagtactaaacagattacgtttataagaattcacaaggggagccaagtttgccgatgcagtgaatgtggtaaaatattccggaacccaagatacttttctgtgcataagaaaatccataccggagagaggccctatgtgtgtcaagactgtgggaaaggatttgttcagagctcttccctcacacagcatcagagagttcattctggagagagaccatttgaatgtcaggagtgtgggaggaccttcaatgatcgctcagccatctcccagcacctgaggactcacactggcgctaagccctacaagtgtcaggactgtggaaaagccttccgccagagctcccacctcatcagacatcagaggactcacaccggggagcgcccatatgcatgcaacaaatgtggaaaggccttcacccagagctcacaccttattgggcaccagagaacccacaataggacaaagcgaaagaagaaacagcctacctcatagctctcaagccagttgaagaaaccttgccttttcagcttgaccctgcaatataacatgcacaggcctgcttgtgaatcaggactgaatgtgaaagggaagtattgagtgaggacattcccaaaaccaaaggacaactgaggagactgcccagcacataatgaataaataagaaaatgagtgaggagttattaacatcatttggaaaaaagatttcccattcacttgatattgtttgttcactcatttagtcattaaaagtgagattaataaaatctgaaaatgttatataataactttaaaaagccaggtaattaataatctgcactgatattacatccacagtaccacagtatttatgtgtatgaattaaggattaaaagataatgtggataaataaactattgatctatgtctgtgt

SEQ ID NO: 319166 - protein, 547 aa, Artificial Sequence
  derived and/or modified sequence
MNIEVVEVLTLNQEVAGPRNAQIQALYAEDGSLSADAPSEQVQQQGKHPGDPEAARQRFRQFRYKDMTGPRELDQLRELCHQWLQPKARSKEQILELLVLEQFLGALPVKLRTWVESQHPENCQEVVALVEGVTWMSEEEVLPAGQPAEGTTCCLEVTAQQEEKQEDAAICPVTVLPEEPVTFQDVAVDFSREEWGLLGPTQRTEYRDVMLETFGHLVSVGWETTLENKELAPNSDIPEEEPAPSLKVQESSRDCALSSTLEDTLQGGVQEVQDTVLKQMESAQEKDLPQKKHFDNRESQANSGALDTNQVSLQKIDNPESQANSGALDTNQVLLHKIPPRKRLRKRDSQVKSMKHNSRVKIHQKSCERQKAKEGNGCRKTFSRSTKQITFIRIHKGSQVCRCSECGKIFRNPRYFSVHKKIHTGERPYVCQDCGKGFVQSSSLTQHQRVHSGERPFECQECGRTFNDRSAISQHLRTHTGAKPYKCQDCGKAFRQSSHLIRHQRTHTGERPYACNKCGKAFTQSSHLIGHQRTHNRTKRKKKQPTS

SEQ ID NO: 319167 - DNA, 1644 bp, Artificial Sequence
  derived and/or modified sequence
atgaacatcgaggtggtggaggtgctgaccctgaaccaggaggtggccggccccagaaacgcccagatccaggccctgtacgccgaggacggcagcctgagcgccgacgcccccagcgagcaggtgcagcagcagggcaagcaccccggcgaccccgaggccgccagacagagattcagacagttcagatacaaggacatgaccggccccagagagctggaccagctgagagagctgtgccaccagtggctgcagcccaaggccagaagcaaggagcagatcctggagctgctggtgctggagcagttcctgggcgccctgcccgtgaagctgagaacctgggtggagagccagcaccccgagaactgccaggaggtggtggccctggtggagggcgtgacctggatgagcgaggaggaggtgctgcccgccggccagcccgccgagggcaccacctgctgcctggaggtgaccgcccagcaggaggagaagcaggaggacgccgccatctgccccgtgaccgtgctgcccgaggagcccgtgaccttccaggacgtggccgtggacttcagcagagaggagtggggcctgctgggccccacccagagaaccgagtacagagacgtgatgctggagaccttcggccacctggtgagcgtgggctgggagaccaccctggagaacaaggagctggcccccaacagcgacatccccgaggaggagcccgcccccagcctgaaggtgcaggagagcagcagagactgcgccctgagcagcaccctggaggacaccctgcagggcggcgtgcaggaggtgcaggacaccgtgctgaagcagatggagagcgcccaggagaaggacctgccccagaagaagcacttcgacaacagagagagccaggccaacagcggcgccctggacaccaaccaggtgagcctgcagaagatcgacaaccccgagagccaggccaacagcggcgccctggacaccaaccaggtgctgctgcacaagatcccccccagaaagagactgagaaagagagacagccaggtgaagagcatgaagcacaacagcagagtgaagatccaccagaagagctgcgagagacagaaggccaaggagggcaacggctgcagaaagaccttcagcagaagcaccaagcagatcaccttcatcagaatccacaagggcagccaggtgtgcagatgcagcgagtgcggcaagatcttcagaaaccccagatacttcagcgtgcacaagaagatccacaccggcgagagaccctacgtgtgccaggactgcggcaagggcttcgtgcagagcagcagcctgacccagcaccagagagtgcacagcggcgagagacccttcgagtgccaggagtgcggcagaaccttcaacgacagaagcgccatcagccagcacctgagaacccacaccggcgccaagccctacaagtgccaggactgcggcaaggccttcagacagagcagccacctgatcagacaccagagaacccacaccggcgagagaccctacgcctgcaacaagtgcggcaaggccttcacccagagcagccacctgatcggccaccagagaacccacaacagaaccaagagaaagaagaagcagcccaccagctag

SEQ ID NO: 319168 - DNA, 1644 bp, Artificial Sequence
  derived and/or modified sequence
atgaacattgaagtcgtggaggtgttaactctgaatcaggaagtggctggacctcggaatgcccagattcaggccttgtacgccgaggatggaagtctctctgctgatgcgcctagcgaacaggtgcagcaacagggaaaacatcccggagatccagaggctgctagacagaggttcaggcagtttagatacaaagacatgactggccccagggagctcgatcagctcagagagctgtgtcaccagtggttacagcccaaggccagatctaaggaacagatcctcgagttattggtactggagcagttcctgggcgcattaccggtcaaactccgcacatgggtggagagccagcacccagagaattgccaagaagtcgtggcactcgttgagggggtgacatggatgagcgaagaggaggtcctccctgcaggccagcctgcagagggaacaacctgctgccttgaggtcactgcccagcaggaggagaagcaggaggacgcagccatctgccctgtgacagtgctgcccgaggaaccagtaacatttcaggatgtggcggtcgatttctctagggaggagtggggcctgctggggcccacacagcgcaccgaatatcgtgatgtcatgctggaaacgttcgggcacttagtgtctgtgggttgggaaaccacattagagaacaaagaactggcacccaactccgacattccagaggaggagcctgcaccgagcctaaaagtccaggaaagtagcagagattgtgccctctctagcacgttggaagatacacttcagggtggcgtgcaggaggtccaggatacggtgttaaaacagatggagagtgcgcaggagaaagacctaccccaaaaaaaacactttgataacagggaaagtcaggccaatagtggggcactggataccaaccaagtgagtcttcaaaagatcgacaaccccgaatctcaggctaacagcggcgcactcgataccaatcaggtcttactgcataagattcctcccagaaagcggttaagaaagagagattcccaggtcaaatcaatgaagcataatagtagggtcaagatacatcaaaagtcttgtgaacgacaaaaagcaaaggagggcaacggatgccgcaagactttctcaagatctactaagcagatcacttttatcagaatacacaaagggtctcaggtgtgcaggtgttccgagtgcggaaaaattttccggaatccacggtatttctccgttcataagaagatccacaccggtgagcgaccttatgtgtgccaagattgcgggaaaggtttcgtccaaagctcttcactgactcagcaccagcgcgtgcactcaggagagaggccatttgaatgccaagaatgcgggaggaccttcaatgatcgcagcgccatttcacagcacttacgcactcacacgggggccaagccctacaaatgccaggattgtgggaaggcattccggcaatcttcacacctcatccgccaccagagaactcatacaggggagcgcccgtatgcttgtaataaatgcggaaaggcttttacacagagtagccatctgatcggccaccaacggacccataaccggaccaagcgaaaaaagaagcagcccacctcatag

SEQ ID NO: 319169 - DNA, 1644 bp, Artificial Sequence
  derived and/or modified sequence
atgaacatcgaggtggtggaggtgctgaccctgaaccaggaggtggccggccccagaaatgcccagatccaggccctgtatgcagaagatggcagcctgtctgcagatgcccccagcgagcaggtgcagcagcagggcaagcaccctggggaccctgaggccgcccggcagcgcttccggcagttccgctacaaggacatgacaggcccccgggagctggaccagctgcgggagctgtgccaccagtggctgcagcccaaggcccggagcaaggagcagatcctggagctgctggtgctggagcagttcctgggcgccctgcctgtgaagctgcggacctgggtggagagccagcaccctgagaactgccaggaggtggtggccctggtggagggcgtgacctggatgtctgaggaggaggtgctgcctgctggccagcctgctgagggcaccacctgctgcctggaggtgacagcccagcaggaggagaagcaggaggatgctgccatctgccctgtgacagtgctgcctgaggagcctgtgaccttccaggatgtggccgtggacttcagccgggaggagtggggcctgctgggccccacccagaggacagagtacagagatgtgatgctggagaccttcggccacctggtgtctgtgggctgggagaccaccctggagaacaaggagctggcccccaacagcgacatccctgaggaggagcccgcccccagcctgaaggtgcaggagagcagccgggactgtgccctgagcagcaccctggaggacaccctgcagggcggcgtgcaggaggtgcaggacacagtgctgaagcagatggagagcgcccaggagaaggacctgccccagaagaagcactttgacaaccgggagagccaggccaacagcggggccctggacaccaaccaggtgtccctgcagaagattgacaaccctgagagccaggccaacagcggggccctggacaccaaccaggtgctgctgcacaagatcccccccaggaagaggctgaggaagagggacagccaggtgaagtccatgaagcacaacagccgggtgaagatccaccagaagagctgtgagcggcagaaggccaaggagggcaatggctgcaggaagaccttcagccgcagcaccaagcagatcaccttcatccgcatccacaagggcagccaggtgtgccgctgcagtgaatgtgggaagatcttcaggaacccccgctacttctctgtgcacaagaagatccacactggagagcggccctacgtgtgccaggactgtgggaagggctttgtgcagagcagcagcctgacccagcaccagagggtgcacagcggggagcggccctttgagtgccaggagtgtggccgcaccttcaatgacagaagtgccatcagccagcacctgcggacccacactggagccaagccctacaagtgccaggactgtgggaaggccttccggcagagcagccacctgatccgccaccagaggacccacactggagagcggccctatgcctgcaacaagtgtgggaaggccttcacccagagcagccacctgattggccaccagaggacccacaacagaaccaagaggaagaagaagcagcccaccagctag

SEQ ID NO: 319170 - DNA, 1644 bp, Artificial Sequence
  derived and/or modified sequence
atgaacatcgaggtggtggaggtgctgaccctgaaccaggaggtggcaggccccagaaacgctcagatacaggcgttgtacgcagaagatggatcgctgagcgcagacgccccatcagagcaggtgcagcagcaggggaagcacccaggcgatccagaggccgcacggcaacgattccggcagttccgatacaaggacatgactggaccacgggagctagaccagctgcgtgaactttgtcatcagtggctgcagccgaaagcccgctccaaagaacagattttggaactgctggtgctggagcagttcctaggcgcgctgcctgtgaagttaaggacttgggttgagagccaacatcccgagaattgccaggaagtcgtcgctcttgtggagggggtgacgtggatgtcagaggaggaagtcctgccagccggccaaccagccgagggcacaacctgttgtttagaagtgactgcccaacaggaggagaaacaggaggatgccgccatttgcccggtgactgttttgccagaagaacccgttactttccaggatgtcgccgtcgatttctccagagaagaatggggcttacttgggcccacacagcgaactgaataccgcgatgtcatgctggagacgttcggacatctggtgagcgtcgggtgggagacaaccctcgagaacaaggagctggccccaaacagcgatattccagaagaggaacccgccccatcccttaaagtgcaggaatccagccgtgattgcgctctcagcagcaccctagaggacacgctacagggaggagtacaagaggtacaagatacggtcttaaaacagatggagagcgcccaggaaaaggacctgccacagaagaagcacttcgacaatcgcgagtctcaggccaatagcggcgctttggatacaaatcaagtgtcccttcagaagatagacaaccccgagtcgcaagccaatagcggagcactggacacgaaccaggtgctccttcataaaatccctccaaggaagcgtctcagaaagcgcgatagtcaggtcaagtcaatgaagcacaacagtagggtgaagattcatcagaaatcatgtgagagacaaaaagcgaaggaaggaaatggatgtcgcaagacattttcacgatcaacaaagcagattactttcattaggattcacaaaggcagccaggtttgccgatgttcagaatgtgggaaaattttcaggaacccccgctacttctccgtgcataaaaagatccacaccggtgaaaggccttacgtttgtcaggattgcggcaaaggcttcgtgcagagttcaagtctaacccagcaccagcgggtgcactcaggggaaaggcccttcgaatgccaagagtgtggccgaaccttcaacgaccgctccgcaatatcccaacatttaagaacccataccggagctaagccatataagtgtcaggactgcggtaaggctttccgccagtcttcacacctgattcgccatcagcgcacgcatacaggagagcggccttatgcctgtaataaatgcggtaaggcatttactcagagcagtcacctaattgggcaccaacgaactcacaatagaacaaagaggaagaaaaaacagccgacttcttag

SEQ ID NO: 319171 - DNA, 1644 bp, Artificial Sequence
  derived and/or modified sequence
atgaacatcgaggttgtagaagttttaaccctcaatcaggaggtcgctggcccacgcaacgcccaaatccaggcactgtacgctgaggatggcagtctctcagctgacgccccatctgaacaggtacagcagcagggcaagcatcccggtgatccagaagccgctcgccagagatttcgccagtttcggtacaaagatatgactgggccacgggagctcgatcaacttcgagagctgtgtcatcaatggctccagccaaaagcacggtccaaagagcaaatactggagttgctggtcctcgagcaatttctcggggctctgcccgtgaagctgaggacctgggtggagagccagcaccccgaaaactgtcaagaagtggtcgccttggtcgagggagtgacatggatgagcgaagaagaagttctgccagcgggtcagcctgccgaaggcactacctgctgcctggaggtgaccgcccaacaggaagagaagcaagaggacgctgccatctgtcccgttaccgttttgccagaggagcccgtgaccttccaggatgtagccgtcgactttagtcgcgaagaatggggtctgctgggcccaacccagagaaccgaatatcgggatgtgatgctggaaacttttggacacttggtgagcgtgggatgggaaaccactctggaaaataaggagctggctccgaatagcgacattcctgaagaggagccagctcctagcctgaaagtccaggaaagcagccgtgattgcgccctgagctcaacattggaggacacactgcagggcggagtccaggaggtgcaggacacggtcctcaaacaaatggagagcgcacaggagaaggatttgccacaaaagaaacactttgataaccgcgagtctcaggctaactctggtgctctggacaccaaccaggtgtcactacagaagattgacaaccccgagtcccaggccaattctggggcacttgatactaatcaagtgctgctccataaaattcctcctaggaaacgcctccgtaaaagggacagccaggtgaagagtatgaagcataacagtcgggtgaaaatccaccaaaaatcctgcgaaaggcagaaggccaaggaaggcaatggctgtcggaaaacattctccagaagcaccaaacaaattacattcatccgtattcacaaagggtcacaggtgtgtcgctgtagcgagtgcggaaagatattccgaaaccctcggtacttctctgtgcataaaaagattcacactggcgagcgcccttatgtgtgtcaggactgtggaaaaggcttcgttcagagctccagcctcacacagcatcaacgagtgcattccggcgagagacccttcgagtgtcaggagtgtggtcgcacctttaatgaccggtctgccattagccaacaccttagaactcataccggggcaaagccgtacaaatgccaggactgcggtaaggccttccgtcagtcatcccacctcattcgccaccagagaactcacacaggcgaaagaccttatgcttgtaacaagtgcggaaaggcgttcacccagagtagccatctgatcggtcaccaacgcacgcacaaccgcacgaaacgtaaaaagaagcagccaactagctag

SEQ ID NO: 319172 - DNA, 1257 bp, Artificial Sequence
  derived and/or modified sequence
atggtagggcagttggcagcacggcgggctgccggcgttgtgctggagatgataagagaagggaaaatagcaggccgagccgtactgattgccggtcaacccggcacagggaaaaccgcgattgccatgggcatggcccaggccctaggcccagacacccctttcacggcgattgccggttccgagatcttttccctggagatgagcaagacagaagctctgactcaggcattcaggcggagcattggcgtgaggataaaagaagagaccgaaattattgaaggtgaggtcgtggaaatccaaattgacaggcctgccacggggactggctcaaaggtcgggaagctgactctgaaaaccaccgaaatggaaacaatttacgatctgggaactaagatgattgagagtttgaccaaggataaagtgcaagcgggcgatgttatcaccattgataaggcgactggcaaaattagtaaactggggagaagcttcactcgagctcgggattatgatgctatgggctcccagacaaagtttgtgcagtgccccgatggcgaactgcaaaagcgcaaggaagttgtgcacactgtgagcctccatgagattgatgtgattaacagccggacacaggggtttttagccttattttctggagatacaggagaaataaagagcgaagtgagagaacagatcaacgccaaggttgctgagtggcgtgaggagggaaaagctgaaatcatacccggcgttttgtttattgacgaggtgcacatgctcgacatagagagtttttcattcctgaatagggccttagaatccgacatggcccctgtgctgatcatggccaccaaccgagggattactcggatcagaggcacatcataccagtcaccgcatggcatcccaatagatttgctggatcggctgctgatagtcagcacgactccatactcagagaaagataccaagcagattctccgtattcgttgcgaagaggaggacgtcgagatgtccgaggacgcatacaccgttcttacccgtataggcttagaaacaagcttgaggtatgcgattcagcttatcaccgccgcctcactcgtctgcaggaagagaaaaggtacagaggtccaggttgatgatatcaagagggtgtattccctgttcctcgatgagtcacgttccacccaatatatgaaagaatatcaggatgctttcctcttcaacgaattaaaaggagaaactatggatacgtcgtag

SEQ ID NO: 319173 - DNA, 1257 bp, Artificial Sequence
  derived and/or modified sequence
atggtgggccagctggccgcccggcgggctgctggggtggtgctggagatgatccgggagggcaagattgctggccgggctgtgctgattgctggccagcccggcaccgggaagacagccatcgccatgggcatggcccaggccctgggccctgacacccccttcaccgccatcgccggcagcgagatcttcagcctggagatgagcaagacagaggccctgacccaggccttcagaagaagcattggagtgcgcatcaaggaggagacagagatcattgaaggagaggtggtggagatccagattgacaggcctgccactggaacaggcagcaaggtgggcaagctgaccctgaagaccacagagatggagaccatctatgacctgggcaccaagatgattgagagcctgaccaaggacaaggtgcaggccggagatgtgatcaccatcgacaaggccaccgggaagatcagcaagctgggccgctccttcacccgggcccgggactatgatgccatgggcagccagaccaagtttgtgcagtgcccagatggagagctgcagaagaggaaggaggtggtgcacacagtgtccctgcacgagattgatgtgatcaacagcaggacccagggcttcctggccctcttcagcggggacaccggggagatcaagtctgaggtgcgggagcagatcaatgccaaggtggccgagtggagggaggagggcaaggccgagatcatccctggggtgctcttcattgatgaggtgcacatgctggacatcgagagcttctccttcctgaacagagccctggagagtgacatggcccctgtgctgatcatggccaccaacagaggcatcacccgcatccggggcaccagctaccagagcccccacggcatccccatcgacctgctggaccggctgctgattgtgtccaccaccccctacagcgagaaggacaccaagcagatcctgcgcatccgctgtgaggaggaggatgtggagatgtctgaagatgcctacacagtgctgacccgcatcggcctggagaccagcctgcgctatgccatccagctgatcacagctgccagcctggtgtgcaggaagaggaagggcacagaggtgcaggtggatgacatcaagagggtgtacagcctcttcctggatgagagccgcagcacccagtacatgaaggagtaccaggatgccttcctgttcaatgagctgaagggggagaccatggacaccagctag

SEQ ID NO: 319174 - DNA, 1257 bp, Artificial Sequence
  derived and/or modified sequence
atggtgggccagctggccgcccggcgggccgccggcgtggtgctggagatgatcagggagggaaaaatagccggaagagccgtgcttatagcgggacagccgggaactggaaaaaccgctatcgctatgggtatggcccaggccctggggcccgacaccccttttacagctattgccggaagcgagatcttttcactggaaatgtccaagacggaggccctgactcaggcatttcgcaggtctataggcgtcaggattaaagaagaaacagagattatcgaaggggaggtggtggaaattcagattgacagacctgcaaccggcacggggtccaaagtcggtaagttgacactgaaaacaactgagatggaaactatttacgatctaggaacaaaaatgatcgagagtctgaccaaggataaggtgcaggcaggagacgtgatcaccatcgataaagctaccggtaaaatatcgaaactagggcggagcttcactcgtgcgcgggactatgacgccatgggctctcaaacgaaatttgtccagtgccccgatggcgaactccaaaagaggaaagaggtcgtgcacactgtttccttgcacgagatcgatgtgatcaactcaaggacgcagggcttcctcgcgttattcagcggtgacaccggcgagattaaaagtgaggttagagagcagatcaacgcaaaggtagcagagtggcgggaggaaggaaaagcagaaatcattcccggcgttctcttcatcgacgaagttcacatgcttgatatcgagtcctttagtttccttaatcgtgccctggaatcagacatggcaccggtgctcataatggcaacgaacagaggcatcacacgcatcaggggcactagttatcagagtccccatggcattccgatcgacctgctggaccggcttctgatagtgagtaccactccttattctgagaaggacacgaaacaaattctgagaatccgctgtgaagaggaagacgtggaaatgagtgaggacgcttacactgtgttgacaagaatagggttggagactagtctccgctatgcaattcagttgatcacagcagcctctctggtgtgtcgaaagaggaaagggacagaggtccaggtcgatgacattaagcgagtctactcacttttcctggacgaatcccgctcgacacaatacatgaaggagtaccaggatgcattcctgtttaatgaactcaaaggagaaaccatggatacctcctag

SEQ ID NO: 319175 - DNA, 1257 bp, Artificial Sequence
  derived and/or modified sequence
atggttggacagctcgcggcaaggagagcggcaggggtcgtactggagatgattcgggaagggaagattgccggacgcgcagtcctcatagccggtcagcctggcaccgggaaaaccgctatcgccatgggcatggctcaggctctcgggcctgacacccccttcactgcgatcgccggatccgagattttcagtttggagatgtcaaagactgaagcccttactcaggcgtttagaagaagcatcggagtcagaattaaggaagagactgaaatcatcgagggcgaggtggttgagatccagatcgatcggcctgctacggggaccggttctaaggttggtaagctgacgctcaagaccaccgagatggagacaatctatgacttgggcactaagatgattgaaagtctcacaaaagacaaagtgcaggccggtgatgtgatcactattgacaaggctaccggcaaaatatccaaattgggcagaagctttactcgcgcacgcgattacgatgcgatggggtcccagaccaaatttgttcagtgtcctgacggcgagctgcagaagcgcaaggaagtggtacataccgtgagcctccatgaaatcgacgtcatcaatagccggacccagggcttccttgcactgttttctggcgatacaggcgaaatcaaaagcgaggtgagggaacagattaacgccaaggttgcagagtggcgggaagaaggaaaggccgagatcattccaggggtcctattcatcgatgaagtccacatgctcgatatcgagtccttcagctttttaaacagagcccttgagagcgatatggcccctgtactaatcatggccacaaacaggggcatcacccggattagaggaacaagctatcagtcaccgcacggtattcccattgatcttctcgaccgcttgttgatcgtctccacaacgccctacagcgaaaaggacaccaaacagattttacgtataagatgcgaggaagaggatgtcgagatgtctgaggatgcctacacagtactgacccggatcgggttggaaactagccttcggtatgcgatccagctgattacagctgcttcccttgtatgcaggaaaaggaaagggactgaggtgcaagtagacgacatcaagagagtgtattctctgtttttagacgagtcaaggagcacccaatacatgaaagaatatcaggacgctttcttgtttaacgaactcaagggcgagaccatggatactagctag

SEQ ID NO: 319176 - DNA, 1257 bp, Artificial Sequence
  derived and/or modified sequence
atggtgggccagctggccgccagaagagccgccggcgtggtgctggagatgatcagagagggcaagatcgccggcagagccgtgctgatcgccggccagcccggcaccggcaagaccgccatcgccatgggcatggcccaggccctgggccccgacacccccttcaccgccatcgccggcagcgagatcttcagcctggagatgagcaagaccgaggccctgacccaggccttcagaagaagcatcggcgtgagaatcaaggaggagaccgagatcatcgagggcgaggtggtggagatccagatcgacagacccgccaccggcaccggcagcaaggtgggcaagctgaccctgaagaccaccgagatggagaccatctacgacctgggcaccaagatgatcgagagcctgaccaaggacaaggtgcaggccggcgacgtgatcaccatcgacaaggccaccggcaagatcagcaagctgggcagaagcttcaccagagccagagactacgacgccatgggcagccagaccaagttcgtgcagtgccccgacggcgagctgcagaagagaaaggaggtggtgcacaccgtgagcctgcacgagatcgacgtgatcaacagcagaacccagggcttcctggccctgttcagcggcgacaccggcgagatcaagagcgaggtgagagagcagatcaacgccaaggtggccgagtggagagaggagggcaaggccgagatcatccccggcgtgctgttcatcgacgaggtgcacatgctggacatcgagagcttcagcttcctgaacagagccctggagagcgacatggcccccgtgctgatcatggccaccaacagaggcatcaccagaatcagaggcaccagctaccagagcccccacggcatccccatcgacctgctggacagactgctgatcgtgagcaccaccccctacagcgagaaggacaccaagcagatcctgagaatcagatgcgaggaggaggacgtggagatgagcgaggacgcctacaccgtgctgaccagaatcggcctggagaccagcctgagatacgccatccagctgatcaccgccgccagcctggtgtgcagaaagagaaagggcaccgaggtgcaggtggacgacatcaagagagtgtacagcctgttcctggacgagagcagaagcacccagtacatgaaggagtaccaggacgccttcctgttcaacgagctgaagggcgagaccatggacaccagctag

SEQ ID NO: 319177 - protein, 275 aa, Artificial Sequence
  derived and/or modified sequence
MRILQLILLALATGLVGGETRIIKGFECKPHSQPWQAALFEKTRLLCGATLIAPRWLLTAAHCLKPWVSLTSPTHVSPDLSSSNYCLSHLSRYIVHLGQHNLQKEEGCEQTRTATESFPHPGFNNSLPNKDHRNDIMLVKMASPVSITWAVRPLTLSSRCVTAGTSCLISGWGSTSSPQLRLPHTLRCANITIIEHQKCENAYPGNITDTMVCASVQEGGKDSCQGDSGGPLVCNQSLQGIISWGQDPCAITRKPGVYTKVCKYVDWIQETMKNN

SEQ ID NO: 319178 - DNA, 1266 bp, Artificial Sequence
  derived and/or modified sequence
ggagtgcaggcttggaaagcaggagagctcagcctacgtctttaatcctcctgcccaccccttggattctgtctccactgggactcaagagaggaacctggggcccgctcctcccccctccaggccatgaggattctgcagttaatcctgcttgctctggcaacagggcttgtagggggagagaccaggatcatcaaggggttcgagtgcaagcctcactcccagccctggcaggcagccctgttcgagaagacgcggctactctgtggggcgacgctcatcgcccccagatggctcctgacagcagcccactgcctcaagccgtgggtgtcactcacctctcccacccatgtctcccccgacctttcctcctccaactactgtctctcccacctcagccgctacatagttcacctggggcagcacaacctccagaaggaggagggctgtgagcagacccggacagccactgagtccttcccccaccccggcttcaacaacagcctccccaacaaagaccaccgcaatgacatcatgctggtgaagatggcatcgccagtctccatcacctgggctgtgcgacccctcaccctctcctcacgctgtgtcactgctggcaccagctgcctcatttccggctggggcagcacgtccagcccccagttacgcctgcctcacaccttgcgatgcgccaacatcaccatcattgagcaccagaagtgtgagaacgcctaccccggcaacatcacagacaccatggtgtgtgccagcgtgcaggaagggggcaaggactcctgccagggtgactccgggggccctctggtctgtaaccagtctcttcaaggcattatctcctggggccaggatccgtgtgcgatcacccgaaagcctggtgtctacacgaaagtctgcaaatatgtggactggatccaggagacgatgaagaacaattagactggacccacccaccacagcccatcaccctccatttccacttggtgtttggttcctgttcactctgttaataagaaaccctaagccaagaccctctacgaacattctttgggcctcctggactacaggagatgctgtcacttaataatcaacctggggttcgaaatcagtgagacctggattcaaattctgccttgaaatattgtgactctgggaatgacaacacctggtttgttctctgttgtatccccagccccaaagacagctcctggccatatatcaaggtttcaataaatatttgctaaatgagtg

SEQ ID NO: 319179 - DNA, 369 bp, Artificial Sequence
  derived and/or modified sequence
atggacgtgagaagactgaaggtgaatgaattacgggaagagttgcaacggcggggccttgatactcgcggtctgaaggcagagctggcagagaggcttcaggcagctctcgaggcagaggaacctgacgacgagagggaactggacgcagatgatgagcctgggaggcccggccatatcaatgaggaagccgagctccagcccgccactctgcagcccggtaggctgcagcccggactccattcccccactgcttccacttccactactacatgtctgcaactgtgggagctcaggcgcctccagcctgggccattgtatcccaccgcaactccacattgtaccgacttgccgtctgcacagctgtag

SEQ ID NO: 319180 - DNA, 2571 bp, Artificial Sequence
  derived and/or modified sequence
atggacgtccggagactgaaggtgaatgaactgcgggaggagcttcagcgccgtgggctggatacacggggcctgaaggctgagctggcagaacgcctgcaggccgcgctggaggctgaggaaccagatgatgagcgggagcttgacgctgacgatgagcctggtagacccggccacattaatgaggaggtggaaactgaaggcggcagtgaactcgagggaactgcgcagcccccacccccgggccttcaaccacacgccgagcccggcggatatagcggcccggacggtcattacgcgatggataatatcacaagacagaatcaattctatgacactcaagtgataaagcaagaaaacgagagcgggtatgagcggcgccccctggagatggagcagcagcaggcttatcgcccagagatgaaaacagagatgaagcaaggggccccaacctctttcctgcctccagaagcgagccagctgaaaccagacagacagcagttccagagcagaaagcgaccttatgaggagaaccgcggacggggctacttcgaacaccgcgaggatagaaggggacgctctcctcagcctccagctgaggaagatgaagacgactttgatgacacactcgtggctatagacacctataattgcgacctgcatttcaaagtggctcgcgaccgctcaagtggttaccctttgactattgaggggttcgcgtatctgtggagtggtgcgcgagcctcttatggagtcaggcgaggccgcgtgtgttttgagatgaagatcaacgaagagataagcgttaagcacctaccgtccactgaacccgaccctcatgtggttcgaatcggttggtcgttggactcctgtagcacgcagctcggagaagagccattctcgtatggctatgggggtactggtaagaaatccactaattctagatttgaaaactatggcgacaagttcgccgaaaacgacgtcattggatgtttcgccgactttgaatgcggaaacgatgtggagttatcctttactaagaacggcaaatggatgggcattgccttccgcatacagaaggaggccctgggcggccaggcactctatcctcatgtattggtgaaaaattgcgctgtcgagtttaatttcggtcagcgagccgagccatattgttctgtcctgccaggtttcaccttcatccagcacctgccgctttccgagcgaattagaggcaccgtggggcctaaatccaaagccgagtgcgaaatcctgatgatggtaggcctgcctgccgcagggaagaccacctgggccattaaacatgcggccagcaacccgtcaaagaagtataatattctgggcactaatgccatcatggacaagatgagggtgatgggcctgcggcggcagaggaattatgcaggtcgatgggatgtattgatccagcaggcaactcagtgtctaaaccggctgattcaaatcgccgcccgcaaaaaacgcaactatatactcgatcaaaccaacgtttacggcagcgctcagaggaggaaaatgcggccgtttgagggcttccagagaaaggccatcgtcatttgccctacagacgaggacctgaaggacaggaccataaaacgaacagacgaggaggggaaagacgtccctgatcacgccgtgctagagatgaaagcgaacttcacacttccggatgtcggggattttctcgacgaggtgctttttatcgagctccagagggaggaagctgacaagctggttcgccagtacaacgaagaagggagaaaggctggcccgccacccgaaaagagattcgataacaggggcggtgggggctttcgcggccggggaggaggcggagggttccagaggtacgagaacaggggccctcccggcggaaaccggggtgggttccaaaatcgcgggggcggcagcgggggtgggggtaactatcgtgggggttttaacagatcaggcggcggaggttactcccaaaatcggtggggtaacaacaatcgcgacaacaacaatagtaacaatcggggaagctacaaccgagccccccagcagcaacctcccccacaacagcctcccccaccgcagccgcctccccagcagcctcccccccccccaagttattccccagcccggaatcctcctggggcatcaacttacaacaaaaattccaacatccccggctctagtgctaacacttccacacccaccgtgagcagctactcccctccccagccctcttatagccaaccgccatataaccagggtggctatagccagggctataccgccccccctcccccaccacctcctcctcccgcttacaattatggaagctatgggggctataaccctgctccatacaccccccccccgcctcccactgcccagacctacccccagccatcgtacaatcaatatcagcagtacgctcagcagtggaaccagtattaccagaaccagggtcagtggccgccttattacgggaattacgactacgggagctatagcggcaacacgcaaggcggcacatccacccaatag

SEQ ID NO: 319181 - DNA, 1018 bp, Artificial Sequence
  derived and/or modified sequence
ctgggaggccgggccgggctcgggggccaccccgggggcccgggccatggatgtgcgccgtctgaaggtgaacgaacttcgcgaggagctgcagcgccgcggcctggacactcgaggcctcaaggccgagcttgctgagcggctgcaggcggcgttggaggccgaggagcctgacgacgagcgggagctcgacgccgacgacgaaccggggcgacccgggcacatcaacgaggaggccgagttacagccagccaccctacaaccagggaggttacagccagggctacacagccccaccgcctccacctccaccaccacctgcctacaactatgggagctacggcggttacaacccggccccctataccccaccgccaccccccactgcacagacctaccctcagcccagctataaccagtatcagcagtatgcccagcagtggaaccagtactatcagaaccagggccagtggccgccatactacgggaactacgactacgggagctactccgggaacacacagggtggcacaagtacacagtagccagtgtgacccagaggctcccggaggcccctgccggcttcctccaccagcgcctgcctcggcccctcctctgcccccgccagatcccgtggtgctggggatggggtcatcccagggctgcctccctccagcccactgcctcccctctgaggggcttccttcccctccatagggccaggcatttttttctggattcaaacaggcaacaatgaccttttattttctgtttgtccccacctccccagccttccacctcctgttcttcctaccttcttcctttttgactaaataatccccacctcccttgatcatacagtgaggctacagtgactgaggggagaatcccctcctgttcactctcccaaccctgctccagcccctcagcttcccagaccctcatgcagttggttgtaaattctcccaggagctgttttactgtctacttttcaggattaaaaaaaaaatcaaaactt

SEQ ID NO: 319182 - DNA, 3714 bp, Artificial Sequence
  derived and/or modified sequence
agaacaaatcattgtgggaagctgggaggagagagagagagaggaagtcggacgtgggcgaggggcggggtgtctggactggaacctctgggcccacatgccatggacaatattaccaggcagaaccaattctacgatacccaagtcatcaaacaagaaaacgagtcaggctacgagaggagaccactggaaatggagcagcagcaggcctatcgtccagaaatgaagacagagatgaagcaaggagcacccaccagcttcctcccgcctgaagcttctcaactcaagccagacaggcagcaattccagagtcgaaagaggccttatgaagaaaaccggggacgggggtactttgagcaccgagaggataggaggggccgctctcctcagcctcctgctgaagaggatgaagatgactttgatgatacccttgttgctattgacacctataactgcgacctccacttcaaggtggcccgagatcggagtagtggctatccgctcacaattgagggctttgcatacctgtggtcaggagcccgtgccagctatggggtcagaaggggccgtgtatgcttcgagatgaagatcaatgaggaaatctccgtgaagcaccttccgtctacagagcctgacccccacgtggtccgtatcggctggtccctggactcctgcagcacccagctaggcgaagagcctttctcctatggctatggaggcactgggaagaagtccaccaatagccggtttgaaaactacggagacaagtttgcagagaacgatgtgattggctgctttgcggattttgaatgtggaaatgacgtggaactgtcttttaccaagaatggaaagtggatgggcattgctttccgaatccagaaggaagccttggggggtcaggccctctatcctcatgtcctggtgaagaattgcgcagtggagttcaacttcggacagagagcagagccctactgttctgtcctcccggggtttaccttcatccagcaccttccccttagtgagcgtatccggggcaccgttggaccaaagagcaaggcagaatgtgagattctgatgatggtgggcctgcctgctgctggcaagaccacatgggccatcaaacatgcagcctccaacccttccaagaagtacaacatcctgggtaccaatgccatcatggataagatgcgggtgatgggcctacgccggcagcggaactatgctggccgctgggatgtcctgatccagcaggccacccagtgcctcaaccgcctcatccagattgctgcccgcaagaaacgcaactatatcctagatcagacaaatgtttatgggtcagcccagagacgaaaaatgagaccatttgaaggcttccagcgcaaagctattgtaatttgtcccactgacgaggacctaaaagaccgaacaataaagcgaaccgacgaggaagggaaggatgtcccagatcatgcggtcttagaaatgaaagccaacttcacgttgccagatgttggggacttcctggatgaggttctgttcattgagctgcagcgggaggaagcggacaagctagtgaggcagtacaacgaggaaggccgcaaggctgggccaccccctgaaaagcgctttgacaaccgaggtggtggtggcttccggggccgcgggggtggtggtggcttccagcgctatgaaaaccgaggaccccctggaggcaaccgtggcggcttccagaaccgagggggaggcagcggtggaggaggcaactaccgaggaggtttcaaccgcagcggaggtggtggctatagccagaaccgctggggtaacaacaaccgggataacaacaactccaacaacagaggcagctacaaccgggctccccagcaacagccgccaccacagcagcctccgccaccacagccaccaccccagcagccaccgccaccacccagctacagccctgctcggaaccccccaggggccagcacctacaataagaacagcaacatccctggctcaagcgccaataccagcacccccaccgtcagcagctacagccctccacagccgagttacagccagccaccctacaaccagggaggttacagccagggctacacagccccaccgcctccacctccaccaccacctgcctacaactatgggagctacggcggttacaacccggccccctataccccaccgccaccccccactgcacagacctaccctcagcccagctataaccagtatcagcagtatgcccagcagtggaaccagtactatcagaaccagggccagtggccgccatactacgggaactacgactacgggagctactccgggaacacacagggtggcacaagtacacagtagccagtgtgacccagaggctcccggaggcccctgccggcttcctccaccagcgcctgcctcggcccctcctctgcccccgccagatcccgtggtgctggggatggggtcatcccagggctgcctccctccagcccactgcctcccctctgaggggcttccttcccctccatagggccaggcatttttttctggattcaaacaggcaacaatgaccttttattttctgtttgtccccacctccccagccttccacctcctgttcttcctaccttcttcctttttgactaaataatccccacctcccttgatcatacagtgaggctacagtgactgaggggagaatcccctcctgttcactctcccaaccctgctccagcccctcagcttcccagaccctcatgcagttggttgtaaattctcccaggagctgttttactgtctacttttcaggattaaaaaaaaaatcaaaacttaaaaaaaaaaaagtttaaaaagcaaaatggggagggggaggaagcagtgacttttttttggtaattatgcgcttttttttaatttttagaatttgtctttttactgtgggtgggctgttgatatttcatcaagataagcatttctttcctgagttcaggtgactgaggaagagccacaaaacaaaacacaacaaaaccaaaccacagaatcatctttaacccaactttttatacgatgccccagttccccataactttgcacacaagcttctgtgttcagttgaattgtaactgctttttgtatttggagagagtgactattgaacttgaaaccttttattccgggcgtcttggtagtttctggtgggattcagtgggtgagagggaagaaggggaggttggggggctccttcccttcagaacttgaagtttctcccactgcctcctctccagtggtctcccaggtgccagacccaaaagcttttcctacagtgataccctttatttttacttccccttgactcatatgttttaacatgattttaacaaactgcacttattaagaaatgtgtttgccctgttttgtttggtttcgttttgttttctttgaataaatgacatggcacctcctagcaggaaggaagcagggttgaaaccctgaagtgttactgcagttggccgttaattggggtgggggcctctttaaagggaaattatttactcattcattaaacaacttaactgagggattcatgtgcctggccccgattttggtgctaaaaatgcacgcttaaacaagggtccctggtttaaaatccactagttcatttttaaagtgcttctcttgttctctacctctcacagtcta

SEQ ID NO: 319183 - DNA, 4201 bp, Artificial Sequence
  derived and/or modified sequence
cagtagctcctaggccttctcgtggccgttgttttgaaaacggcgctctgattggctaggtttccgggcccgcgcccgttgccccacgcactgaccaattggcactcatgtaacatcggacgaggcacgagtgaggggggaggcggtggcggcggccattttgagccgctgccgccattggagtgggccccccccctttcccccttcgcctcctgacaggaaaggtttaagggggacagagccctgggaggccgggccgggctcgggggccaccccgggggcccgggccatggatgtgcgccgtctgaaggtgaacgaacttcgcgaggagctgcagcgccgcggcctggacactcgaggcctcaaggccgagcttgctgagcggctgcaggcggcgttggaggccgaggagcctgacgacgagcgggagctcgacgccgacgacgaaccggggcgacccgggcacatcaacgaggaggtcgagaccgaggggggctccgagctggaggggaccgcgcagccaccgccgcccgggctgcagccgcacgcggagcccggcggctactcggggccggacggacattatgccatggacaatattaccaggcagaaccaattctacgatacccaagtcatcaaacaagaaaacgagtcaggctacgagaggagaccactggaaatggagcagcagcaggcctatcgtccagaaatgaagacagagatgaagcaaggagcacccaccagcttcctcccgcctgaagcttctcaactcaagccagacaggcagcaattccagagtcgaaagaggccttatgaagaaaaccggggacgggggtactttgagcaccgagaggataggaggggccgctctcctcagcctcctgctgaagaggatgaagatgactttgatgatacccttgttgctattgacacctataactgcgacctccacttcaaggtggcccgagatcggagtagtggctatccgctcacaattgagggctttgcatacctgtggtcaggagcccgtgccagctatggggtcagaaggggccgtgtatgcttcgagatgaagatcaatgaggaaatctccgtgaagcaccttccgtctacagagcctgacccccacgtggtccgtatcggctggtccctggactcctgcagcacccagctaggcgaagagcctttctcctatggctatggaggcactgggaagaagtccaccaatagccggtttgaaaactacggagacaagtttgcagagaacgatgtgattggctgctttgcggattttgaatgtggaaatgacgtggaactgtcttttaccaagaatggaaagtggatgggcattgctttccgaatccagaaggaagccttggggggtcaggccctctatcctcatgtcctggtgaagaattgcgcagtggagttcaacttcggacagagagcagagccctactgttctgtcctcccggggtttaccttcatccagcaccttccccttagtgagcgtatccggggcaccgttggaccaaagagcaaggcagaatgtgagattctgatgatggtgggcctgcctgctgctggcaagaccacatgggccatcaaacatgcagcctccaacccttccaagaagtacaacatcctgggtaccaatgccatcatggataagatgcgggtgatgggcctacgccggcagcggaactatgctggccgctgggatgtcctgatccagcaggccacccagtgcctcaaccgcctcatccagattgctgcccgcaagaaacgcaactatatcctagatcagacaaatgtttatgggtcagcccagagacgaaaaatgagaccatttgaaggcttccagcgcaaagctattgtaatttgtcccactgacgaggacctaaaagaccgaacaataaagcgaaccgacgaggaagggaaggatgtcccagatcatgcggtcttagaaatgaaagccaacttcacgttgccagatgttggggacttcctggatgaggttctgttcattgagctgcagcgggaggaagcggacaagctagtgaggcagtacaacgaggaaggccgcaaggctgggccaccccctgaaaagcgctttgacaaccgaggtggtggtggcttccggggccgcgggggtggtggtggcttccagcgctatgaaaaccgaggaccccctggaggcaaccgtggcggcttccagaaccgagggggaggcagcggtggaggaggcaactaccgaggaggtttcaaccgcagcggaggtggtggctatagccagaaccgctggggtaacaacaaccgggataacaacaactccaacaacagaggcagctacaaccgggctccccagcaacagccgccaccacagcagcctccgccaccacagccaccaccccagcagccaccgccaccacccagctacagccctgctcggaaccccccaggggccagcacctacaataagaacagcaacatccctggctcaagcgccaataccagcacccccaccgtcagcagctacagccctccacagccgagttacagccagccaccctacaaccagggaggttacagccagggctacacagccccaccgcctccacctccaccaccacctgcctacaactatgggagctacggcggttacaacccggccccctataccccaccgccaccccccactgcacagacctaccctcagcccagctataaccagtatcagcagtatgcccagcagtggaaccagtactatcagaaccagggccagtggccgccatactacgggaactacgactacgggagctactccgggaacacacagggtggcacaagtacacagtagccagtgtgacccagaggctcccggaggcccctgccggcttcctccaccagcgcctgcctcggcccctcctctgcccccgccagatcccgtggtgctggggatggggtcatcccagggctgcctccctccagcccactgcctcccctctgaggggcttccttcccctccatagggccaggcatttttttctggattcaaacaggcaacaatgaccttttattttctgtttgtccccacctccccagccttccacctcctgttcttcctaccttcttcctttttgactaaataatccccacctcccttgatcatacagtgaggctacagtgactgaggggagaatcccctcctgttcactctcccaaccctgctccagcccctcagcttcccagaccctcatgcagttggttgtaaattctcccaggagctgttttactgtctacttttcaggattaaaaaaaaaatcaaaacttaaaaaaaaaaaagtttaaaaagcaaaatggggagggggaggaagcagtgacttttttttggtaattatgcgcttttttttaatttttagaatttgtctttttactgtgggtgggctgttgatatttcatcaagataagcatttctttcctgagttcaggtgactgaggaagagccacaaaacaaaacacaacaaaaccaaaccacagaatcatctttaacccaactttttatacgatgccccagttccccataactttgcacacaagcttctgtgttcagttgaattgtaactgctttttgtatttggagagagtgactattgaacttgaaaccttttattccgggcgtcttggtagtttctggtgggattcagtgggtgagagggaagaaggggaggttggggggctccttcccttcagaacttgaagtttctcccactgcctcctctccagtggtctcccaggtgccagacccaaaagcttttcctacagtgataccctttatttttacttccccttgactcatatgttttaacatgattttaacaaactgcacttattaagaaatgtgtttgccctgttttgtttggtttcgttttgttttctttgaataaatgacatggcacctcctagcaggaaggaagcagggttgaaaccctgaagtgttactgcagttggccgttaattggggtgggggcctctttaaagggaaattatttactcattcattaaacaacttaactgagggattcatgtgcctggccccgattttggtgctaaaaatgcacgcttaaacaagggtccctggtttaaaatccactagttcatttttaaagtgcttctcttgttctctacctctcacagtcta

SEQ ID NO: 319184 - DNA, 369 bp, Artificial Sequence
  derived and/or modified sequence
atggatgtgcggcggctgaaggtgaatgagctgcgggaggagctgcagaggcggggcctggacacccggggcctgaaggccgagctggccgagcggctgcaggccgccctggaggccgaggagccagatgatgagcgggagctggatgctgatgatgagcccggccggcccggccacatcaatgaggaggccgagctgcagcctgccaccctgcagcccggccgcctgcagcccggcctgcacagccccacagccagcaccagcaccaccacctgcctgcagctgtgggagctgcggcggctgcagcccggccccctgtaccccacagccaccccccactgcacagacctgcccagcgcccagctgtag

SEQ ID NO: 319185 - DNA, 2571 bp, Artificial Sequence
  derived and/or modified sequence
atggatgtgcggcggctgaaggtgaatgagctgcgggaggagctgcagaggcggggcctggacacccggggcctgaaggccgagctggccgagcggctgcaggccgccctggaggccgaggagccagatgatgagcgggagctggatgctgatgatgagcccggccggcccggccacatcaatgaggaggtggagacagagggcggcagcgagctggagggcacagcccagcccccacctcctggcctgcagccccatgctgagcccggcggctacagcggcccagatggccactacgccatggacaacatcacccggcagaaccagttctatgacacccaggtgatcaagcaggagaatgaaagtggctatgaaagaagacccctggagatggagcagcagcaggcctacagacctgagatgaagacagagatgaagcagggcgcccccaccagcttcctgcccccagaggccagccagctgaagccagaccggcagcagttccagagcaggaagaggccctatgaagaaaatagaggccggggctactttgagcaccgggaggaccggcggggccgcagcccccagcccccagcagaagaagatgaagatgactttgatgacaccctggtggccatcgacacctacaactgtgacctgcacttcaaggtggcccgggacaggagcagcggctaccccctgaccatcgagggctttgcctacctgtggagcggggcccgggccagctatggagtgagaagaggccgggtgtgctttgagatgaagatcaatgaggagatctctgtgaagcacctgcccagcacagagccagacccccacgtggtgcgcatcggctggagcctggacagctgcagcacccagctgggggaggagcccttctcctatggctacggcggcaccgggaagaagagcaccaacagcagatttgaaaattatggagacaagtttgctgaaaatgatgtgattggctgctttgctgactttgaatgtggaaatgatgtggagctgtccttcaccaagaatggcaagtggatgggcatcgccttccgcatccagaaggaggccctgggcggccaggccctgtacccccacgtgctggtgaagaactgtgctgtggagttcaactttggccagagagctgagccctactgcagcgtgctgcccggcttcaccttcatccagcacctgcccctgtctgagcgcatccggggcaccgtgggccccaagagcaaggccgagtgtgagatcctgatgatggtgggcctgcctgctgctgggaagaccacctgggccatcaagcacgccgccagcaaccccagcaagaagtacaacatcctgggcaccaatgccatcatggacaagatgagggtgatgggcctgcggcggcagagaaattatgccggccgctgggatgtgctgatccagcaggccacccagtgcctgaacagactcatccagattgctgccaggaagaagaggaactacatcctggaccagaccaacgtgtatggcagcgcccagaggaggaagatgaggccctttgagggcttccagaggaaggccatcgtcatctgccccacagatgaggacctgaaggacaggaccatcaagaggacagatgaggagggcaaggatgtgcctgaccatgctgtgctggagatgaaggccaacttcaccctgcctgatgtgggggacttcctggatgaggtgctcttcatcgagctgcagcgggaggaggccgacaagctggtgcggcagtacaatgaggagggcaggaaggccggccccccacctgagaagagatttgacaacagaggaggcggcggcttccggggccggggcggcggcggcggcttccagagatatgagaacagaggccccccaggcggcaacagaggaggcttccagaacagaggaggcggcagcggcggcggcggcaactacagaggaggcttcaacagaagtggcggcggcggctacagccagaaccgctggggcaacaacaacagagacaacaacaacagcaacaacagaggcagctacaacagagccccccagcagcagcccccaccccagcagcccccaccaccccagcccccaccccagcagcccccacctccacccagctacagccctgccagaaatcctcctggggccagcacctacaacaagaacagcaacatccctggcagcagcgccaacaccagcacccccaccgtgtcctcctacagccccccccagcccagctacagccagcccccctacaaccagggcggctacagccagggctacacagcccctcctcctcctcctcctcctcctccagcctacaactacggcagctatggaggctacaacccagccccctacaccccacctcctccacccacagcccagacctacccccagcccagctacaaccagtaccagcagtatgcccagcagtggaaccagtactaccagaaccagggccagtggccaccctactacggcaactatgactatggcagctacagcggcaacacccagggcggcaccagcacccagtag

SEQ ID NO: 319186 - DNA, 369 bp, Artificial Sequence
  derived and/or modified sequence
atggacgtgcggcggctgaaggtgaacgagctgcgggaggagctgcagaggaggggccttgatacgcgaggcctcaaggccgagcttgccgagaggttgcaagctgcgttagaggccgaggagccagacgacgaacgagagctcgacgcagatgatgagccaggcagacctggccacataaacgaagaagcagagctgcagcccgccacactgcagccgggacgcctgcagcccggattgcactcgccgaccgcctctacttccaccaccacctgtctgcagttgtgggagctccggaggctgcagccaggaccgctgtacccaacggccacaccgcattgcaccgatctcccttccgctcagctatag

SEQ ID NO: 319187 - DNA, 2571 bp, Artificial Sequence
  derived and/or modified sequence
atggacgtgcggcggctgaaggtgaacgagctgcgggaggagctgcaacgacgtgggctggatacacgcggcttgaaggcagaactggctgagcggcttcaggccgcacttgaagcagaggagccggatgacgagagagagctggacgcggacgatgagcctggcaggcctggacatatcaacgaagaagtcgagaccgagggtggaagcgaacttgagggcacagcacagcccccccctcccgggctgcaaccacacgctgagcctggcggctatagcggccctgatggacactacgccatggataatatcaccagacagaatcagttctacgatacacaagtcattaaacaagagaacgagtctggctatgaaaggcgccccttagagatggaacagcagcaggcttatagacctgaaatgaagaccgagatgaaacagggtgccccaacgtcctttctgccacctgaggcatctcagcttaaacccgacaggcaacagttccagtctcgaaaacgaccctatgaagagaatcgggggcgcggatattttgaacaccgggaagatagaagaggcaggtccccccagccaccagcggaggaggatgaagacgatttcgacgataccctggtggccattgatacctataactgtgacttgcactttaaagttgcccgcgatcgtagtagtggatatcccctgaccattgagggattcgcctacctgtggagcggagcccgggcgtcttatggcgttaggcgaggccgagtttgctttgaaatgaagatcaacgaagaaattagcgtcaagcaccttccttccaccgagcctgatccacacgtggtacggatagggtggtctttggactcctgctcaacccaactcggagaagagccctttagctacgggtatggaggcacaggcaagaagagcaccaacagccgatttgagaactacggtgataagtttgcagaaaatgacgtgattgggtgctttgccgacttcgagtgtggcaatgacgtagagctgtcctttactaagaatggtaaatggatggggattgcattccgtatacagaaggaggccttaggggggcaggctctctacccccacgtgctggtgaagaactgcgccgtcgagttcaacttcggccaaagagccgaaccctactgtagtgttttaccgggattcacattcatccaacacctgccgctttccgaacgcatacgcggtacggtaggccctaaatccaaggccgagtgcgagatcctgatgatggtaggcctcccagctgcagggaaaacaacctgggccatcaaacacgctgcctcgaacccttcaaaaaaatacaatatactgggaactaatgccatcatggataaaatgagggtgatgggactccgacggcaaaggaattatgcaggtcggtgggacgtgttgattcagcaagctacccagtgcctgaatcgattgattcagattgcggcccgaaaaaaacgtaactacatactcgaccaaaccaatgtgtatggaagcgcacagcgtcgcaaaatgaggccattcgaggggttccagagaaaggctattgtcatctgcccgacagatgaagatctcaaagatcggaccatcaaacggactgacgaagagggaaaagacgtccccgaccacgccgttctggagatgaaagcaaattttaccctccccgacgtgggtgacttcctcgacgaagtgttgttcattgagctgcagagggaggaggcagacaaattggtgagacagtataacgaggagggaaggaaagcggggccaccacctgaaaaacggtttgacaaccgcggagggggcgggttccgcggccgtggcggtggaggtggattccagcgctatgagaacaggggcccgcccggaggcaaccggggcggatttcagaatcgcggtggtggttcaggaggcggggggaattacagaggcgggtttaacaggtcaggcgggggagggtacagtcagaacaggtggggcaacaacaatagagacaataacaatagtaataacagaggatcctataatagagccccccagcagcaacctccaccccagcagcccccaccaccacaaccgccacctcagcagcccccgccccccccttcatattcgcccgcccggaatccccctggagccagcacctacaacaagaactcaaatattccgggaagctctgcaaacactagcacccctacagtcagctcctatagtccaccccagcccagttattcacagcccccatacaaccagggcggctatagtcaaggttacacggccccaccccccccaccgcctcccccacctgcttacaactacggtagctatggcgggtacaatccagctccctatactccacccccgcccccaactgcgcagacctacccacagccgtcatataatcagtaccagcagtatgcacaacagtggaaccagtactatcagaatcaaggccagtggccaccctactacgggaactatgactatggtagctattcaggcaatactcagggaggcacatccacccagtag

SEQ ID NO: 319188 - DNA, 369 bp, Artificial Sequence
  derived and/or modified sequence
atggacgttcggaggttgaaggtgaatgagctacgcgaagaattacagcggagggggctggacacaagggggctgaaggccgagctcgccgagagactgcaggcagctttggaagccgaagaaccagatgatgagcgggaactagatgccgatgacgagccgggtagaccgggacacatcaacgaagaggcagagttacagcccgcaaccttgcaaccaggccgtctgcaacccggtctacacagccccacagccagcacaagcaccactacttgcctgcagctgtgggaattgaggcggctccaacccggtcctctatatcctacagctacgccgcactgcacagacttgccctctgcacaactgtag

SEQ ID NO: 319189 - DNA, 2571 bp, Artificial Sequence
  derived and/or modified sequence
atggatgtgcggaggctcaaggtgaatgaactcagggaagagctgcagagacgagggctggacactcggggtctcaaggctgaactggctgaacgactgcaggccgcactcgaagctgaggagcccgacgacgaacgggagttggacgcggacgacgaacccggtagaccaggccacattaacgaggaagttgagaccgagggaggctcggaactggagggcactgcccagccaccgcctccaggactgcagcctcatgcggaacccggtggctattctggaccagacggccactacgccatggataatatcaccaggcagaatcaattctatgatacacaggtgatcaagcaggagaatgagagtggctatgagcgacgcccactcgaaatggaacagcagcaggcatataggccagagatgaagaccgaaatgaaacagggcgcaccaacatccttcctcccacccgaggcctcacaactgaagcctgaccggcagcagttccagagtcggaaacgtccttacgaggagaaccgaggacggggatatttcgagcaccgggaggaccgcaggggccgttcgcctcagcccccagctgaggaggacgaggacgacttcgacgatacgctcgttgcaattgatacctataattgcgacttgcacttcaaggtcgccagagaccgttcctccgggtatcctttaacaattgaggggttcgcgtatctgtggagcggagctcgcgcaagttacggagtgcgtcggggaagagtctgttttgaaatgaagatcaatgaggaaattagcgtaaaacacttgccttcaaccgagcctgacccgcatgtggtgaggatcggctggtcgcttgatagttgttccacacagctaggcgaggagccctttagttatgggtatggtggcactggcaaaaagtctacaaattctcggtttgagaattacggcgacaaattcgccgagaacgatgtcatcggatgtttcgcagatttcgagtgtggaaacgacgtagagctgagttttacgaagaacgggaagtggatgggcatcgccttccggattcagaaggaagctctggggggtcaggccttatatccccatgtcctcgtcaaaaactgtgccgtggagtttaactttggtcagagagccgaaccgtactgctccgtgctgcctggatttacttttatccagcaccttcccctttccgagaggattcggggaacagtcgggccaaaaagcaaggctgagtgtgaaatcctcatgatggtgggactcccagccgcagggaaaactacttgggccattaagcatgcagccagcaacccaagcaaaaagtacaacatcctgggaaccaatgctatcatggacaagatgagggttatgggcttaaggcggcagcgcaactacgcaggcaggtgggacgttttgatccaacaagcaacccagtgtctgaaccgactcatccagatcgctgcccgtaaaaaacgcaactatatcttggatcagaccaatgtctatggaagtgcacagaggcggaaaatgcgcccttttgaggggtttcaacgaaaggccattgtcatatgcccgacagacgaagatttgaaagatagaacaataaagcgtacagacgaggagggaaaggatgtacccgaccacgccgtcctggagatgaaggctaacttcacacttcccgatgtgggagacttcttggacgaggtccttttcatcgaattacagcgggaagaagctgacaaactggtgcgccaatataacgaagaggggagaaaggcaggccctcctcctgagaagcgcttcgataataggggaggtgggggttttcgcggacgcggaggtggtggcggatttcagcggtacgaaaacaggggtccccctggcggtaacaggggtggctttcagaatcgtggcggtggttctggcggagggggaaattacagagggggatttaaccggtccggaggaggagggtacagccagaaccgctgggggaacaacaatagggacaacaacaactcaaacaacaggggatcctacaatcgtgcacctcagcagcaaccccctcctcagcagcctccacccccacagcctccacctcagcagccaccaccaccccctagttacagcccggctcggaaccccccaggcgcatccacttacaacaaaaattcaaacattccgggatcatccgcaaacacttccaccccaaccgtcagctcatactccccccctcagccaagctatagccagcccccttacaatcagggcggttacagccaaggctataccgctcccccaccaccacctcctcctccgccagcatacaactatggatcttatgggggatacaatcccgcaccatatacacctccgcctcctccgaccgctcagacttacccgcagccttcctacaaccaataccaacagtacgcccagcagtggaaccagtactatcagaaccaagggcagtggcccccttattatgggaactacgattacggttcctattcgggaaacacccagggcggaactagcacccaatag

SEQ ID NO: 319190 - DNA, 369 bp, Artificial Sequence
  derived and/or modified sequence
atggacgtgagaagactgaaggtgaacgagctgagagaggagctgcagagaagaggcctggacaccagaggcctgaaggccgagctggccgagagactgcaggccgccctggaggccgaggagcccgacgacgagagagagctggacgccgacgacgagcccggcagacccggccacatcaacgaggaggccgagctgcagcccgccaccctgcagcccggcagactgcagcccggcctgcacagccccaccgccagcaccagcaccaccacctgcctgcagctgtgggagctgagaagactgcagcccggccccctgtaccccaccgccaccccccactgcaccgacctgcccagcgcccagctgtag

SEQ ID NO: 319191 - DNA, 2571 bp, Artificial Sequence
  derived and/or modified sequence
atggacgtgagaagactgaaggtgaacgagctgagagaggagctgcagagaagaggcctggacaccagaggcctgaaggccgagctggccgagagactgcaggccgccctggaggccgaggagcccgacgacgagagagagctggacgccgacgacgagcccggcagacccggccacatcaacgaggaggtggagaccgagggcggcagcgagctggagggcaccgcccagccccccccccccggcctgcagccccacgccgagcccggcggctacagcggccccgacggccactacgccatggacaacatcaccagacagaaccagttctacgacacccaggtgatcaagcaggagaacgagagcggctacgagagaagacccctggagatggagcagcagcaggcctacagacccgagatgaagaccgagatgaagcagggcgcccccaccagcttcctgccccccgaggccagccagctgaagcccgacagacagcagttccagagcagaaagagaccctacgaggagaacagaggcagaggctacttcgagcacagagaggacagaagaggcagaagcccccagccccccgccgaggaggacgaggacgacttcgacgacaccctggtggccatcgacacctacaactgcgacctgcacttcaaggtggccagagacagaagcagcggctaccccctgaccatcgagggcttcgcctacctgtggagcggcgccagagccagctacggcgtgagaagaggcagagtgtgcttcgagatgaagatcaacgaggagatcagcgtgaagcacctgcccagcaccgagcccgacccccacgtggtgagaatcggctggagcctggacagctgcagcacccagctgggcgaggagcccttcagctacggctacggcggcaccggcaagaagagcaccaacagcagattcgagaactacggcgacaagttcgccgagaacgacgtgatcggctgcttcgccgacttcgagtgcggcaacgacgtggagctgagcttcaccaagaacggcaagtggatgggcatcgccttcagaatccagaaggaggccctgggcggccaggccctgtacccccacgtgctggtgaagaactgcgccgtggagttcaacttcggccagagagccgagccctactgcagcgtgctgcccggcttcaccttcatccagcacctgcccctgagcgagagaatcagaggcaccgtgggccccaagagcaaggccgagtgcgagatcctgatgatggtgggcctgcccgccgccggcaagaccacctgggccatcaagcacgccgccagcaaccccagcaagaagtacaacatcctgggcaccaacgccatcatggacaagatgagagtgatgggcctgagaagacagagaaactacgccggcagatgggacgtgctgatccagcaggccacccagtgcctgaacagactgatccagatcgccgccagaaagaagagaaactacatcctggaccagaccaacgtgtacggcagcgcccagagaagaaagatgagacccttcgagggcttccagagaaaggccatcgtgatctgccccaccgacgaggacctgaaggacagaaccatcaagagaaccgacgaggagggcaaggacgtgcccgaccacgccgtgctggagatgaaggccaacttcaccctgcccgacgtgggcgacttcctggacgaggtgctgttcatcgagctgcagagagaggaggccgacaagctggtgagacagtacaacgaggagggcagaaaggccggccccccccccgagaagagattcgacaacagaggcggcggcggcttcagaggcagaggcggcggcggcggcttccagagatacgagaacagaggcccccccggcggcaacagaggcggcttccagaacagaggcggcggcagcggcggcggcggcaactacagaggcggcttcaacagaagcggcggcggcggctacagccagaacagatggggcaacaacaacagagacaacaacaacagcaacaacagaggcagctacaacagagccccccagcagcagccccccccccagcagcccccccccccccagccccccccccagcagcccccccccccccccagctacagccccgccagaaacccccccggcgccagcacctacaacaagaacagcaacatccccggcagcagcgccaacaccagcacccccaccgtgagcagctacagccccccccagcccagctacagccagcccccctacaaccagggcggctacagccagggctacaccgcccccccccccccccccccccccccccccgcctacaactacggcagctacggcggctacaaccccgccccctacacccccccccccccccccaccgcccagacctacccccagcccagctacaaccagtaccagcagtacgcccagcagtggaaccagtactaccagaaccagggccagtggcccccctactacggcaactacgactacggcagctacagcggcaacacccagggcggcaccagcacccagtag

SEQ ID NO: 319192 - DNA, 369 bp, Artificial Sequence
  derived and/or modified sequence
atgagcgccacctggtgcagccccgagggccagggcatgggccaggggcccgggcgcgaggttggggggaactctgccgcgtcggggcccgcgtcacctattcgggatccctgcctctccgaggcagggcttaaagggccaccttccgctcacccacggaggttatgcctgttgcaccggctggtgtgcttttcgggtggtctgacaagtatccagctgagccccagaacctgctgctcccaccagtgggcacagctgttctctcccgcttgttttccacagtggcgagcgcccggctgttcactagacgactcaagatctctgacaagaatccgacccgtgcacttacccggacctagtcttgattag

SEQ ID NO: 319193 - protein, 487 aa, Artificial Sequence
  derived and/or modified sequence
MGDTGLRKRREDEKSIQSQEPKTTSLQKELGLISGISIIVGTIIGSGIFVSPKSVLSNTEAVGPCLIIWAACGVLATLGALCFAELGTMITKSGGEYPYLMEAYGPIPAYLFSWASLIVIKPTSFAIICLSFSEYVCAPFYVGCKPPQIVVKCLAAAAILFISTVNSLSVRLGSYVQNIFTAAKLVIVAIIIISGLVLLAQGNTKNFDNSFEGAQLSVGAISLAFYNGLWAYDGWNQLNYITEELRNPYRNLPLAIIIGIPLVTACYILMNVSYFTVMTATELLQSQAVAVTFGDRVLYPASWIVPLFVAFSTIGAANGTCFTAGRLIYVAGREGHMLKVLSYISVRRLTPAPAIIFYGIIATIYIIPGDINSLVNYFSFAAWLFYGLTILGLIVMRFTRKELERPIKVPVVIPVLMTLISVFLVLAPIISKPTWEYLYCVLFILSGLLFYFLFVHYKFGWAQKISKPITMHLQMLMEVVPPEEDPE

SEQ ID NO: 319194 - DNA, 1464 bp, Artificial Sequence
  derived and/or modified sequence
atgggcgacaccggcctgagaaagagaagagaggacgagaagagcatccagagccaggagcccaagaccaccagcctgcagaaggagctgggcctgatcagcggcatcagcatcatcgtgggcaccatcatcggcagcggcatcttcgtgagccccaagagcgtgctgagcaacaccgaggccgtgggcccctgcctgatcatctgggccgcctgcggcgtgctggccaccctgggcgccctgtgcttcgccgagctgggcaccatgatcaccaagagcggcggcgagtacccctacctgatggaggcctacggccccatccccgcctacctgttcagctgggccagcctgatcgtgatcaagcccaccagcttcgccatcatctgcctgagcttcagcgagtacgtgtgcgcccccttctacgtgggctgcaagcccccccagatcgtggtgaagtgcctggccgccgccgccatcctgttcatcagcaccgtgaacagcctgagcgtgagactgggcagctacgtgcagaacatcttcaccgccgccaagctggtgatcgtggccatcatcatcatcagcggcctggtgctgctggcccagggcaacaccaagaacttcgacaacagcttcgagggcgcccagctgagcgtgggcgccatcagcctggccttctacaacggcctgtgggcctacgacggctggaaccagctgaactacatcaccgaggagctgagaaacccctacagaaacctgcccctggccatcatcatcggcatccccctggtgaccgcctgctacatcctgatgaacgtgagctacttcaccgtgatgaccgccaccgagctgctgcagagccaggccgtggccgtgaccttcggcgacagagtgctgtaccccgccagctggatcgtgcccctgttcgtggccttcagcaccatcggcgccgccaacggcacctgcttcaccgccggcagactgatctacgtggccggcagagagggccacatgctgaaggtgctgagctacatcagcgtgagaagactgacccccgcccccgccatcatcttctacggcatcatcgccaccatctacatcatccccggcgacatcaacagcctggtgaactacttcagcttcgccgcctggctgttctacggcctgaccatcctgggcctgatcgtgatgagattcaccagaaaggagctggagagacccatcaaggtgcccgtggtgatccccgtgctgatgaccctgatcagcgtgttcctggtgctggcccccatcatcagcaagcccacctgggagtacctgtactgcgtgctgttcatcctgagcggcctgctgttctacttcctgttcgtgcactacaagttcggctgggcccagaagatcagcaagcccatcaccatgcacctgcagatgctgatggaggtggtgccccccgaggaggaccccgagtag

SEQ ID NO: 319195 - DNA, 1464 bp, Artificial Sequence
  derived and/or modified sequence
atgggcgatacgggcctgcggaaacgaagggaagacgaaaagtccatccagagccaggagccaaagaccaccagtttacagaaagagctggggctgatttccgggatatctatcatagtggggacaatcatcggctccgggatctttgtgtctcctaagagcgtcctgtccaacaccgaagccgtcggcccttgcctgatcatttgggccgcatgtggcgtgctggcaactttgggggcactttgtttcgccgaattgggcacaatgattaccaagtccgggggggagtacccttacttaatggaagcctacggtcccatacccgcctacctcttctcatgggcctctctgatcgtaattaaaccgacctcattcgctatcatttgcttatcttttagtgagtatgtgtgtgcgcctttttacgtgggctgtaagccaccacagattgtcgtcaaatgtctcgcagctgccgcgattttgttcatctccaccgtgaactctctttcagtgcggctgggatcctacgtgcagaacattttcactgccgcaaagctcgtaatagtggctattataatcatctctggccttgtgctgttagcccagggcaacacaaaaaattttgacaatagctttgagggagcccaactttccgtgggggccatcagcctcgctttctacaatgggctgtgggcatatgatggttggaaccagctgaactatattaccgaggagcttaggaacccttaccgcaatctcccattggcaataattatcgggatcccgttggtgactgcctgctacatcctgatgaatgtatcctactttaccgtcatgaccgctaccgagcttttgcagtcacaggccgtcgccgtcacttttggcgatcgtgtgttgtaccccgcatcttggattgtccccctgtttgtggctttctcaacaattggggccgccaacggcacgtgcttcactgccgggaggttaatctatgtggctgggagagagggccatatgctgaaagtgctatcatatataagtgtgcgtcgcttgacacccgcccccgcaataatcttttacgggataatcgccaccatttacattatcccgggcgacatcaactcattggtgaattactttagtttcgctgcctggttgttctacggcctaactatcttgggactgatagtcatgaggttcacgcggaaggaattagaaaggcccatcaaagtcccagtcgtcatcccagttcttatgacccttatctctgtgttcttggtgcttgccccaataatcagtaaacccacctgggagtatctttactgcgtcctctttatcctatctggcctccttttttacttcctgtttgtgcactataagttcggatgggcacaaaaaatcagcaagcccatcactatgcacctgcagatgctcatggaagtggtcccacccgaggaagacccagaatag

SEQ ID NO: 319196 - DNA, 1464 bp, Artificial Sequence
  derived and/or modified sequence
atgggggataccgggctccgcaagagaagagaggatgaaaaatctattcagtcgcaggagcccaaaacaacctccctccagaaggagcttggcctgatctccggcatctccatcatcgtcggaaccatcatcggctccggaatttttgtctcccccaagtccgtactgtccaatacagaggccgtggggccctgtctaatcatctgggccgcttgtggcgtcctcgccaccctgggggctttgtgttttgcagaactaggtacaatgatcacaaaaagtggaggggagtatccctatttgatggaagcttatggccccatccctgcgtatctcttcagctgggccagcctcatcgttataaaacccacctcttttgctatcatctgcctgtcattcagcgagtatgtatgtgcacccttttatgtaggttgtaagcccccacagattgtcgtgaagtgtctggccgccgcggcaattttattcatatctactgtgaattctctaagtgttcgcctcggctcttacgttcagaacatctttacagccgctaaattggtcattgtcgctataattatcatatcgggtctggtactgttggcacagggtaacaccaaaaacttcgacaattctttcgagggcgctcagcttagcgtcggtgccattagcctggcattttacaacggtctgtgggcatacgatggttggaaccagctcaactatattactgaggagcttagaaacccctatagaaacttaccactggccattattattggaataccactcgtcactgcctgctacatcctcatgaacgtgtcgtactttaccgtgatgaccgcgacagagctactgcagagccaggctgtggccgtaaccttcggcgatcgcgttctataccccgcgagctggattgtgcccctttttgtggccttttctaccatcggggccgcaaatgggacttgtttcacagccgggaggttgatctatgtggccggacgcgagggacacatgttgaaagttctctcgtacatcagcgtccggaggctgactccagcacctgccatcatcttttatggtatcatagccaccatctatatcataccaggcgacattaactccctggtgaattatttcagtttcgccgcatggctattctacggactcaccatccttggattaattgtaatgcgtttcacacgcaaggagctcgaaaggcccatcaaggtcccagtggtgattccagtgctgatgactcttatctcagtgttcctagtgttggccccaatcattagtaagccaacctgggagtacctgtattgtgttctatttatcttgagcggattactgttctacttcttgtttgtgcactacaagtttgggtgggcacaaaagatatccaaacccataacaatgcatctgcaaatgctcatggaggtcgtgcccccggaggaagaccctgagtag

SEQ ID NO: 319197 - DNA, 1464 bp, Artificial Sequence
  derived and/or modified sequence
atgggagacaccggcctgaggaagagaagagaagatgagaagagcatccagagccaggagcccaagaccaccagcctgcagaaggagctgggcctcatcagcggcatcagcatcatcgtgggcaccatcatcggcagcggcatctttgtgagccccaagtctgtgctgagcaacacagaagctgtgggcccctgcctgatcatctgggccgcctgtggggtgctggccaccctgggcgccctgtgctttgctgagctgggcaccatgatcaccaagtctggaggagagtacccctacctgatggaggcctacggccccatcccagcctacctgttctcctgggccagcctcatcgtcatcaagcccaccagctttgccatcatctgcctgtccttctctgaatatgtgtgtgcccccttctacgtgggctgcaagccaccccagatcgtggtgaagtgcctggccgctgctgccatcctcttcatcagcacagtgaacagcctgtctgtgcggctgggcagctatgtgcagaacatcttcaccgctgccaagctggtgattgtggccatcatcatcatcagcggcctggtgctgctggcccagggcaacaccaagaactttgacaacagctttgaaggagcccagctgtctgtgggcgccatcagcctggccttctacaacggcctgtgggcctatgatggctggaaccagctgaactacatcacagaggagctgaggaacccctacagaaacctgcccctggccatcatcatcggcatccccctggtgacagcctgctacatcctgatgaatgtgtcctacttcaccgtgatgacagccacagagctgctgcagagccaggccgtggccgtgacctttggagacagagtgctgtacccagcctcctggatcgtgcccctgtttgtggccttcagcaccatcggggccgccaacggcacctgcttcaccgctggccgcctcatctacgtggccggccgggagggccacatgctgaaggtgctgagctacatctctgtgcggcggctgaccccagccccagccatcatcttctacggcatcatcgccaccatctacatcatccctggggacatcaacagcctggtgaactacttctcctttgctgcctggctgttctacggcctgaccatcctgggcctcatcgtgatgaggttcaccaggaaggagctggagcggcccatcaaggtgcctgtggtgattcctgtgctgatgaccctcatctctgtgttcctggtgctggcccccatcatcagcaagcccacctgggagtacctgtactgtgtgctcttcatcctgagcggcctgctcttctacttcctgtttgtgcactacaagtttggctgggcccagaagatcagcaagcccatcaccatgcacctgcagatgctgatggaggtggtgcccccagaggaggaccctgagtag

SEQ ID NO: 319198 - DNA, 1464 bp, Artificial Sequence
  derived and/or modified sequence
atgggcgacaccggcctgcggaagcggcgggaggacgagaagagcatacagtcacaagagcctaaaaccactagcctccagaaagagctgggccttattagcggcatttcaatcatcgtcggaaccattattggatctggcatatttgtgtccccgaaaagtgttctcagcaatactgaggcggtgggaccatgcctcatcatttgggccgcttgtggtgtcctcgcaacactgggcgccctgtgcttcgccgagcttggcacaatgattaccaagagcggaggcgaatatccctacctcatggaggcttatggccctattcccgcctacctgttctcctgggcctccctgattgttatcaagcctacaagtttcgctattatatgcctgagtttctctgagtacgtgtgtgcccctttctatgttggatgcaagccaccgcagatcgtggtcaagtgcttagccgccgctgcaatcctgttcatctcaacggtaaactccctttctgtaagactgggttcttatgtacaaaacatcttcaccgcagcaaaactagtaatcgttgctatcattattatatctggcctcgtgctgctggctcagggaaacacaaagaacttcgataatagctttgagggcgctcagttgtccgtgggcgccatatctctcgctttttataacggattgtgggcatacgatggatggaaccagctgaactacattaccgaggagctgcgcaatccatatcgtaacctcccactcgccataataataggaatccctttggtgactgcttgctacattctcatgaacgtcagctacttcaccgtgatgacagccactgaacttcttcagagccaagccgtggctgtgaccttcggggatcgcgtgctctacccagcttcatggattgttcctctgtttgttgcattctctacaataggcgctgctaatggaacatgtttcaccgccgggagacttatttatgtagcaggacgtgagggtcatatgctgaaagttctctcatacatcagtgttcggaggctgactccagcgccagcgattatcttttacggaattattgccactatctatattatcccaggagacatcaattcacttgtgaattactttagttttgccgcttggctcttctatggcctgaccatactggggctaattgtcatgcgcttcactagaaaagagttggagcgcccaattaaggtcccagtggtgatccccgtccttatgactctaattagcgtgttcctggtccttgccccaatcatctcaaagccaacctgggaatacttgtactgtgtgttattcattctctcaggtctactgttttattttctgttcgtgcattacaagtttgggtgggcccagaaaatctccaagcctatcaccatgcacctccagatgctcatggaggtggttccccccgaggaggatccagaatag

SEQ ID NO: 319199 - DNA, 1464 bp, Artificial Sequence
  derived and/or modified sequence
atgggcgacaccggcctgcggaagcggcgggaggacgagaagagcattcaatctcaggaacccaaaacaaccagcctgcagaaagagttaggcctgatcagcggaatcagcatcatagtgggcaccattattggcagtgggatatttgtcagcccaaagtctgtcctctctaacacagaagccgttggcccatgtctgattatctgggctgcctgtggggttctggctaccctcggcgctctgtgcttcgccgaactggggacaatgatcactaaatccggtggcgagtatccgtatttgatggaagcttacgggccgatcccagcttacctcttttcctgggcttccctcatcgtgattaagccaacctccttcgctattatctgtctctcgttcagtgagtatgtgtgcgctcccttttacgtgggctgtaagcctccgcaaatcgtcgtgaaatgtttggcagcagccgccatcctgtttatctccaccgtaaattccctcagcgtgcggctgggatcatacgtgcagaatattttcaccgcagccaagctagtaattgtggccataataatcatctctgggctagtcttactcgcgcaagggaataccaagaattttgacaatagttttgagggggctcagttgtccgtgggcgccatcagcctggccttctacaatggcctttgggcctacgacgggtggaaccagcttaattatatcaccgaagagttgaggaatccgtacagaaatctgccactggctataatcattgggatccccctggtgactgcctgctacatcctcatgaatgtctcctattttacggtcatgaccgcaacagaattgctccagagtcaggccgtggcggtgacctttggtgacagggttctgtacccggcttcctggattgtgccacttttcgtcgccttctctactataggcgccgctaatggcacctgctttacggctggtaggcttatttacgtcgcaggacgggaagggcacatgttgaaagtgctgtcatatattagcgtgcggcggctaaccccagcccctgccattatcttctatgggatcattgctacaatttacataattccaggcgatattaacagtctggtcaattacttctcattcgccgcctggctgttctatggcctcactattttgggcctgatagtgatgcggtttactcgcaaggaactggagagacctatcaaggtgccggtggtgatcccagtgctgatgacactgatttctgtatttctggtgctcgcacccataattagtaaacctacctgggaatacctgtattgtgttctgtttatcctgagtggactactgttttacttcctgttcgtccattataaatttgggtgggcacagaagatatctaagcctatcacaatgcacctacaaatgctgatggaggtggtgccaccggaagaagacccggagtag

SEQ ID NO: 319200 - DNA, 1464 bp, Artificial Sequence
  derived and/or modified sequence
atgggcgatacaggactgaggaaacggcgagaagacgaaaaatccatccagagccaggagcctaagaccactagtcttcagaaggagctggggctcatttcagggatttccattatcgtcgggacaataattgggtccggtattttcgtgagccctaaaagtgtgctgtccaacactgaggccgtcggaccctgcctgatcatttgggcagcctgtggcgtgctagcgactcttggggcattgtgttttgcagagttgggaactatgataaccaagagcgggggtgaatatccgtacctcatggaagcttacggccctataccagcataccttttttcatgggccagcctgattgtcatcaagcccacctccttcgccatcatatgcctgtcgttttcagagtacgtctgtgcccctttttacgtcggatgtaagcccccacaaatagtagttaaatgtctggcagcagcagctatattgtttattagcactgtaaattctctgtccgttcgccttggaagctacgtccagaatattttcaccgccgcaaaactggtgatagtagctatcatcattatatcaggattggtcctacttgcacaggggaataccaagaacttcgacaacagttttgagggcgctcagctttccgtgggagcaatctccctggccttttacaacggcctttgggcctatgacggctggaaccagcttaactatattactgaagagctacgaaacccttaccggaatttacctcttgccattataattgggatccccctggtgaccgcctgttacatcttgatgaatgtgtcttacttcaccgtgatgacagcaactgagctgctgcagtcccaagcggtggccgtgacattcggggaccgcgttctgtaccctgcaagctggattgtgccactcttcgtggctttctcgacaatcggcgctgccaacggtacatgcttcactgccggtcgcctaatctatgttgccggtcgggaaggacacatgctgaaagtactgagctatatctcggtccggcgactcacccccgcaccggctatcatattctatggaatcatcgcaaccatttacatcatccctggggacataaactccctggtgaactactttagtttcgccgcttggttattttacggactgacgatactgggactgatcgtcatgcgattcactagaaaggaactggaacgcccaatcaaagtgccagtggtgatccctgtcctgatgacccttatctccgtctttttagtgctggccccaattatctcgaaacctacctgggagtatctgtattgcgttcttttcatcctcagcggcttgctcttctatttcctgtttgttcattataaattcggttgggctcaaaaaattagcaaacctataactatgcacctgcagatgctgatggaggtcgtgcctccagaagaggatcccgagtag

SEQ ID NO: 319201 - DNA, 1464 bp, Artificial Sequence
  derived and/or modified sequence
atgggcgatacaggcctgcgtaaacggagagaggatgagaaaagcatccagtcccaggagccaaagacgacctccttgcaaaaagaactgggccttatcagtgggatatccatcatcgtcgggaccatcatcgggtccggaatttttgtgagccctaagagcgtcctttcgaataccgaggcagtgggaccctgtttgatcatatgggctgcctgcggggttctggcaacactgggtgcgctatgttttgctgaactcgggactatgattacgaagagtggcggagagtatccgtacctcatggaggcttacgggcctattccagcatacctcttttcctgggcgagtctgattgtgataaaacctactagctttgctataatatgcctgagtttctcagaatacgtgtgtgcccctttttacgtgggatgtaagcccccacagatcgtcgtcaagtgccttgctgccgcagctatcctgttcataagcaccgtaaattcactgtctgtgcgacttggaagctacgttcagaacattttcacggcggcaaagctcgttatagtggccattattattattagtggattggtgctgctggcgcagggtaacactaaaaatttcgacaactcttttgaaggggctcagctgtctgtaggcgcaatctcactggctttctacaacggcctctgggcctatgatggctggaaccagctcaactacattaccgaggagctgcgcaacccctacagaaatctgcccctcgccattatcattggcatcccattggtgacggcatgctatattcttatgaacgtctcgtattttactgtcatgacagctaccgaattgttgcaaagccaggccgtggccgtcacattcggtgacagggtcctttatccagcctcttggattgtccccctgttcgttgcgttttctacaatcggcgctgccaacggaacatgctttactgccggaaggctcatttatgtggcaggcagagagggacatatgttgaaggtcctcagctacatatctgtgcgcagactgaccccagctccagcgatcatcttctacggaatcatagccaccatctatatcattcctggcgatattaacagtctcgttaactacttctctttcgccgcatggctcttttacggcttaaccattctgggcttgatcgtaatgcggttcacgcggaaggagctggagagacccattaaagtgcctgtcgtcatcccggtgctgatgactctcattagcgtgtttctcgtcttggccccaattatatctaagcccacctgggaatacttgtattgtgttctatttatcctatcgggcctcctgttttactttctgttcgtgcactataagtttggctgggctcagaagatttctaaacctattaccatgcacctgcaaatgctgatggaagttgtgccccctgaggaggatccagagtag

SEQ ID NO: 319202 - DNA, 1464 bp, Artificial Sequence
  derived and/or modified sequence
atgggagacactggcctgagaaagagacgtgaagatgaaaaatctatccagtcccaggaacctaaaaccacatccctgcaaaaggaactgggactaattagcggtatcagtatcatagtaggaacaatcatcggttctggaatttttgtctccccaaagtcagtcctgtcgaacacagaggcagttggtccatgtctgattatatgggcagcatgcggcgtcctcgctactctgggggcactgtgcttcgccgaactggggacgatgatcaccaagtctggcggcgaatacccatatcttatggaggcatatggtcccattccagcataccttttctcctgggcgtccttaattgttatcaaacctacatcttttgccattatttgcctttctttttccgagtatgtgtgtgcccctttctatgtcggctgcaaaccacctcagattgtagtgaagtgtctggcagccgccgccatactctttatctcaacggtgaattcactctccgtacgactggggagttatgttcagaacatcttcactgccgcaaaacttgtgattgttgccataattattatctccggcctggtgctgctggcccagggaaatacaaagaattttgataattcttttgagggagcacaattgagcgtgggcgctatctcactggccttctataacggactgtgggcttatgatggatggaaccaattgaactacatcaccgaggaacttcgcaatccctaccggaaccttcctttggccatcattatcggaattcctttggtaaccgcttgctacattttgatgaacgtgtcctactttactgttatgacagctacggaacttctacaatctcaagccgtggctgtgactttcggcgatcgtgtgctgtatccagcctcgtggatcgttccactgtttgttgccttctctactattggcgctgcgaatggcacttgtttcaccgcaggccgactgatctatgtcgcaggccgggagggtcacatgctgaaggttttgagctacatatctgttcggaggctgaccccggccccagccattattttctacggaattatcgcaactatctatatcatccctggcgatatcaactccctggtgaactacttttcctttgcagcgtggttgttttacggcttgacaattctgggactaatcgtgatgcggttcactcgtaaggagctcgaaagaccaatcaaagtgcctgtcgtgatccctgtcctgatgacattaatctctgtctttttggtgctggcgcccatcatctccaagcctacgtgggagtatctgtactgcgttctgttcattctgtcaggcctgcttttctacttcttgtttgtgcattacaagtttgggtgggcccagaagatatcaaagccaattactatgcacctccagatgcttatggaagtggtgcctcccgaggaggatccagagtag

SEQ ID NO: 319203 - DNA, 1464 bp, Artificial Sequence
  derived and/or modified sequence
atgggggacactggcctaaggaagcggagagaagatgaaaagagcatacagagccaggaaccaaagacgactagtttacagaaagaactgggactaataagcgggatatcaattattgtgggtacgatcatcggtagtgggatatttgtgtcaccaaagagtgttttgtctaacaccgaggccgtcggcccctgcctcatcatttgggccgcttgcggcgtcttagctactctcggcgcactatgtttcgccgaactgggaaccatgattacgaaaagcggcggcgagtatccatacttgatggaagcctatggccccattcccgcatatctatttagttgggcgtcccttatcgtgattaaacccacttcttttgctataatttgtctgtctttcagcgaatatgtgtgtgctcctttttacgtgggatgcaaacctccacaaattgtggttaagtgcctcgccgcggctgccattttgtttatttctactgtgaatagcttgagtgttagacttggaagttacgttcaaaacattttcacggctgctaaactggtgattgtcgctattattattatctccggactcgtcctgctcgcccaggggaacaccaagaacttcgacaattcattcgagggcgctcagctgagcgtgggggcaatcagtctcgcgttttacaatggactttgggcatacgatggatggaatcaactgaactatattacagaagaactgcgtaacccttaccgcaacctcccactcgctattattataggcatcccactggttactgcttgttatatcctaatgaacgtctcttacttcactgtgatgacagccacagagcttttgcagagtcaggccgtcgccgttacctttggggacagagtcttgtaccctgcttcatggattgtgccactctttgtcgcgttcagcacaattggagctgcaaatggtacctgtttcactgccggccgcctaatatacgtagctggaagagagggacatatgctgaaagtcctgagttacatttctgtgcgacgactcactcctgcacctgcgatcattttttatggaatcattgcaactatctatatcattccaggagatattaacagccttgtcaactactttagtttcgccgcttggctcttttacggcttaacaattctagggctcatcgtgatgagattcacaaggaaagagctcgagaggcctattaaagttcccgtcgttatacccgtcctgatgaccctaatcagcgtgttcctggtcttggcaccaatcatctcaaaacccacatgggagtatctctactgtgttcttttcatcttgtccggcctgctgttttactttttattcgtccactacaaattcggctgggcccaaaaaatttcaaagccaatcacaatgcacctccaaatgcttatggaagtggtacccccagaagaggatcctgaatag

SEQ ID NO: 319204 - DNA, 1752 bp, Artificial Sequence
  derived and/or modified sequence
ggcacgggcggtcagctgggccgcagctcctccggctctgcagggtcacggaggaaggtaagtaagccagctcccctagtccaggccgagcttgcacttgcgtcttgtctgctgctgctgaaccaagatttagctgtgcgccctccttgcagtctcctggaaccagcaggaggaaacatgggggatactggcctgagaaagcggagagaggatgagaagtcgatccagagccaagagcctaagaccaccagtctccaaaaggagctgggcctcatcagtggcatctccatcatcgtgggcaccatcattggctctgggatcttcgtttcccccaagtctgtgctcagcaacacggaagctgtggggccctgcctcatcatatgggcggcttgcggggtcctcgcgacgctgggtgccctgtgctttgcggagcttggcacaatgatcaccaagtcagggggagagtatccctacctgatggaggcctacgggcccatccccgcctacctcttctcctgggccagcctgatcgtcattaagcccacgtccttcgccatcatctgcctcagcttctccgagtatgtgtgtgcgcccttctatgtgggctgcaagcctcctcaaatcgttgtgaaatgcctggccgccgccgccatcttgttcatctcgacagtgaactcactgagcgtgcggctgggaagctacgtccagaacatcttcaccgcggccaagctggtgatcgtggccatcatcatcatcagcgggctggtgctcctggcccaaggaaacacaaagaattttgataattctttcgagggcgcccagctgtctgtgggagccatcagcctggcgttttacaatggactctgggcctatgatggatggaatcaactcaattacatcacagaagaacttagaaacccttacagaaacctgcctttggccattatcatcgggatccccctggtgacggcgtgctacatcctcatgaacgtgtcctacttcaccgtgatgactgccaccgaactcctgcagtcccaggcggtggctgtgacatttggtgaccgtgttctctatcctgcttcttggatcgttccactttttgtggcattttcaaccatcggtgctgctaacgggacctgcttcacagcgggcagactcatttacgtggcgggccgggagggtcacatgctcaaagtgctttcttacatcagcgtcaggcgcctcactccagcccccgccatcatcttttatggtatcatagcaacgatttatatcatccctggtgacataaactcgttagtcaattatttcagctttgccgcatggctgttttatggcctgacgattctaggactcatcgtgatgagatttacaaggaaagagctggaaaggcctatcaaggtgcccgtagtcattcccgtcttgatgacactcatctctgtgtttttggttctggctccaatcatcagcaagcccacctgggagtacctctactgtgtgctgtttatattaagcggccttttattttacttcctgtttgtccactacaagtttggatgggctcagaaaatctcaaagccgattaccatgcaccttcagatgctaatggaagtggtcccaccggaggaagaccctgagtaacaagctccgtctcttgtagccaagtcagctgaatttattttcttaagcaatatttgtggttatttcttcctttttttcttacgaataaaatatactcagatgtttaaaata

SEQ ID NO: 319205 - DNA, 1772 bp, Artificial Sequence
  derived and/or modified sequence
acaagacatggccatttctagggttggaccgtgcaggcacgggcggtcagctgggccgcagctcctccggctctgcagggtcacggaggaagccagctcccctagtccaggccgagcttgcacttgcgtcttgtctgctgctgctgaaccaagatttagctgtgcgccctccttgcagtctcctggaaccagcaggaggaaacatgggggatactggcctgagaaagcggagagaggatgagaagtcgatccagagccaagagcctaagaccaccagtctccaaaaggagctgggcctcatcagtggcatctccatcatcgtgggcaccatcattggctctgggatcttcgtttcccccaagtctgtgctcagcaacacggaagctgtggggccctgcctcatcatatgggcggcttgcggggtcctcgcgacgctgggtgccctgtgctttgcggagcttggcacaatgatcaccaagtcagggggagagtatccctacctgatggaggcctacgggcccatccccgcctacctcttctcctgggccagcctgatcgtcattaagcccacgtccttcgccatcatctgcctcagcttctccgagtatgtgtgtgcgcccttctatgtgggctgcaagcctcctcaaatcgttgtgaaatgcctggccgccgccgccatcttgttcatctcgacagtgaactcactgagcgtgcggctgggaagctacgtccagaacatcttcaccgcggccaagctggtgatcgtggccatcatcatcatcagcgggctggtgctcctggcccaaggaaacacaaagaattttgataattctttcgagggcgcccagctgtctgtgggagccatcagcctggcgttttacaatggactctgggcctatgatggatggaatcaactcaattacatcacagaagaacttagaaacccttacagaaacctgcctttggccattatcatcgggatccccctggtgacggcgtgctacatcctcatgaacgtgtcctacttcaccgtgatgactgccaccgaactcctgcagtcccaggcggtggctgtgacatttggtgaccgtgttctctatcctgcttcttggatcgttccactttttgtggcattttcaaccatcggtgctgctaacgggacctgcttcacagcgggcagactcatttacgtggcgggccgggagggtcacatgctcaaagtgctttcttacatcagcgtcaggcgcctcactccagcccccgccatcatcttttatggtatcatagcaacgatttatatcatccctggtgacataaactcgttagtcaattatttcagctttgccgcatggctgttttatggcctgacgattctaggactcatcgtgatgagatttacaaggaaagagctggaaaggcctatcaaggtgcccgtagtcattcccgtcttgatgacactcatctctgtgtttttggttctggctccaatcatcagcaagcccacctgggagtacctctactgtgtgctgtttatattaagcggccttttattttacttcctgtttgtccactacaagtttggatgggctcagaaaatctcaaagccgattaccatgcaccttcagatgctaatggaagtggtcccaccggaggaagaccctgagtaacaagctccgtctcttgtagccaagtcagctgaatttattttcttaagcaatatttgtggttatttcttcctttttttcttacgaataaaatatactcagatgttt

SEQ ID NO: 319206 - protein, 100 aa, Artificial Sequence
  derived and/or modified sequence
METRQVSRSPRVRLLLLLLLLLVVPWGVRTASGVALPPVGVLSLRPPGRAWADPATPRPRRSLALADDAAFRERARLLAALERRHWLNSYMHKLLVLDAP

SEQ ID NO: 319207 - DNA, 459 bp, Artificial Sequence
  derived and/or modified sequence
gtaggggactgtgcgggaagctgggggtggatgcatggtggggcccggggttctgggccgggatgcagccctactgagcccctttctggttctccacaggtgatggagacccgccaggtgtccaggagccctcgggttcggctgctgctgctgctgctgctgctgctggtggtgccctggggcgtccgcactgcctcgggagtcgccctgcccccggtcggggtcctcagcctccgccccccaggacgggcctgggcggatcccgccacccccaggccgcggaggagcctggcgctggcggacgacgcggccttccgggagcgcgcgcggttgctggccgccctcgagcgccgccactggctgaactcgtacatgcacaagctgctggtgttggatgcgccctgagcgcgctgcccgtccccatcttaataaagaccatgccctgcgctccggactgcg

SEQ ID NO: 319208 - protein, 714 aa, Artificial Sequence
  derived and/or modified sequence
MAEAHQAVGFRPSLTSDGAEVELSAPVLQEIYLSGLRSWKRHLSRFWNDFLTGVFPASPLSWLFLFSAIQLAWFLQLDPSLGLMEKIKELLPDWGGQHHGLRGVLAAALFASCLWGALIFTLHVALRLLLSYHGWLLEPHGAMSSPTKTWLALVRIFSGRHPMLFSYQRSLPRQPVPSVQDTVRKYLESVRPILSDEDFDWTAVLAQEFLRLQASLLQWYLRLKSWWASNYVSDWWEEFVYLRSRNPLMVNSNYYMMDFLYVTPTPLQAARAGNAVHALLLYRHRLNRQEIPPTLLMGMRPLCSAQYEKIFNTTRIPGVQKDYIRHLHDSQHVAVFHRGRFFRMGTHSRNSLLSPRALEQQFQRILDDPSPACPHEEHLAALTAAPRGTWAQVRTSLKTQAAEALEAVEGAAFFVSLDAEPAGLTREDPAASLDAYAHALLAGRGHDRWFDKSFTLIVFSNGKLGLSVEHSWADCPISGHMWEFTLATECFQLGYSTDGHCKGHPDPTLPQPQRLQWDLPDQIHSSISLALRGAKILSENVDCHVVPFSLFGKSFIRRCHLSSDSFIQIALQLAHFRDRGQFCLTYESAMTRLFLEGRTETVRSCTREACNFVRAMEDKEKTADDHGYGVSYIFMGDGMITFHISSKKSSTKTDSHRLGQHIEDALLDVASLFQAGQHFKRRFRGSGKENSRHRCGFLSRQTGASKASMTSTDF

SEQ ID NO: 319209 - DNA, 2145 bp, Artificial Sequence
  derived and/or modified sequence
atggccgaggcccatcaagccgtgggctttagaccatccctgacgagtgacggagctgaggtagagctaagcgcacccgtcctgcaagaaatatacttaagcggactgaggtcttggaagaggcatttaagccgattttggaatgacttccttactggagtttttccagccagcccactgtcctggctttttctgtttagtgccatccagctcgcttggtttttgcagctggacccaagcctcgggctgatggagaagataaaggagctgcttccagattgggggggacagcatcatggattgagaggggtgctggcggccgccctgttcgcctcgtgtttgtggggggccctgatctttactcttcacgttgcactgagactcttgctttcgtaccacggctggcttctggaaccccacggcgcaatgtcaagtcctactaagacctggttggctcttgtgcggatctttagcggcaggcacccaatgttgttctcttaccagcggagtctgcccagacagcccgttcccagtgtacaggacacagtccggaagtatctggagtccgtacgacccatcctgtctgacgaggattttgactggaccgctgtcctcgcacaggaattcctcaggctgcaagccagtttgctgcaatggtaccttaggctgaagtcgtggtgggctagcaactacgtcagcgactggtgggaggaatttgtgtatctgaggagcaggaaccccctcatggtcaacagtaactactacatgatggattttctatatgtcaccccaacaccattgcaggccgctagagctggcaatgctgtgcacgcccttcttctctacagacatcgcctgaaccgccaggaaatccctcctaccctgctcatgggtatgaggccgctttgctctgcccagtacgagaaaatcttcaataccacaagaattccgggcgtccagaaggattatataaggcaccttcatgattctcagcacgtagccgtattccatcgggggaggttttttagaatgggaacacattctcggaattcattgctgtccccaagagctctggagcagcagttccagaggatcctggatgacccttcaccagcctgccctcacgaagagcacctggcagcattaactgccgcccccagaggcacatgggcccaggtgcgtacaagtctgaagacacaggccgctgaggcactggaagccgtcgagggcgccgccttctttgtctcattagacgctgagcctgcagggctgacccgcgaggatccggccgcctctctggacgcgtacgcccatgcactacttgccgggagaggacacgatcggtggtttgataaatcttttacgctgatcgtattcagcaatggaaaacttggactgtctgtggaacacagttgggccgactgccccatctcaggccacatgtgggaattcacacttgccactgaatgcttccagctgggatacagtaccgacgggcactgtaaggggcatccagatcctacacttccacagccccaacggctgcagtgggatcttcccgaccagattcactcttctattagtctcgcactgagaggcgctaaaatactgtcggaaaacgtagattgccatgtcgtgccgttctcattatttggcaaatccttcatcagacgctgccatctctcatctgattccttcattcagattgccttgcagctggctcatttccgcgatcgcgggcaattctgcctcacctacgaatctgcaatgacgaggctatttttagaaggcaggaccgaaaccgtgaggtcctgcacacgcgaagcctgtaatttcgttcgcgctatggaagacaaggagaagaccgccgacgaccatggatatggagtaagctacatcttcatgggcgatgggatgatcacctttcatatctcctcaaaaaagagctctaccaaaacagactcccaccgactcgggcagcatatcgaagacgcacttctggatgtggctagcctgttccaagcaggccagcacttcaagagacgattcagaggatccgggaaggaaaattctcggcaccgctgcggcttcctgagccggcagacgggtgcctcgaaagctagcatgacatctacagatttctag

SEQ ID NO: 319210 - DNA, 2145 bp, Artificial Sequence
  derived and/or modified sequence
atggccgaggcccaccaggccgtgggcttccggcccagcctgaccagtgatggagctgaggtggagctgagcgcccctgtgctgcaggagatctacctgagcggcctgcgctcctggaagaggcacctgagccgcttctggaatgacttcctgactggagtcttccctgccagccccctgtcctggctgttcctgttcagcgccatccagctggcctggttcctgcagctggaccccagcctgggcctgatggagaagatcaaggagctgctgcctgactggggcggccagcaccacggcctgcggggcgtgctggccgccgccctgtttgccagctgcctgtggggcgccctgatcttcaccctgcacgtggccctgcggctgctgctgagctaccacggctggctgctggagccccacggggccatgagcagccccaccaagacctggctggccctggtgcgcatcttcagcggccgccaccccatgctgttctcctaccagaggagcctgccccggcagcctgtgcccagcgtgcaggacacagtgaggaagtacctggagagcgtgcggcccatcctgagtgatgaagattttgactggacagctgtgctggcccaggagttcctgcggctgcaggccagcctgctgcagtggtacctgcggctgaagtcctggtgggccagcaactacgtgtctgactggtgggaggagtttgtgtacctgcggagcaggaaccccctgatggtgaacagcaactactacatgatggacttcctgtatgtgacccccacccccctgcaggccgcccgggctggaaatgctgtgcacgccctgctgctgtaccgccaccggctgaaccggcaggagatcccccccaccctgctgatgggcatgaggcccctgtgcagcgcccagtatgagaagatcttcaacaccacccgcatccctggggtgcagaaggactacatccgccacctgcatgacagccagcacgtggccgtgttccaccggggccgcttcttcaggatgggcacccacagcaggaacagcctgctgagcccccgggccctggagcagcagttccagaggatcctggatgaccccagccctgcctgcccccatgaggagcacctggccgccctgacagctgccccccggggcacctgggcccaggtgaggaccagcctgaagacccaggccgctgaggccctggaggccgtggagggcgccgccttctttgtgtccctggatgctgagcccgccggcctgaccagagaagatcctgctgccagcctggatgcctatgcccacgccctgctggccggccggggccatgaccgctggtttgacaagagcttcaccctgattgtgttcagcaatggcaagctgggcctgtctgtggagcacagctgggccgactgccccatcagcggccacatgtgggagttcaccctggccacagagtgcttccagctgggctacagcacagatggccactgcaagggccacccagaccccaccctgccccagccccagaggctgcagtgggacctgcctgaccagatccacagcagcatcagcctggccctgcggggggccaagatcctgtctgaaaatgtggactgccacgtggtgcccttcagcctgtttgggaagagcttcatccgccgctgccacctgagcagtgacagcttcatccagatcgccctgcagctggcccacttccgggaccggggccagttctgcctgacctatgagagcgccatgaccaggctcttcctggagggccgcacagaaacagtgcgcagctgcacccgggaggcctgcaactttgtgcgggccatggaggacaaggagaagacagcagatgaccacggctacggcgtgtcctacatcttcatgggagatggcatgatcaccttccacatcagcagcaagaagagcagcaccaagacagacagccaccggctgggccagcacattgaagatgccctgctggatgtggccagcctcttccaggccggccagcacttcaagaggcgcttccggggcagcggcaaggagaacagccgccaccgctgtggcttcctgagccggcagacaggagccagcaaggcctccatgaccagcacagacttctag

SEQ ID NO: 319211 - DNA, 2145 bp, Artificial Sequence
  derived and/or modified sequence
atggccgaggcccaccaggccgtgggcttccggcccagcctgacctcagatggggccgaggtcgagctgtcggcacccgtgctgcaggagatttatcttagcggtttgcggagttggaaacgccatctgtctcgcttttggaacgacttcttgacgggagtgttccccgcatccccactctcctggctgtttttgttctctgctattcagctggcctggtttttgcagttggatccgagcctgggcctgatggaaaaaatcaaggaacttttgcctgactggggcggtcagcatcatggtctgcgcggggtgctagctgccgccctgtttgcctcctgcttgtggggcgccctcatattcaccctccacgtcgctctccggctcttactgtcttaccacggttggctgctcgagccacatggggccatgagttctcctacaaagacttggctagcactcgtgcgcattttctcaggcaggcatcccatgcttttttcctaccaacgcagcttgccccggcagcctgtgcccagtgtccaggacacagtgagaaagtatctggaatcggtcaggcctatcctcagtgacgaggacttcgactggaccgctgtgctggcccaggagttcctgagactccaggcgtcactgctgcagtggtatttgagattgaagtcttggtgggcttctaattatgtatctgattggtgggaagagttcgtgtatctcagatcacggaatcccttaatggtcaatagcaattactacatgatggacttcctctacgtgacacctacccccttgcaagcagccagagccggcaacgctgtccatgctcttctactttataggcaccgactgaacaggcaagagattccgccaacacttttgatgggtatgaggcctttgtgctccgcccagtatgagaaaatctttaatacgaccagaatcccaggtgtccagaaagactacatcagacatctccatgattcccagcacgtcgccgtgttccatagaggtcgattcttccgaatgggcacacactccaggaacagtctcctctctcctcgcgcactggaacagcagttccagagaattctagacgacccaagccccgcctgtccacacgaggaacacctggcggctctgaccgccgctccacgaggcacttgggcccaggtgaggacatctctgaaaacacaggccgctgaagcactcgaggcggtggaaggtgccgctttctttgtgagcctcgatgcagaacccgccggtctaacgagagaagaccctgccgcatctttggacgcgtacgctcacgcattgttagcgggaaggggccatgacagatggtttgacaaatcctttaccctgatcgtgttctctaacggcaagctgggactctccgtcgaacatagctgggcagactgccccataagcggccacatgtgggaattcaccctggccacagaatgtttccagcttggctacagcaccgacggtcactgcaaaggccaccccgacccgacgctacctcagccacagagactgcaatgggatttgcccgatcagattcatagtagcatcagcttggcccttaggggcgccaagattctgtccgaaaacgtagactgtcacgtggtgccgttctcgttattcgggaagtcgtttatcagacgttgccacctgtcttctgattctttcattcagatcgccctacagctagcccactttagagaccgggggcaattttgtctgacttacgaatctgccatgacccgtttgtttctcgaaggaagaaccgagaccgtgcgttcttgtacccgagaggcctgtaatttcgtgcgcgccatggaagacaaggagaaaaccgccgatgaccatggctatggtgtgtcctatattttcatgggtgacgggatgattactttccacatcagctctaagaaaagttcgacgaagaccgactcccacaggcttggacagcatatcgaagatgcgctgctcgacgttgcgtcgttgttccaggccggacagcatttcaagcgcagatttagagggtctggcaaggaaaactccagacatcgctgtggatttttgtctaggcagaccggagcatcaaaggccagcatgacatccacagatttctag

SEQ ID NO: 319212 - DNA, 2145 bp, Artificial Sequence
  derived and/or modified sequence
atggccgaagcccaccaggcggtgggcttccgtccttccttgacctccgatggagctgaagtagaactgagcgcacccgtgcttcaggaaatctacttgagtggtctgagatcttggaagcgacatctgagtaggttttggaatgactttttgacaggcgtgtttccagcctccccactcagctggcttttcctctttagcgccatacaactggcatggtttctccagcttgacccctcactcgggctcatggagaagattaaggagcttctcccggactggggcggtcagcaccatgggcttcgaggcgtgctggccgctgctctatttgcctcttgtctttggggcgctttgattttcactctgcacgttgctttaagattgctccttagttatcacggatggttgctcgagcctcatggcgcaatgtcctccccaactaagacatggcttgccctggttcgtatctttagtgggcgtcatccaatgctgttctcatatcagcggtcactgcctcgtcagccagtccctagtgttcaagatactgtgcggaaatacctcgagagcgtgcgaccaatcctatctgatgaggacttcgattggacagccgtgctggcacaggaattcctcaggctccaggcttcattattgcagtggtatttgcgtctcaagtcgtggtgggcttccaactacgtgtcagactggtgggaagaatttgtgtatctgcgatccagaaaccccctcatggtcaattcaaactactacatgatggattttctgtacgtgacgccaacacccctccaggccgctcgtgctggaaatgccgtgcatgcactccttctttaccgacataggctgaaccggcaagagatcccccctacgctgctcatgggcatgcgcccattgtgcagtgcccagtatgaaaagatcttcaataccaccagaatccccggagttcagaaagactatatccgccatctgcacgatagccagcacgtggctgtgttccatcgagggcgatttttcagaatgggaacacattctcggaattccttgctgtctccacgagcccttgagcagcagtttcagcgcatactggatgacccctcacccgcatgccctcacgaggagcatctcgcggctctaaccgcggctccacggggtacatgggcccaggtgagaacatccttaaaaacacaggcggctgaggcccttgaagccgtggagggagccgcattttttgtgagtctggatgccgagccagcgggactgacacgggaggaccccgcagcgagcctcgacgcctatgcccacgcgttgctggccggaaggggtcatgacaggtggttcgacaagagctttacccttattgtgttcagtaacggcaagttgggattgtcagtggaacacagctgggcggattgccctatttccggacatatgtgggagttcaccttagccacagagtgttttcagctgggctacagtaccgacggccattgtaaagggcaccccgaccccaccctgccccagcctcagcggttacagtgggacctcccagatcagatccactcttcaatctcactggcccttcggggagctaagattcttagtgaaaacgtggactgtcatgtagtgcctttctcgctgttcggtaaatccttcatcaggcgatgtcacctatccagcgacagttttattcagatagcgctccagctagcacacttccgcgaccggggacaattttgcttgacctacgaaagcgcgatgactagactatttcttgagggaagaacagagacggtccgatcatgtacacgagaggcatgcaatttcgtccgtgctatggaagacaaagagaagaccgcagatgatcacgggtatggcgttagctacatctttatgggtgatggcatgattacctttcatatctctagtaagaagtcaagtacaaagacagattctcaccggctcggtcagcacatcgaagatgcgcttcttgatgtggcctcattgttccaggctgggcagcactttaagaggcgcttcaggggttcagggaaggaaaactccaggcacaggtgcgggttcctctcaaggcaaacgggggctagtaaagccagtatgacatcgactgatttctag

SEQ ID NO: 319213 - DNA, 2500 bp, Artificial Sequence
  derived and/or modified sequence
gagagagaggaatcggggtttctgggtgacggtgatctcggggtgggcaggactccaaaggcccgtcgacccggtggtggactccttgcactgggattggacatatgcaagcgggagatttggggccggcgctcaaaatcggggggcgggggtggactcgggtttggaccccaggatccgatcagcggacccttgattcaacgtgaggtcccgaattgacgtccttccctcaaaacctccgggtctacaaaccaggaccctcaagacccttcagggctccagcgtgacatggctgaagcgcaccaggccgtgggcttccgaccctcgctgacctcggacggggctgaagtggaactcagtgcccctgtgctgcaggagatctacctctctggcctgcgctcctggaaaaggcatctctcacgtttctggaatgactttctcaccggtgtgtttcctgccagccccctcagttggcttttcctcttcagtgccatccagcttgcctggttcctccagctggatccttccttaggactgatggagaagatcaaagagttgctgcctgactggggtggacaacaccacgggctccggggggtcctggcagccgcgctgtttgcctcgtgtttgtggggagccctgatcttcacactgcacgtggccctgaggctgcttctgtcctaccacggctggcttcttgagccccacggagccatgtcctcccccaccaagacctggctggccctggtccgcatcttctctggccgccacccgatgctgttcagttaccagcgctccctgccacgccagcccgtgccctctgtgcaggacaccgtgcgcaagtacctggagtcggtccggcccatcctctccgacgaggacttcgactggaccgcggtcctggcgcaggaattcctgaggctgcaggcgtcgctgctgcagtggtacctgcggctcaagtcctggtgggcgtccaattatgtcagtgactggtgggaggaatttgtgtacctgcgctcccgaaatccgctgatggtgaacagcaactattacatgatggacttcctgtatgtcacacccacgcctctgcaggcagctcgcgctgggaatgccgtccatgccctcctcctgtaccgccaccgcctgaaccgccaggagatacccccgactttgctgatgggaatgcgccccttatgctctgcccagtacgagaagatcttcaacaccacgcggattccaggggtccaaaaagactacatccgccacctccatgacagccaacacgtggctgtcttccaccggggccgattcttccgcatggggacccactcccgaaacagcctgctttccccgagagccctggagcagcagtttcagagaatcctggatgatccctcaccggcctgcccccacgaggaacatctggcagctctgacagctgctcccaggggcacgtgggcccaggtgcggacatccctgaagacccaggcagcggaggccctggaggcggtggaaggggccgctttctttgtgtcactggatgctgagcccgcggggctcaccagggaggacccggcagcgtcgttggatgcctacgcccatgctctgctggccggccggggccatgatcgctggtttgacaaatccttcaccctaatcgtcttctctaacgggaagctgggcctcagcgtggagcactcctgggccgactgccccatctcaggacacatgtgggagttcactctggctacagaatgctttcagctgggctactcaacagacggccactgcaaggggcacccggaccccacactaccccagccccagcggctgcaatgggaccttccagaccagatccactcctccatctctctagccctgaggggagccaagatcttgtctgaaaatgtcgactgccatgtcgttccattctccctatttggcaagagcttcatccgacgctgccacctctcttcagacagcttcatccagatcgccttgcaactggcccacttccgggacaggggtcaattctgcctgacttatgagtcggccatgactcgcttattcctggaaggccggacggagacggtgcggtcttgcacgagggaggcctgcaactttgtcagggccatggaggacaaagagaagacggctgatgaccatggttatggtgtttcttatatcttcatgggggatggcatgatcaccttccacatctccagcaaaaaatcaagcacaaaaacggattcccacaggctggggcagcacattgaggacgcactgctggatgtggcctccctgttccaggcgggacagcattttaagcgccggttcagagggtcagggaaggagaactccaggcacaggtgtggatttctctcccgccagactggggcctccaaggcctcaatgacatccaccgacttctgactccttccagcaggcagctggcctctccaaggaataagggtgaaattgccacagctggctgacacag

SEQ ID NO: 319214 - DNA, 2145 bp, Artificial Sequence
  derived and/or modified sequence
atggccgaggcccaccaggccgtgggcttcagacccagcctgaccagcgacggcgccgaggtggagctgagcgcccccgtgctgcaggagatctacctgagcggcctgagaagctggaagagacacctgagcagattctggaacgacttcctgaccggcgtgttccccgccagccccctgagctggctgttcctgttcagcgccatccagctggcctggttcctgcagctggaccccagcctgggcctgatggagaagatcaaggagctgctgcccgactggggcggccagcaccacggcctgagaggcgtgctggccgccgccctgttcgccagctgcctgtggggcgccctgatcttcaccctgcacgtggccctgagactgctgctgagctaccacggctggctgctggagccccacggcgccatgagcagccccaccaagacctggctggccctggtgagaatcttcagcggcagacaccccatgctgttcagctaccagagaagcctgcccagacagcccgtgcccagcgtgcaggacaccgtgagaaagtacctggagagcgtgagacccatcctgagcgacgaggacttcgactggaccgccgtgctggcccaggagttcctgagactgcaggccagcctgctgcagtggtacctgagactgaagagctggtgggccagcaactacgtgagcgactggtgggaggagttcgtgtacctgagaagcagaaaccccctgatggtgaacagcaactactacatgatggacttcctgtacgtgacccccacccccctgcaggccgccagagccggcaacgccgtgcacgccctgctgctgtacagacacagactgaacagacaggagatcccccccaccctgctgatgggcatgagacccctgtgcagcgcccagtacgagaagatcttcaacaccaccagaatccccggcgtgcagaaggactacatcagacacctgcacgacagccagcacgtggccgtgttccacagaggcagattcttcagaatgggcacccacagcagaaacagcctgctgagccccagagccctggagcagcagttccagagaatcctggacgaccccagccccgcctgcccccacgaggagcacctggccgccctgaccgccgcccccagaggcacctgggcccaggtgagaaccagcctgaagacccaggccgccgaggccctggaggccgtggagggcgccgccttcttcgtgagcctggacgccgagcccgccggcctgaccagagaggaccccgccgccagcctggacgcctacgcccacgccctgctggccggcagaggccacgacagatggttcgacaagagcttcaccctgatcgtgttcagcaacggcaagctgggcctgagcgtggagcacagctgggccgactgccccatcagcggccacatgtgggagttcaccctggccaccgagtgcttccagctgggctacagcaccgacggccactgcaagggccaccccgaccccaccctgccccagccccagagactgcagtgggacctgcccgaccagatccacagcagcatcagcctggccctgagaggcgccaagatcctgagcgagaacgtggactgccacgtggtgcccttcagcctgttcggcaagagcttcatcagaagatgccacctgagcagcgacagcttcatccagatcgccctgcagctggcccacttcagagacagaggccagttctgcctgacctacgagagcgccatgaccagactgttcctggagggcagaaccgagaccgtgagaagctgcaccagagaggcctgcaacttcgtgagagccatggaggacaaggagaagaccgccgacgaccacggctacggcgtgagctacatcttcatgggcgacggcatgatcaccttccacatcagcagcaagaagagcagcaccaagaccgacagccacagactgggccagcacatcgaggacgccctgctggacgtggccagcctgttccaggccggccagcacttcaagagaagattcagaggcagcggcaaggagaacagcagacacagatgcggcttcctgagcagacagaccggcgccagcaaggccagcatgaccagcaccgacttctag

SEQ ID NO: 319215 - DNA, 744 bp, Artificial Sequence
  derived and/or modified sequence
atgctgctgatcctgctgtctgtggccctgctggccctgagcagcgctgagagcagcagtgaagatgtgtcccaggaggagagcctcttcctgatcagcggcaagccagagggcagaagaccccagggcggcaaccagccccagaggcctcctcctcctcctgggaagccccagggccccccaccccagggcggcaaccagagccagggccccccacctcctcctgggaagccagagggccggcccccccagggcggcaaccagagccagggccccccaccccaccctgggaagccagagcggcccccaccccagggcggcaaccagagccagggcaccccacctcctcctgggaagccagagcggcccccaccccagggcggcaaccagagccaccggcccccacctcctcctgggaagccagagcggcccccaccccagggcggcaaccagagccagggccccccaccccaccctgggaagccagagggccccccaccccaggagggcaacaagagccgcagcgcccggagccccccaggcaagccccagggccccccccagcaggagggcaacaagccccagggccccccacctcctgggaagccccagggccccccacctgctgggggcaacccccagcagccccaggcccctcctgctgggaagccccagggccccccacctccaccccagggcggccggccccccaggcctgcccagggccagcagcccccccagtag

SEQ ID NO: 319216 - DNA, 2985 bp, Artificial Sequence
  derived and/or modified sequence
atggccgccagcttcttcagcgacttcggcctgatgtggtacctggaggagctgaagaaggaggagttcagaaagttcaaggagcacctgaagcagatgaccctgcagctggagctgaagcagatcccctggaccgaggtgaagaaggccagcagagaggagctggccaacctgctgatcaagcactacgaggagcagcaggcctggaacatcaccctgagaatcttccagaagatggacagaaaggacctgtgcatgaaggtgatgagagagagaaccggctacaccaagacctaccaggcccacgccaagcagaagttcagcagactgtggagcagcaagagcgtgaccgagatccacctgtacttcgaggaggaggtgaagcaggaggagtgcgaccacctggacagactgttcgcccccaaggaggccggcaagcagcccagaaccgtgatcatccagggcccccagggcatcggcaagaccaccctgctgatgaagctgatgatggcctggagcgacaacaagatcttcagagacagattcctgtacaccttctacttctgctgcagagagctgagagagctgccccccaccagcctggccgacctgatcagcagagagtggcccgaccccgccgcccccatcaccgagatcgtgagccagcccgagagactgctgttcgtgatcgacagcttcgaggagctgcagggcggcctgaacgagcccgacagcgacctgtgcggcgacctgatggagaagagacccgtgcaggtgctgctgagcagcctgctgagaaagaagatgctgcccgaggccagcctgctgatcgccatcaagcccgtgtgccccaaggagctgagagaccaggtgaccatcagcgagatctaccagcccagaggcttcaacgagagcgacagactggtgtacttctgctgcttcttcaaggaccccaagagagccatggaggccttcaacctggtgagagagagcgagcagctgttcagcatctgccagatccccctgctgtgctggatcctgtgcaccagcctgaagcaggagatgcagaagggcaaggacctggccctgacctgccagagcaccaccagcgtgtacagcagcttcgtgttcaacctgttcacccccgagggcgccgagggccccaccccccagacccagcaccagctgaaggccctgtgcagcctggccgccgagggcatgtggaccgacaccttcgagttctgcgaggacgacctgagaagaaacggcgtggtggacgccgacatccccgccctgctgggcaccaagatcctgctgaagtacggcgagagagagagcagctacgtgttcctgcacgtgtgcatccaggagttctgcgccgccctgttctacctgctgaagagccacctggaccacccccaccccgccgtgagatgcgtgcaggagctgctggtggccaacttcgagaaggccagaagagcccactggatcttcctgggctgcttcctgaccggcctgctgaacaagaaggagcaggagaagctggacgccttcttcggcttccagctgagccaggagatcaagcagcagatccaccagtgcctgaagagcctgggcgagagaggcaacccccagggccaggtggacagcctggccatcttctactgcctgttcgagatgcaggaccccgccttcgtgaagcaggccgtgaacctgctgcaggaggccaacttccacatcatcgacaacgtggacctggtggtgagcgcctactgcctgaagtactgcagcagcctgagaaagctgtgcttcagcgtgcagaacgtgttcaagaaggaggacgagcacagcagcaccagcgactacagcctgatctgctggcaccacatctgcagcgtgctgaccaccagcggccacctgagagagctgcaggtgcaggacagcaccctgagcgagagcaccttcgtgacctggtgcaaccagctgagacaccccagctgcagactgcagaagctgggcatcaacaacgtgagcttcagcggccagagcgtgctgctgttcgaggtgctgttctaccagcccgacctgaagtacctgagcttcaccctgaccaagctgagcagagacgacatcagaagcctgtgcgacgccctgaactaccccgccggcaacgtgaaggagctggccctggtgaactgccacctgagccccatcgactgcgaggtgctggccggcctgctgaccaacaacaagaagctgacctacctgaacgtgagctgcaaccagctggacaccggcgtgcccctgctgtgcgaggccctgtgcagccccgacaccgtgctggtgtacctgatgctggccttctgccacctgagcgagcagtgctgcgagtacatcagcgagatgctgctgagaaacaagagcgtgagatacctggacctgagcgccaacgtgctgaaggacgagggcctgaagaccctgtgcgaggccctgaagcaccccgactgctgcctggacagcctgtgcctggtgaagtgcttcatcaccgccgccggctgcgaggacctggccagcgccctgatcagcaaccagaacctgaagatcctgcagatcggctgcaacgagatcggcgacgtgggcgtgcagctgctgtgcagagccctgacccacaccgactgcagactggagatcctgggcctggaggagtgcggcctgaccagcacctgctgcaaggacctggccagcgtgctgacctgcagcaagaccctgcagcagctgaacctgaccctgaacaccctggaccacaccggcgtggtggtgctgtgcgaggccctgagacaccccgagtgcgccctgcaggtgctgggcctgagaaagaccgacttcgacgaggagacccaggccctgctgaccgccgaggaggagagaaaccccaacctgaccatcaccgacgactgcgacaccatcaccagagtggagatctag

SEQ ID NO: 319217 - DNA, 2985 bp, Artificial Sequence
  derived and/or modified sequence
atggcggcttcttttttcagtgattttggcctaatgtggtatctggaagagctgaagaaagaggagttcagaaaattcaaagaacatcttaagcaaatgacgcttcagctggagctgaaacagatcccctggactgaagtcaaaaaggcgagccgagaggagctcgcgaacctactgatcaagcactacgaagagcagcaagcctggaacattacccttcgaatcttccaaaagatggatagaaaggatctgtgcatgaaggtcatgcgcgaaagaaccggttacaccaagacgtaccaggcccacgctaagcagaaatttagccggctgtggagcagtaaaagtgtgacagagatccacctctatttcgaagaggaagtgaagcaggaggagtgtgaccatctggacaggctcttcgctcccaaagaggcaggtaaacaaccccgaacagttattattcagggtcctcaggggattggcaaaaccacccttctgatgaagctgatgatggcgtggtctgataacaagatcttccgcgacagatttctttatacgttttatttctgttgccgggagctgagggagcttcctcccacgtccttggctgacctcatcagtcgcgaatggccagatcccgctgcccccattaccgaaattgtctcccaacccgaacgccttctatttgtgattgacagctttgaggagttgcagggtggattaaacgaacccgatagcgacctatgcggcgacctcatggagaagcgacctgtccaggtgctgctgagctccctgctccggaagaagatgctccccgaggcatccttgcttatagcaatcaagcccgtttgccctaaagagctgagggatcaggtcaccatttccgagatttatcagcctagagggttcaacgagtccgataggctggtgtacttttgctgttttttcaaagatcctaagagggcgatggaagccttcaacctggtgagggagagtgagcaactcttctctatatgtcagatccctctcctttgttggatcttatgcaccagccttaagcaggaaatgcagaaaggtaaagacttggccctgacttgccagtccacaactagtgtgtactccagtttcgtgtttaacctgttcaccccagagggcgccgagggtccgactccccaaacccagcatcagcttaaggccttatgttctctggctgcagaaggcatgtggacagatactttcgaattctgcgaagacgatctgcgccggaacggcgtcgtggatgccgacatacctgcgctcttgggcacaaagatactcttgaagtacggggagagggaatcaagttatgtgtttctccatgtgtgcatccaagaattttgcgcggcactgttctatctcctaaaaagccacctggatcatccacaccctgctgtccgctgcgttcaggaacttctagtggccaactttgaaaaagcccggagagcgcactggatattcctgggttgtttcctcaccgggctgctgaacaagaaagaacaggagaagcttgatgccttttttggtttccagttatctcaggagataaagcaacagattcaccagtgtctcaaaagcctcggagagcgcggtaacccccagggccaggtggactcactggccatattttactgtttatttgagatgcaagacccagcttttgtcaagcaagccgtcaacctgctgcaggaagccaacttccatattatcgataacgtagatctagtggtttccgcttactgcctcaagtactgctcctcgctgaggaaactctgtttcagtgtgcagaatgtgttcaaaaaggaggacgaacacagctcgaccagcgattacagcctgatttgttggcaccacatctgctcggttctcaccaccagtggccaccttagagaattgcaggtccaggactccactctctccgagtcgacatttgtcacttggtgcaatcagctgcggcacccgtcttgcaggcttcagaagctggggattaataatgtcagtttctcgggtcagagcgtcctcctgtttgaggtacttttctaccaaccagatcttaagtatctgtccttcaccctcaccaaactgagccgtgatgacattaggtctctgtgtgacgcattaaattaccctgcagggaatgttaaagagttggcgctggtcaattgccacctatcgccaatcgattgtgaggtgctggctgggctcttgaccaacaacaaaaagctgacctatcttaatgtcagctgcaatcaactcgataccggggtgcccctcctgtgcgaggcgctttgtagtcccgacactgtcctggtttatctgatgctggccttttgccatctcagcgaacaatgctgtgagtacatatcagagatgctgttgcggaataagtcagtgagatacctggacctgagcgcaaacgtgttgaaggatgaaggcctgaaaacgttgtgtgaggctttgaagcaccctgactgctgtcttgatagcttgtgtttagtgaaatgctttatcactgctgcaggttgtgaggatcttgcaagcgctcttatctctaatcagaatttgaagatcctccagatcgggtgcaacgagatcggcgacgtcggcgtccagttgctgtgcagggcccttactcacacggactgcaggcttgaaattctaggcctggaagaatgcggcctcactagcacatgctgcaaggacctggcatctgtactgacatgcagtaagaccctgcagcagcttaatttaacactgaacactctggaccatacaggtgttgtggtgctgtgtgaagccctacgccacccagagtgtgcactgcaggtcctcggcttgcgcaagacagattttgacgaggagactcaggcactgctcaccgctgaagaagaacgcaacccaaaccttactattaccgacgactgcgatacgatcacacgggttgaaatctag

SEQ ID NO: 319218 - DNA, 2985 bp, Artificial Sequence
  derived and/or modified sequence
atggccgccagcttcttcagtgactttggcctgatgtggtacctggaggagctgaagaaggaggagttcaggaagttcaaggagcacctgaagcagatgaccctgcagctggagctgaagcagatcccctggacagaggtgaagaaggccagccgggaggagctggccaacctgctgatcaagcactatgaggagcagcaggcctggaacatcaccctgcgcatcttccagaagatggacaggaaggacctgtgcatgaaggtgatgagggagaggacaggctacaccaagacctaccaggcccacgccaagcagaagttcagccggctgtggagcagcaagtctgtgacagagatccacctgtactttgaggaggaggtgaagcaggaggagtgtgaccacctggaccggctgtttgcccccaaggaggccggcaagcagcccaggacagtcatcatccagggcccccagggcatcggcaagaccaccctgctgatgaagctgatgatggcctggagcgacaacaagatcttccgggaccgcttcctgtacaccttctacttctgctgccgggagctgcgggagctgccccccaccagcctggccgacctgatcagccgggagtggccagaccctgctgcccccatcacagaaattgtgtcccagcctgagcggctgctcttcgtcatcgacagctttgaggagctgcagggcggcctgaatgaaccagacagcgacctgtgtggggacctgatggagaagaggcctgtgcaggtgctgctgagcagcctgctgaggaagaagatgctgcctgaggccagcctgctgattgccatcaagcctgtgtgccccaaggagctgcgggaccaggtgaccatcagcgagatctaccagccccggggcttcaatgaaagtgaccggctggtgtacttctgctgcttcttcaaggaccccaagagggccatggaggccttcaacctggtgcgggagagcgagcagctgttcagcatctgccagatccccctgctgtgctggatcctgtgcaccagcctgaagcaggagatgcagaagggcaaggacctggccctgacctgccagagcaccacctctgtgtacagcagctttgtgttcaacctcttcaccccagagggcgctgagggccccaccccccagacccagcaccagctgaaggccctgtgcagcctggccgctgagggcatgtggacagacacctttgagttctgtgaagatgacctgcggagaaatggagtggtggatgctgacatcccagccctgctgggcaccaagatcctgctgaagtatggagagcgggagagcagctatgtgttcctgcacgtgtgcatccaggagttctgtgccgccctcttctacctgctgaagagccacctggaccacccccaccctgctgtgcgctgtgtgcaggagctgctggtggccaactttgagaaggcccggcgggcccactggatcttcctgggctgcttcctgaccggcctgctgaacaagaaggagcaggagaagctggatgccttcttcggcttccagctgagccaggagatcaagcagcagatccaccagtgcctgaagagcctgggggagcggggcaacccccagggccaggtggacagcctggccatcttctactgcctgtttgagatgcaggaccctgcctttgtgaagcaggccgtgaacctgctgcaggaggccaacttccacatcatcgacaacgtggacctggtggtgtctgcctactgcctgaagtactgcagcagcctgaggaagctgtgcttctctgtgcagaatgtgttcaagaaggaggatgagcacagcagcaccagtgactacagcctcatctgctggcaccacatctgcagcgtgctgaccaccagcggccacctgcgggagctgcaggtgcaggacagcaccctgtctgagagcacctttgtgacctggtgcaaccagctgcggcaccccagctgccgcctgcagaagctgggcatcaacaacgtgtccttcagcggccagagcgtgctgctgtttgaggtgctcttctaccagcctgacctgaagtacctgtccttcaccctgaccaagctgagcagagatgacatccgcagcctgtgtgatgccctgaactacccagctggaaatgtgaaggagctggccctggtgaactgccacctgagccccatcgactgtgaggtgctggccggcctgctgaccaacaacaagaagctgacctacctgaatgtgtcctgcaaccagctggacacaggagtgcccctgctgtgtgaggccctgtgcagcccagacacagtgctggtgtacctgatgctggccttctgccacctgtctgagcagtgctgtgagtacatcagcgagatgctgctgaggaacaagtctgtgcgctacctggacctgagcgccaacgtgctgaaggatgagggcctgaagaccctgtgtgaggccctgaagcacccagactgctgcctggacagcctgtgcctggtgaagtgcttcatcacagctgctggctgtgaggacctggccagcgccctgatcagcaaccagaacctgaagatcctgcagatcggctgcaatgaaattggagatgtgggcgtgcagctgctgtgccgggccctgacccacacagactgccgcctggagatcctgggcctggaggagtgtggcctgaccagcacctgctgcaaggacctggcctctgtgctgacctgcagcaagaccctgcagcagctgaacctgaccctgaacaccctggaccacactggagtggtggtgctgtgtgaggccctgcggcacccagaatgtgccctgcaggtgctgggcctgaggaagacagactttgatgaggagacccaggccctgctgacagctgaggaggagaggaaccccaacctgaccatcacagatgactgtgacaccatcaccagggtggagatctag

SEQ ID NO: 319219 - DNA, 2985 bp, Artificial Sequence
  derived and/or modified sequence
atggccgccagcttcttcagcgacttcggcctgatgtggtacctggaggagcttaaaaaagaagagttccgcaagtttaaggagcacctgaaacagatgactctgcagcttgaactgaagcagatcccttggacagaagtaaaaaaagcctctcgcgaagagttggccaatttgttgatcaagcattatgaagagcagcaggcctggaacattaccctccgaattttccaaaaaatggaccggaaagacctgtgcatgaaggtgatgcgggaaaggacgggctacaccaaaacctaccaggcccacgccaagcagaaattttcacgcctctggtcctccaagtcagttacagagattcacctttactttgaagaggaagttaagcaggaagagtgcgatcatttggaccggctcttcgcaccgaaagaggcaggcaaacagcccaggactgtcataatccaggggccacagggcataggaaaaactacactgttgatgaagttaatgatggcctggtctgataacaaaattttccgcgatcggtttctctacaccttctatttctgctgtcgagaacttagggagctcccaccgacttccttggcggacctgatcagccgagagtggcccgaccctgccgcaccaatcaccgaaatcgtgtcccaacccgagcggctgctttttgtgatagatagcttcgaggagcttcaaggtggactgaatgagccagattctgacctgtgcggggatctgatggaaaaaaggcccgtgcaggtcctcctttcctctctgctgaggaagaaaatgttaccagaagcctccctgctgatcgcaatcaagcccgtctgcccaaaagaactccgcgaccaggtgaccatctcagagatttatcagccaaggggattcaacgaaagcgataggttagtgtatttttgctgcttcttcaaggatccgaaaagggctatggaggcttttaacctggtgcgcgagtcagagcagctgttctctatctgccagatcccactgctctgttggattttgtgtacctcactgaaacaagagatgcagaaggggaaggacttggcgctcacctgccaaagcacaacaagcgtctattcttcctttgtttttaatttattcactcccgagggcgctgaggggcccactccacagacccagcaccagctaaaggctttgtgctcactggctgccgaggggatgtggaccgatacttttgaattttgcgaagatgatttgcggcgcaatggcgttgtagacgccgacatacctgcactgctgggtactaaaatactgctgaaatacggagaaagagagtccagctacgtcttccttcacgtatgcattcaggagttttgtgccgctctgttttacctcctgaagtctcatctagaccatccacatccagcagttcgatgtgtgcaggaattgctggtggcaaatttcgagaaggctcgcagagcacactggatttttctggggtgcttcctgacaggcctactgaataaaaaagaacaggagaaactggacgccttttttgggtttcaactgagtcaggagataaagcagcaaattcatcaatgccttaagagcctgggcgagaggggcaacccccaaggacaggtcgactccctcgctatcttttattgcctcttcgagatgcaggaccctgcgtttgtcaaacaggccgtgaatctgctgcaggaggctaacttccatataatagacaacgtcgatctagtcgtatccgcttactgtcttaagtactgtagcagcctgcgaaagctctgttttagtgtgcagaacgtgtttaagaaagaggacgaacactcgtccacaagcgactattccctgatttgctggcatcatatttgttccgtactgacgacgagcggccatctgcgggaattacaggtccaggattctacactgtccgaatcaaccttcgtgacctggtgtaaccagctgcggcacccctcttgccggctccagaaactggggataaacaatgtttcattcagcggacagtccgtgctgctttttgaggtccttttctatcaacctgatcttaaatatctttctttcacactgaccaagctgtccagagacgatatcaggtcactgtgcgatgcccttaattaccctgctgggaacgtgaaagagctcgctcttgtgaattgtcacctgagccccatagactgcgaagtgctcgcaggactgctgactaacaacaagaaactgacgtatctaaacgtcagttgtaaccagttagatacgggggtcccactgctctgtgaggccctctgttcacccgataccgtgctcgtgtatcttatgctcgcattttgccatctatccgagcagtgttgcgaatacatctccgaaatgctgctgaggaataaatccgttaggtatctggacctctccgcaaatgtcctgaaagatgaaggtctgaagactttatgtgaggccctaaagcatcccgattgctgcctggatagcctttgccttgtgaagtgttttatcactgcagcaggctgtgaggacctggccagcgccctgataagcaaccagaacctgaaaatcctgcagatcgggtgtaacgagattggtgacgtgggggtgcagctactttgtagagctctgacccacaccgactgtaggctcgagatactcggtctcgaggagtgcggcctgacatccacatgttgcaaggatctggcctctgttctgacgtgctcaaaaactctacagcagctgaacctgactctaaacaccctcgatcatacgggcgttgtggtgctgtgtgaagcacttagacatccagagtgcgcactccaagttcttgggctacggaaaactgacttcgacgaggaaacccaggccctcttgactgccgaggaagaacgcaatcctaatctcacaatcactgatgactgtgatacgatcactagggtagaaatctag

SEQ ID NO: 319220 - DNA, 2985 bp, Artificial Sequence
  derived and/or modified sequence
atggccgcttcgttttttagcgattttggtcttatgtggtacctcgaggagctgaagaaagaagagttccggaagttcaaagagcatcttaaacaaatgacattacagctagagctgaagcagatcccctggacagaggtcaaaaaggcaagccgagaggaactggctaacctgctcattaagcattacgaagaacagcaggcctggaatatcacactcagaatttttcaaaagatggatcgaaaggacctgtgcatgaaggtgatgcgagagagaacaggttatacaaaaacctatcaggcgcacgccaagcagaagtttagccgactgtggagctcaaagagtgtgacagaaattcacctgtatttcgaggaggaggtgaagcaggaagagtgcgaccacttagataggctctttgcccctaaagaggccggtaagcagccacggactgtgatcattcaggggcctcagggaattggcaagactacgctccttatgaagttgatgatggcttggtctgacaacaaaattttcagggatcggttcctgtataccttttacttctgttgtcgggagcttcgggagctcccgccaacaagcttggccgatttaatctcgcgagaatggcccgatcccgctgccccaatcaccgagatagtgagtcaaccagagcgtcttctctttgtgatcgactcatttgaagaactgcagggaggcctaaacgagcccgactccgacctgtgcggcgacctaatggagaagcgacccgtgcaggttctgctgtcctccctgctgcgaaaaaaaatgctccctgaagcgtcactgctgatagccatcaagcccgtgtgcccaaaggaactgagagaccaggtgactataagtgaaatttatcagccaagaggtttcaacgaaagtgatcggttggtttacttttgttgcttcttcaaggacccaaaaagggccatggaagcattcaacctcgtccgggagagtgagcaactcttcagcatttgtcagattcctctgttgtgctggatcctttgtacgagccttaaacaggaaatgcagaaaggaaaggacctggccttgacatgccaaagcacaacaagcgtgtactctagttttgtgtttaatctgtttactcctgagggtgccgaaggaccaactccacagactcagcaccagcttaaagccctgtgctctctcgcggctgaagggatgtggactgacacctttgagttttgtgaggatgatttgcggagaaatggtgttgttgacgctgatatacctgcgctcctgggcacaaaaatcctgctgaagtacggagagcgtgaatcgtcttacgtgtttttgcatgtgtgcatacaggagttttgcgcggctttattttacctccttaagagtcatctcgatcatcctcaccccgctgtgagatgtgtacaggaactgcttgtggccaactttgagaaagctagaagagcgcactggattttccttggctgttttctgacgggattgttaaataaaaaagagcaggaaaagttggacgcctttttcggctttcagttgagccaggaaatcaaacagcaaatccaccaatgtcttaaaagccttggcgaacggggtaatccacagggccaagtcgattcactggctatcttctattgcctgtttgaaatgcaggaccctgctttcgttaagcaggcagtgaatttgctccaggaggccaattttcatataattgataatgtcgacctggtggtgtctgcctattgcctaaagtattgctcatccctccggaaactctgcttttccgtccaaaacgtcttcaagaaagaagacgagcatagctccacttcagactattctctcatatgctggcaccacatctgttccgtgctcaccacgtcaggtcatctgcgagagctacaggtgcaggacagtaccctcagtgagagtaccttcgttacatggtgtaatcagctccgtcaccctagttgccgtctccagaaattgggcatcaacaacgtcagtttctccggtcaaagtgtgctgctgtttgaagtgctgttttatcagcccgatctgaaatatttgagcttcaccttgacaaaactttccagagatgatattcgatcactgtgtgatgccctaaattaccccgcaggaaacgtgaaggagctggctctagtcaactgtcacttgagtcctattgattgcgaggtcctggctggacttctcacaaataacaagaaattgacatacctgaacgtgtcctgcaatcaactggataccggagttcctcttttgtgtgaagccctgtgctctcccgatacggtcctggtatacctgatgctggcattttgccatctatctgagcaatgttgcgaatatatcagtgagatgctacttcggaacaaaagcgttcgttatttggacctctccgcgaacgtgttgaaagatgaaggccttaaaacgctgtgcgaggctctgaaacaccccgattgttgtttggatagtctctgtctggtgaaatgtttcattaccgccgctggctgtgaagatcttgccagcgccttaatcagtaatcagaatctgaagatcctccagataggttgtaacgagattggggatgttggggtgcaactgctgtgcagggcgctgacacacaccgactgcagactcgaaatactgggattagaggaatgcggacttaccagcacttgttgtaaggatctggcaagcgtgctgacatgttctaaaaccctgcagcaactgaacctgaccctgaacactttagatcacaccggagtggtggtgctgtgtgaagctctacgacatcctgaatgcgcactccaggtgcttggattgcgcaagacagactttgatgaggaaacgcaggctctgcttacggccgaggaggaacgaaatcccaacctcacgatcaccgatgactgtgatactatcacaagagtggaaatttag

SEQ ID NO: 319221 - protein, 938 aa, Artificial Sequence
  derived and/or modified sequence
MAASFFSDFGLMWYLEELKKEEFRKFKEHLKQMTLQLELKQIPWTEVKKASREELANLLIKHYEEQQAWNITLRIFQKMDRKDLCMKVMRERTGYTKTYQAHAKQKFSRLWSSKSVTEIHLYFEEEVKQEECDHLDRLFAPKEAGKQPRTVIIQGPQGIGKTTLLMKLMMAWSDNKIFRDRFLYTFYFCCRELRELPPTSLADLISREWPDPAAPITEIVSQPERLLFVIDSFEELQGGLNEPDSDLCGDLMEKRPVQVLLSSLLRKKMLPEASLLIAIKPVCPKELRDQVTISEIYQPRGFNESDRLVYFCCFFKDPKRAMEAFNLVRESEQLFSICQIPLLCWILCTSLKQEMQKGKDLALTCQSTTSVYSSFVFNLFTPEGAEGPTPQTQHQLKALCSLAAEGMWTDTFEFCEDDLRRNGVVDADIPALLGTKILLKYGERESSYVFLHVCIQEFCAALFYLLKSHLDHPHPAVRCVQELLVANFEKARRAHWIFLGCFLTGLLNKKEQEKLDAFFGFQLSQEIKQQIHQCLKSLGERGNPQGQVDSLAIFYCLFEMQDPAFVKQAVNLLQEANFHIIDNVDLVVSAYCLKYCSSLRKLCFSVQNVFKKEDEHSSTSDYSLICWHHICSVLTTSGHLRELQVQDSTLSESTFVTWCNQLRHPSCRLQKLGINNVSFSGQSVLLFEVLFYQPDLKYLSFTLTKLSRDDIRSLCDALNYPAGNVKELALAFCHLSEQCCEYISEMLLRNKSVRYLDLSANVLKDEGLKTLCEALKHPDCCLDSLCLVKCFITAAGCEDLASALISNQNLKILQIGCNEIGDVGVQLLCRALTHTDCRLEILGLEECGLTSTCCKDLASVLTCSKTLQQLNLTLNTLDHTGVVVLCEALRHPECALQVLGLRKTDFDEETQALLTAEEERNPNLTITDDCDTITRVEI

SEQ ID NO: 319222 - DNA, 2817 bp, Artificial Sequence
  derived and/or modified sequence
atggccgccagcttcttcagcgacttcggcctgatgtggtacctggaggagctgaagaaggaggagttcagaaagttcaaggagcacctgaagcagatgaccctgcagctggagctgaagcagatcccctggaccgaggtgaagaaggccagcagagaggagctggccaacctgctgatcaagcactacgaggagcagcaggcctggaacatcaccctgagaatcttccagaagatggacagaaaggacctgtgcatgaaggtgatgagagagagaaccggctacaccaagacctaccaggcccacgccaagcagaagttcagcagactgtggagcagcaagagcgtgaccgagatccacctgtacttcgaggaggaggtgaagcaggaggagtgcgaccacctggacagactgttcgcccccaaggaggccggcaagcagcccagaaccgtgatcatccagggcccccagggcatcggcaagaccaccctgctgatgaagctgatgatggcctggagcgacaacaagatcttcagagacagattcctgtacaccttctacttctgctgcagagagctgagagagctgccccccaccagcctggccgacctgatcagcagagagtggcccgaccccgccgcccccatcaccgagatcgtgagccagcccgagagactgctgttcgtgatcgacagcttcgaggagctgcagggcggcctgaacgagcccgacagcgacctgtgcggcgacctgatggagaagagacccgtgcaggtgctgctgagcagcctgctgagaaagaagatgctgcccgaggccagcctgctgatcgccatcaagcccgtgtgccccaaggagctgagagaccaggtgaccatcagcgagatctaccagcccagaggcttcaacgagagcgacagactggtgtacttctgctgcttcttcaaggaccccaagagagccatggaggccttcaacctggtgagagagagcgagcagctgttcagcatctgccagatccccctgctgtgctggatcctgtgcaccagcctgaagcaggagatgcagaagggcaaggacctggccctgacctgccagagcaccaccagcgtgtacagcagcttcgtgttcaacctgttcacccccgagggcgccgagggccccaccccccagacccagcaccagctgaaggccctgtgcagcctggccgccgagggcatgtggaccgacaccttcgagttctgcgaggacgacctgagaagaaacggcgtggtggacgccgacatccccgccctgctgggcaccaagatcctgctgaagtacggcgagagagagagcagctacgtgttcctgcacgtgtgcatccaggagttctgcgccgccctgttctacctgctgaagagccacctggaccacccccaccccgccgtgagatgcgtgcaggagctgctggtggccaacttcgagaaggccagaagagcccactggatcttcctgggctgcttcctgaccggcctgctgaacaagaaggagcaggagaagctggacgccttcttcggcttccagctgagccaggagatcaagcagcagatccaccagtgcctgaagagcctgggcgagagaggcaacccccagggccaggtggacagcctggccatcttctactgcctgttcgagatgcaggaccccgccttcgtgaagcaggccgtgaacctgctgcaggaggccaacttccacatcatcgacaacgtggacctggtggtgagcgcctactgcctgaagtactgcagcagcctgagaaagctgtgcttcagcgtgcagaacgtgttcaagaaggaggacgagcacagcagcaccagcgactacagcctgatctgctggcaccacatctgcagcgtgctgaccaccagcggccacctgagagagctgcaggtgcaggacagcaccctgagcgagagcaccttcgtgacctggtgcaaccagctgagacaccccagctgcagactgcagaagctgggcatcaacaacgtgagcttcagcggccagagcgtgctgctgttcgaggtgctgttctaccagcccgacctgaagtacctgagcttcaccctgaccaagctgagcagagacgacatcagaagcctgtgcgacgccctgaactaccccgccggcaacgtgaaggagctggccctggccttctgccacctgagcgagcagtgctgcgagtacatcagcgagatgctgctgagaaacaagagcgtgagatacctggacctgagcgccaacgtgctgaaggacgagggcctgaagaccctgtgcgaggccctgaagcaccccgactgctgcctggacagcctgtgcctggtgaagtgcttcatcaccgccgccggctgcgaggacctggccagcgccctgatcagcaaccagaacctgaagatcctgcagatcggctgcaacgagatcggcgacgtgggcgtgcagctgctgtgcagagccctgacccacaccgactgcagactggagatcctgggcctggaggagtgcggcctgaccagcacctgctgcaaggacctggccagcgtgctgacctgcagcaagaccctgcagcagctgaacctgaccctgaacaccctggaccacaccggcgtggtggtgctgtgcgaggccctgagacaccccgagtgcgccctgcaggtgctgggcctgagaaagaccgacttcgacgaggagacccaggccctgctgaccgccgaggaggagagaaaccccaacctgaccatcaccgacgactgcgacaccatcaccagagtggagatctag

SEQ ID NO: 319223 - DNA, 2817 bp, Artificial Sequence
  derived and/or modified sequence
atggctgctagcttctttagtgatttcgggcttatgtggtacctcgaagaattaaaaaaggaagaattcagaaaattcaaggaacacttgaaacagatgacactgcaactggagctaaaacagattccatggaccgaagtgaaaaaggccagccgagaggagttagcgaatttacttattaagcactatgaagaacagcaagcgtggaatataactctgcgaatcttccagaagatggaccgaaaggacctctgtatgaaagtcatgcgggaacgaactggctacaccaaaacatatcaggcccacgctaaacagaaattctctcgtttgtggtccagcaaatccgtcaccgagatccacctctactttgaagaggaggtgaagcaggaagagtgcgatcaccttgatagactgtttgcaccgaaagaagccggcaaacagcctagaacagtgatcatccagggaccccagggcatcggcaaaaccaccctgctgatgaagctgatgatggcctggtccgacaacaagatatttagggatagattcttatacacattttacttttgttgccgggaactgagagaattacctcctactagcctggctgacctgatttcgagggagtggccggatccagccgctccaatcactgagattgtgagccaacccgaaaggctcctgttcgttattgatagttttgaggaactgcagggcgggctaaatgaacctgatagtgacctgtgtggcgatctcatggaaaagcggcctgtccaggttttgctgagcagtctcctaagaaaaaagatgctgcctgaggctagtctgttgattgctatcaagcccgtgtgccctaaagagctgcgcgaccaagtgaccattagtgaaatttaccagccccggggcttcaacgaatctgaccgactggtgtacttttgttgcttttttaaagacccaaagcgtgcaatggaagccttcaacctggtccgcgaaagcgagcagctctttagcatttgtcaaatcccgctcctgtgttggatactgtgcacctctctgaagcaggagatgcagaagggaaaggacttagcactcacatgccagtctaccactagcgtctacagcagctttgtctttaacctcttcacgccggagggagcagaaggtcctacacctcagacacaacatcagctgaaagccttatgctctctggctgcggagggaatgtggaccgatacttttgagttttgcgaggacgatttaaggcgcaacggagtcgttgacgcagatatcccggctttactgggcaccaagatcctactcaagtatggtgaacgtgagtctagctatgtgtttctgcacgtgtgcatccaggagttttgtgccgccctcttttacctgctgaagagccatctcgatcacccacatccagccgtgaggtgtgtacaggaactgttggttgccaacttcgagaaagcccgtagagcacattggatatttttgggatgctttctgaccggcctgctgaacaagaaagagcaggagaagttggacgccttcttcgggtttcaattgagccaggaaattaaacaacagatccaccagtgtcttaagtctcttggggagagaggaaatccacaaggacaagtagattccttagccattttctattgccttttcgagatgcaggatcccgcctttgttaagcaggctgtcaacctactccaggaggccaacttccacattatagataacgtagacctggtggtgtccgcttactgtttaaaatattgtagctctctgagaaaactttgcttcagtgtacaaaatgtgtttaaaaaagaggacgaacatagctctaccagcgactactccctgatttgctggcatcacatttgctcagtcctcaccacaagtgggcacttacgtgagctgcaggtgcaggactcaactctgagcgaaagtacttttgtcacttggtgcaatcagctacgccatccatcatgtaggctgcaaaagctggggataaataacgtgtctttctcagggcaaagtgtccttctgttcgaggtgctgttctaccagccggatctgaaatatctgtcgttcactctgaccaaactctctcgggatgatatcaggtccctgtgtgatgctttgaattatcccgccggcaatgtcaaagagctcgccctggccttttgccatcttagcgaacagtgctgtgaatatatttctgagatgttactccgcaataagtcagttcgatatctggatctcagcgccaacgtgctaaaggacgaagggttgaagaccctttgtgaagctcttaaacatccagactgctgtctggatagtctctgtctggtcaagtgcttcatcaccgctgccggctgtgaggatttagcctcggcccttatctctaatcaaaacctaaaaatcctgcagattggttgcaatgaaattggcgacgtgggggtccagctgctctgtagagcgctcactcacacagactgccgcctcgagattctcggcctcgaggaatgcgggctgacctctacatgctgtaaggatctggcctctgtcctaacctgcagtaaaacgctgcaacagcttaatctcacgctgaatactctggatcatactggcgtggtggtgctgtgcgaggctcttcgccatcccgaatgtgccctgcaggttctgggcttacgtaagacggactttgacgaagaaactcaggccctgctaaccgctgaggaggagcgcaaccccaatctcaccatcaccgatgactgcgataccatcacacgggtggaaatttag

SEQ ID NO: 319224 - DNA, 2817 bp, Artificial Sequence
  derived and/or modified sequence
atggccgccagcttcttcagtgactttggcctgatgtggtacctggaggagctgaagaaggaggagttcaggaagttcaaggagcacctgaagcagatgaccctgcagctggagctgaagcagatcccctggacagaggtgaagaaggccagccgggaggagctggccaacctgctgatcaagcactatgaggagcagcaggcctggaacatcaccctgcgcatcttccagaagatggacaggaaggacctgtgcatgaaggtgatgagggagaggacaggctacaccaagacctaccaggcccacgccaagcagaagttcagccggctgtggagcagcaagtctgtgacagagatccacctgtactttgaggaggaggtgaagcaggaggagtgtgaccacctggaccggctgtttgcccccaaggaggccggcaagcagcccaggacagtcatcatccagggcccccagggcatcggcaagaccaccctgctgatgaagctgatgatggcctggagcgacaacaagatcttccgggaccgcttcctgtacaccttctacttctgctgccgggagctgcgggagctgccccccaccagcctggccgacctgatcagccgggagtggccagaccctgctgcccccatcacagaaattgtgtcccagcctgagcggctgctcttcgtcatcgacagctttgaggagctgcagggcggcctgaatgaaccagacagcgacctgtgtggggacctgatggagaagaggcctgtgcaggtgctgctgagcagcctgctgaggaagaagatgctgcctgaggccagcctgctgattgccatcaagcctgtgtgccccaaggagctgcgggaccaggtgaccatcagcgagatctaccagccccggggcttcaatgaaagtgaccggctggtgtacttctgctgcttcttcaaggaccccaagagggccatggaggccttcaacctggtgcgggagagcgagcagctgttcagcatctgccagatccccctgctgtgctggatcctgtgcaccagcctgaagcaggagatgcagaagggcaaggacctggccctgacctgccagagcaccacctctgtgtacagcagctttgtgttcaacctcttcaccccagagggcgctgagggccccaccccccagacccagcaccagctgaaggccctgtgcagcctggccgctgagggcatgtggacagacacctttgagttctgtgaagatgacctgcggagaaatggagtggtggatgctgacatcccagccctgctgggcaccaagatcctgctgaagtatggagagcgggagagcagctatgtgttcctgcacgtgtgcatccaggagttctgtgccgccctcttctacctgctgaagagccacctggaccacccccaccctgctgtgcgctgtgtgcaggagctgctggtggccaactttgagaaggcccggcgggcccactggatcttcctgggctgcttcctgaccggcctgctgaacaagaaggagcaggagaagctggatgccttcttcggcttccagctgagccaggagatcaagcagcagatccaccagtgcctgaagagcctgggggagcggggcaacccccagggccaggtggacagcctggccatcttctactgcctgtttgagatgcaggaccctgcctttgtgaagcaggccgtgaacctgctgcaggaggccaacttccacatcatcgacaacgtggacctggtggtgtctgcctactgcctgaagtactgcagcagcctgaggaagctgtgcttctctgtgcagaatgtgttcaagaaggaggatgagcacagcagcaccagtgactacagcctcatctgctggcaccacatctgcagcgtgctgaccaccagcggccacctgcgggagctgcaggtgcaggacagcaccctgtctgagagcacctttgtgacctggtgcaaccagctgcggcaccccagctgccgcctgcagaagctgggcatcaacaacgtgtccttcagcggccagagcgtgctgctgtttgaggtgctcttctaccagcctgacctgaagtacctgtccttcaccctgaccaagctgagcagagatgacatccgcagcctgtgtgatgccctgaactacccagctggaaatgtgaaggagctggccctggccttctgccacctgtctgagcagtgctgtgagtacatcagcgagatgctgctgaggaacaagtctgtgcgctacctggacctgagcgccaacgtgctgaaggatgagggcctgaagaccctgtgtgaggccctgaagcacccagactgctgcctggacagcctgtgcctggtgaagtgcttcatcacagctgctggctgtgaggacctggccagcgccctgatcagcaaccagaacctgaagatcctgcagatcggctgcaatgaaattggagatgtgggcgtgcagctgctgtgccgggccctgacccacacagactgccgcctggagatcctgggcctggaggagtgtggcctgaccagcacctgctgcaaggacctggcctctgtgctgacctgcagcaagaccctgcagcagctgaacctgaccctgaacaccctggaccacactggagtggtggtgctgtgtgaggccctgcggcacccagaatgtgccctgcaggtgctgggcctgaggaagacagactttgatgaggagacccaggccctgctgacagctgaggaggagaggaaccccaacctgaccatcacagatgactgtgacaccatcaccagggtggagatctag

SEQ ID NO: 319225 - DNA, 2817 bp, Artificial Sequence
  derived and/or modified sequence
atggccgccagcttcttcagcgacttcggcctgatgtggtacctggaggagcttaaaaaagaggaattccgcaaattcaaggagcaccttaagcagatgactttacagctggagctgaagcagatcccctggacggaagtgaagaaagcttcacgggaggaactcgccaaccttctgattaagcattatgaagagcaacaggcctggaatattacacttaggattttccaaaaaatggaccggaaagacctttgcatgaaagtgatgcgcgagagaactggttataccaaaacataccaggctcatgccaaacaaaagttctcaaggctctggtcttcaaaaagcgttacagaaatccacctctactttgaagaagaagtcaaacaggaggagtgtgatcacctagacaggctatttgctccaaaggaggccggcaagcagcctagaactgttattattcaaggacctcagggaattggcaagacaactttacttatgaaactgatgatggcttggtctgacaacaagatcttcagagaccggttcctgtatactttttacttttgttgtcgcgaactgcgagaacttcccccgacctcgctcgccgatctgatctcacgggagtggcccgatccagctgcacccattacggagatcgtgtcacagcccgaaagactattgttcgtcatcgactctttcgaagagctgcagggcggattaaacgagcctgactccgatttgtgtggagacctgatggagaagaggcctgtgcaggtgttactgagcagcctactacgaaagaagatgcttccggaggctagcctattaattgccatcaagcccgtctgccctaaggagctgcgagaccaggtgaccattagtgaaatctaccagccccgagggttcaacgagagcgataggttggtttatttctgttgttttttcaaagacccgaagagagcaatggaagcatttaacctcgttagggagagcgagcaacttttttcaatttgtcagatcccattgctctgttggatcctctgtacaagcttgaaacaggagatgcagaagggtaaggatttggcccttacatgtcagtcaacaacaagtgtgtatagctcattcgtcttcaacctgttcaccccagaaggcgccgagggaccaaccccacaaacccagcatcagcttaaggcactgtgttcccttgccgctgaaggcatgtggacagacaccttcgagttctgcgaagatgacctcagacgcaatggggtagtggatgcagacattccagcgctcctcggtacaaagatccttctaaagtatggcgaaagagagtctagctacgtattccttcacgtgtgtattcaggagttttgcgccgcactattttacctactaaaatctcacctggatcatccccacccagcagtaaggtgtgtgcaagaactcttagttgcaaatttcgagaaggcacgccgggctcactggattttcctcggatgcttcttgactggactgctgaataagaaggagcaggaaaaacttgacgctttctttggttttcagttgtcgcaagagattaaacagcaaattcatcagtgtctcaaaagtctcggcgaacgaggcaacccccagggtcaagtggactcactagcgattttttactgcctatttgaaatgcaggacccagctttcgtgaaacaggcagttaacctgctgcaggaggcaaattttcacataatcgataatgttgacctggtggttagtgcgtactgtctgaaatactgttcttccctgcgcaaactgtgcttctctgtccagaacgtgtttaagaaagaggacgaacactctagtaccagcgactactcccttatctgttggcatcacatctgtagcgtccttacaacaagcggccacctgcgcgagctgcaggtccaggacagtacgctgtccgaaagtacattcgtgacttggtgcaatcagctccggcaccccagctgccgcctacagaagctggggatcaataacgtgagtttcagcggtcagtctgttttgttatttgaagtactgttttaccagccagatctcaagtacctgtctttcaccctgaccaaactgtctcgggacgacattcgctcactctgcgacgccctcaactacccggcaggaaatgtaaaggagctggcactggccttttgccaccttagcgaacaatgttgcgagtacatttccgaaatgctgctgcgtaataaatcagttcgatatctcgacctatccgcaaatgttcttaaggacgaggggctcaagacattatgcgaagcccttaaacacccagattgctgtctggactccctatgtcttgtcaaatgctttattacagcggccggttgtgaagacttggccagcgcattgatttccaatcaaaacttgaagatccttcagatcggctgtaatgagataggcgacgtgggcgtccagctgctgtgtcgtgctctgactcacacagattgcagactcgagatcctgggactggaggaatgtggactcacctccacatgctgcaaggatctggcgtcagtccttacttgttccaaaactctgcagcagctgaacttaactctgaacactctagaccacaccggtgtagtcgtgctgtgcgaagctcttcgacacccagagtgcgccctgcaagtgctcggactgcgcaaaactgattttgatgaggaaacgcaggcactgctgactgccgaggaggaacgtaaccctaatttgacgataactgatgattgcgacactattacacgcgtggagatttag

SEQ ID NO: 319226 - DNA, 3504 bp, Artificial Sequence
  derived and/or modified sequence
gtgctgggctgttcgtctcttctatgtgctgatttcctgggttactttgggtcttccttttctttctcccttttaccctgtctcctttcttgaggctgatcgatcacagccaggcctctccattctatttacccagcgttttccttctctccagttagtggggtagatgaacgccctgtgtttataaggtgcctcccaggagcctgagacctgtgagaagaatggggggtggaggtgggggagactcgtcacgaagggagaccttggagcttcgagggtgggaatgttcttattagattcttcatctctgttgacacaaacatgtaggagaagctggagaacatagacagggatgaggttttatttatttattgttcctggtcactgtctctttgaggattggtatctctgctccagaaaagatggcagcctctttcttctctgattttggtcttatgtggtatctggaggagctcaaaaaggaggagttcaggaaatttaaagaacatctcaagcaaatgactttgcagcttgaactcaagcagattccctggactgaggtcaaaaaagcatcccgggaagaacttgcaaacctcttgatcaagcactatgaagaacaacaagcttggaacataaccttaagaatctttcaaaagatggatagaaaggatctctgcatgaaggtcatgagggagagaacaggatacacaaagacctatcaagctcacgcaaagcagaaattcagccgcttatggtccagcaagtctgtcactgagattcacctatactttgaggaggaagtcaagcaagaagaatgtgaccatttggaccgcctttttgctcccaaggaagctgggaaacagccacgtacagtgatcattcaaggaccacaaggaattggaaaaacgacactcctgatgaagctgatgatggcctggtcggacaacaagatctttcgggataggttcctgtacacgttctatttctgctgcagagaactgagggagttgccgccaacgagtttggctgacttgatttccagagagtggcctgaccccgctgctcctataacagagatcgtgtctcaaccggagagactcttgttcgtcatcgacagcttcgaagagctgcagggcggcttgaacgaacccgattcggatctgtgtggtgacttgatggagaaacggccggtgcaggtgcttctgagcagtttgctgaggaagaagatgctcccggaggcctccctgctcatcgctatcaaacccgtgtgcccgaaggagctccgggatcaggtgacgatctcagaaatctaccagccccggggattcaacgagagtgataggttagtgtatttctgctgtttcttcaaagacccgaaaagagccatggaagccttcaatcttgtaagagaaagtgaacagctgttttccatatgccaaatcccgctcctctgctggatcctgtgtaccagtctgaagcaagagatgcagaaaggaaaagacctggccctgacctgccagagcactacctctgtgtactcctctttcgtctttaacctgttcacacctgagggtgccgagggcccgactccgcaaacccagcaccagctgaaggccctgtgctccctggctgcagagggtatgtggacagacacatttgagttttgtgaagacgacctccggagaaatggggttgttgacgctgacatccctgcgctgctgggcaccaagatacttctgaagtacggggagcgtgagagctcctacgtgttcctccacgtgtgtatccaggagttctgtgccgccttgttctatttgctcaagagccaccttgatcatcctcacccagctgtgagatgtgtacaggaattgctagttgccaattttgaaaaagcaaggagagcacattggatttttttggggtgttttctaactggccttttaaataaaaaggaacaagaaaaactggatgcgttttttggcttccaactgtcccaagagataaagcagcaaattcaccagtgcctgaagagcttaggggagcgtggcaatcctcagggacaggtggattccttggcgatattttactgtctctttgaaatgcaggatcctgcctttgtgaagcaggcagtgaacctcctccaagaagctaactttcatattattgacaacgtggacttggtggtttctgcctactgcttaaaatactgctccagcttgaggaaactctgtttttccgttcaaaatgtctttaagaaagaggatgaacacagctctacgtcggattacagcctcatctgttggcatcacatctgctctgtgctcaccaccagcgggcacctcagagagctccaggtgcaggacagcaccctcagcgagtcgacctttgtgacctggtgtaaccagctgaggcatcccagctgtcgccttcagaagcttggaataaataacgtttccttttctggccagagtgttctgctctttgaggtgctcttttatcagccagacttgaaatacctgagcttcaccctcacgaaactctctcgtgatgacatcaggtccctctgtgatgccttgaactacccagcaggcaacgtcaaagagctagcgttggctttctgccacctcagcgagcagtgctgcgaatacatctctgaaatgcttctgcgtaacaagagcgtgcgctatctagacctcagtgccaatgtcctgaaggacgaaggactgaaaactctctgcgaggccttgaaacatccggactgctgcctggattcactgtgtttggtaaaatgttttatcactgctgctggctgtgaagacctcgcctctgctctcatcagcaatcaaaacctgaagattctgcaaattgggtgcaatgaaatcggagatgtgggtgtgcagctgttgtgtcgggctctgacgcatacggattgccgcttagagattcttgggttggaagaatgtgggttaacgagcacctgctgtaaggatctcgcgtctgttctcacctgcagtaagaccctgcagcagctcaacctgaccttgaacaccttggaccacacaggggtggttgtactctgtgaggccctgagacacccagagtgtgccctgcaggtgctcgggctgagaaaaactgattttgatgaggaaacccaggcacttctgacggctgaggaagagagaaatcctaacctgaccatcacagacgactgtgacacaatcacaagggtagagatctgattgcgaggaacctgggctctgactcgaacacctgcaaaggacagggactgggaccgttacttacatgacactgcacccaggagatacaaatcattgatactctgagttgtgagatttctggcaccccattcatagatttgatatgatacacgtggtttttatgtgctctgtggccttggatgagtcactgaaaggccttcatggtctctcggtctcacaaggacctcttaacccctcaataaagtgttacatttctaaacattgg

SEQ ID NO: 319227 - DNA, 2817 bp, Artificial Sequence
  derived and/or modified sequence
atggcagcctccttcttctctgattttggactaatgtggtacttggaagagctgaagaaggaggaatttcggaagttcaaggagcaccttaagcaaatgacactgcaactagagctgaaacagatcccatggacagaagtcaagaaagccagcagagaggaactggccaatctgttgatcaaacattacgaggagcagcaggcgtggaacataacactgcggatctttcagaaaatggataggaaagacctgtgcatgaaagtaatgagagaaaggacgggctataccaaaacctaccaggcccacgctaaacaaaagttctcacgcctgtggtctagcaagagtgtcactgagattcacctttatttcgaagaagaggttaaacaggaggaatgcgatcatctcgatcgcctcttcgcaccaaaggaagcaggcaaacaaccacgaacagtgatcattcaaggcccacagggtattggtaagacaacgctgcttatgaagctgatgatggcctggtcagacaacaagattttcagggatcggtttctctacacattttacttttgctgccgcgaactgagggaactgcctcccacatcgctagcggatctgatctcacgggaatggccagacccagccgctccaatcactgaaatagtgtcacagccagagcgcctcctgtttgtcatagacagtttcgaggaattgcaaggcggactcaatgagcctgattctgacctctgtggagacctgatggagaaacggcctgtccaagtcctactgtcttctctcctgcggaaaaagatgctgccagaggctagtctcctaatcgccatcaagcccgtctgcccaaaagagcttcgggatcaagtgacgatcagtgaaatttaccagcctaggggctttaatgagtcagatcggctggtgtacttctgctgctttttcaaggaccccaagcgagcaatggaggctttcaatttggtgagggaaagcgaacaacttttttccatatgtcagatcccactcctctgctggattctgtgtacatctctgaaacaagaaatgcagaagggtaaggacctcgctctgacttgtcagtctactaccagtgtctatagttccttcgtgttcaatctcttcacacccgaaggggctgagggtcccacgccgcaaactcagcatcagctcaaagctctgtgctctctcgccgctgaaggaatgtggaccgatactttcgagttctgtgaagatgacctccggcgaaacggagtcgtggatgctgacatccccgctctcttaggcaccaagatcctcctcaaatatggggaaagagaaagcagctacgtgttcttgcatgtgtgcattcaggagttctgtgccgctctcttttatttactcaagagccatctggatcaccctcatcccgcagttcgctgcgtacaggagctgttggtggctaacttcgagaaagcacggagggctcactggattttcttgggttgttttcttactggactgctgaataagaaagagcaagaaaagttggatgcattctttggatttcagctcagccaggagattaagcagcagatccaccagtgtcttaaatccctcggagagcgtggcaatccccagggacaagtcgactctctggcgatcttttactgtctttttgagatgcaggatcccgcatttgttaaacaggccgtcaatcttctccaggaggctaacttccatattatcgataacgtggatctcgtggtttccgcctactgcttgaaatattgctcgtccctccgcaaactgtgcttcagcgtgcaaaatgtttttaagaaagaggatgagcactcctccacttcggactattccctgatctgttggcatcacatctgctccgtgctgacaacctccggccacttgcgcgagctccaggttcaggactctacgctgtccgagagtacctttgtcacctggtgcaaccaactcagacatccctcatgtaggctgcaaaagctcggtattaacaatgtgtcctttagtgggcagtctgtgctgcttttcgaagttctcttctatcaaccggacctaaaatatctcagcttcaccctgaccaaactgtcccgcgatgacatccggagtctctgcgatgccctgaactatccagctgggaacgtgaaggagctagccctggcattctgccacctaagtgagcagtgctgcgaatacatctccgagatgctactgcggaacaaaagcgtgcgttatctcgatctgtctgccaatgtcttgaaggacgaaggtctcaagacgctctgcgaggcactcaaacatcctgactgttgccttgattctctgtgtctggtgaagtgctttatcaccgcagcaggctgcgaagacctggcatctgctttgattagcaatcagaacctgaaaatactccaaatcgggtgcaacgaaattggtgatgttggcgtgcagctcctttgccgcgctctgactcacacagactgcaggctggagatcctgggcctggaggaatgcggactgacatcgacttgctgcaaggacctggccagcgtattgacttgtagcaaaacgttgcaacaactcaatcttacactaaacacgctggatcacaccggtgttgtggtgctgtgcgaggccctgcgccacccagagtgtgcgctgcaggtgctaggactgagaaaaaccgattttgacgaggagacccaggcacttctgactgcagaagaagagagaaatcccaatctgaccataacagatgactgcgacactatcactcgggtggaaatttag

SEQ ID NO: 319228 - protein, 569 aa, Artificial Sequence
  derived and/or modified sequence
MSKDLVTFGDVAVNFSQEEWEWLNPAQRNLYRKVMLENYRSLVSLGVSVSKPDVISLLEQGKEPWMVKKEGTRGPCPDWEYVFKNSEFSSKQETYEESSKVVTVGARHLSYSLDYPSLREDCQSEDWYKNQLGSQEVHLSQLIITHKEILPEVQNKEYNKSWQTFHQDTIFDIQQSFPTKEKAHKHEPQKKSYRKKSVEMKHRKVYVEKKLLKCNDCEKVFNQSSSLTLHQRIHTGEKPYACVECGKTFSQSANLAQHKRIHTGEKPYECKECRKAFSQNAHLAQHQRVHTGEKPYQCKECKKAFSQIAHLTQHQRVHTGERPFECIECGKAFSNGSFLAQHQRIHTGEKPYVCNVCGKAFSHRGYLIVHQRIHTGERPYECKECRKAFSQYAHLAQHQRVHTGEKPYECKVCRKAFSQIAYLDQHQRVHTGEKPYECIECGKAFSNSSSLAQHQRSHTGEKPYMCKECRKTFSQNAGLAQHQRIHTGEKPYECNVCGKAFSYSGSLTLHQRIHTGERPYECKDCRKSFRQRAHLAHHERIHTMESFLTLSSPSPSTSNQLPRPVGFIS

SEQ ID NO: 319229 - protein, 137 aa, Artificial Sequence
  derived and/or modified sequence
MSKDLVTFGDVAVNFSQEEWEWLNPAQRNLYRKVMLENYRSLVSLGVSVSKPDVISLLEQGKEPWMVKKEGTRGPCPDWEYVFKNSEFSSKQETYEESSKVVTVGARHLSYSLDYPSLREDCQSEDWYKNQLGSQEV

SEQ ID NO: 319230 - protein, 129 aa, Artificial Sequence
  derived and/or modified sequence
MSKDLVTFGDVAVNFSQEEWEWLNPAQRNLYRKVMLENYRSLVSLGVSVSKPDVISLLEQGKEPWMVKKEGTRGPCPDWEYVFKNSEFSSKQETYEESSKVVTVGARHLSYSLDYPSLREDCQSEDWYK

SEQ ID NO: 319231 - DNA, 1710 bp, Artificial Sequence
  derived and/or modified sequence
atgagcaaggacctggtgaccttcggcgacgtggccgtgaacttcagccaggaggagtgggagtggctgaaccccgcccagagaaacctgtacagaaaggtgatgctggagaactacagaagcctggtgagcctgggcgtgagcgtgagcaagcccgacgtgatcagcctgctggagcagggcaaggagccctggatggtgaagaaggagggcaccagaggcccctgccccgactgggagtacgtgttcaagaacagcgagttcagcagcaagcaggagacctacgaggagagcagcaaggtggtgaccgtgggcgccagacacctgagctacagcctggactaccccagcctgagagaggactgccagagcgaggactggtacaagaaccagctgggcagccaggaggtgcacctgagccagctgatcatcacccacaaggagatcctgcccgaggtgcagaacaaggagtacaacaagagctggcagaccttccaccaggacaccatcttcgacatccagcagagcttccccaccaaggagaaggcccacaagcacgagccccagaagaagagctacagaaagaagagcgtggagatgaagcacagaaaggtgtacgtggagaagaagctgctgaagtgcaacgactgcgagaaggtgttcaaccagagcagcagcctgaccctgcaccagagaatccacaccggcgagaagccctacgcctgcgtggagtgcggcaagaccttcagccagagcgccaacctggcccagcacaagagaatccacaccggcgagaagccctacgagtgcaaggagtgcagaaaggccttcagccagaacgcccacctggcccagcaccagagagtgcacaccggcgagaagccctaccagtgcaaggagtgcaagaaggccttcagccagatcgcccacctgacccagcaccagagagtgcacaccggcgagagacccttcgagtgcatcgagtgcggcaaggccttcagcaacggcagcttcctggcccagcaccagagaatccacaccggcgagaagccctacgtgtgcaacgtgtgcggcaaggccttcagccacagaggctacctgatcgtgcaccagagaatccacaccggcgagagaccctacgagtgcaaggagtgcagaaaggccttcagccagtacgcccacctggcccagcaccagagagtgcacaccggcgagaagccctacgagtgcaaggtgtgcagaaaggccttcagccagatcgcctacctggaccagcaccagagagtgcacaccggcgagaagccctacgagtgcatcgagtgcggcaaggccttcagcaacagcagcagcctggcccagcaccagagaagccacaccggcgagaagccctacatgtgcaaggagtgcagaaagaccttcagccagaacgccggcctggcccagcaccagagaatccacaccggcgagaagccctacgagtgcaacgtgtgcggcaaggccttcagctacagcggcagcctgaccctgcaccagagaatccacaccggcgagagaccctacgagtgcaaggactgcagaaagagcttcagacagagagcccacctggcccaccacgagagaatccacaccatggagagcttcctgaccctgagcagccccagccccagcaccagcaaccagctgcccagacccgtgggcttcatcagctag

SEQ ID NO: 319232 - DNA, 414 bp, Artificial Sequence
  derived and/or modified sequence
atgagcaaggacctggtgaccttcggcgacgtggccgtgaacttcagccaggaggagtgggagtggctgaaccccgcccagagaaacctgtacagaaaggtgatgctggagaactacagaagcctggtgagcctgggcgtgagcgtgagcaagcccgacgtgatcagcctgctggagcagggcaaggagccctggatggtgaagaaggagggcaccagaggcccctgccccgactgggagtacgtgttcaagaacagcgagttcagcagcaagcaggagacctacgaggagagcagcaaggtggtgaccgtgggcgccagacacctgagctacagcctggactaccccagcctgagagaggactgccagagcgaggactggtacaagaaccagctgggcagccaggaggtgtag

SEQ ID NO: 319233 - DNA, 390 bp, Artificial Sequence
  derived and/or modified sequence
atgagcaaggacctggtgaccttcggcgacgtggccgtgaacttcagccaggaggagtgggagtggctgaaccccgcccagagaaacctgtacagaaaggtgatgctggagaactacagaagcctggtgagcctgggcgtgagcgtgagcaagcccgacgtgatcagcctgctggagcagggcaaggagccctggatggtgaagaaggagggcaccagaggcccctgccccgactgggagtacgtgttcaagaacagcgagttcagcagcaagcaggagacctacgaggagagcagcaaggtggtgaccgtgggcgccagacacctgagctacagcctggactaccccagcctgagagaggactgccagagcgaggactggtacaagtag

SEQ ID NO: 319234 - DNA, 1710 bp, Artificial Sequence
  derived and/or modified sequence
atgtcgaaagacctggtgacatttggagacgtcgcagtgaatttttcccaggaagaatgggagtggcttaacccagcacagcgtaatctctaccggaaggtgatgctggagaattaccgcagtttggtgtcgctgggggtctcagtgtctaaaccagacgtgatctccctattagaacaaggcaaagagccttggatggtgaagaaggagggcacgagagggccatgtccagactgggagtacgttttcaaaaatagtgagttctcgagtaaacaagaaacatacgaagagtccagtaaagtggtgacagtaggagcaagacatctctcctatagcctggattacccgtcgcttcgagaggattgccagtccgaagactggtataagaaccaactcgggtcccaagaggtacacctgagtcagttgatcatcacccataaggaaattctcccagaggtgcagaataaggaatacaataaatcatggcagacatttcatcaggatacaatttttgacatccagcagagctttcctaccaaagagaaggcacataagcacgagccacagaaaaagagctatcggaaaaaaagcgtggaaatgaaacacaggaaagtgtacgttgaaaaaaaattgctaaaatgcaatgattgtgaaaaggttttcaatcaatcttctagcttgactctccatcagaggatccacacgggtgaaaagccctatgcttgtgtagagtgtggtaagacattttctcagagtgccaaccttgctcagcacaagcgcatacatacaggcgagaagccatatgaatgcaaggagtgcagaaaggctttttcccagaatgctcacttggcccaacatcaacgcgtgcacacaggggagaagccataccagtgtaaggagtgtaagaaggctttttcccagatagcgcatctgacacagcaccaacgggtacacactggcgaacgcccctttgagtgcatagagtgtgggaaagcgttttccaatggctcattcttggcccagcaccaacgaatacacaccggcgagaaaccttacgtctgtaatgtctgcggaaaagccttcagtcatcgcggctacctgatcgtgcaccagcgaatccacactggcgagaggccttatgaatgcaaagaatgtcgaaaggctttctcccagtacgcccatctcgctcaacaccagagggttcataccggcgaaaaaccctacgaatgtaaggtctgccgcaaagcgttcagccagatcgcttacttagaccaacaccagagggttcatactggggagaagccatatgagtgtattgaatgtggcaaggccttctccaattcttcaagcctggcccagcatcagagaagtcacaccggagagaagccttacatgtgcaaagagtgtcgcaagacattttcccagaatgcaggattagctcagcaccagcggatccacaccggcgagaagccctatgaatgcaatgtctgtggcaaggctttcagttactctggaagcttgaccctccatcagagaatccacactggggagaggccctatgaatgcaaggactgccggaaatcttttcgccagcgagcccacctggcccatcatgagcgaatccacaccatggaatccttcctcaccctgtcctcacccagcccctcaacctctaaccagttgccaaggccggttgggttcatttcctag

SEQ ID NO: 319235 - DNA, 1710 bp, Artificial Sequence
  derived and/or modified sequence
atgtccaaggacctcgtgactttcggggatgttgcggtgaacttctctcaagaagaatgggagtggttaaaccctgcgcagcgcaacctctatcggaaagtgatgcttgagaactatcggagcctcgtgtccctgggcgtgagtgtgtcgaagcccgatgttatcagtttactggagcaaggaaaggagccttggatggtgaagaaagaaggcacccgtgggccatgcccagattgggagtacgtcttcaaaaatagcgaattctcctctaagcaggaaacatatgaagaaagcagtaaggtggtgaccgttggggccaggcatctgagctatagtctagattatccatccttgagggaagattgccaaagcgaggactggtataagaatcaactcggctctcaagaggtccacctgtcacagctgatcattacgcacaaagagatcctgcctgaagtccagaacaaggaatacaacaagagctggcagacattccaccaggataccatcttcgatatccagcaatccttccccactaaagagaaagcccataaacacgagcctcaaaaaaagtcatatcgaaagaagtccgtcgaaatgaaacacaggaaggtttacgtggagaagaagctgctcaaatgcaacgactgtgagaaagtgtttaaccaaagttcctcactgacactgcaccagaggattcacacaggagagaagccctatgcctgcgttgagtgcgggaaaacgttctcccagtccgccaatcttgctcagcacaaaaggattcacactggagagaagccctacgaatgtaaagaatgccgcaaggctttttcccagaatgcccatctggctcaacatcagagggtgcacaccggagaaaagccatatcagtgcaaagagtgtaagaaggctttcagccaaatagcccacctcacccaacatcaacgggtccacaccggcgaacgccccttcgagtgtattgaatgtgggaaggcattttcaaatggtagcttcctggcacaacaccaaagaatccatacaggagagaagccttatgtgtgcaatgtttgcggtaaagctttctctcatcggggctatctgattgtgcaccagcgcatccacaccggcgagaggccttatgaatgcaaggagtgccgaaaggcctttagccagtacgctcatctggcacagcatcagcgtgtccacactggagaaaaaccctacgagtgcaaagtttgtcgaaaagctttttcacagattgcctatctggatcaacaccagcgagtccataccggggaaaaaccttatgaatgcatagagtgtgggaaggctttcagcaactcttcttctttggcacagcaccaaaggagccacaccggcgagaagccatacatgtgtaaggaatgtcgaaagaccttttcgcagaacgctggattagcccagcatcagcgaattcataccggcgaaaaaccctacgaatgcaatgtatgcggtaaggctttttcctattcaggctccctgacactccaccagcggatccacactggagaacgtccctatgaatgcaaagactgccggaagagttttaggcagcgggcgcacctggcccaccatgaacggattcatactatggagagctttttgactctaagttcaccatcaccatccacctcaaatcagctgccacggcctgtaggattcatctcttag

SEQ ID NO: 319236 - DNA, 414 bp, Artificial Sequence
  derived and/or modified sequence
atgtcaaaagatctagtgacgttcggagatgtggctgtaaacttttcccaggaagaatgggagtggctaaaccctgctcagcgtaacctctatagaaaggtgatgctggagaactaccgaagcctcgtgtcgctgggtgtgagtgttagtaagcccgacgtaatcagcctattggaacagggcaaggagccctggatggttaaaaaggaaggaactagagggccatgtccagattgggagtacgtgtttaagaactctgaattctcatctaagcaagagacctacgaggaatcaagtaaggtggtaacagtgggagctcgtcacctgtcctattcgctggactacccatcactgagggaggattgccagtcagaggactggtacaagaaccagctgggcagccaagaagtctag

SEQ ID NO: 319237 - DNA, 390 bp, Artificial Sequence
  derived and/or modified sequence
atgtcgaaggatctggttacctttggggatgttgccgtgaactttagccaagaagagtgggaatggctaaaccctgcacagcgaaatctgtatcgcaaggtaatgctggagaactatcgctcccttgtgtcattgggagtttccgtgagtaagcccgatgtaatcagcctacttgaacagggcaaggaaccatggatggtgaagaaagaagggacacgcggcccctgtccagattgggaatacgtattcaagaattctgagttcagctccaaacaagagacttatgaggagagttctaaggtcgtgactgtaggagcccgccatctgtcttacagcctagattatccttcactccgagaagattgtcagtccgaggactggtacaagtag

SEQ ID NO: 319238 - DNA, 1710 bp, Artificial Sequence
  derived and/or modified sequence
atgagcaaggacctggtgacctttggagatgtggccgtgaacttcagccaggaggagtgggagtggctgaacccagcccagaggaacctgtacaggaaggtgatgctggagaactaccgcagcctggtgtccctgggcgtgtctgtgtccaagccagatgtgatcagcctgctggagcagggcaaggagccctggatggtgaagaaggagggcacccggggcccctgcccagactgggagtatgtgttcaagaacagcgagttcagcagcaagcaggagacctatgaggagagcagcaaggtggtgacagtgggcgcccggcacctgagctacagcctggactaccccagcctgcgggaggactgccagagcgaggactggtacaagaaccagctgggcagccaggaggtgcacctgagccagctgatcatcacccacaaggagatcctgcctgaggtgcagaacaaggagtacaacaagtcctggcagaccttccaccaggacaccatctttgacatccagcagagcttccccaccaaggagaaggcccacaagcatgagccccagaagaagagctacaggaagaagtctgtggagatgaagcacaggaaggtgtatgtggagaagaagctgctgaagtgcaatgactgtgagaaggtgttcaaccagagcagcagcctgaccctgcaccagaggatccacactggagagaagccctatgcctgtgtggagtgtgggaagaccttcagccagagcgccaacctggcccagcacaagaggatccacactggagagaagccctatgagtgcaaggagtgcaggaaggccttcagccagaatgcccacctggcccagcaccagagggtgcacactggagagaagccctaccagtgcaaggagtgcaagaaggccttcagccagatcgcccacctgacccagcaccagagggtgcacactggagagcggccctttgaatgtattgaatgtgggaaggccttcagcaatggcagcttcctggcccagcaccagaggatccacactggagagaagccctacgtgtgcaatgtgtgtgggaaggccttcagccaccggggctacctgattgtgcaccagaggatccacactggagagcggccctatgagtgcaaggagtgcaggaaggccttcagccagtatgcccacctggcccagcaccagagggtgcacactggagagaagccctatgagtgcaaggtgtgcaggaaggccttcagccagatcgcctacctggaccagcaccagagggtgcacactggagagaagccctatgaatgtattgaatgtgggaaggccttcagcaacagcagcagcctggcccagcaccagaggagccacactggagagaagccctacatgtgcaaggagtgcaggaagaccttcagccagaatgccggcctggcccagcaccagaggatccacactggagagaagccctatgaatgtaatgtgtgtgggaaggccttctcctacagcggcagcctgaccctgcaccagaggatccacactggagagcggccctatgagtgcaaggactgcaggaagagcttccggcagagggcccacctggcccaccacgagcgcatccacaccatggagagcttcctgaccctgagcagccccagccccagcaccagcaaccagctgcccaggcctgtgggcttcatctcctag

SEQ ID NO: 319239 - DNA, 414 bp, Artificial Sequence
  derived and/or modified sequence
atgagcaaggacctggtgacctttggagatgtggccgtgaacttcagccaggaggagtgggagtggctgaacccagcccagaggaacctgtacaggaaggtgatgctggagaactaccgcagcctggtgtccctgggcgtgtctgtgtccaagccagatgtgatcagcctgctggagcagggcaaggagccctggatggtgaagaaggagggcacccggggcccctgcccagactgggagtatgtgttcaagaacagcgagttcagcagcaagcaggagacctatgaggagagcagcaaggtggtgacagtgggcgcccggcacctgagctacagcctggactaccccagcctgcgggaggactgccagagcgaggactggtacaagaaccagctgggcagccaggaggtgtag

SEQ ID NO: 319240 - DNA, 390 bp, Artificial Sequence
  derived and/or modified sequence
atgagcaaggacctggtgacctttggagatgtggccgtgaacttcagccaggaggagtgggagtggctgaacccagcccagaggaacctgtacaggaaggtgatgctggagaactaccgcagcctggtgtccctgggcgtgtctgtgtccaagccagatgtgatcagcctgctggagcagggcaaggagccctggatggtgaagaaggagggcacccggggcccctgcccagactgggagtatgtgttcaagaacagcgagttcagcagcaagcaggagacctatgaggagagcagcaaggtggtgacagtgggcgcccggcacctgagctacagcctggactaccccagcctgcgggaggactgccagagcgaggactggtacaagtag

SEQ ID NO: 319241 - DNA, 1710 bp, Artificial Sequence
  derived and/or modified sequence
atgagcaaggacctggtgaccttcggcgacgtggccgtgaacttctcccaggaggaatgggagtggctcaaccccgcgcaaagaaacctatacagaaaagtgatgctggaaaattatcggtctctggtgtccctgggggtatctgtttcgaagccggacgtcataagcctactggaacaggggaaagagccatggatggtgaaaaaagaaggaacccgagggccttgcccagattgggaatatgtgttcaagaacagtgagttctcatccaagcaagagacctacgaggaaagcagcaaggtggtaactgtgggcgccaggcaccttagttactctctggattatccttcgctacgcgaggattgtcagtccgaggattggtacaaaaaccaattaggatcacaggaggtccatctctcccagttaataattactcacaaagagatcctgccagaggtgcaaaacaaagagtataacaaatcttggcagacttttcatcaggacaccatctttgatattcagcaaagcttccccaccaaagaaaaggcccacaagcacgagccacagaaaaaatcctaccggaagaaaagtgtggagatgaagcatcggaaggtgtacgtagaaaaaaagctgctcaaatgcaacgattgtgagaaagtattcaaccagagctcaagtcttaccctccaccaacgcattcacaccggagaaaaaccgtacgcctgtgtggagtgtggcaaaaccttctcacagtccgcgaacctggctcagcataagcgcattcataccggagagaaaccatacgagtgtaaggaatgccgaaaagccttttctcagaatgcccatctcgctcagcatcaaagagttcacacaggcgaaaagccctatcagtgtaaagagtgcaaaaaggcattttctcagatcgcccacttgacgcagcatcagcgcgtgcacactggcgagagacctttcgagtgtatcgagtgtgggaaagccttttctaacgggagcttcctcgctcaacatcagagaatacatacaggggagaagccatacgtttgtaacgtctgtggcaaagccttctcacacaggggctatctcattgtccaccaacgaatccacacaggcgaacgcccttacgagtgtaaggaatgtcggaaggccttttctcagtatgcccacttagcccagcaccagagggtgcacaccggcgaaaagccatacgagtgtaaagtctgtcggaaggccttttcccagattgcctacttagatcagcaccagcgggtgcacaccggggaaaagccttatgagtgtatcgagtgtggcaaggccttctcaaactcatctagcctcgctcagcaccaacgcagccatacaggggagaagccttacatgtgcaaagagtgcaggaaaactttttcacagaatgctggtctggctcagcaccagcgaatccacaccggagaaaaaccctatgagtgcaatgtgtgcggtaaggccttctcttactctggctctcttaccttacatcagaggatccacaccggcgagcgcccttacgagtgcaaagattgtaggaagagctttcgacaacgagcccacctggcgcatcatgaaaggattcataccatggaatcctttctgaccctatcctcccccagcccaagcacgagcaaccagctcccaagacctgtgggcttcatctcatag

SEQ ID NO: 319242 - DNA, 1710 bp, Artificial Sequence
  derived and/or modified sequence
atgagcaaggacctggtgaccttcggcgacgtggccgtgaacttcagccaagaagagtgggaatggctcaatccagcccaacgtaatctctacagaaaagtcatgctggaaaactataggtcactggtcagtttgggggtgtccgtctcaaaaccggatgtgatctctctgcttgagcaggggaaagagccatggatggtcaaaaaggaggggacccgggggccctgtccagattgggagtacgtcttcaagaacagtgagttctcctctaagcaggaaacatacgaggaatccagtaaggtagttacagttggagccagacacctctcctattccttggattatccctcactacgggaggattgtcagtccgaagattggtacaaaaaccagctgggctcccaggaggtgcacctttctcagttaatcatcacccacaaggagatcctccctgaggtgcaaaataaagagtacaataaatcttggcagacatttcaccaggacactatcttcgacatacagcagagtttccccactaaagagaaagcccacaagcacgagcctcaaaaaaagtcgtatagaaagaagagtgttgagatgaagcacagaaaagtgtatgttgagaagaaactccttaagtgtaacgactgtgaaaaggttttcaaccaatcatcttcactcaccctgcatcagaggattcacacaggcgaaaagccttatgcatgtgtggaatgcgggaagaccttcagtcaatcagccaatcttgcacaacataaacggatacatacaggagagaagccctatgaatgcaaggaatgtagaaaggccttttcccaaaacgcccacctggcccaacatcagagagttcacacgggagaaaagccctaccagtgcaaggagtgcaagaaagctttttcacagattgcacatctgacacaacaccagcgagttcatacaggggaacgtccatttgagtgcatcgagtgtggcaaggctttcagcaatgggtctttcctagctcaacaccagagaatccatacaggcgagaaaccgtacgtgtgtaatgtgtgtggaaaagccttcagtcaccggggatatctaattgtgcaccagagaatccataccggggagcgcccctacgaatgcaaggagtgtcggaaggctttcagccaatacgcccatctcgcacagcaccaaagggtacatactggtgagaaaccatatgagtgcaaggtgtgtaggaaggccttctcccagatcgcctacttagaccaacatcagcgcgtgcacaccggggagaaaccctatgagtgcatcgagtgcggcaaggcttttagtaatagtagcagcctagcacagcatcagagatctcatacgggtgaaaaaccttacatgtgtaaggaatgccgcaaaacattctcacaaaacgcgggtctcgcccaacaccagagaatccacacgggagagaaaccctacgaatgcaacgtgtgcggtaaggccttttcatatagtggttctctgacgttgcatcagagaatacataccggagaacgcccttacgaatgcaaagattgccggaaatccttcagacagcgagcgcatcttgcgcaccatgaacgcattcatacgatggagagtttcctcactttgagttctccctcaccttcaacctctaaccaactccctaggcccgtcggtttcatctcctag

SEQ ID NO: 319243 - DNA, 414 bp, Artificial Sequence
  derived and/or modified sequence
atgagcaaggacctggtgaccttcggcgacgtggccgtgaacttcagccaagaggaatgggagtggctgaatcccgctcagaggaatctctacagaaaggtcatgctggagaactatagatctctcgtgagtttaggagtttccgtgtctaaacctgatgttatctcactgcttgaacaggggaaagaaccttggatggtaaaaaaggaagggacccgcggaccctgtcctgattgggagtacgtgttcaaaaatagcgaattttcgtcaaaacaggaaacatacgaagaatcttccaaggtagtgactgtgggcgccaggcatttgtcatatagcttggactacccatctctccgggaggattgccaaagcgaggactggtacaagaaccagctcggctcacaagaagtatag

SEQ ID NO: 319244 - DNA, 390 bp, Artificial Sequence
  derived and/or modified sequence
atgagcaaggacctggtgaccttcggcgacgtggccgtgaacttctcccaagaggaatgggagtggcttaatccagcacagaggaacctttacaggaaggtgatgctagagaactaccgtagcctggtctccctgggcgtgtcagtgagcaagcccgatgtgatttccctgcttgagcaaggaaaagaaccatggatggtgaagaaagagggaactagagggccctgccctgattgggaatatgtctttaaaaattccgaattcagcagtaaacaggagacctatgaggaaagcagcaaggtggtaaccgtcggggctagacatctatcctatagcctcgattaccccagcctacgggaggattgccagtctgaagactggtacaaatag

SEQ ID NO: 319245 - DNA, 1710 bp, Artificial Sequence
  derived and/or modified sequence
atgtctaaagatctggtcaccttcggagacgtggccgtcaacttctcccaggaagaatgggaatggttaaaccctgcacagcgaaatctctacaggaaagtgatgttggagaattacaggtccctggtgagcctcggggtctcagtctctaagccggacgtcatctcactcctggagcaggggaaggaaccttggatggtcaaaaaggagggcactcgaggcccttgtcccgattgggagtatgtgttcaagaacagtgagttcagttctaagcaggaaacctacgaggagtcttccaaggtcgtgacagtgggcgctaggcacctcagttactcattggactatccttccttgcgggaggattgccaatccgaggattggtacaagaaccaacttggtagtcaggaagtgcacttaagtcagctcataataacccacaaagaaatcctgccagaggttcagaacaaggagtacaataaatcatggcagacgttccatcaggacaccatctttgacattcagcagtcattcccaacaaaggaaaaagcacacaagcacgaaccccagaaaaaatcatatcggaaaaaaagtgtcgaaatgaagcatcgcaaggtgtatgtggagaagaagctcctgaagtgcaacgactgtgaaaaggtctttaaccaaagcagctctctcacactccaccagcgcattcacacaggagagaagccatacgcatgtgtagaatgtggaaagactttctcccagtccgcaaacctagctcaacacaagcgaatccacaccggcgaaaagccctacgaatgtaaggaatgtcgcaaagctttttcgcaaaatgctcacctggcacagcatcaacgcgtgcataccggggagaagccttatcagtgcaaggagtgcaaaaaagcattttcccagattgctcacttgacccaacaccagagggtccacaccggagagcgaccattcgagtgcatcgagtgcggtaaagcattttcgaatggaagttttttagctcagcatcaacgtatccatactggagaaaaaccatacgtgtgtaatgtttgcggtaaggcgttctcgcatcggggatatctgatcgtccatcagcgcatacatactggagaacgcccatatgagtgcaaagagtgcagaaaagcattttcacagtatgcacatctggcacaacatcagagagtccacacaggagaaaaaccatatgagtgcaaagtttgcagaaaagctttctcacagatcgcctaccttgatcagcaccaacgcgtgcacacaggagaaaagccctacgaatgtattgagtgcggtaaggctttcagcaattcgtcttccttggcgcagcaccagagaagccacaccggagagaaaccatacatgtgcaaggagtgtaggaagacctttagccagaatgctggactcgctcagcatcagcggatccacacaggagagaagccatacgagtgtaatgtgtgcggcaaagccttcagctactccgggagcttgactcttcaccaacgaattcacaccggagagcgcccatatgagtgtaaagactgccggaagtcctttcgccaacgggcacatcttgcccatcacgaacggatccatacgatggaatccttcctcaccctttccagcccttctcccagcaccagtaatcagcttcccaggccagtcggctttatttcttag

SEQ ID NO: 319246 - DNA, 1710 bp, Artificial Sequence
  derived and/or modified sequence
atgagtaaggatctggtgacatttggcgacgtggcagtaaatttctcccaggaggagtgggaatggttgaacccagcccaacggaacctctataggaaagtcatgctcgaaaactacagaagtttagtgagtctgggcgtttcagtcagcaagccggatgtcatctctctacttgaacaggggaaagaaccctggatggttaaaaaagaggggactcgaggaccatgccctgactgggagtatgtcttcaagaactctgagttcagtagtaaacaggagacttatgaagagagtagcaaggtggtcaccgtgggtgctagacacctgagttactcccttgattatcctagtctcagggaagactgccagtccgaggattggtacaaaaaccagcttggatcacaggaggttcatctgtcccaactgattataacccacaaagagatcctgcccgaggtgcagaataaggaatataacaagtcttggcagacattccaccaggatactatttttgacatccagcaatcttttccaaccaaggaaaaggcccacaagcatgagccacagaagaagtcctaccggaaaaaaagtgtagaaatgaagcacaggaaagtgtacgtggagaagaaacttctgaagtgtaacgactgtgaaaaggtcttcaaccaatcctcatccctgacactgcatcaacgaatccatacaggagagaaaccttatgcctgtgtggaatgcgggaagactttcagccaatctgctaatctcgctcagcacaagcgcattcatacaggagaaaagccatacgagtgtaaagagtgtcgtaaagccttctcccagaatgctcacctggcacagcatcaacgcgttcatacaggagaaaagccctaccagtgtaaagaatgtaagaaagcatttagtcaaattgcccacctgacacagcaccagcgcgtccacacaggcgaacggccttttgaatgtatcgagtgtggcaaggcattctcaaacggcagctttctggcccagcaccagcgcatacacaccggagagaagccttacgtctgcaacgtttgcggaaaggccttctctcacagaggttatctgattgtgcaccagcgcatacacactggagaaaggccgtacgaatgtaaagaatgtcggaaggcattcagccagtacgcccatctggctcaacaccagagagtacataccggcgagaaaccctatgagtgcaaagtgtgccggaaggcgttttctcagatcgcttaccttgaccaacatcaacgggttcacacgggagagaagccatatgagtgtatagagtgtggtaaggcctttagcaattcctcatcacttgcacagcatcagcgctcacacaccggcgaaaaaccttatatgtgtaaagaatgtcggaagacattctctcagaacgccggactggcacagcaccaaaggatacacaccggagagaagccctacgaatgcaacgtctgtggaaaggccttcagctactctggcagtctgacactgcatcagcggattcacactggcgagcggccttacgagtgtaaagattgtcgtaagtctttcaggcagcgggcacatctcgcgcaccatgagaggattcacacaatggaatcctttctgacactgagttccccatctccgtccactagtaatcagctgccgagacctgttggcttcattagctag

SEQ ID NO: 319247 - DNA, 414 bp, Artificial Sequence
  derived and/or modified sequence
atgtcgaaagacctagtgactttcggagatgtggcagtgaatttcagccaggaagagtgggagtggctcaaccccgctcaaagaaatttgtataggaaggtgatgttggaaaattatcgcagtctggtatcgttaggtgtaagcgtcagtaagccagatgtcatttctctcctggagcagggtaaggagccttggatggttaaaaaggaaggcaccagagggccttgtcccgattgggagtatgttttcaagaatagcgagttctcctccaagcaggaaacttatgaggagagtagcaaagtcgtcacggtcggggctaggcatttgtcttacagccttgactacccttctctcagggaggactgtcagtcagaggactggtacaagaatcaattagggtcacaggaagtatag

SEQ ID NO: 319248 - DNA, 390 bp, Artificial Sequence
  derived and/or modified sequence
atgagcaaggatctcgtgaccttcggtgacgttgcagtgaatttttcacaggaagagtgggagtggctcaatcctgcgcagcgaaacctctataggaaggtgatgctggagaactatcgcagcctggtcagccttggggtttcagtttctaagcccgacgttatctcactacttgaacagggcaaggaaccctggatggtaaagaaagaaggtactcgaggcccatgtcccgactgggagtacgtgttcaagaattccgaattctcttcgaagcaggagacctatgaggagtcatctaaggtggtaaccgttggggctagacacttgtcgtatagcttagactatccatctttacgggaggactgtcaatccgaagactggtacaaatag

SEQ ID NO: 319249 - DNA, 2538 bp, Artificial Sequence
  derived and/or modified sequence
actgcgcgtgcgcctcaccgcgctggcaccccggcctggcagcctttggggacctgaaccagctgcgcctgcgcagctcgactttctcaggatactgtccctctcccacagaggagctgaaggagtaggacagaagaactgtcaaattctggaatccttaaagccatgtccaaggatttggtgacatttggggatgtggctgtaaatttctctcaagaggaatgggaatggctgaaccctgctcagaggaatttgtacaggaaagtgatgttggagaactacaggagcttggtatcattgggagtttctgtttctaagccagatgtgatctcattattggagcaaggaaaagagccctggatggtgaagaaggagggaacaagaggcccatgccctgattgggagtatgtatttaaaaacagtgaattttcatcaaagcaagagacatatgaagaatcatccaaagttgtgacagtgggagcaagacatcttagttatagccttgactatcccagtttgagagaagactgtcaaagtgaggactggtataagaaccagctgggaagtcaagaggtacatcttagtcaattaatcatcactcataaagaaatccttccagaagttcaaaataaagaatataacaaatcttggcaaacattccaccaggatacaatctttgatatacaacagagttttcccaccaaagaaaaagcacataagcatgaaccacaaaagaaaagttaccgaaaaaaatctgttgaaatgaaacataggaaagtctatgtagaaaagaaacttttgaaatgtaatgattgtgagaaagtcttcaaccagagctcatcccttactcttcatcagagaattcatactggagagaaaccctatgcatgtgttgaatgtgggaaaacgttcagccagagtgcaaacttggcgcaacataagagaatacatactggagagaaaccctatgaatgtaaagaatgtaggaaagccttcagccagaatgcacacctggcccaacatcagagagttcatactggagagaaaccttatcagtgtaaagaatgtaaaaaagccttcagccagattgcacacctgactcagcatcagagagttcatactggagagagacctttcgaatgtattgaatgtggaaaggcctttagtaatggttcatttcttgctcagcatcagagaattcatacaggagagaaaccttatgtgtgtaatgtgtgtgggaaagcctttagccatcgtggatacctaattgtacatcagagaattcatactggagagagaccctacgaatgtaaggaatgtaggaaagccttcagccagtatgcacaccttgctcaacatcagagagttcatactggagaaaaaccttatgaatgtaaagtatgtaggaaagccttcagccaaattgcataccttgatcaacatcagagggttcatactggagagaaaccctatgaatgtattgaatgtgggaaggcctttagcaatagttcatcacttgcacaacatcagagaagtcatactggagaaaaaccctatatgtgtaaggaatgtaggaaaacatttagccagaatgcaggccttgctcaacatcagagaattcatactggagagaaaccttatgaatgtaatgtttgtgggaaagcatttagctatagtggatctcttactctacatcagagaattcatactggagaaagaccctatgaatgtaaagattgcaggaaatctttcaggcagcgtgcacatcttgctcatcatgagagaattcatactatggagtcattcttgactctttcctctccctcaccctccacatcaaatcagttgccaagacctgtaggtttcatctcctgaatatttctggaatccacctcttgaatccatttccatcccatcatccttgtccaatgcacattaatatatttgacatgggatactcgagtagctttctaattggtctccttgtactcaccattgtctctgtcagatgtccacattgcaaccaaatttgtatttttaaaaatatgtttaatctcatttctccctcattaaaatccctcagtggcatcccatggtttttaagttaaagcacacattcttcaaaatagcctaaaaacctagcctctaacaccttgttccaggttaccttccaaagtttctatcttgtgtcactatccatctcattctctgaatacttatccaggattaagatacatattccaggatcaaaaagacctgggttccaatctttgcacttccatttcctgccctctaatttgggggcagcagtttgtgctttgtaagcttcagtcttatttatagtgtgggaataataatggttctacctcagaagttaatagaagaatgaaataatgcatgtaaattgctcagcagcgtgcctagcataaagtaattactcaaaccataatgtaaagtaaaaagataaccatactatacatagaaagccaatcatctcagccatgattatctcagaaataaaaagagatgcagcagctc

SEQ ID NO: 319250 - DNA, 4916 bp, Artificial Sequence
  derived and/or modified sequence
agggctgcggcgcctttgtgagcgcggccgccggccaggatcgagccctggcccgggccctggcccagccccggcctccaaggaccgcgccgaaggaggtgcccactggagggaggaggcgctcgactttctcaggatactgtccctctcccacagaggagctgaaggagtaggacagaagaactgtcaaattctggaatccttaaagccatgtccaaggatttggtgacatttggggatgtggctgtaaatttctctcaagaggaatgggaatggctgaaccctgctcagaggaatttgtacaggaaagtgatgttggagaactacaggagcttggtatcattgggagtttctgtttctaagccagatgtgatctcattattggagcaaggaaaagagccctggatggtgaagaaggagggaacaagaggcccatgccctgattgggagtatgtatttaaaaacagtgaattttcatcaaagcaagagacatatgaagaatcatccaaagttgtgacagtgggagcaagacatcttagttatagccttgactatcccagtttgagagaagactgtcaaagtgaggactggtataagaaccagctgggaagtcaagaggtacatcttagtcaattaatcatcactcataaagaaatccttccagaagttcaaaataaagaatataacaaatcttggcaaacattccaccaggatacaatctttgatatacaacagagttttcccaccaaagaaaaagcacataagcatgaaccacaaaagaaaagttaccgaaaaaaatctgttgaaatgaaacataggaaagtctatgtagaaaagaaacttttgaaatgtaatgattgtgagaaagtcttcaaccagagctcatcccttactcttcatcagagaattcatactggagagaaaccctatgcatgtgttgaatgtgggaaaacgttcagccagagtgcaaacttggcgcaacataagagaatacatactggagagaaaccctatgaatgtaaagaatgtaggaaagccttcagccagaatgcacacctggcccaacatcagagagttcatactggagagaaaccttatcagtgtaaagaatgtaaaaaagccttcagccagattgcacacctgactcagcatcagagagttcatactggagagagacctttcgaatgtattgaatgtggaaaggcctttagtaatggttcatttcttgctcagcatcagagaattcatacaggagagaaaccttatgtgtgtaatgtgtgtgggaaagcctttagccatcgtggatacctaattgtacatcagagaattcatactggagagagaccctacgaatgtaaggaatgtaggaaagccttcagccagtatgcacaccttgctcaacatcagagagttcatactggagaaaaaccttatgaatgtaaagtatgtaggaaagccttcagccaaattgcataccttgatcaacatcagagggttcatactggagagaaaccctatgaatgtattgaatgtgggaaggcctttagcaatagttcatcacttgcacaacatcagagaagtcatactggagaaaaaccctatatgtgtaaggaatgtaggaaaacatttagccagaatgcaggccttgctcaacatcagagaattcatactggagagaaaccttatgaatgtaatgtttgtgggaaagcatttagctatagtggatctcttactctacatcagagaattcatactggagaaagaccctatgaatgtaaagattgcaggaaatctttcaggcagcgtgcacatcttgctcatcatgagagaattcatactatggagtcattcttgactctttcctctccctcaccctccacatcaaatcagttgccaagacctgtaggtttcatctcctgaatatttctggaatccacctcttgaatccatttccatcccatcatccttgtccaatgcacattaatatatttgacatgggatactcgagtagctttctaattggtctccttgtactcaccattgtctctgtcagatgtccacattgcaaccaaatttgtatttttaaaaatatgtttaatctcatttctccctcattaaaatccctcagtggcatcccatggtttttaagttaaagcacacattcttcaaaatagcctaaaaacctagcctctaacaccttgttccaggttaccttccaaagtttctatcttgtgtcactatccatctcattctctgaatacttatccaggattaagatacatattccaggatcaaaaagacctgggttccaatctttgcacttccatttcctgccctctaatttgggggcagcagtttgtgctttgtaagcttcagtcttatttatagtgtgggaataataatggttctacctcagaagttaatagaagaatgaaataatgcatgtaaattgctcagcagcgtgcctagcataaagtaattactcaaaccataatgtaaagtaaaaagataaccatactatacatagaaagccaatcatctcagccatgattatctcagaaataaaaagagatgcagcagctcaggactgagagattgtgaagtttttttttttttaggaatggtaggcatttttctaaaagtaggtgaggagggtatctaacagtaggatttacattagagtccatgatatagggtaagatggtggcttgtatcagcattcactggatatttaacagttctaagatgctaatgtcttattttaaaagtctttttttttgagatggagtcttgctctgttgctcaggcttgagtgcagtagtgcaatcttggctcactgcaacctccgcctcctgtgttcaagtgattctcctgcctcagcctcctgagtagctgggattacaggcctgcaccaccacgcccagctaatttttgtatttttagtagagagagggttttgacatgtcggccaggcttttctctaactcctgacgtccggtgatccgcctgccttggcctcccaaagtgctgggattacatgcgtgagctaccgtgcctggcctaaaaagtcatttttaataagacagtttactgagatgtattcatcatttacatgtaaacaaaggcaaaatcgaaattaaaaagaaatcttgaaacaagtcagtaaccaatgatgagtagaaaataaagtataagtttgaacccctgttctaaatctgggtgaatgaattatatcaaatctatgtcatttaaaataataaaggttgttaaattactaaaatttcaaaactagtgaagaaaagaaaccaaaactgtaggtcagttctcataaactggcccacaaacatgtttgattctgtatgcattaagtttaaaatacatatgaataccttcagcagaccatgtgttttccctttctccaacattcaaaccactccctgattctttacatctgacctcttttaatattacttcctgaccccagaattcttttggcatataatcaatgcagtgatcaattcacatgtgactatagatacaaacagaatgacgaaagtttaatggaggatgaaaaagaagacaaataaatattttatcctttatatggtaagacagattcactatcatactgatgtcagtagcccatgaattaatttacagattctacctaacaaaattctaataaattttgtaaggttttaacatgtatgtgtgaacatacatattcatgctgttacacatataaagaaaattataacaaaagtgacctataccatcagtggtttaacagttttggaaaaatttatcgtgctctatacaacaattcattccatatgtgaaagttactttcaagtgctttatctaaatgtggaacaaacagtgattagaggagtctgtgacacactctaatcatggaatgagactggccttcctaaacatgagattcagaagcctccccacctcctgtcaacaagtcatagatttgactgtataagaactttataaagcttttatatgatcaaagatagtaaaagatacaatattttttaaacctaagaatgggagaaaattattgcagcacatataaactatggaattcatatccttaacataaaattgctcataaaaatcccttaggaaatgacgcttttctccagctcatagtcaaaggatatgaagaggcaacaggtgaccaataaatatgtggtaagtactaaatctccctaggatcagaagaaatacagtttaggccaatgaaatactatttttttcaatatcagattaataaaactgcattgaaagcatacaaaaagagatactatgcactaatttaaaagagcatgagtttgtacaaactctggtaggcaatttgtcaacttcagaattttaattgggaaaagtagaattttattttgaagttcaaaaactcggcacacaatgtctttccctccagattctattatacacatagaacaatgtaaatgattcttaaaaaaaaaaaaaaggtgaggcttttgagtggatgaaataattttgtaaaaggcaaaacagggaagagtgttcatgaattgtagcagaagatgctgcatgttatatgcgaatgaccgaagggttttaaaaatggaatctagtctgcccaaaggatccctagagaagttcaggcttggagttggcttatgtacaggctgtggcttctaagaagacatgatgaaaagcctcttgaagcctttgtatgtgaaagttatgtcagtagcccttgccaaaagcctcctcactctcccctctcttgtataagtaaattgaatgggatccttatttcacaccattaacaagtataagttctaactgaataaaaatctaaatgtaaattactaaagcaaaagtattagaaaaaatatagtgggatatgttaacga

SEQ ID NO: 319251 - DNA, 582 bp, Artificial Sequence
  derived and/or modified sequence
gtgagcgcggccgccggccaggatcgagccctggcccgggccctggcccagccccggcctccaaggaccgcgccgaaggagctcgactttctcaggatactgtccctctcccacagaggagctgaaggagtaggacagaagaactgtcaaattctggaatccttaaagccatgtccaaggatttggtgacatttggggatgtggctgtaaatttctctcaagaggaatgggaatggctgaaccctgctcagaggaatttgtacaggaaagtgatgttggagaactacaggagcttggtatcattgggagtttctgtttctaagccagatgtgatctcattattggagcaaggaaaagagccctggatggtgaagaaggagggaacaagaggcccatgccctgattgggagtatgtatttaaaaacagtgaattttcatcaaagcaagagacatatgaagaatcatccaaagttgtgacagtgggagcaagacatcttagttatagccttgactatcccagtttgagagaagactgtcaaagtgaggactggtataagaaccagctgggaagtcaagaggtac

SEQ ID NO: 319252 - DNA, 554 bp, Artificial Sequence
  derived and/or modified sequence
actgcgcgtgcgcctcaccgcgctggcaccccggcctggcagcctttggggacctgaaccagctgcgcctgcgcagctcgactttctcaggatactgtccctctcccacagaggagctgaaggagtaggacagaagaactgtcaaattctggaatccttaaagccatgtccaaggatttggtgacatttggggatgtggctgtaaatttctctcaagaggaatgggaatggctgaaccctgctcagaggaatttgtacaggaaagtgatgttggagaactacaggagcttggtatcattgggagtttctgtttctaagccagatgtgatctcattattggagcaaggaaaagagccctggatggtgaagaaggagggaacaagaggcccatgccctgattgggagtatgtatttaaaaacagtgaattttcatcaaagcaagagacatatgaagaatcatccaaagttgtgacagtgggagcaagacatcttagttatagccttgactatcccagtttgagagaagactgtcaaagtgaggactggtataagaa

SEQ ID NO: 319253 - protein, 716 aa, Artificial Sequence
  derived and/or modified sequence
MMSIRQRREIRATEVSEDFPAQEENVKLENKLPSGCTSRRLWKILSLTIGGTIALCIGLLTSVYLATLHENDLWFSNIKEVEREISFRTECGLYYSYYKQMLQAPTLVQGFHGLIYDNKTESMKTINLLQRMNIYQEVFLSILYRVLPIQKYLEPVYFYIYTLFGLQAIYVTALYITSWLLSGTWLSGLLAAFWYVTNRIDTTRVEFTIPLRENWALPFFAIQIAAITYFLRPNLQPLSERLTLLAIFISTFLFSLTWQFNQFMMLMQALVLFTLDSLDMLPAVKATWLYGIQITSLLLVCILQFFNSMILGSLLISFNLSVFIARKLQKNLKTGSFLNRLGKLLLHLFMVLCLTLFLNNIIKKILNLKSDEHIFKFLKAKFGLGATRDFDANLYLCEEAFGLLPFNTFGRLSDTLLFYAYIFVLSITVIVAFVVAFHNLSDSTNQQSVGKMEKGTVDLKPETAYNLIHTILFGFLALSTMRMKYLWTSHMCVFASFGLCSPEIWELLLKSVHLYNPKRICIMRYSVPILILLYLCYKFWPGMMDELSELREFYDPDTVELMNWINSNTPRKAVFAGSMQLLAGVKLCTGRTLTNHPHYEDSSLRERTRAVYQIYAKRAPEEVHALLRSFGTDYVILEDSICYERRHRRGCRLRDLLDIANGHMMDGPGENDPDLKPADHPRFCEEIKRNLPPYVAYFTRVFQNKTFHVYKLSRNK

SEQ ID NO: 319254 - DNA, 2151 bp, Artificial Sequence
  derived and/or modified sequence
atgatgtctatacgccagagacgtgagatacgcgccacggaggtatccgaggactttccagctcaggaggagaacgttaagctcgagaataagttacctagcggatgcacatcccgccggttatggaaaattctctctctcacgattggcggcacaatcgccctgtgcatcggcttgctaacttccgtgtatcttgctacactacatgagaatgacctgtggttttccaatatcaaggaagtggagcgggagatttccttcagaacagaatgcggcctttattattcctactataagcagatgctccaggctcccaccctggtccagggattccacggactgatttacgataataaaacagagtccatgaaaactatcaacctgctgcagagaatgaacatctaccaggaggtgttcctgtccatcctctaccgcgtcctgcccatccagaagtacctcgaacccgtgtatttttacatttacaccctcttcggtttgcaagccatctatgttacagctctgtacatcacttcttggttgctgagtggaacatggctgtctggcctcttagctgcgttctggtatgtgacaaatagaatagacactactcgcgtggagttcaccatccctctgagagaaaattgggccctccccttcttcgccattcagattgcagcaataacttatttcctgcgtcccaatctacagcctctatccgagagactgacgctcctggccatcttcatatctacatttttattctctctcacctggcagttcaatcagttcatgatgctgatgcaggccttagttttgtttactctagatagtctagatatgctcccggcagtgaaagcgacctggctttacggcatccagattacctccctcttgctggtttgcattctgcagttctttaattctatgattttgggttcgctcctgataagtttcaacctttcagtgttcatcgcgcgaaagctccaaaagaacctgaagaccggatcttttctgaataggcttggcaagttgctgctccacttgttcatggttctttgccttactttgttcttgaataatataataaagaagatcttgaacttaaaatccgacgaacacatctttaaatttctcaaagcaaagttcggcttgggggctactcgggacttcgacgccaacctgtacctgtgcgaggaggcattcggcctgctgccattcaacacattcggaagactctctgacacactgttgttctatgcttatatattcgtcctaagcattactgttatcgtggcctttgtcgttgcatttcacaacttatccgacagtactaaccagcaatctgtcggcaagatggagaaggggactgtcgatcttaaaccagaaacagcttacaatctgatacatactattctgtttggattccttgcattgagcactatgaggatgaagtacttatggaccagccacatgtgcgtattcgcaagcttcgggctttgcagccccgagatttgggagttacttctgaaatcagttcacctgtataatcccaagcggatttgtattatgcgttacagcgtgcccatcctgatactcctctacctctgttataaattttggccagggatgatggatgagctgtctgagctgagagaattttatgacccagataccgtagagcttatgaactggatcaactcaaatactccaaggaaggctgtcttcgctgggtctatgcaattgctggccggagtgaaactctgcactgggcggaccctgacaaatcaccctcactatgaggactcctctctcagggaacggactcgggctgtctaccagatttatgctaagagagcaccagaggaggtgcacgcattgctaagatctttcggcacagattacgtgattctcgaggactctatttgctacgaacggcggcatcgccgagggtgcaggcttagagatttgctcgatattgccaatggtcacatgatggacgggcctggagaaaatgaccccgatctgaagcccgctgaccacccccggttctgcgaggagattaagaggaatctgccgccctatgtggcttactttactagagtgttccagaataagactttccatgtgtataagctgtcccggaataaatag

SEQ ID NO: 319255 - DNA, 2151 bp, Artificial Sequence
  derived and/or modified sequence
atgatgagcattcggcaacggcgcgagatacgcgcgacagaggtgtctgaggactttcccgcccaggaagaaaacgttaaattggaaaacaagttgccttctggctgtacctcccggagactgtggaagattcttagcctgactattggtggcacaattgcgctctgcatcggactgctgacaagtgtctatcttgctacactccatgaaaatgacctttggtttagcaatatcaaggaggttgagagggaaatttcttttaggacagagtgtggcctttattactcttattataaacagatgctgcaagcccccacactggtgcagggcttccacggacttatttacgataacaagaccgagagcatgaagacgatcaatctccttcagcgcatgaacatttatcaagaggtctttctctctatcctctacagggtgctgcccatccagaagtacctggaacccgtctacttttatatttatacactcttcggacttcaggctatctatgtcaccgccctgtacattacaagttggttgctctctggcacctggctgagcggcctgctggcagcattctggtacgtaaccaacagaatcgacactacaagagtggaatttaccattccgcttcgagaaaattgggccttgccattttttgccattcagattgcagcaatcacctattttctgaggcctaatttacagccactctctgagcggcttaccttgctggcaatctttatatccacattcctgttctcactgacatggcaatttaaccaattcatgatgctcatgcaagcattggtgctgtttacccttgattctctggacatgctgccagccgttaaggccacctggctctacggcatccagatcacgtctcttctgctggtgtgcatcctgcagttttttaattcaatgatcctgggatcacttttgatatcctttaacctgtcagttttcattgcacgaaaactgcagaagaacctgaaaactggttcttttcttaatcgactggggaaattgctcttgcacctgttcatggtgctatgtctcactctgtttctaaataatatcatcaaaaagattctgaatctaaagtccgacgaacatattttcaagttccttaaggcaaagttcgggctgggggctacccgcgacttcgatgccaatttgtatctgtgcgaggaagcttttggcctgctcccgtttaacaccttcggtcggttgagcgataccctcctcttctatgcctacattttcgtgctgtcaattaccgtaatagttgcatttgttgtcgcctttcacaacctctctgattctacaaatcagcaaagtgtcggcaagatggagaagggcactgtggatctgaagcctgagacagcctataacctgattcacaccatactctttggcttcctggcactgtccactatgcggatgaaatatctttggacaagtcacatgtgcgtctttgcctccttcgggttgtgtagtccagaaatctgggagctgctcctgaagtccgtgcatctttataaccccaagagaatctgcatcatgagatattccgtgcccatccttattctgctatatttatgctacaaattttggccaggcatgatggacgagttgtctgagcttagagagttctacgatcctgataccgtggagttgatgaactggatcaactcaaatacccccaggaaggctgtgttcgctggaagcatgcagctcttggctggcgtgaagctttgtacggggcggacccttacgaaccatcctcattatgaggattcatcactgcgggaacgcaccagggcggtctaccagatctatgctaaacgcgcccccgaggaggttcatgcccttctgcggtctttcgggacggactatgttatccttgaggacagcatctgctatgagaggagacaccgaaggggctgccgactgcgcgacctccttgatattgccaatggccatatgatggacggccccggggagaacgatcccgacctgaaaccagcggaccatccaagattctgcgaagagataaagagaaacctgccaccctacgtggcctactttacccgcgtgttccagaataagaccttccatgtgtataaattaagtaggaataagtag

SEQ ID NO: 319256 - DNA, 2151 bp, Artificial Sequence
  derived and/or modified sequence
atgatgagcatccggcagaggcgggagatccgggccacagaggtgtctgaggacttccctgcccaggaggagaatgtgaagctggagaacaagctgcccagcggctgcaccagccggcggctgtggaagatcctgagcctgaccatcggcggcaccatcgccctgtgcatcggcctgctgacctctgtgtacctggccaccctgcatgaaaatgacctgtggttcagcaacatcaaggaggtggagcgggagatctccttcagaacagaatgtggcctgtactacagctactacaagcagatgctgcaggcccccaccctggtgcagggcttccacggcctcatctatgacaacaagacagagagcatgaagaccatcaacctgctgcagaggatgaacatctaccaggaggtgttcctgagcatcctgtacagagtgctgcccatccagaagtacctggagcctgtgtacttctacatctacaccctgtttggcctgcaggccatctacgtgacagccctgtacatcacctcctggctgctgagcggcacctggctgagcggcctgctggccgccttctggtacgtgaccaacagaattgacaccaccagggtggagttcaccatccccctgcgggagaactgggccctgcccttctttgccatccagattgctgccatcacctacttcctgcggcccaacctgcagcccctgtctgagcggctgaccctgctggccatcttcatcagcaccttcctgttcagcctgacctggcagttcaaccagttcatgatgctgatgcaggccctggtgctcttcaccctggacagcctggacatgctgcctgctgtgaaggccacctggctgtatggcatccagatcaccagcctgctgctggtgtgcatcctgcagttcttcaacagcatgatcctgggcagcctgctgatctccttcaacctgtctgtgttcatcgccaggaagctgcagaagaacctgaagacaggcagcttcctgaaccggctgggcaagctgctgctgcacctgttcatggtgctgtgcctgaccctcttcctgaacaacatcatcaagaagatcctgaacctgaagagtgatgagcacatcttcaagttcctgaaggccaagtttggcctgggcgccacccgggactttgatgccaacctgtacctgtgtgaggaggccttcggcctgctgcccttcaacaccttcggccgcctgagtgacaccctgctcttctacgcctacatctttgtgctgagcatcaccgtcatcgtggcctttgtggtggccttccacaacctgagtgacagcaccaaccagcagagcgtgggcaagatggagaagggcaccgtggacctgaagccagagacagcctacaacctgatccacaccatcctgtttggcttcctggccctgagcaccatgaggatgaagtacctgtggaccagccacatgtgtgtgtttgccagctttggcctgtgcagccctgagatctgggagctgctgctgaagtctgtgcacctgtacaaccccaagaggatctgcatcatgagatacagcgtgcccatcctgatcctgctgtacctgtgctacaagttctggccaggcatgatggatgagctgtctgagctgcgggagttctatgaccctgacacagtggagctgatgaactggatcaacagcaacacccccaggaaggctgtgtttgctggctccatgcagctgctggccggcgtgaagctgtgcaccggccgcaccctgaccaaccacccccactatgaggacagcagcctgcgggagaggaccagggctgtgtaccagatctatgccaagagggcccctgaggaggtgcacgccctgctgcggagctttggaacagattatgtgatcctggaggacagcatctgctatgaaagaagacaccggcggggctgccgcctgcgggacctgctggacatcgccaacggccacatgatggatggccctggagaaaatgaccctgacctgaagccagctgaccacccccgcttctgtgaggagatcaagaggaacctgcccccctacgtggcctacttcaccagggtcttccagaacaagaccttccacgtgtacaagctgagcaggaacaagtag

SEQ ID NO: 319257 - DNA, 2151 bp, Artificial Sequence
  derived and/or modified sequence
atgatgagcatccggcagcggcgggagatccgggccaccgaggtgtccgaggacttcccagcccaggaagagaatgttaagttggagaataagttgccctcgggctgcacttcacgccggctttggaagatcctttcgcttactatcggcggaaccatagctctctgcattgggctcctgacgtcagtttatctagctacactgcatgagaatgatctgtggttctctaacattaaagaggtcgagagagaaatctctttcaggactgagtgcgggctgtattattcctactacaagcagatgctgcaggcgcctactcttgtacaggggtttcacggcctaatctatgacaacaaaacagagtccatgaagaccattaacctgctgcagcgcatgaatatctatcaggaagtcttcctctccatcctttatcgggtgctgcccatccaaaagtatcttgaacctgtgtacttctacatttacacactgttcgggctgcaggccatctacgtgacagcgctttacattacgtcctggcttttgagcgggacctggctttctggattactggctgctttttggtacgtaactaacaggatcgacaccacccgggtcgaattcacaataccattaagggagaactgggcgctccccttttttgccatccagattgccgctattacgtactttttgcgcccaaatcttcagcctttatcggagcgattaacacttttggccatatttatctctacattcctgttttctctcacatggcagttcaatcagtttatgatgctgatgcaggcccttgtgctgttcacgctggactccctggacatgttgcccgcagttaaagccacatggctgtacggtatccagatcacatccttgctgctggtgtgcatcttgcagttcttcaacagtatgatcctggggtctcttctcattagcttcaacttgtcagtcttcatcgcacggaagctacaaaaaaacctgaagacaggaagttttctcaaccggctggggaaactacttcttcatctgttcatggttctgtgtctgactctcttcctgaataatatcatcaagaagatacttaacctgaaatccgacgaacacatcttcaaattcctgaaagccaaattcggactgggagccacccgagatttcgacgccaacttatacctatgcgaggaggccttcggactgttacctttcaatacttttggacgactctcagacacattgcttttctatgcctatatattcgtcctctctataactgttatcgtggcattcgtagtagcattccataacttatctgatagcaccaatcaacagtccgtcggcaaaatggaaaaaggcaccgtcgatttaaagcccgagaccgcctataacctgattcatacaatactctttggattcttagccttgagtactatgaggatgaagtacttgtggacctctcatatgtgtgtattcgcctcatttggcctttgcagtcccgagatctgggaacttctactaaagtcagttcatctatacaaccccaaaaggatttgcattatgcgatatagcgtgcccatactgatcctgctatacctgtgttataaattctggcctggcatgatggacgaactgagcgagttaagggagttctatgacccagataccgtggaactgatgaattggattaactctaataccccaagaaaagcagtgttcgctggatccatgcagttgctggctggcgttaagctgtgcaccgggaggacactcacaaatcaccctcattacgaggatagctccctgagggaacgcacacgtgccgtctatcagatctacgcgaagagagcaccggaggaagtgcatgcccttctcagatccttcggaacagattatgttattctggaggacagcatttgctatgaaagacgtcacaggaggggctgtcgcctgcgcgatctcctggacatcgcgaacggacacatgatggatggtccaggggaaaatgatcccgacctcaaacctgcggatcatcctcgcttttgcgaggaaataaagaggaatctgcctccgtacgtggcatacttcacgcgcgtcttccagaataagacttttcacgtgtataaattatctagaaacaagtag

SEQ ID NO: 319258 - DNA, 2151 bp, Artificial Sequence
  derived and/or modified sequence
atgatgagcatccggcagcggcgggagatccgggccaccgaggtgtcggaagacttccccgcgcaggaggagaatgtaaagctggagaacaagcttccatccggctgcacctccaggagactgtggaagatcttaagtcttactattggtggcactatcgccctctgcataggtttgctgacctcagtatacttagctaccctgcacgaaaacgatttgtggttttcgaacatcaaggaagtggagcgggaaatttcttttcgcaccgagtgtggcctgtactactcgtactataagcagatgctgcaggctcccactctagttcaggggttccacggtctcatctacgacaacaagacagagtctatgaaaacaattaatctgctgcagagaatgaacatctaccaggaggtctttctgagcattctataccgtgtgctcccaattcaaaaatatctggagcccgtgtatttctatatttatacactttttggtctccaggccatatacgtgacagccctgtacattacttcctggctgctcagcggaacctggctgtctgggctccttgcagcattttggtatgtcacaaacagaatagacaccacgcgtgtggagttcaccattcccctccgcgaaaattgggccctccccttctttgccatccaaatcgcggcaatcacttatttcctgcggcctaacctgcaaccgctaagcgagaggcttactctgttggccatttttatttccaccttcctcttttcgctgacctggcagttcaatcagtttatgatgctcatgcaggctctggtactgtttaccctggactcactggatatgttgccggccgttaaggcaacttggctgtacggaatccaaataaccagcctgttgctcgtctgcattttacagtttttcaatagtatgatcctcgggtccctgcttattagctttaatttgagcgtcttcattgcccgcaagctacagaaaaacttaaagacagggagctttcttaatcggcttggtaaacttcttctgcatttgtttatggttttatgtcttacactatttctgaataatattatcaaaaagatcctcaacctcaaaagtgacgagcacatatttaaattcctcaaggccaaattcggtctcggggctacgagagatttcgacgcaaacctgtacctttgcgaggaagcattcggcttgctgccatttaataccttcgggcggctgagtgatactctcctcttttacgcctatatcttcgtcctaagtattacagtaatagtggcctttgtggtcgcttttcataatctgagcgacagcacaaaccagcaatccgtgggaaaaatggagaagggtacagtagatctgaagccagaaaccgcgtataacctcattcatacaatcctgttcggatttctcgccttgtccactatgaggatgaaatacctctggacaagccatatgtgcgtctttgcatcatttgggctctgttcccccgagatctgggagctgctgctcaaatctgtccacctttacaacccaaaacgcatatgtattatgagatactctgtgccaattcttatcctgctgtacctatgttacaaattctggccaggcatgatggacgagctttccgagctcagggaattctacgatcccgacactgtcgagctcatgaattggattaactctaacacaccaaggaaggcagtgttcgcgggcagcatgcagcttctggctggtgtgaaactctgtacaggtcggacgctgacgaatcacccccattacgaggattccagcctgcgtgaacgtacccgggctgtatatcaaatatatgcaaagagagcccccgaggaggtgcatgcattattgaggtcatttggaacagactacgtgattctggaggacagtatatgctacgagcgtcgacaccggaggggctgtcggctgagggatctgctggatattgcaaacgggcacatgatggatggacctggcgagaacgacccggacctcaaaccagctgatcatccaagattttgcgaagaaataaagcggaatctgcccccctatgtcgcgtacttcacgcgtgtcttccagaacaagacttttcatgtgtacaagttgtccaggaataagtag

SEQ ID NO: 319259 - DNA, 2151 bp, Artificial Sequence
  derived and/or modified sequence
atgatgtctattaggcagcgtcgcgagattagagctacggaggtgtctgaagacttccccgctcaagaggagaatgtgaagcttgagaacaaacttccgtctggatgtacttcacgtcgcctgtggaaaattctgtccctcacgatcggcggtacgatcgctctgtgcatcggcctcctgacctccgtatacttagccaccctgcacgagaatgacctgtggttcagtaacatcaaagaggtcgagagagaaatcagtttccggactgagtgcggtttgtattactcgtactataaacagatgctgcaggctccaaccctggtgcaggggttccacggcttgatctatgataacaagaccgagagcatgaagactataaaccttttacaaagaatgaacatttaccaggaggtgttcctgtcaattctctaccgtgttctgcctatccagaaatatctcgagcccgtttatttctatatctacaccctcttcggcctgcaagcaatttacgttacagctctgtacattactagttggttactgtccgggacttggttgagtggactcctggccgctttttggtatgttaccaacaggatcgacactacgcgtgtggaattcacaattccactacgagaaaattgggctctgcctttcttcgctatccaaatcgctgcgatcacctactttcttaggccaaacttgcagcctctctcggaacgactgaccctcttggcaatcttcatcagcacttttctgttcagccttacctggcagttcaaccaattcatgatgctcatgcaggctctggtgctcttcactctcgacagtctggacatgctccctgctgtaaaggcgacctggctgtatggcatccagatcacaagcctgctgctagtgtgtatcctgcagttctttaattccatgatcctgggttcacttctgattagtttcaacctatcggtgtttattgcacggaaactccagaaaaatttgaagactggttcttttctcaaccggctcgggaagctactgctccatttattcatggtcctctgcctgaccctgtttctcaataatattatcaagaagattttaaatttgaagtccgatgagcacatctttaagtttttgaaggcaaaatttggcctgggtgccaccagagatttcgatgccaacctttatctgtgcgaagaggctttcggcctcctgcccttcaataccttcggcagactgtcagacactctgctcttttatgcatacatttttgtcttgtctatcacagtgatcgtggcgttcgtggtcgcattccacaacctgagcgattccaccaaccagcagtcagtgggcaagatggagaagggaacagtggatctcaagcccgaaaccgcttacaatttaatacataccattctgtttggctttctggctctatcaaccatgcggatgaaatacctttggactagccatatgtgtgttttcgcctctttcgggctttgctctccggaaatttgggaactcctgttgaaatcagtccatctttacaatcccaaaaggatttgcattatgaggtatagcgtgcccatactgatcctgttgtatctctgttacaaattttggcccggtatgatggacgagttaagcgagcttagggagttctacgaccccgacactgttgaactgatgaactggatcaattctaacacacccagaaaggcggttttcgccggtagtatgcaactgctagctggtgtcaagctgtgcactggaaggacgctgaccaaccatccacattatgaagactctagcttgagggaacgcacgcgcgcagtgtatcaaatctacgctaaacgcgcaccagaggaggtccacgcactgctgagatcgtttgggacagactacgtaatactggaggattccatttgctacgagcgcagacaccgcagagggtgccgccttagggatcttcttgatatcgccaacggacacatgatggatggcccaggtgagaatgacccagacctgaagcccgcagatcatcccaggttctgcgaagagatcaaaagaaacctcccaccttacgttgcctacttcaccagagtatttcagaataagacgtttcacgtctataaattaagtagaaacaaatag

SEQ ID NO: 319260 - DNA, 2151 bp, Artificial Sequence
  derived and/or modified sequence
atgatgtccatcaggcagcgcagagagatcagagccacagaagtgtctgaggatttcccagcccaggaggagaacgtcaagctggagaacaaattacccagcggctgcacttcacggcgactttggaaaatcctatctcttactatcgggggtacaattgccctgtgtatcggtctgctgacgagcgtgtaccttgctacactccacgaaaatgatctgtggttcagtaacattaaagaggtggaaagagagatcagttttaggacagagtgcggactgtactactcctattataagcagatgttacaggcaccaacccttgttcagggttttcacggactcatatatgataataaaacagagagcatgaagaccataaacttgttacagcggatgaacatataccaagaggtgttcttaagcatcctttacagagtgctccctatacagaagtatctagaaccagtttacttttatatctatactctgttcggccttcaagctatttacgtaacagcactttacatcacctcctggctcctctcgggcacctggctttcggggctgctagccgctttctggtatgtgaccaaccgcatcgacactacccgggttgaatttactatcccactgagagagaactgggccctgccattctttgccatacagattgccgctattacctattttttgcgcccaaatttacagccgctgagtgagcggttaacactgctggcaatattcatatctacttttttgttcagccttacgtggcagtttaaccagtttatgatgttaatgcaagccctagtgctattcactctggactctctggacatgctcccggctgttaaggcaacatggctgtacggaattcagatcacaagcctccttctcgtgtgtattctgcaattttttaactctatgatcctaggtagcctgctcatctcattcaatttgtcggtctttatagctagaaagctgcaaaaaaacttgaagacgggcagttttttaaatcggcttggaaaactcctgctccacctgtttatggttctgtgcctcactctgttcctcaataatatcataaagaagatcttgaatcttaaatcagacgagcatatattcaaatttctaaaggccaagttcggactgggagcaacccgggattttgacgcgaacctgtatctctgtgaagaagcttttggtttgcttccctttaataccttcggccgactgtccgacacactcctcttctatgcctacattttcgtcctttctattactgtgattgtggctttcgtggtggccttccacaatttgtcagacagtacaaaccagcaaagcgtggggaagatggaaaagggcaccgtcgatttgaaacccgagaccgcctacaaccttatccacacgattctgtttggcttcctggctttgtcaactatgaggatgaagtacttatggacaagccatatgtgcgtgttcgcctcttttggcctgtgctcgcccgagatctgggagctgctgttgaagagtgtgcatttgtataaccccaaaagaatatgtattatgagatattctgttcccatcttgattctgctttatctgtgctacaagttctggccgggtatgatggacgaactgagtgagctgagggaattttacgatcccgacacggtggaattaatgaattggatcaattcaaatacaccacgcaaagccgtgttcgcaggttccatgcaacttctggcgggtgtgaaactctgcacaggacgcaccctgacaaaccatccccactacgaagacagttcgctgagagaaagaacaagagccgtctatcagatctatgctaaaagggcacccgaggaggtgcacgccctgctgcgcagttttggcacagactacgtaatcttggaagacagtatatgttacgagcggaggcacagaagaggctgtcgtttgcgcgatctcttggacattgcaaacgggcacatgatggatggaccaggtgaaaatgacccagatcttaagcctgcagatcatccacgcttctgcgaagagataaaacgcaatctgcctccctatgtggcctatttcacaagagtgttccagaacaagacattccacgtctacaagttatctcgaaataagtag

SEQ ID NO: 319261 - DNA, 2151 bp, Artificial Sequence
  derived and/or modified sequence
atgatgagcatcagacagagaagagagatcagagccaccgaggtgagcgaggacttccccgcccaggaggagaacgtgaagctggagaacaagctgcccagcggctgcaccagcagaagactgtggaagatcctgagcctgaccatcggcggcaccatcgccctgtgcatcggcctgctgaccagcgtgtacctggccaccctgcacgagaacgacctgtggttcagcaacatcaaggaggtggagagagagatcagcttcagaaccgagtgcggcctgtactacagctactacaagcagatgctgcaggcccccaccctggtgcagggcttccacggcctgatctacgacaacaagaccgagagcatgaagaccatcaacctgctgcagagaatgaacatctaccaggaggtgttcctgagcatcctgtacagagtgctgcccatccagaagtacctggagcccgtgtacttctacatctacaccctgttcggcctgcaggccatctacgtgaccgccctgtacatcaccagctggctgctgagcggcacctggctgagcggcctgctggccgccttctggtacgtgaccaacagaatcgacaccaccagagtggagttcaccatccccctgagagagaactgggccctgcccttcttcgccatccagatcgccgccatcacctacttcctgagacccaacctgcagcccctgagcgagagactgaccctgctggccatcttcatcagcaccttcctgttcagcctgacctggcagttcaaccagttcatgatgctgatgcaggccctggtgctgttcaccctggacagcctggacatgctgcccgccgtgaaggccacctggctgtacggcatccagatcaccagcctgctgctggtgtgcatcctgcagttcttcaacagcatgatcctgggcagcctgctgatcagcttcaacctgagcgtgttcatcgccagaaagctgcagaagaacctgaagaccggcagcttcctgaacagactgggcaagctgctgctgcacctgttcatggtgctgtgcctgaccctgttcctgaacaacatcatcaagaagatcctgaacctgaagagcgacgagcacatcttcaagttcctgaaggccaagttcggcctgggcgccaccagagacttcgacgccaacctgtacctgtgcgaggaggccttcggcctgctgcccttcaacaccttcggcagactgagcgacaccctgctgttctacgcctacatcttcgtgctgagcatcaccgtgatcgtggccttcgtggtggccttccacaacctgagcgacagcaccaaccagcagagcgtgggcaagatggagaagggcaccgtggacctgaagcccgagaccgcctacaacctgatccacaccatcctgttcggcttcctggccctgagcaccatgagaatgaagtacctgtggaccagccacatgtgcgtgttcgccagcttcggcctgtgcagccccgagatctgggagctgctgctgaagagcgtgcacctgtacaaccccaagagaatctgcatcatgagatacagcgtgcccatcctgatcctgctgtacctgtgctacaagttctggcccggcatgatggacgagctgagcgagctgagagagttctacgaccccgacaccgtggagctgatgaactggatcaacagcaacacccccagaaaggccgtgttcgccggcagcatgcagctgctggccggcgtgaagctgtgcaccggcagaaccctgaccaaccacccccactacgaggacagcagcctgagagagagaaccagagccgtgtaccagatctacgccaagagagcccccgaggaggtgcacgccctgctgagaagcttcggcaccgactacgtgatcctggaggacagcatctgctacgagagaagacacagaagaggctgcagactgagagacctgctggacatcgccaacggccacatgatggacggccccggcgagaacgaccccgacctgaagcccgccgaccaccccagattctgcgaggagatcaagagaaacctgcccccctacgtggcctacttcaccagagtgttccagaacaagaccttccacgtgtacaagctgagcagaaacaagtag

SEQ ID NO: 319262 - DNA, 6024 bp, Artificial Sequence
  derived and/or modified sequence
ggaaggaccaagtttgcggagcggcttctgctcgtcggccgtgcggcgaggcagggcctgggctgcgaccccggcggccgctcgcggtcttgggagagctggggcgcgtgcctgaacttcccggctgcccctgtccttggagacctacctgatggggacgccaggtgtgcaggggcgtggcgcgtaggagtgatttggagaacaatgcatgtaagtctgacatcatgatgtccatccggcaaagaagagaaataagagccacagaagtttctgaagactttccagcccaagaagaaaatgtgaagttggaaaataaattgccatctggttgtaccagtagaagattatggaagattttgtcattgacaattggtggaaccattgccctttgcattggacttcttacatctgtctaccttgccacgttacatgaaaatgatttatggttttctaatattaaggaagtggagcgagaaatctcattcagaacagagtgtggcctgtattactcctactacaagcagatgctgcaggctccaaccctcgtgcaaggttttcatggcctaatatatgataataaaactgaatctatgaagacaattaacctccttcagcgaatgaatatttaccaagaggtttttctcagtattttatatagagttctacccatacagaaatatttagagccagtttatttttatatttacaccttatttgggctccaggcgatctatgtcacagctctctacataaccagctggctactcagtggtacatggctgtcaggactgttggcagctttctggtatgtcacaaatagaatagataccacaagagttgagtttaccatcccactgagggagaactgggcgctgccattctttgcaattcagatagcagcaattacatatttcctgagaccaaacttacagcctctttctgaaaggctgacacttcttgccattttcatatcaacttttctctttagtctgacatggcaatttaatcaatttatgatgctgatgcaagcattagtgctgttcacactggactccctggacatgctgccagcagtgaaggcgacatggctgtatggaatacagataacaagtttactcctggtctgcattcttcagttttttaattccatgattcttggatcactgcttatcagttttaacctttcagtattcattgcaagaaaacttcagaaaaatctgaaaactggaagcttccttaataggcttgggaaacttttgttacatttatttatggttttatgtttgacactttttctcaacaacataattaagaaaattcttaacctgaagtcagatgaacacatatttaaatttctgaaggcaaaatttgggcttggagcaacaagggattttgatgcaaatctctatctgtgtgaagaagcttttggcctcctgccttttaatacatttggaaggctttcagatactctgcttttttatgcttacatattcgttctgtccatcacagtgattgtagcattcgttgttgcctttcataatctcagtgattctacaaatcaacaatccgtgggtaaaatggaaaaaggcacagttgacctgaaaccagaaactgcctacaacttaatacataccattctgtttggattcttggcattgagtacaatgagaatgaagtacctctggacgtcacacatgtgtgtgttcgcatcattcggcctatgtagccctgaaatatgggagttacttctgaagtcagtccatctttataacccaaagaggatatgtataatgcgatattcagtaccgatattaatactgctgtatctatgctataagttctggccaggaatgatggatgaactctccgagttgagagaattctatgatccagatacagtggagctgatgaactggattaactctaacactccaagaaaggctgtgtttgcgggaagcatgcagttgctggccggagtcaagctgtgcacgggaaggaccctaaccaaccacccgcactatgaagacagcagcctgagagagcggaccagagcggtttatcagatatatgccaagagggcaccagaggaagtgcatgccctcctaaggtccttcggcactgactacgtaatcctggaagacagcatctgctacgagcggaggcaccgccggggctgccgactccgggacctgctggacattgccaacggccacatgatggatggcccaggagagaatgatcctgatttgaaacctgcagaccaccctcgcttctgtgaagagatcaaaagaaacctgcctccctacgtggcctacttcaccagagtgttccagaacaaaaccttccacgtttacaagctgtccagaaacaagtagcgcagatttctgcccagtgtctatttttgatacggagaaactgcatcatgatgaaactcaatagatgacgtttcctatgtaagtaggtagcccaaaccttcaagctgtgatatgagtaagttctacagatgtttacacaagtgttgccatctttgaaagcatcttctacaagcagaagtctttttcgttgtgtgtctatctttctcattaatgttctttagcctaaatgttaacaactttctaagagtgacctagaattatgttgttggagagaatgatgtgtgttccatggatacctggataggcacataacatgttggaagatgagcacctgctcaggatttgaaatacgtttaattttcaggtgacttaagacagctatgattgaatcaactagagatgatgatcgacttatttaatatgatttcactggtgaagaccaattggtagctttttaaaaagcactttagtgtcctgttttaccttaaaatgttataatattttccagttgtcatgctgtcaacattaacaaaaaaaatcatgttaaggctttgtatcaaacattttgttacactctgtctgaaatgtaatgtggagtacttcagcagtatgtgtcatgtattgtgtgtgtctgtgtgtgtgcatgtgcacacatgtgttttaatgctgggcacagaaaagtgttacaagttccatatcgtaagtccttaaaggggcagaaatatatgtagccaagtagaatttattacattttagtgttattattttaaaacttactgatactctttaacctctcctgcagtaatagttttgctttatttcttactcatttcaatttattgggtttgcaaaattttgtaaactttttgtgtttttagcctttgtattttttacagcctagaatcttgcaaagtctgaatattttttaaatgttctatcttaactagttcactaatacagtatttttagcagacagcattttcagacagcattttcataccaagtttgacttgtggtctccaatcttactgggaaggccctggtagtgtaattcttttccttattaaaaggtaaccaagtgcctctaagtcatgcttatttgtaaacaacaaagaagagtatatgtacctgctcaaaatttttttgataatcgcttatataattaatttctaatgatgaggacatgtaaaagttgccagtaagaacatagtatgcatttaattaaatcaagatggctaatggaattaactttctcccctgttcttgccaggtggaaatgatttaagcatttctccttgcagttgtattgaagtaaattaccataggcatcaagatggctgcatcacattttcaaatgattttatattcagttgctacttataaagcagcattcaaaaagtcttttacactgtcatgttggacacaagcagactcagcttttatcaaaacttgtttaaataaaaaattgacagtagctgggttattaaattatgcaactgaaactcctgaattatatcttttctgtatcccttaataagattggagaccactgccgtttaggataatacaataataaaacgttttaatcagtactaaaactttaattaagccaataatgatgcatgcctgttgtagctgacagcatgggtcagtacatccttcagcgagtgccttactctaattgaaaccaagcacacgtaaggtacaatatgttagactctgtgattttgttttcaaaatcctctgttatggctatatttaaatttattttaaatattcctgtatgtattcatctaagcatttgggcatttggagtcttaatatacaagaaacacgtacttaaatttttatgcttatcaccgcaatgatggcaaacagtgattttttttttcatagtttaggtgtcattgttgccagcacctttagtgctcagtcttcagtgaaaaatataaagtgccaaaaaaatcttgcaagacagaatccatacttaacactctttccaagacactgtgaccatgtacagtagctatttcctgatgaccaaatctctcaacgaatcatgttattaataaatatttttagcactcatcagtattctccaatgtgaccttctcattggagtacacagaaggaaagcaaagaagagcatctgacttctagctctggcttacagcctctctaccaggccgaagcaagagacccgcggcagcagctccccgccactcagacctgggtggtgataacctcaaagaatggctctgttttctattgacagaaaacccacttgattttgcttctgagttagcagtcagaagaccctctaagtacaatagaagtgctcttaacggactctgcctgtgtgactcccaggccccggagtctccatctctctcgtaagccacctgccacagcacagctggaggctgttctctggtgttctcagcgctccggctccctccctggagttgtgcacccgtcccaaactcctccatgcaagttctgcttcctcttataagtacacaactcagttaagtattcacatacacacagaaaatacgggtgtgaaaagaaagaattttctgtaaaaattaagttgaatactttggtaaaaagtgataaaggctgagttgccaataaaagttgcttttaaattaggtgtggctgggaatattataagatattggggaaaatatacaaatcaagaaaatttctgagcttagattgcttcatagatttatttaagtactcatcccacctttaaaacctctaaactgagaagaagggacccaaatcatgttattggtgtgatttatgtgagaagtagaactgtagtcattggacccttaggcaaaggaaaatccgtgtctttatatcagaagatcggcaaacgaatgtatattacacagtttaggttatgattccctactttaacctacttactttattaaatgaccaactactgatactgatcacaatagttattagagattctaatttagttggaaggttctaatcactttcattacaggcatttgaaaaatagggattcatttcgaatatattagccaggagcatagttagatgttacccaggccatttatcatcctgttaatgatgattttcccgacccttgtgagatcagcgtgacaggagtgtgtgtgtgtgtgtgtgtttctgtgggtgtgtggttttggttgggtgctgccaggtggcaaaggcatatgtaaatacatctgatctgcatctttatttcacagttaactaaaagtaaaaatgtctattctgattccatattgattttgtctaagatgtaaaaatttgagttcatctttggccaaaacctacctgaattaacatacaaaatatttgatttttaaaatttaattcaaatctcaaaatcaattaagtattctcagatcctatatcttggttaatatgctcccagatactttaaacatggcaaccttttggcctaagagaatgtttgttcatggaaaaaagcttttgagatgagagggtgtcttactttcttgtggcaattgattttctgttttaacaccctttgggtaaaatcttgcaaagagcttttataatttgttttactgaattgtatggagattgtataccaagtaaagctcttttaaattac

SEQ ID NO: 319263 - DNA, 5998 bp, Artificial Sequence
  derived and/or modified sequence
gttgacgccccccagcccctcatttccacaaagctccgcggcggttctgccctccttgtacccgcggcgcgctgcggcccgtggcgcggccccgttcccgcctagccccgtcggcctccttcccctcccggagccgcgcgtgaggacggctgaggccgcaggagtgatttggagaacaatgcatgtaagtctgacatcatgatgtccatccggcaaagaagagaaataagagccacagaagtttctgaagactttccagcccaagaagaaaatgtgaagttggaaaataaattgccatctggttgtaccagtagaagattatggaagattttgtcattgacaattggtggaaccattgccctttgcattggacttcttacatctgtctaccttgccacgttacatgaaaatgatttatggttttctaatattaaggaagtggagcgagaaatctcattcagaacagagtgtggcctgtattactcctactacaagcagatgctgcaggctccaaccctcgtgcaaggttttcatggcctaatatatgataataaaactgaatctatgaagacaattaacctccttcagcgaatgaatatttaccaagaggtttttctcagtattttatatagagttctacccatacagaaatatttagagccagtttatttttatatttacaccttatttgggctccaggcgatctatgtcacagctctctacataaccagctggctactcagtggtacatggctgtcaggactgttggcagctttctggtatgtcacaaatagaatagataccacaagagttgagtttaccatcccactgagggagaactgggcgctgccattctttgcaattcagatagcagcaattacatatttcctgagaccaaacttacagcctctttctgaaaggctgacacttcttgccattttcatatcaacttttctctttagtctgacatggcaatttaatcaatttatgatgctgatgcaagcattagtgctgttcacactggactccctggacatgctgccagcagtgaaggcgacatggctgtatggaatacagataacaagtttactcctggtctgcattcttcagttttttaattccatgattcttggatcactgcttatcagttttaacctttcagtattcattgcaagaaaacttcagaaaaatctgaaaactggaagcttccttaataggcttgggaaacttttgttacatttatttatggttttatgtttgacactttttctcaacaacataattaagaaaattcttaacctgaagtcagatgaacacatatttaaatttctgaaggcaaaatttgggcttggagcaacaagggattttgatgcaaatctctatctgtgtgaagaagcttttggcctcctgccttttaatacatttggaaggctttcagatactctgcttttttatgcttacatattcgttctgtccatcacagtgattgtagcattcgttgttgcctttcataatctcagtgattctacaaatcaacaatccgtgggtaaaatggaaaaaggcacagttgacctgaaaccagaaactgcctacaacttaatacataccattctgtttggattcttggcattgagtacaatgagaatgaagtacctctggacgtcacacatgtgtgtgttcgcatcattcggcctatgtagccctgaaatatgggagttacttctgaagtcagtccatctttataacccaaagaggatatgtataatgcgatattcagtaccgatattaatactgctgtatctatgctataagttctggccaggaatgatggatgaactctccgagttgagagaattctatgatccagatacagtggagctgatgaactggattaactctaacactccaagaaaggctgtgtttgcgggaagcatgcagttgctggccggagtcaagctgtgcacgggaaggaccctaaccaaccacccgcactatgaagacagcagcctgagagagcggaccagagcggtttatcagatatatgccaagagggcaccagaggaagtgcatgccctcctaaggtccttcggcactgactacgtaatcctggaagacagcatctgctacgagcggaggcaccgccggggctgccgactccgggacctgctggacattgccaacggccacatgatggatggcccaggagagaatgatcctgatttgaaacctgcagaccaccctcgcttctgtgaagagatcaaaagaaacctgcctccctacgtggcctacttcaccagagtgttccagaacaaaaccttccacgtttacaagctgtccagaaacaagtagcgcagatttctgcccagtgtctatttttgatacggagaaactgcatcatgatgaaactcaatagatgacgtttcctatgtaagtaggtagcccaaaccttcaagctgtgatatgagtaagttctacagatgtttacacaagtgttgccatctttgaaagcatcttctacaagcagaagtctttttcgttgtgtgtctatctttctcattaatgttctttagcctaaatgttaacaactttctaagagtgacctagaattatgttgttggagagaatgatgtgtgttccatggatacctggataggcacataacatgttggaagatgagcacctgctcaggatttgaaatacgtttaattttcaggtgacttaagacagctatgattgaatcaactagagatgatgatcgacttatttaatatgatttcactggtgaagaccaattggtagctttttaaaaagcactttagtgtcctgttttaccttaaaatgttataatattttccagttgtcatgctgtcaacattaacaaaaaaaatcatgttaaggctttgtatcaaacattttgttacactctgtctgaaatgtaatgtggagtacttcagcagtatgtgtcatgtattgtgtgtgtctgtgtgtgtgcatgtgcacacatgtgttttaatgctgggcacagaaaagtgttacaagttccatatcgtaagtccttaaaggggcagaaatatatgtagccaagtagaatttattacattttagtgttattattttaaaacttactgatactctttaacctctcctgcagtaatagttttgctttatttcttactcatttcaatttattgggtttgcaaaattttgtaaactttttgtgtttttagcctttgtattttttacagcctagaatcttgcaaagtctgaatattttttaaatgttctatcttaactagttcactaatacagtatttttagcagacagcattttcagacagcattttcataccaagtttgacttgtggtctccaatcttactgggaaggccctggtagtgtaattcttttccttattaaaaggtaaccaagtgcctctaagtcatgcttatttgtaaacaacaaagaagagtatatgtacctgctcaaaatttttttgataatcgcttatataattaatttctaatgatgaggacatgtaaaagttgccagtaagaacatagtatgcatttaattaaatcaagatggctaatggaattaactttctcccctgttcttgccaggtggaaatgatttaagcatttctccttgcagttgtattgaagtaaattaccataggcatcaagatggctgcatcacattttcaaatgattttatattcagttgctacttataaagcagcattcaaaaagtcttttacactgtcatgttggacacaagcagactcagcttttatcaaaacttgtttaaataaaaaattgacagtagctgggttattaaattatgcaactgaaactcctgaattatatcttttctgtatcccttaataagattggagaccactgccgtttaggataatacaataataaaacgttttaatcagtactaaaactttaattaagccaataatgatgcatgcctgttgtagctgacagcatgggtcagtacatccttcagcgagtgccttactctaattgaaaccaagcacacgtaaggtacaatatgttagactctgtgattttgttttcaaaatcctctgttatggctatatttaaatttattttaaatattcctgtatgtattcatctaagcatttgggcatttggagtcttaatatacaagaaacacgtacttaaatttttatgcttatcaccgcaatgatggcaaacagtgattttttttttcatagtttaggtgtcattgttgccagcacctttagtgctcagtcttcagtgaaaaatataaagtgccaaaaaaatcttgcaagacagaatccatacttaacactctttccaagacactgtgaccatgtacagtagctatttcctgatgaccaaatctctcaacgaatcatgttattaataaatatttttagcactcatcagtattctccaatgtgaccttctcattggagtacacagaaggaaagcaaagaagagcatctgacttctagctctggcttacagcctctctaccaggccgaagcaagagacccgcggcagcagctccccgccactcagacctgggtggtgataacctcaaagaatggctctgttttctattgacagaaaacccacttgattttgcttctgagttagcagtcagaagaccctctaagtacaatagaagtgctcttaacggactctgcctgtgtgactcccaggccccggagtctccatctctctcgtaagccacctgccacagcacagctggaggctgttctctggtgttctcagcgctccggctccctccctggagttgtgcacccgtcccaaactcctccatgcaagttctgcttcctcttataagtacacaactcagttaagtattcacatacacacagaaaatacgggtgtgaaaagaaagaattttctgtaaaaattaagttgaatactttggtaaaaagtgataaaggctgagttgccaataaaagttgcttttaaattaggtgtggctgggaatattataagatattggggaaaatatacaaatcaagaaaatttctgagcttagattgcttcatagatttatttaagtactcatcccacctttaaaacctctaaactgagaagaagggacccaaatcatgttattggtgtgatttatgtgagaagtagaactgtagtcattggacccttaggcaaaggaaaatccgtgtctttatatcagaagatcggcaaacgaatgtatattacacagtttaggttatgattccctactttaacctacttactttattaaatgaccaactactgatactgatcacaatagttattagagattctaatttagttggaaggttctaatcactttcattacaggcatttgaaaaatagggattcatttcgaatatattagccaggagcatagttagatgttacccaggccatttatcatcctgttaatgatgattttcccgacccttgtgagatcagcgtgacaggagtgtgtgtgtgtgtgtgtgtttctgtgggtgtgtggttttggttgggtgctgccaggtggcaaaggcatatgtaaatacatctgatctgcatctttatttcacagttaactaaaagtaaaaatgtctattctgattccatattgattttgtctaagatgtaaaaatttgagttcatctttggccaaaacctacctgaattaacatacaaaatatttgatttttaaaatttaattcaaatctcaaaatcaattaagtattctcagatcctatatcttggttaatatgctcccagatactttaaacatggcaaccttttggcctaagagaatgtttgttcatggaaaaaagcttttgagatgagagggtgtcttactttcttgtggcaattgattttctgttttaacaccctttgggtaaaatcttgcaaagagcttttataatttgttttactgaattgtatggagattgtataccaagtaaagctcttttaaattac

SEQ ID NO: 319264 - protein, 542 aa, Artificial Sequence
  derived and/or modified sequence
MMSIRQRREIRATEVSEDFPAQEENVKLENKLPSGCTSRRLWKILSLTIGGTIALCIGLLTSVYLATLHENDLWFSNIKEVEREISFRTECGLYYSYYKQMLQAPTLVQGFHGLIYDNKTESMKTINLLQRMNIYQEVFLSILYRVLPIQKYLEPVYFYIYTLFGLQAIYVTALYITSWLLSGTWLSGLLAAFWYVTNRIDTTRVEFTIPLRENWALPFFAIQIAAITYFLRPNLQPLSERLTLLAIFISTFLFSLTWQFNQFMMLMQALVLFTLDSLDMLPAVKATWLYGIQITSLLLVCILQFFNSMILGSLLISFNLSVFIARKLQKNLKTGSFLNRLGKLLLHLFMVLCLTLFLNNIIKKILNLKSDEHIFKFLKAKFGLGATRDFDANLYLCEEAFGLLPFNTFGRLSDTLLFYAYIFVLSITVIVAFVVAFHNLSDSTNQQSVGKMEKGTVDLKPETAYNLIHTILFGFLALSTMRMKYLWTSHMCVFASFGLCSPEIWELLLKSVHLYNPKRICIMRYSVPILILLYLCYKNQKS

SEQ ID NO: 319265 - protein, 113 aa, Artificial Sequence
  derived and/or modified sequence
MMSIRQRREIRATEVSEDFPAQEENVKLENKLPSGCTSRRLWKILSLTIGGTLPFALDFLHLSTLPRYMKMIYGFLILRKWSEKSHSEQSVACITPTTSRCCRLQPSCKVFMA

SEQ ID NO: 319266 - DNA, 1629 bp, Artificial Sequence
  derived and/or modified sequence
atgatgtctatcagacagagacgagagataagagctacagaggtatccgaggatttccccgcccaggaagaaaacgtcaaacttgaaaacaagttgccctcgggctgcacttcccgcagactatggaaaatcctgtcccttacaattggcggcactatcgcgctctgtatcgggcttctaactagcgtctatctcgctaccctgcacgaaaatgacctgtggttttcgaacatcaaagaagtggaaagggagatctcattcaggactgagtgcgggctgtattatagctactataagcaaatgctgcaggctccaaccctagtacagggctttcacggactgatatacgacaataagacagagtctatgaagactataaacctcctacagagaatgaacatttatcaggaggtctttctgagtatcttataccgggttctccccatccagaaatatctggagcctgtctacttctacatctacacactatttggactacaagctatctatgtgactgccctgtacattacatcctggcttctgagtgggacatggctgtccgggctgttagctgccttctggtacgtgactaacaggatcgatacaacgcgagttgagtttaccatccccctgcgagaaaattgggctcttcctttttttgccattcagatcgctgccattacctatttcttgcggcccaatctacaaccgctgagcgaacggttaactttgctggccattttcatatcaacgtttctgttcagtctgacctggcagttcaaccagttcatgatgctcatgcaggctctggtgctcttcacgttagactcgcttgatatgctgcctgcagtaaaagctacctggctctacggaatacagataacatcacttctgctcgtctgtatcctgcagttttttaatagcatgatattaggaagcttgctgatctcctttaacctatccgtgttcattgcccggaaacttcagaagaacctgaaaaccggctcctttctgaaccggctggggaaactgttgctgcatctctttatggtgctgtgccttactctgttcctaaacaacatcatcaaaaagatactgaacctgaagtcggatgagcatatcttcaagtttttaaaggcaaaattcgggttaggggccactagggacttcgacgctaatctttacttatgtgaggaagccttcggattattgccatttaatacctttggccggctttccgataccctactgttttatgcttacatctttgttctatccatcaccgtgattgtagccttcgtcgtggcttttcacaacctttcagatagcacaaaccagcaaagcgtgggcaaaatggagaagggaactgtcgacctcaagcctgagactgcatataacctcatccacactattctgtttggcttcttggcactgtctacaatgcggatgaagtacctctggacaagtcacatgtgtgtgtttgcctcatttggattgtgttccccagagatatgggaactactccttaagtctgtacacttatacaaccctaagaggatttgtattatgagatactctgtacccatactaatccttctgtatctgtgctacaaaaaccagaagtcctag

SEQ ID NO: 319267 - DNA, 342 bp, Artificial Sequence
  derived and/or modified sequence
atgatgagcattagacaaaggagagaaattcgggctacggaggtgagcgaagatttccctgcccaggaagaaaatgttaagctcgaaaacaagctgccctccgggtgcaccagcagacggctctggaaaatccttagtctcaccattggtgggaccctccccttcgcgctcgactttctgcacctttccactctgcctcgctatatgaagatgatatacggattccttatactacggaaatggtctgaaaagagccattctgagcaatcggtcgcctgtataacacccacaacctcaagatgctgtaggctgcagcctagttgcaaggtgttcatggcatag

SEQ ID NO: 319268 - DNA, 1629 bp, Artificial Sequence
  derived and/or modified sequence
atgatgagcatccggcagaggcgggagatccgggccacagaggtgtctgaggacttccctgcccaggaggagaatgtgaagctggagaacaagctgcccagcggctgcaccagccggcggctgtggaagatcctgagcctgaccatcggcggcaccatcgccctgtgcatcggcctgctgacctctgtgtacctggccaccctgcatgaaaatgacctgtggttcagcaacatcaaggaggtggagcgggagatctccttcagaacagaatgtggcctgtactacagctactacaagcagatgctgcaggcccccaccctggtgcagggcttccacggcctcatctatgacaacaagacagagagcatgaagaccatcaacctgctgcagaggatgaacatctaccaggaggtgttcctgagcatcctgtacagagtgctgcccatccagaagtacctggagcctgtgtacttctacatctacaccctgtttggcctgcaggccatctacgtgacagccctgtacatcacctcctggctgctgagcggcacctggctgagcggcctgctggccgccttctggtacgtgaccaacagaattgacaccaccagggtggagttcaccatccccctgcgggagaactgggccctgcccttctttgccatccagattgctgccatcacctacttcctgcggcccaacctgcagcccctgtctgagcggctgaccctgctggccatcttcatcagcaccttcctgttcagcctgacctggcagttcaaccagttcatgatgctgatgcaggccctggtgctcttcaccctggacagcctggacatgctgcctgctgtgaaggccacctggctgtatggcatccagatcaccagcctgctgctggtgtgcatcctgcagttcttcaacagcatgatcctgggcagcctgctgatctccttcaacctgtctgtgttcatcgccaggaagctgcagaagaacctgaagacaggcagcttcctgaaccggctgggcaagctgctgctgcacctgttcatggtgctgtgcctgaccctcttcctgaacaacatcatcaagaagatcctgaacctgaagagtgatgagcacatcttcaagttcctgaaggccaagtttggcctgggcgccacccgggactttgatgccaacctgtacctgtgtgaggaggccttcggcctgctgcccttcaacaccttcggccgcctgagtgacaccctgctcttctacgcctacatctttgtgctgagcatcaccgtcatcgtggcctttgtggtggccttccacaacctgagtgacagcaccaaccagcagagcgtgggcaagatggagaagggcaccgtggacctgaagccagagacagcctacaacctgatccacaccatcctgtttggcttcctggccctgagcaccatgaggatgaagtacctgtggaccagccacatgtgtgtgtttgccagctttggcctgtgcagccctgagatctgggagctgctgctgaagtctgtgcacctgtacaaccccaagaggatctgcatcatgagatacagcgtgcccatcctgatcctgctgtacctgtgctacaagaaccagaagagctag

SEQ ID NO: 319269 - DNA, 342 bp, Artificial Sequence
  derived and/or modified sequence
atgatgagcatccggcagaggcgggagatccgggccacagaggtgtctgaggacttccctgcccaggaggagaatgtgaagctggagaacaagctgcccagcggctgcaccagccggcggctgtggaagatcctgagcctgaccatcggcggcaccctgccctttgccctggacttcctgcacctgagcaccctgccccgctacatgaagatgatctacggcttcctgatcctgaggaagtggagcgagaagagccacagcgagcagagcgtggcctgcatcacccccaccaccagccgctgctgccgcctgcagcccagctgcaaggtgttcatggcctag

SEQ ID NO: 319270 - DNA, 1629 bp, Artificial Sequence
  derived and/or modified sequence
atgatgagcatccggcagcggcgggagatccgggccaccgaggtgagtgaagatttccccgcccaggaggaaaacgtgaaactggaaaacaagttgccttccgggtgtacatctcgaaggctgtggaagattttaagcctgaccattggagggaccatcgctttgtgtattgggctccttacaagtgtgtacctggcaactctccacgagaatgatctgtggttttccaatataaaagaagtggaaagagaaatctccttcaggacggagtgcggcttgtattattcttactacaagcagatgttgcaagcaccgacactcgtacagggattccacggcctgatatacgacaacaaaacagagagcatgaagactatcaacctgctgcaacgtatgaatatttaccaagaggtatttctgtcaatcctgtaccgagtcctcccaattcaaaaatatctcgaacccgtttatttctacatctacactttatttggccttcaagccatttatgtcactgccttgtatattaccagttggctgttgtccgggacttggctatctggactcctggctgctttttggtacgtcactaatagaatagatactactagagtggaatttacgatccctctcagggaaaattgggcacttcctttcttcgcgattcagatcgccgcgatcacttacttcctgaggccgaatctccaacccctgtctgaacgtctgacactcctggccattttcatatcaaccttcctgttctcactgacttggcagtttaatcagtttatgatgctcatgcaggctctggttctgttcacccttgattcacttgatatgctcccagctgttaaagcaacatggctttatggaatccaaatcacttctctcctgctggtctgcatcctgcagtttttcaactcaatgattctgggttccttactgatctcatttaacttgagcgtgttcatcgccagaaagctccagaagaatctcaaaactgggagttttctcaatcgactgggaaagttacttctgcacctcttcatggtcttgtgcctgacattgtttcttaataatatcataaaaaaaatactgaaccttaaatctgatgagcatatcttcaagttccttaaggcgaaattcggcttaggcgcaacccgcgacttcgatgccaacttgtacttgtgcgaagaggccttcggcttattaccatttaacacatttggacgactcagtgataccctgcttttctatgcctatatatttgtcctcagcatcacagtgattgtcgccttcgtcgtggcttttcacaacctcagcgacagtacgaatcaacagtccgtggggaaaatggagaaaggtacagttgaccttaaacccgaaactgcttataacctgattcacaccattctgttcggttttctggccctgtctaccatgagaatgaagtacctgtggacatctcacatgtgtgtgtttgcctcctttggcctttgctctccagaaatttgggagcttttactgaagtccgtccacctttacaatcccaaacgcatctgcattatgagatactcagtgcctattttaattctgctgtatctatgctataagaaccaaaagtcctag

SEQ ID NO: 319271 - DNA, 342 bp, Artificial Sequence
  derived and/or modified sequence
atgatgagcatccggcagcggcgggagatccgggccaccgaggtgtccgaggactttcctgctcaggaggagaacgttaaattggagaacaagctacctagtggatgtacatcaaggcgcctgtggaagattctgagtttgaccatcggtgggacccttccatttgcgctggacttcctacatctatccactctgcctaggtacatgaaaatgatctacgggttcctgattttgaggaagtggagcgagaagagccactctgagcagagcgtggcttgcattactccaacgaccagtcgttgctgccggctgcaaccatcctgtaaagttttcatggcctag

SEQ ID NO: 319272 - DNA, 1629 bp, Artificial Sequence
  derived and/or modified sequence
atgatgtccatccgccagcgaagagaaattcgagccactgaggtgtctgaagattttccagcgcaggaagaaaatgtgaaattggaaaacaaactacctagcggatgcacgtccaggcgcctctggaagatactctcgctgaccattggcggtacaattgctttgtgtatcggacttctgacctcagtgtatctggccacgcttcacgaaaacgacctttggttcagcaacattaaagaagtggagagagaaatttcttttcggactgaatgtggcttgtattacagttattataagcaaatgttgcaagctcctactttggtccaggggtttcatggcttgatttacgacaacaaaacagagtccatgaaaactatcaacctgcttcagcgcatgaatatataccaggaagtgtttttaagcatattgtatcgggttctgccaattcagaagtatctggagccggtgtatttctacatatacaccttatttggactacaagccatttatgtgactgccttatatataactagttggctattgtcgggtacttggctgagtggactgctggcagctttttggtacgtgaccaaccgaatcgacacgactcgagtggaattcactatacccctacgcgagaattgggctcttccattcttcgccatccagatcgccgctataacttattttcttcggccaaacctccagcccctgtcagaaaggctcactctcctggctatttttattagcacctttctgttttccttaacttggcaatttaatcaatttatgatgctcatgcaagccctcgttctatttaccctggacagcctggatatgttgccggcagtgaaagcaacatggctgtacggcatccagattactagcctgctactggtctgcattctccaattctttaacagcatgattttaggatccctcctgataagctttaatctgtccgtgtttatagcacgcaagctgcagaaaaacctgaagacggggagtttcctcaatcgattgggtaagcttttgcttcaccttttcatggttctttgtcttaccctattcctgaacaacattattaagaagatcctgaacctgaaatccgacgagcacatatttaaatttctgaaggctaagttcggcttgggcgctacccgcgacttcgacgccaacttgtatctgtgcgaggaggcttttgggttgttaccattcaatacattcggtagactctccgacacactgctgttctacgcctacattttcgtcctctcgatcacggtcatagtggcctttgtagtagcctttcataatctcagtgattccacgaatcagcagagcgtgggcaagatggagaagggcaccgtcgatctgaaacctgagactgcctacaacctcatacataccattttgttcggtttccttgccctgtccacgatgcgcatgaagtatctgtggacatcacatatgtgcgtctttgcgagcttcggcctgtgtagtccggagatctgggagctgctgctgaagtccgtgcacctttacaaccctaagcggatctgcattatgagatatagtgtgccaatcttaattctactgtacctttgttataaaaatcagaaatcctag

SEQ ID NO: 319273 - DNA, 342 bp, Artificial Sequence
  derived and/or modified sequence
atgatgtcgattcgacagcgcagagaaattcgcgctaccgaggtctctgaggattttccggctcaagaggagaacgtaaagctcgagaacaaactgccctccggatgcactagccgaaggctctggaagatcctgagcctgaccataggagggaccctgccttttgccctggattttctacacctatctactctcccaagatacatgaagatgatctacggcttcctgattttaaggaagtggtctgagaagagccatagcgagcagtcagtggcatgtatcactcccaccacctccagatgttgtcggctgcagcctagttgcaaagtgttcatggcttag

SEQ ID NO: 319274 - DNA, 1629 bp, Artificial Sequence
  derived and/or modified sequence
atgatgagcatcagacagagaagagagatcagagccaccgaggtgagcgaggacttccccgcccaggaggagaacgtgaagctggagaacaagctgcccagcggctgcaccagcagaagactgtggaagatcctgagcctgaccatcggcggcaccatcgccctgtgcatcggcctgctgaccagcgtgtacctggccaccctgcacgagaacgacctgtggttcagcaacatcaaggaggtggagagagagatcagcttcagaaccgagtgcggcctgtactacagctactacaagcagatgctgcaggcccccaccctggtgcagggcttccacggcctgatctacgacaacaagaccgagagcatgaagaccatcaacctgctgcagagaatgaacatctaccaggaggtgttcctgagcatcctgtacagagtgctgcccatccagaagtacctggagcccgtgtacttctacatctacaccctgttcggcctgcaggccatctacgtgaccgccctgtacatcaccagctggctgctgagcggcacctggctgagcggcctgctggccgccttctggtacgtgaccaacagaatcgacaccaccagagtggagttcaccatccccctgagagagaactgggccctgcccttcttcgccatccagatcgccgccatcacctacttcctgagacccaacctgcagcccctgagcgagagactgaccctgctggccatcttcatcagcaccttcctgttcagcctgacctggcagttcaaccagttcatgatgctgatgcaggccctggtgctgttcaccctggacagcctggacatgctgcccgccgtgaaggccacctggctgtacggcatccagatcaccagcctgctgctggtgtgcatcctgcagttcttcaacagcatgatcctgggcagcctgctgatcagcttcaacctgagcgtgttcatcgccagaaagctgcagaagaacctgaagaccggcagcttcctgaacagactgggcaagctgctgctgcacctgttcatggtgctgtgcctgaccctgttcctgaacaacatcatcaagaagatcctgaacctgaagagcgacgagcacatcttcaagttcctgaaggccaagttcggcctgggcgccaccagagacttcgacgccaacctgtacctgtgcgaggaggccttcggcctgctgcccttcaacaccttcggcagactgagcgacaccctgctgttctacgcctacatcttcgtgctgagcatcaccgtgatcgtggccttcgtggtggccttccacaacctgagcgacagcaccaaccagcagagcgtgggcaagatggagaagggcaccgtggacctgaagcccgagaccgcctacaacctgatccacaccatcctgttcggcttcctggccctgagcaccatgagaatgaagtacctgtggaccagccacatgtgcgtgttcgccagcttcggcctgtgcagccccgagatctgggagctgctgctgaagagcgtgcacctgtacaaccccaagagaatctgcatcatgagatacagcgtgcccatcctgatcctgctgtacctgtgctacaagaaccagaagagctag

SEQ ID NO: 319275 - DNA, 342 bp, Artificial Sequence
  derived and/or modified sequence
atgatgagcatcagacagagaagagagatcagagccaccgaggtgagcgaggacttccccgcccaggaggagaacgtgaagctggagaacaagctgcccagcggctgcaccagcagaagactgtggaagatcctgagcctgaccatcggcggcaccctgcccttcgccctggacttcctgcacctgagcaccctgcccagatacatgaagatgatctacggcttcctgatcctgagaaagtggagcgagaagagccacagcgagcagagcgtggcctgcatcacccccaccaccagcagatgctgcagactgcagcccagctgcaaggtgttcatggcctag

SEQ ID NO: 319276 - DNA, 1824 bp, Artificial Sequence
  derived and/or modified sequence
gttgacgccccccagcccctcatttccacaaagctccgcggcggttctgccctccttgtacccgcggcgcgctgcggcccgtggcgcggccccgttcccgcctagccccgtcggcctccttcccctcccggagccgcgcgtgaggacggctgaggccgcaggagtgatttggagaacaatgcatgtaagtctgacatcatgatgtccatccggcaaagaagagaaataagagccacagaagtttctgaagactttccagcccaagaagaaaatgtgaagttggaaaataaattgccatctggttgtaccagtagaagattatggaagattttgtcattgacaattggtggaaccattgccctttgcattggacttcttacatctgtctaccttgccacgttacatgaaaatgatttatggttttctaatattaaggaagtggagcgagaaatctcattcagaacagagtgtggcctgtattactcctactacaagcagatgctgcaggctccaaccctcgtgcaaggttttcatggcctaatatatgataataaaactgaatctatgaagacaattaacctccttcagcgaatgaatatttaccaagaggtttttctcagtattttatatagagttctacccatacagaaatatttagagccagtttatttttatatttacaccttatttgggctccaggcgatctatgtcacagctctctacataaccagctggctactcagtggtacatggctgtcaggactgttggcagctttctggtatgtcacaaatagaatagataccacaagagttgagtttaccatcccactgagggagaactgggcgctgccattctttgcaattcagatagcagcaattacatatttcctgagaccaaacttacagcctctttctgaaaggctgacacttcttgccattttcatatcaacttttctctttagtctgacatggcaatttaatcaatttatgatgctgatgcaagcattagtgctgttcacactggactccctggacatgctgccagcagtgaaggcgacatggctgtatggaatacagataacaagtttactcctggtctgcattcttcagttttttaattccatgattcttggatcactgcttatcagttttaacctttcagtattcattgcaagaaaacttcagaaaaatctgaaaactggaagcttccttaataggcttgggaaacttttgttacatttatttatggttttatgtttgacactttttctcaacaacataattaagaaaattcttaacctgaagtcagatgaacacatatttaaatttctgaaggcaaaatttgggcttggagcaacaagggattttgatgcaaatctctatctgtgtgaagaagcttttggcctcctgccttttaatacatttggaaggctttcagatactctgcttttttatgcttacatattcgttctgtccatcacagtgattgtagcattcgttgttgcctttcataatctcagtgattctacaaatcaacaatccgtgggtaaaatggaaaaaggcacagttgacctgaaaccagaaactgcctacaacttaatacataccattctgtttggattcttggcattgagtacaatgagaatgaagtacctctggacgtcacacatgtgtgtgttcgcatcattcggcctatgtagccctgaaatatgggagttacttctgaagtcagtccatctttataacccaaagaggatatgtataatgcgatattcagtaccgatattaatactgctgtatctatgctataagaatcagaaatct

SEQ ID NO: 319277 - DNA, 528 bp, Artificial Sequence
  derived and/or modified sequence
gcggccgctcgcggtcttgggagagctggggcgcgtgcctgaacttcccggctgcccctgtccttggagacctacctgatggggacgccaggtgtgcaggggcgtggcgcgtaggagtgatttggagaacaatgcatgtaagtctgacatcatgatgtccatccggcaaagaagagaaataagagccacagaagtttctgaagactttccagcccaagaagaaaatgtgaagttggaaaataaattgccatctggttgtaccagtagaagattatggaagattttgtcattgacaattggtggaaccttgccctttgcattggacttcttacatctgtctaccttgccacgttacatgaaaatgatttatggttttctaatattaaggaagtggagcgagaaatctcattcagaacagagtgtggcctgtattactcctactacaagcagatgctgcaggctccaaccctcgtgcaaggttttcatggcctaatatatgataataaaactgaatctatgaagacaatt

SEQ ID NO: 319278 - protein, 377 aa, Artificial Sequence
  derived and/or modified sequence
MELSVLLFLALLTGLLLLLVQRHPNSHGTLPPGPRPLPLLGNLLQMDRRGLLKSFLRFREKYGDVFTVHLGPRPVVMLCGVEAIREALVDNAEAFSGRGKIVIMDPVYQGYGMLFANGNRWKVLRRFSVTTMRDFGMGKRSVEERIQDEAQCLIEELRKSKGALVDPTFLFHSITANIICSIIFGKRFHYQDQEFLKTLNLFCQSFLLISSISSQLFELFSGFLKYFPGAHRQVYKNLQEINAYIGHSVEKHRETLDPSAPRDLIDTYLLHMEKEKSNPHSEFSHQNLIINTLSLFFAGTETTSTTLRYGFLLMLKYPHVAERVYKEIEQVVGPHRPPALDDRAKMPYTEAVIREIQRFADLLPMGVPHIVTQHTSF

SEQ ID NO: 319279 - DNA, 1134 bp, Artificial Sequence
  derived and/or modified sequence
atggagctgagcgtgctgctgttcctggccctgctgaccggcctgctgctgctgctggtgcagagacaccccaacagccacggcaccctgccccccggccccagacccctgcccctgctgggcaacctgctgcagatggacagaagaggcctgctgaagagcttcctgagattcagagagaagtacggcgacgtgttcaccgtgcacctgggccccagacccgtggtgatgctgtgcggcgtggaggccatcagagaggccctggtggacaacgccgaggccttcagcggcagaggcaagatcgtgatcatggaccccgtgtaccagggctacggcatgctgttcgccaacggcaacagatggaaggtgctgagaagattcagcgtgaccaccatgagagacttcggcatgggcaagagaagcgtggaggagagaatccaggacgaggcccagtgcctgatcgaggagctgagaaagagcaagggcgccctggtggaccccaccttcctgttccacagcatcaccgccaacatcatctgcagcatcatcttcggcaagagattccactaccaggaccaggagttcctgaagaccctgaacctgttctgccagagcttcctgctgatcagcagcatcagcagccagctgttcgagctgttcagcggcttcctgaagtacttccccggcgcccacagacaggtgtacaagaacctgcaggagatcaacgcctacatcggccacagcgtggagaagcacagagagaccctggaccccagcgcccccagagacctgatcgacacctacctgctgcacatggagaaggagaagagcaacccccacagcgagttcagccaccagaacctgatcatcaacaccctgagcctgttcttcgccggcaccgagaccaccagcaccaccctgagatacggcttcctgctgatgctgaagtacccccacgtggccgagagagtgtacaaggagatcgagcaggtggtgggcccccacagaccccccgccctggacgacagagccaagatgccctacaccgaggccgtgatcagagagatccagagattcgccgacctgctgcccatgggcgtgccccacatcgtgacccagcacaccagcttctag

SEQ ID NO: 319280 - DNA, 1134 bp, Artificial Sequence
  derived and/or modified sequence
atggagctgtcagtgctcctgttcttagcactattgaccggactgttacttcttctagtccaaagacacccaaattcacacgggaccctcccacctggccctcgccctctgcccttgcttggaaacctccttcaaatggacagacgcggtttactcaaaagctttttacgctttcgcgagaaatatggtgatgtttttaccgttcatctgggccctagaccggtcgttatgctgtgcggtgtggaagccattcgtgaggctctggtcgataacgcggaggccttttccgggcggggaaagatcgtaatcatggatcccgtgtatcaggggtacgggatgctctttgccaacggtaaccggtggaaggtgttgaggcggttcagtgttaccactatgagagatttcggcatgggtaaacggagcgtggaagagaggattcaagatgaagcacaatgtctaatcgaggaattacgtaagtccaaaggagcgctcgtcgatcccactttcctctttcatagcattacagccaatattatttgttcaatcatattcgggaagaggtttcactaccaggatcaggagtttttgaagacgctgaacctattctgtcagtcctttctgttaatatcttccatatcctcccagctgtttgagctgttctcagggttcctcaaatattttccaggagctcatagacaagtctacaagaaccttcaagagatcaacgcctacatcggacactctgtcgagaagcaccgcgagaccctggatccatccgctccgcgtgatctcatcgatacctatctgttacacatggaaaaagagaagagcaacccacattcagagttctcccaccagaacctgattatcaatactctttctctgtttttcgcaggcaccgaaaccacctcaactactctgagatatgggtttctccttatgcttaaatatccacacgtggccgaacgagtctacaaggagatagagcaggtggtgggaccccatcggccccctgcgttggacgatcgggccaagatgccttatactgaggcagtgatccgcgaaatccagagattcgccgatttattgccgatgggcgtgccacatatagttactcaacatacgtcattctag

SEQ ID NO: 319281 - DNA, 1134 bp, Artificial Sequence
  derived and/or modified sequence
atggagctgtctgtgctgctcttcctggccctgctgaccggcctgctgctgctgctggtgcagaggcaccccaacagccacggcaccctgcccccaggcccccggcccctgcccctgctgggcaacctgctgcagatggaccggcggggcctgctgaagagcttcctgcgcttccgggagaagtatggagatgtgttcaccgtgcacctgggccccaggcctgtggtgatgctgtgtggggtggaggccatccgggaggccctggtggacaatgctgaggccttcagcggccggggcaagatcgtcatcatggaccctgtgtaccagggctacggcatgctgtttgccaatggaaaccgctggaaggtgctgcggcgcttctctgtgaccaccatgagggactttggcatgggcaagaggtctgtggaggagcgcatccaggatgaggcccagtgcctgattgaggagctgaggaagagcaaaggagccctggtggaccccaccttcctgttccacagcatcacagccaacatcatctgcagcatcatctttgggaagcgcttccactaccaggaccaggagttcctgaagaccctgaacctcttctgccagagcttcctgctgatcagcagcatcagcagccagctgtttgagctgttcagcggcttcctgaagtacttccctggggcccaccggcaggtgtacaagaacctgcaggagatcaatgcctacatcggccacagcgtggagaagcaccgggagaccctggaccccagcgccccccgggacctgattgacacctacctgctgcacatggagaaggagaagagcaacccccacagcgagttcagccaccagaacctgatcatcaacaccctgagcctcttctttgctggaacagagaccaccagcaccaccctgcgctatggcttcctgctgatgctgaagtacccccacgtggccgagcgggtgtacaaggagattgagcaggtggtgggcccccaccggcccccagccctggatgaccgggccaagatgccctacacagaagctgtgatccgggagatccagagatttgctgacctgctgcccatgggcgtgccccacatcgtgacccagcacaccagcttctag

SEQ ID NO: 319282 - DNA, 1134 bp, Artificial Sequence
  derived and/or modified sequence
atggagctgagcgtgctgctgttcctggccctgctgaccggcctgctgcttttgctggttcagcgccaccctaacagtcatggaacccttcctccagggcctcgtcctctgccgctactggggaatctgcttcagatggaccgcaggggcctgctcaagtcgtttttgcgcttcagagaaaaatatggcgatgtatttaccgttcacctgggccctcgtcctgtcgtgatgctgtgtggtgttgaagccatcagggaggcactcgttgataatgcagaagcgtttagtgggagaggcaagatcgtgatcatggatccagtgtaccaggggtatgggatgctcttcgcaaacgggaacagatggaaggtgttgagaaggttttcagtgaccactatgcgagacttcggtatgggcaagagaagcgtcgaagagcgtatccaggacgaagcccagtgcctaatcgaggaactgcgcaagtcaaaaggtgctctagttgaccctacctttttatttcacagtatcacagccaatattatctgcagcattatctttgggaaaagattccactaccaggatcaggagttcctcaagactctgaatctgttctgtcagagctttttacttatttcatccatctcaagtcagctgttcgaactatttagtgggttccttaaatatttccctggagcacatagacaagtctataagaacctgcaagagattaacgcctacatagggcacagtgtcgaaaaacatagggagacgctagacccgtccgctccacgcgacctgattgatacttacctgctgcacatggagaaggaaaaatcaaacccacattccgagttctcccaccagaacttgatcattaatacgctgtcgctgtttttcgcaggaaccgagacaacttctacaacactgcgctacggtttcctgttgatgctcaagtacccccacgtggccgaacgtgtatacaaggaaatcgagcaagttgtggggccccaccgacctcccgctctggacgatcgcgcaaaaatgccttatacggaagcggtcatccgggagatccagcgatttgctgaccttctgcctatgggcgttccccacatcgtgacacaacacacttccttctag

SEQ ID NO: 319283 - DNA, 1134 bp, Artificial Sequence
  derived and/or modified sequence
atggagttgagcgtccttctgttcctcgcactcctgactggcctcctgcttcttctcgtgcagcggcaccccaactcccatgggacgcttcccccaggcccacggcctcttcctcttctaggaaacctgctgcagatggaccgcaggggccttctaaagtccttcctgcgattccgggagaaatatggcgatgtgtttacagtccatctgggccctagaccagtggttatgctctgcggcgtcgaggccattagagaagcactggtcgataacgcagaggccttctctggtaggggtaaaattgtgatcatggacccagtctatcaaggttacggcatgctgttcgccaacggcaaccgatggaaggtcctccgcagattttcagttaccactatgagagactttggcatgggtaaacgttcggtggaggaacggatccaggacgaagcccagtgtctgatcgaagaactcagaaagtcaaagggtgctcttgtcgatcccacattcttattccattccataaccgctaacatcatctgctctatcatctttgggaagcgcttccactaccaggaccaagaattcctcaagactctgaatctgttttgccaaagcttcttgctgatatcctcaatctctagtcagttatttgagctgttctctggctttctcaagtattttcctggcgcacataggcaagtgtataaaaacctgcaagagattaacgcatacatcggacactctgttgagaaacatagggagaccttggatcccagcgcgccacgggacttaattgacacgtatctgcttcacatggaaaaagaaaagagcaatccgcacagcgaattttcccaccaaaatctcataattaacaccctttctctatttttcgctggcactgagacaaccagtaccacgctgcgatatggctttcttttgatgttgaagtacccacatgtcgccgaacgtgtttataaggaaatcgagcaggtggtgggtccgcaccgtcctcctgcactcgacgatcgggctaaaatgccttacacagaggccgtcattcgagagatccagcgtttcgcagacctgctccctatgggagtaccccacatagtcacccaacatactagtttctag

SEQ ID NO: 319284 - protein, 169 aa, Artificial Sequence
  derived and/or modified sequence
KIHEEINQVIGPHRLPRVDDRVKMPYTDVVIHEIQRLVDIVPMGVPHNIIQDTQFRGYLLPKGTDVFPLLGSVLKDPKYFRYPDAFYPQHFLDEQGRFKKNEAFVPFSSGKRICLGEAMARMELFLYFTSTLQNFSLCSLVPLVDIDITPKLSGFGNITPTYELCLVAR

SEQ ID NO: 319285 - DNA, 2511 bp, Artificial Sequence
  derived and/or modified sequence
ttcccagtgaagaaaagacagagctgccacttgtacccagattgtctggatcctaaaatcaatagcctaaaaagataataatttgcctcttacaccccaccaagaaattctgttcaattctgttgagctgagagggaagaacagggagactggaaatatgaagaaaggggaatggccccagaggatttccctgtgtgaattcaatttacctttattcaggtgggagattataggttatataaccacccccaatataaagcaatctcttccccgatgacactcaaacccggaaaacttgaatcccagggtgttcagattttggtataagctgatctcccaggacctacttaggcaggatctggtgcccaggacagaacctgttgacctggcaccatggagctgggaggggctgtcaccatctttctggcactccgcttgtcttgcctgctcatcctcattgcctggaaacgaatggataaggcaggaaagctgcccccaggtcctacaccaattcttttcctggggcacctgctgcaagttcgaactgatgctacgtttcagtctttcatgaaggtgagtctgtctgtctcctttaatagggctaaaagcaactaatcctatagccagattcacatagaaacttatgacttctaaaagatagactctcagaaacacagactttgcaaatcttagaattctgaaattccagaatcctaaaatgttggaaacacacattctcagtgcattgaaataagattttcatgatctcaggactttggaatcacagtacattatatttttaaacacaggattctttgactcagcttgtcttagcactttgagacttggtatcatgaagtcttaagattctagaaatttaacatttcagagagagaagtatgaatcttggaatttatcgaatccaggtcccttattttggagatgcagacagtaactcttgtgggaagggatgagcttttgccgagaatgacagaagccaagacttccgtgcctctttcccagtattccttccaagcccagatttaccttggttccttagtaccatgtttatatccctctaaaatcgccatcctctaaaatcctcaactggcctatgcttggtactccagtcagcccctcctcttgtgttttccttcactccaagctcagggagaaatacagccctgtgttcactgtgtacatgggtcccggccagtggtggttttatgtggacacgaagcagtgaaggaagccttgatagaccaagcggatgagttcagtggccgtggagaactggcttcaataaagcaaaacttccaaggtcatggatcctgcagagagggaaccttactctcttgattgagtcttgaaggttgaggatggcttcctggacagcagagtctagagctttcataatctttccccatcactgcctaagcacagagttgaacacagcaaggggagggaggcagaagcctgagactgagatcttggcaggtgtagctctggccaatggagaacgatggaggattctccgacgcttctccctgaccatccttcgggacttcgggatgggaaagcagagcattaaggagcgaattcaggaggaggccagctacctactggaggagttccagaagaccaagctaagattcacgaagagattaaccaggtgattggaccacaccggctcccaagggtggatgaccgggtcaagatgccctacacagatgtcgttatccatgaaatacagagactggtagacatcgtgcccatgggtgtcccccacaacatcatccaggacactcagtttcgaggttaccttctgcccaagggcacagacgtatttcccctgcttggctctgtcctcaaagaccccaaatacttccgctacccagatgccttctatccccagcactttctggatgagcagggccgcttcaagaagaatgaagcctttgtgcctttttcctctggaaagcgcatctgcttgggcgaggccatggcccgcatggaactctttctctacttcacctccacccttcagaacttctctctatgctcgctggtgccacttgtggacatcgatatcacccccaagctctcaggctttggcaacatcaccccgacctatgagctctgccttgtggcccgctgagccacacctcctgcggggcaaggaggaagtggtgaagaatgcagctctcctctcgtgttcaggagcaccccctcttcctcatcttactaatcctcaagcatccctaagaggaggcactatgattacagagtcagccagggtcacctgagaatgtacagctgcgtgtcttcctctcccgtagaagagcaacgccctgtgcaagatttgcacctctgcctgcaggtttcatggtcacatggtcaccgttgcttaggtttctggctgcatcaaattattactgcagtccctgtgtcttcatgttgtccctttttgtgtgtgctctgattttgaccaaaatgtagtctaaaatcctt

SEQ ID NO: 319286 - protein, 291 aa, Artificial Sequence
  derived and/or modified sequence
MRCMLTNSHPWCGCDWQFREKYGDVFTVHLGPRPVVMLCGVEAIREALVDKAEAFSGRGKIAMVDPFFRGYGVIFANGNRWKVLRRFSVTTMRDFGMGKRSVEERIQEEAQCLIEELRKSKERVYREIEQVIGPHRPPELHDRAKMPYTEAVIYEIQRFSDLLPMGVPHIVTQHTSFRGYIIPKDTEVFLILSTALHDPHYFEKPDAFNPDHFLDANGALKKTEAFIPFSLGKRICLGEGIARAELFLFFTTILQNFSMASPVAPEDIDLTPQECGVGKIPPTYQIRFLPR

SEQ ID NO: 319287 - DNA, 510 bp, Artificial Sequence
  derived and/or modified sequence
aagatccacgaggagatcaaccaggtgatcggcccccacagactgcccagagtggacgacagagtgaagatgccctacaccgacgtggtgatccacgagatccagagactggtggacatcgtgcccatgggcgtgccccacaacatcatccaggacacccagttcagaggctacctgctgcccaagggcaccgacgtgttccccctgctgggcagcgtgctgaaggaccccaagtacttcagataccccgacgccttctacccccagcacttcctggacgagcagggcagattcaagaagaacgaggccttcgtgcccttcagcagcggcaagagaatctgcctgggcgaggccatggccagaatggagctgttcctgtacttcaccagcaccctgcagaacttcagcctgtgcagcctggtgcccctggtggacatcgacatcacccccaagctgagcggcttcggcaacatcacccccacctacgagctgtgcctggtggccagatag

SEQ ID NO: 319288 - DNA, 510 bp, Artificial Sequence
  derived and/or modified sequence
aagatccatgaggagattaaccaggtcatcggtccgcatcgacttccaagggtggacgaccgcgtgaaaatgccttataccgatgtcgtgatacatgaaattcagcgcctcgtcgacatcgtcccaatgggagtcccacacaatatcattcaggacacccagtttcgtggatacctcctgccgaagggaacagacgtgttcccactgttgggatccgtcctgaaggaccccaaatacttccgttaccccgacgccttctatcctcagcacttcctagacgagcagggccggttcaagaaaaacgaggcctttgtgcccttctcttcgggaaaacggatctgtctgggggaagctatggcgcggatggagctgttcctttattttaccagtaccctgcagaacttttccctctgcagcttagtgcctctggtagatatcgatatcacccctaagcttagcgggttcggtaacataacccctacatacgagctatgtcttgtggctcgctag

SEQ ID NO: 319289 - DNA, 510 bp, Artificial Sequence
  derived and/or modified sequence
aagatccacgaggagatcaaccaggtgattggcccccaccggctgccccgggtggatgacagagtgaagatgccctacacagatgtggtgatccacgagatccagaggctggtggacatcgtgcccatgggcgtgccccacaacatcatccaggacacccagttccggggctacctgctgcccaagggcacagatgtgttccccctgctgggctctgtgctgaaggaccccaagtacttccgctacccagatgccttctacccccagcacttcctggatgagcagggccgcttcaagaagaatgaggcctttgtgcccttcagcagcggcaagaggatctgcctgggggaggccatggccaggatggagctgttcctgtacttcaccagcaccctgcagaacttcagcctgtgcagcctggtgcccctggtggacatcgacatcacccccaagctgagcggctttggaaacatcacccccacctatgagctgtgcctggtggccaggtag

SEQ ID NO: 319290 - DNA, 510 bp, Artificial Sequence
  derived and/or modified sequence
aagatccacgaggagatcaaccaggtgatcggcccccaccggctgccccgtgtggacgatcgggtgaagatgccatacacagatgtggtgatccatgagatccagcgcctagtggacatagtacccatgggcgttccccacaacattatccaagacactcagttccgtggttacctgttgccaaaaggcacggacgtatttccactgctcggtagcgtcctgaaggatccgaagtactttcgctacccggacgccttctacccccagcattttctggatgagcagggcagattcaagaagaacgaggcctttgtgcctttctcatccggcaagcgtatatgtttgggtgaggcgatggcccgaatggaacttttcctgtatttcacctccacacttcagaatttctccttgtgctcgctggtacccctagtagacatcgacatcacccctaaactttccggatttggcaacattacccccacgtacgagctctgccttgttgcgcggtag

SEQ ID NO: 319291 - DNA, 510 bp, Artificial Sequence
  derived and/or modified sequence
aaaatacatgaagagatcaatcaggttatcggccctcatcgactcccaagagtcgatgaccgggttaagatgccctatacagacgtggtaattcacgagatccagcgtctcgtcgacatcgtccctatgggtgtccctcacaatatcatacaggacacccagtttcgcggatacctgttgcctaaggggactgacgtattccctctcctcggttcagtgctgaaggatcctaagtactttagatacccagatgcattctatccacagcacttcctcgacgaacaaggaagatttaagaagaatgaggcctttgtccccttttcgagcggcaagagaatttgtctgggcgaagctatggcccgtatggagctattcctatattttacttccacactgcagaatttttccttgtgttccctggttcctctggtcgatatcgatatcacccccaagctgagcggatttgggaacatcactcccacttatgagttatgtttggtcgcacgctag

SEQ ID NO: 319292 - DNA, 876 bp, Artificial Sequence
  derived and/or modified sequence
atgcgctgcatgcttacgaatagccatccttggtgtgggtgcgactggcagtttagagaaaagtacggtgacgtgttcacggtgcacctgggcccccgaccagtagtgatgctctgcggcgtcgaggccatcagggaagctctggtggacaaagccgaagcatttagtgggcggggcaagatcgccatggtcgatccattcttcaggggttatggcgttatcttcgccaatggcaataggtggaaagtgctgcgtcggttcagcgtcacaacaatgagagatttcgggatgggtaaacgctcagtcgaggagagaatccaggaggaggcccagtgcctgattgaggagttgcgcaaaagcaaggagagggtataccgggaaatcgagcaggttatagggccccataggcctcccgaacttcacgatagggcaaaaatgccatatactgaagccgtgatttacgaaattcagcgttttagcgatctgctccctatgggcgtgccacacattgtcactcagcacacaagcttcagaggctacattattccaaaggataccgaggtcttcctcattctgtcgacagccctccatgatccccattatttcgagaaaccagacgccttcaacccagatcacttccttgacgccaatggtgcgctgaaaaagacagaggcattcataccctttagcctgggtaagcgtatatgtcttggggagggcattgccagggccgagctgttcttgttttttaccaccattctgcagaatttctccatggctagccccgtggcaccggaggatattgacctgaccccacaggagtgcggtgtgggaaagatccctcccacataccagatccggttcctgccgagatag

SEQ ID NO: 319293 - DNA, 876 bp, Artificial Sequence
  derived and/or modified sequence
atgcgctgcatgctgaccaacagccacccctggtgtggctgtgactggcagttccgggagaagtatggagatgtgttcaccgtgcacctgggccccaggcctgtggtgatgctgtgtggggtggaggccatccgggaggccctggtggacaaggccgaggccttcagcggccggggcaagatcgccatggtggaccccttcttccggggctatggagtcatctttgccaatggaaaccgctggaaggtgctgcggcgcttctctgtgaccaccatgagggactttggcatgggcaagaggtctgtggaggagcgcatccaggaggaggcccagtgcctgattgaggagctgaggaagagcaaggagcgggtgtaccgggagattgagcaggtgattggcccccacaggcctcctgagctgcatgaccgggccaagatgccctacacagaagctgtgatctatgagatccagcgcttcagtgacctgctgcccatgggcgtgccccacatcgtgacccagcacaccagcttccggggctacatcatccccaaggacacagaggtgttcctgatcctgagcacagccctgcatgacccccactactttgagaagccagatgccttcaacccagaccacttcctggatgccaatggagccctgaagaagacagaggccttcatccccttcagcctgggcaagaggatctgcctgggggagggcatcgcccgggcagagctgttcctgttcttcaccaccatcctgcagaacttctccatggccagccctgtggcccctgaggacatcgacctgaccccccaggagtgtggggtgggcaagatcccccccacctaccagatccgcttcctgcccaggtag

SEQ ID NO: 319294 - DNA, 876 bp, Artificial Sequence
  derived and/or modified sequence
atgcggtgcatgctgaccaacagccacccctggtgcggctgcgactggcaatttcgtgagaagtacggagacgttttcacggtccacctcgggccccgccccgtggtaatgctgtgtggcgtcgaagccattagagaggctctcgtcgacaaggctgaagcattttccggtagaggaaaaatcgctatggtcgaccccttttttcggggatatggcgttattttcgccaatggcaatagatggaaagttctgcgaaggttcagcgttactactatgagggacttcggtatgggaaagaggtccgttgaggaaagaatccaggaggaggcccagtgcctgatcgaagagctgcggaagtctaaggagcgagtttacagagaaatagagcaggtgatcgggccccataggcctccagaactgcacgatcgggccaagatgccatataccgaggccgtaatctacgaaatccagcgttttagtgacctactgcctatgggtgttccgcacatcgtaacccagcacacctcattccgaggttatatcatccccaaggacactgaagtgttcctgatcctaagcacagctctgcacgatcctcactatttcgagaaacccgacgcattcaacccggaccactttttggacgccaacggggctttaaaaaagaccgaggctttcataccgttttctctcggaaaaagaatatgtcttggcgaaggaatcgcacgcgctgaactgtttctgttttttaccaccatccttcagaatttcagcatggcgtcccccgtggctcctgaggatatcgatcttaccccccaagagtgcggggtcggcaagatcccccctacctaccagatccggtttttgcccaggtag

SEQ ID NO: 319295 - DNA, 876 bp, Artificial Sequence
  derived and/or modified sequence
atgagatgtatgcttaccaattcccacccttggtgcggttgcgactggcagttcagagaaaagtacggcgacgtttttacagtgcacctgggtcctcgtccagtggtcatgttgtgtggcgtggaggctatacgagaagcgctggtggacaaggctgaggccttctctggtcgcggaaagatcgcaatggtcgacccctttttccgcggatatggcgttatctttgccaatgggaaccggtggaaagtgctccgcaggttttcagtgaccaccatgagagattttggtatggggaaacggagcgtggaagagcgaatccaggaggaagctcagtgcctcattgaagaacttaggaagagcaaggaacgcgtgtacagagagattgaacaggtgatcgggccacatcggcctccagagctgcacgaccgtgctaagatgccctataccgaagccgtgatttacgagatacagcgatttagcgatcttctgcccatgggggtgccacatatagtcacacagcacacttcttttcggggatatatcatccctaaagacactgaggtgttcttgatactttctactgccctgcatgacccacactattttgagaagcccgacgcctttaacccagatcactttctggatgccaatggagctttgaaaaaaactgaagcattcatcccattttcgcttggcaaaagaatttgcctgggcgaaggcattgctagggcggagctgttcctgtttttcaccacaatcctgcagaatttctccatggcaagccccgttgctccagaggacattgatctgacgccgcaggagtgcggagtaggcaaaattcctccaacataccagattcgtttcttacctagatag

SEQ ID NO: 319296 - DNA, 1426 bp, Artificial Sequence
  derived and/or modified sequence
acaaatgaggtgtatgctgactaacagccacccctggtgtggatgtgattggcagttccgagagaaatatggggacgtcttcacggtacacctgggaccgaggcccgtggtcatgctgtgtggagtagaggccatacgggaggcccttgtggacaaggctgaggccttctctggccggggaaaaatcgccatggtcgacccattcttccggggatatggtgtgatctttgccaatggaaaccgctggaaggtgcttcggcgattctctgtgaccactatgagggacttcgggatgggaaagcggagtgtggaggagcggattcaggaggaggctcagtgtctgatagaggagcttcggaaatccaaggagagagtctacagggagattgaacaggtgattggcccacatcgccctccagagcttcatgaccgagccaaaatgccatacacagaggcagtcatctatgagattcagagattttccgaccttctccccatgggtgtgccccacattgtcacccaacacaccagcttccgagggtacatcatccccaaggacacagaagtatttctcatcctgagcactgctctccatgacccacactactttgaaaaaccagacgccttcaatcctgaccactttctggatgccaatggggcactgaaaaagactgaagcttttatccccttctccttagggaagcggatttgtcttggtgaaggcatcgcccgtgcggaattgttcctcttcttcaccaccatcctccagaacttctccatggccagccccgtggccccagaagacatcgatctgacaccccaggagtgtggtgtgggcaaaatacccccaacataccagatccgcttcctgccccgctgaaggggctgagggaagggggtcaaaggattccagggtcattcagtgtccccgcctctgtagacaatggctctgactccccgcaacttcctgcctctgagagacctgctacaagccagcttccttcccctccatggcaccagttgtctgaggtcacattgcaagtgagtgcaggagtgagattatcgaaaattataatatacaaaatcatatatatatatatgttcttgttttttgagacagagtctcacactgttgcccaggctggagtgcagtggcgtgatctcggctcactgcaacctccacccccggggatcaagcaactctcctgcctcagcctccctagtagctgggattacaggcatgcactaccacgcttggctaatttttgtatttttagtagagatggggtttcactgtgtaggccaggctggtctcgaactcctgaactcaagtgattcacccaccttagcctcccaaagtgctgggattacaggcgtgagtcaccgtgcccagccatgtatatatataattttaaaaattaagctg

SEQ ID NO: 319297 - DNA, 876 bp, Artificial Sequence
  derived and/or modified sequence
atgagatgcatgctgaccaacagccacccctggtgcggctgcgactggcagttcagagagaagtacggcgacgtgttcaccgtgcacctgggccccagacccgtggtgatgctgtgcggcgtggaggccatcagagaggccctggtggacaaggccgaggccttcagcggcagaggcaagatcgccatggtggaccccttcttcagaggctacggcgtgatcttcgccaacggcaacagatggaaggtgctgagaagattcagcgtgaccaccatgagagacttcggcatgggcaagagaagcgtggaggagagaatccaggaggaggcccagtgcctgatcgaggagctgagaaagagcaaggagagagtgtacagagagatcgagcaggtgatcggcccccacagaccccccgagctgcacgacagagccaagatgccctacaccgaggccgtgatctacgagatccagagattcagcgacctgctgcccatgggcgtgccccacatcgtgacccagcacaccagcttcagaggctacatcatccccaaggacaccgaggtgttcctgatcctgagcaccgccctgcacgacccccactacttcgagaagcccgacgccttcaaccccgaccacttcctggacgccaacggcgccctgaagaagaccgaggccttcatccccttcagcctgggcaagagaatctgcctgggcgagggcatcgccagagccgagctgttcctgttcttcaccaccatcctgcagaacttcagcatggccagccccgtggcccccgaggacatcgacctgaccccccaggagtgcggcgtgggcaagatcccccccacctaccagatcagattcctgcccagatag

SEQ ID NO: 319298 - protein, 475 aa, Artificial Sequence
  derived and/or modified sequence
MAEGSVMFSDVSIDFSQEEWDCLDPVQRDLYRDVMLENYGNLVSMGLYTPKPQVISLLEQGKEPWMVGRELTRGLCSDLESMCETKLLSLKKEVYEIELCQREIMGLTKHGLEYSSFGDVLEYRSHLAKQLGYPNGHFSQEIFTPEYMPTFIQQTFLTLHQIINNEDRPYECKKCGKAFSQNSQFIQHQRIHIGEKSYECKECGKFFSCGSHVTRHLKIHTGEKPFECKECGKAFSCSSYLSQHQRIHTGKKPYECKECGKAFSYCSNLIDHQRIHTGEKPYECKVCGKAFTKSSQLFQHARIHTGEKPYECKECGKAFTQSSKLVQHQRIHTGEKPYECKECGKAFSSGSALTNHQRIHTGEKPYDCKECGKAFTQSSQLRQHQRIHAGEKPFECLECGKAFTQNSQLFQHQRIHTDEKPYECNECGKAFNKCSNLTRHLRIHTGEKPYNCKECGKAFSSGSDLIRHQGIHTNK

SEQ ID NO: 319299 - DNA, 1428 bp, Artificial Sequence
  derived and/or modified sequence
atggccgagggcagcgtgatgttcagcgacgtgagcatcgacttcagccaggaggagtgggactgcctggaccccgtgcagagagacctgtacagagacgtgatgctggagaactacggcaacctggtgagcatgggcctgtacacccccaagccccaggtgatcagcctgctggagcagggcaaggagccctggatggtgggcagagagctgaccagaggcctgtgcagcgacctggagagcatgtgcgagaccaagctgctgagcctgaagaaggaggtgtacgagatcgagctgtgccagagagagatcatgggcctgaccaagcacggcctggagtacagcagcttcggcgacgtgctggagtacagaagccacctggccaagcagctgggctaccccaacggccacttcagccaggagatcttcacccccgagtacatgcccaccttcatccagcagaccttcctgaccctgcaccagatcatcaacaacgaggacagaccctacgagtgcaagaagtgcggcaaggccttcagccagaacagccagttcatccagcaccagagaatccacatcggcgagaagagctacgagtgcaaggagtgcggcaagttcttcagctgcggcagccacgtgaccagacacctgaagatccacaccggcgagaagcccttcgagtgcaaggagtgcggcaaggccttcagctgcagcagctacctgagccagcaccagagaatccacaccggcaagaagccctacgagtgcaaggagtgcggcaaggccttcagctactgcagcaacctgatcgaccaccagagaatccacaccggcgagaagccctacgagtgcaaggtgtgcggcaaggccttcaccaagagcagccagctgttccagcacgccagaatccacaccggcgagaagccctacgagtgcaaggagtgcggcaaggccttcacccagagcagcaagctggtgcagcaccagagaatccacaccggcgagaagccctacgagtgcaaggagtgcggcaaggccttcagcagcggcagcgccctgaccaaccaccagagaatccacaccggcgagaagccctacgactgcaaggagtgcggcaaggccttcacccagagcagccagctgagacagcaccagagaatccacgccggcgagaagcccttcgagtgcctggagtgcggcaaggccttcacccagaacagccagctgttccagcaccagagaatccacaccgacgagaagccctacgagtgcaacgagtgcggcaaggccttcaacaagtgcagcaacctgaccagacacctgagaatccacaccggcgagaagccctacaactgcaaggagtgcggcaaggccttcagcagcggcagcgacctgatcagacaccagggcatccacaccaacaagtag

SEQ ID NO: 319300 - DNA, 1686 bp, Artificial Sequence
  derived and/or modified sequence
attgctctaaaaggcctctgtgccctgactgatcctccctccctgtcaactcctaatctttttattgtctccatagttttgccttttccagaatgttgtaatcatacagtatgtagtctttttgaattggcttctttcacttagcaatgtgcatttaagtttcctaagctgttgatcatgagactgagtccctttttatacttcaacagacatgagaacggcctcaaggaagactaaccatctgcaatactagaagccatggctgagggatcagtgatgttcagtgatgtgtccatagacttctctcaggaggagtgggactgcctggaccctgttcagagggacttatacagagatgtgatgttggagaactacggcaatctggtttcaatgggactttacactcctaagcctcaagtgatctccttattggaacaagggaaagagccctggatggttggcagagagcttacaagaggcctgtgttcagatctggaatcgatgtgtgaaaccaagttattatctctaaagaaggaagtttatgaaatagaattatgccagagggagataatgggacttacaaagcatggccttgagtactccagttttggagatgttttggaatatagaagccaccttgcaaaacaactgggatatccaaatgggcattttagtcaagaaatattcactcctgaatacatgcccacatttattcaacagacattccttactctccatcaaataattaataatgaagacagaccctatgaatgtaagaaatgtggaaaggcctttagtcagaactcacaatttattcaacatcagagaattcatattggtgaaaaatcttatgaatgtaaagagtgtgggaaattctttagttgtggttcacatgttactcggcatctgaaaattcatactggcgaaaaaccctttgaatgtaaggaatgtggaaaggccttcagttgtagctcatacctttctcaacatcagagaatccataccggtaagaaaccctatgaatgtaaggaatgtgggaaggcctttagttattgctcaaatcttattgaccatcagcgaattcacactggtgaaaaaccttatgaatgtaaagtatgtgggaaagcctttactaagagctcacaactttttcagcatgcacgaattcatacaggtgagaaaccctatgaatgtaaggaatgtggcaaagcctttacccagagctcaaagcttgttcaacatcagagaattcatactggtgagaaaccctatgagtgcaaggaatgtggcaaagcctttagtagtggctcagcacttactaatcatcagagaattcacactggtgagaaaccctatgattgtaaggaatgtggaaaggcttttactcagagctcacagcttcgtcaacatcagagaattcacgctggtgagaaaccctttgaatgtcttgaatgtgggaaggcctttactcagaactcacaacttttccagcatcagagaattcatacagatgaaaaaccatatgaatgtaatgaatgtggaaaggcctttaataaatgctcaaaccttactcgacatctgagaattcacactggtgaaaagccctataactgtaaggaatgtgggaaggcttttagtagtggctcggatctcattcgtcatcagggaattcatactaataaataa

SEQ ID NO: 319301 - DNA, 1428 bp, Artificial Sequence
  derived and/or modified sequence
atggcagagggcagtgtaatgtttagcgatgtgagtatcgatttctcacaggaagagtgggattgtctggatcccgtccagagggatctctaccgggacgtcatgttggaaaattacggaaaccttgtatccatgggactgtatacaccaaaaccacaggtgatttccctactggagcagggaaaggaaccctggatggtggggagagaattgacacgcggactttgtagcgatctagaatcaatgtgtgagacaaagctccttagcctaaaaaaagaagtttacgagatagagctgtgccagagagaaataatgggattaaccaagcacggacttgaatatagttctttcggggacgtattagaatatagaagccatctagctaagcagttagggtatcctaatggccacttctcccaggagatcttcacccccgagtacatgcccactttcattcagcagaccttcctgaccctgcaccagatcattaacaatgaagacaggccatatgagtgtaaaaagtgcgggaaagcctttagtcagaactctcagtttatacagcaccagaggatccacatcggcgaaaagagttacgaatgtaaagagtgcgggaagttcttttcttgcgggtctcacgtgacaaggcatctgaaaattcatactggcgagaaacctttcgagtgcaaggagtgtggcaaggccttctcttgttcatcgtatcttagtcaacatcagaggatccatacaggtaaaaagccttacgaatgtaaagagtgtggaaaggcgttcagctattgctctaacttaatagatcatcagaggattcacacgggagaaaaaccatatgaatgtaaggtgtgcggcaaagcatttactaagtcatctcaactttttcagcacgctcgaattcatacaggcgagaagccctatgagtgtaaggaatgtgggaaggcttttacacagtccagcaagttggtgcaacaccagcgtatccacaccggagaaaagccctatgaatgtaaggaatgcggaaaggcttttagcagcggatcagcactgacaaaccatcagcgaatccacacaggtgaaaaaccctatgactgcaaagaatgcggtaaggcctttacacaatcatcccaactgaggcagcatcagaggatacacgccggtgaaaagcctttcgagtgtttagaatgcggcaaagctttcacccagaatagtcagctgttccagcaccagagaattcacaccgatgagaagccttacgagtgcaacgagtgcggcaaagcattcaataaatgtagtaatttgacgagacacctgcggatccacaccggggagaagccttacaactgcaaggagtgtggcaaagccttctcaagtggcagcgacttgataagacatcagggcatacatacaaacaagtag

SEQ ID NO: 319302 - DNA, 1428 bp, Artificial Sequence
  derived and/or modified sequence
atggccgagggctctgtgatgttcagtgatgtgtccattgacttcagccaggaggagtgggactgcctggaccctgtgcagagggacctgtacagagatgtgatgctggagaactacggcaacctggtgtccatgggcctgtacacccccaagccccaggtgatcagcctgctggagcagggcaaggagccctggatggtgggccgggagctgacccggggcctgtgcagcgacctggagagcatgtgtgagaccaagctgctgagcctgaagaaggaggtgtatgaaattgagctgtgccagcgggagatcatgggcctgaccaagcacggcctggagtacagcagctttggagatgtgctggagtaccgcagccacctggccaagcagctgggctacccaaatggccacttcagccaggagatcttcaccccagagtacatgcccaccttcatccagcagaccttcctgaccctgcaccagatcatcaacaatgaagatcggccctatgagtgcaagaagtgtgggaaggccttcagccagaacagccagttcatccagcaccagaggatccacatcggggagaagagctatgagtgcaaggaatgtgggaagttcttcagctgtggcagccacgtgaccaggcacctgaagatccacactggagagaagccctttgagtgcaaggaatgtgggaaggccttcagctgcagcagctacctgagccagcaccagaggatccacacaggcaagaagccctatgagtgcaaggaatgtgggaaggccttctcctactgcagcaacctgattgaccaccagaggatccacactggagagaagccctatgagtgcaaggtgtgtgggaaggccttcaccaagagcagccagctgttccagcacgcccgcatccacactggagagaagccctatgagtgcaaggaatgtgggaaggccttcacccagagcagcaagctggtgcagcaccagaggatccacactggagagaagccctatgagtgcaaggaatgtgggaaggccttcagcagcggcagcgccctgaccaaccaccagaggatccacactggagagaagccctatgactgcaaggaatgtgggaaggccttcacccagagcagccagctgcggcagcaccagagaattcatgctggggagaagccctttgaatgtctggagtgtgggaaggccttcacccagaacagccagctgttccagcaccagaggatccacacagatgagaagccctatgaatgtaatgaatgtgggaaggccttcaacaagtgcagcaacctgaccaggcacctgcgcatccacactggagagaagccctacaactgcaaggaatgtgggaaggccttcagcagcggcagtgacctgatccgccaccagggcatccacaccaacaagtag

SEQ ID NO: 319303 - DNA, 1428 bp, Artificial Sequence
  derived and/or modified sequence
atggccgagggcagcgtgatgttcagcgacgtgagcatcgacttctcacaggaagagtgggactgtcttgaccctgtccagagggatctgtatcgagatgtgatgcttgagaattacggcaatttagtctcgatgggactatatacccccaagccacaagttataagcttgcttgaacaggggaaagagccctggatggtcggacgcgaactaacgcggggactgtgcagcgatctcgagtctatgtgcgagaccaagctcctatccctgaaaaaggaggtatacgaaatagaactttgtcagcgtgaaattatgggtctcacgaagcatgggctggagtactcctccttcggggatgtccttgagtataggagtcacctggccaagcagctgggttacccaaatggccacttctcccaagagatcttcaccccagaatatatgccaactttcatacagcagacattcctcaccctgcaccagattataaacaacgaagatcgaccgtacgaatgcaagaagtgcgggaaagctttctcccagaactctcaattcattcagcaccagagaatacacattggtgaaaaatcttatgaatgcaaagagtgcggtaagtttttctcctgtggctcccacgtaaccagacacctcaagatacatacaggcgaaaagccgtttgagtgtaaggaatgcggcaaagccttctcgtgcagttcctatctttcacagcatcagaggattcatactggaaaaaagccttatgaatgtaaagagtgcggtaaagccttctcctactgctccaatctgatcgatcaccaaaggatacacacaggcgaaaaaccctacgagtgtaaagtgtgcggcaaggcattcaccaagagctcacagttgttccagcacgctagaatccatacgggggagaaaccatatgagtgcaaggagtgtggtaaggctttcacccaatcctccaagctggtacagcaccagcggatccacacaggggagaagccgtatgaatgcaaagaatgcggtaaagctttctcttcaggaagcgccctcacgaatcaccagcgcattcatacaggggaaaagccatacgattgtaaggagtgcggcaaagccttcacccagagttctcaactccggcagcaccaacgcatccacgccggcgaaaagccattcgaatgtcttgagtgtggcaaagcatttacccaaaatagccagctattccagcatcagcgaatacacacagacgagaaaccatacgagtgtaatgagtgcgggaaagcgttcaataagtgctcgaatctgacgcgtcacctgcggatacacacaggcgaaaaaccttacaattgcaaagagtgcggcaaagcattctccagcggctcagacctcatccggcatcaggggatccatacaaacaaatag

SEQ ID NO: 319304 - DNA, 1428 bp, Artificial Sequence
  derived and/or modified sequence
atggccgaaggctcggtgatgttcagcgatgtgagcattgatttctcccaggaagagtgggattgcctggatccagtccagagagacctttacagagatgtgatgttggaaaattacggaaaccttgtctcgatgggactttacacccctaaaccacaagtgatttctttgctagagcagggtaaggaaccgtggatggtcggcagggaacttactcgaggtctttgctcggatttggagagcatgtgtgagactaagttgctaagccttaaaaaagaggtgtatgagatcgagttgtgccaaagagagatcatggggcttaccaagcatggtctggaatattcatccttcggtgacgtgctggagtaccgcagccatctggctaagcagcttggctaccccaatgggcatttcagtcaggaaatcttcacccctgaatatatgccgactttcattcagcagacgttcctgaccctgcaccaaataatcaacaacgaagataggccctacgagtgcaaaaagtgtggcaaggctttctcccagaactcccaattcattcaacatcagagaattcatattggggaaaagtcatacgaatgcaaagaatgcgggaaatttttcagttgcggaagtcacgtaaccaggcatttaaaaattcacactggcgagaaaccattcgagtgcaaggagtgtggcaaggctttctcttgttcgtcctacctgtcacaacatcagcgcattcatactggcaaaaaaccatacgagtgtaaggaatgcggaaaagccttttcatattgctcaaacctcatcgaccaccaacggattcatactggcgagaaaccatatgagtgcaaggtatgcggtaaagccttcactaaatcctcgcaactcttccagcacgccagaattcacactggcgagaagccatatgagtgcaaagagtgcggcaaagccttcactcaatcttccaaattagtccagcaccagagaatccacacaggggaaaaaccatacgagtgcaaggaatgcgggaaagctttcagttcagggagcgccttgaccaatcaccagcgcattcatacaggggagaaaccgtacgactgcaaagagtgcggcaaagctttcacacagagttcacagctgcgccagcatcagaggattcatgccggtgagaagcctttcgaatgcctagagtgtggcaaagcattcacacagaattcacagttgttccagcaccaacgaatacacactgatgaaaagccttatgagtgcaacgagtgcgggaaggcattcaacaagtgcagcaacctgacgcgacaccttcggattcacacaggggaaaaaccttataactgcaaggaatgtggtaaggctttctcctcaggatccgatctgattcggcatcagggaattcacaccaacaagtag

SEQ ID NO: 319305 - DNA, 684 bp, Artificial Sequence
  derived and/or modified sequence
atgagccaccacaccagaaccctgggcgtggtgctgagcccccagcagggcgcccccgccggccccggcggcggcctgggcaccccctaccacagccacccctgcaagcccagacaggtgcccgtgagcgagagccagccccccccccacaccatgcaggtgggcagatgggccggcctgggcgtgggccaggccgaggccaccagcgtgagactgggcctgcacggcctggaggccgtgttcccctacctgggccacgacctgcagggccccgccgtgagccacggcgacggcctggccggcgtgggcagagagctggccctgctgctgggcggccccgagcagagaggcgccaagcacagagccaaggtggtgcagggccacctgatcgactgcctgctgctgtgccaccccgtggaggacagaagcagaggctgctgcttcaacgccaccaccagaagagaggccgagggcctgtgcagagccagagtgctgagagagggcgtgaccagcaccctggccgtgctgcaggccgacagcagcctgggcgtgagcagcaccagaagaaccgccgccggcggcgccgccagagccgccgcccacggccagagctgccccagagccacccccgccaccacccccagccccggcagccccagacagggcagactgagcatggagtag

SEQ ID NO: 319306 - DNA, 474 bp, Artificial Sequence
  derived and/or modified sequence
atgctgagtgttagcagaccctgcttctcacagggcgctttccttgggcgcaccctgggatccgtgtgggctcaaggaggatctcgactccccctatgtttctggtatagaatccgatgtggtcggcctgccgtggtccacatcggcggggagggagctcggtgggaaaaaggtgctaggggaaggaaggagcaccgcttacggaggagcgatctcggatcacgcccagtgccgttcctggctcaggggattccagatatcgtgattcgtttattatgtctctctgcaggctccgccagttcccatcaagcaagcgacccactttctagcgccgccgctaccctcgcagctgagctcgattgggctctggtttctcagaagtctagtgaagatcttgcgccgcccagtctgctcctcaactgcatttccttcctgataactcagtgtccccaccctcggtggctccccggctag

SEQ ID NO: 319307 - protein, 710 aa, Artificial Sequence
  derived and/or modified sequence
MRELKRTLDAKAYPLEVTKLIYCSRTVPEIEKVIEELRKLLNFYEKQEGEKLPFLGLALSSRKNLCIHPEVTPLRFGKDVDGKCHSLTASYVRAQYQHDTSLPHCRFYEEFDAHGREVPLPAGIYNLDDLKALGRRQGWCPYFLARYSILHANVVVYSYHYLLDPKIADLVSKELARKAVVVFDEAHNIDNVCIDSMSVNLTRRTLDRCQGNLETLQKTVLRIKETDEQRLRDEYRRLVEGLREASAARETDAHLANPVLPDEVLQEAVPGSIRTAEHFLGFLRRLLEYVKWRLRVQHVVQESPPAFLSGLAQRVCIQRKPLRFCAERLRSLLHTLEITDLADFSPLTLLANFATLVSTYAKGFTIIIEPFDDRTPTIANPILHFSCMDASLAIKPVFERFQSVIITSGTLSPLDIYPKILDFHPVTMATFTMTLARVCLCPMIIGRGNDQVAISSKFETREDIAVIRNYGNLLLEMSAVVPDGIVAFFTSYQYMESTVASWYEQGILENIQRNKLLFIETQDGAETSVALEKYQEACENGRGAILLSVARGKVSEGIDFVHHYGRAVIMFGVPYVYTQSRILKARLEYLRDQFQIRENDFLTFDAMRHAAQCVGRAIRGKTDYGLMVFADKRFARGDKRGKLPRWIQEHLTDANLNLTVDEGVQVAKYFLRQMAQPFHREDQLGLSLLSLEQLESEETLKRIEQIAQQL

SEQ ID NO: 319308 - protein, 682 aa, Artificial Sequence
  derived and/or modified sequence
MKLNVDGLLVYFPYDYIYPEQFSYMRELKRTLDAKGHGVLEMPSGTGKTVSLLALIMAYQRAYPLEVTKLIYCSRTVPEIEKVIEELRKLLNFYEKQEGEKLPFLGLALSSRKNLCIHPEILHANVVVYSYHYLLDPKIADLVSKELARKAVVVFDEAHNIDNVCIDSMSVNLTRRTLDRCQGNLETLQKTVLRIKETDEQRLRDEYRRLVEGLREASAARETDAHLANPVLPDEVLQEAVPGSIRTAEHFLGFLRRLLEYVKWRLRVQHVVQESPPAFLSGLAQRVCIQRKPLRFCAERLRSLLHTLEITDLADFSPLTLLANFATLVSTYAKGFTIIIEPFDDRTPTIANPILHFSCMDASLAIKPVFERFQSVIITSGTLSPLDIYPKILDFHPVTMATFTMTLARVCLCPMIIGRGNDQVAISSKFETREDIAVIRNYGNLLLEMSAVVPDGIVAFFTSYQYMESTVASWYEQGILENIQRNKLLFIETQDGAETSVALEKYQEACENGRGAILLSVARGKVSEGIDFVHHYGRAVIMFGVPYVYTQSRILKARLEYLRDQFQIRENDFLTFDAMRHAAQCVGRAIRGKTDYGLMVFADKRFARGDKRGKLPRWIQEHLTDANLNLTVDEGVQVAKYFLRQMAQPFHREDQLGLSLLSLEQLESEETLKRIEQIAQQL

SEQ ID NO: 319309 - DNA, 2133 bp, Artificial Sequence
  derived and/or modified sequence
atgagagagctgaagagaaccctggacgccaaggcctaccccctggaggtgaccaagctgatctactgcagcagaaccgtgcccgagatcgagaaggtgatcgaggagctgagaaagctgctgaacttctacgagaagcaggagggcgagaagctgcccttcctgggcctggccctgagcagcagaaagaacctgtgcatccaccccgaggtgacccccctgagattcggcaaggacgtggacggcaagtgccacagcctgaccgccagctacgtgagagcccagtaccagcacgacaccagcctgccccactgcagattctacgaggagttcgacgcccacggcagagaggtgcccctgcccgccggcatctacaacctggacgacctgaaggccctgggcagaagacagggctggtgcccctacttcctggccagatacagcatcctgcacgccaacgtggtggtgtacagctaccactacctgctggaccccaagatcgccgacctggtgagcaaggagctggccagaaaggccgtggtggtgttcgacgaggcccacaacatcgacaacgtgtgcatcgacagcatgagcgtgaacctgaccagaagaaccctggacagatgccagggcaacctggagaccctgcagaagaccgtgctgagaatcaaggagaccgacgagcagagactgagagacgagtacagaagactggtggagggcctgagagaggccagcgccgccagagagaccgacgcccacctggccaaccccgtgctgcccgacgaggtgctgcaggaggccgtgcccggcagcatcagaaccgccgagcacttcctgggcttcctgagaagactgctggagtacgtgaagtggagactgagagtgcagcacgtggtgcaggagagcccccccgccttcctgagcggcctggcccagagagtgtgcatccagagaaagcccctgagattctgcgccgagagactgagaagcctgctgcacaccctggagatcaccgacctggccgacttcagccccctgaccctgctggccaacttcgccaccctggtgagcacctacgccaagggcttcaccatcatcatcgagcccttcgacgacagaacccccaccatcgccaaccccatcctgcacttcagctgcatggacgccagcctggccatcaagcccgtgttcgagagattccagagcgtgatcatcaccagcggcaccctgagccccctggacatctaccccaagatcctggacttccaccccgtgaccatggccaccttcaccatgaccctggccagagtgtgcctgtgccccatgatcatcggcagaggcaacgaccaggtggccatcagcagcaagttcgagaccagagaggacatcgccgtgatcagaaactacggcaacctgctgctggagatgagcgccgtggtgcccgacggcatcgtggccttcttcaccagctaccagtacatggagagcaccgtggccagctggtacgagcagggcatcctggagaacatccagagaaacaagctgctgttcatcgagacccaggacggcgccgagaccagcgtggccctggagaagtaccaggaggcctgcgagaacggcagaggcgccatcctgctgagcgtggccagaggcaaggtgagcgagggcatcgacttcgtgcaccactacggcagagccgtgatcatgttcggcgtgccctacgtgtacacccagagcagaatcctgaaggccagactggagtacctgagagaccagttccagatcagagagaacgacttcctgaccttcgacgccatgagacacgccgcccagtgcgtgggcagagccatcagaggcaagaccgactacggcctgatggtgttcgccgacaagagattcgccagaggcgacaagagaggcaagctgcccagatggatccaggagcacctgaccgacgccaacctgaacctgaccgtggacgagggcgtgcaggtggccaagtacttcctgagacagatggcccagcccttccacagagaggaccagctgggcctgagcctgctgagcctggagcagctggagagcgaggagaccctgaagagaatcgagcagatcgcccagcagctgtag

SEQ ID NO: 319310 - DNA, 2049 bp, Artificial Sequence
  derived and/or modified sequence
atgaagctgaacgtggacggcctgctggtgtacttcccctacgactacatctaccccgagcagttcagctacatgagagagctgaagagaaccctggacgccaagggccacggcgtgctggagatgcccagcggcaccggcaagaccgtgagcctgctggccctgatcatggcctaccagagagcctaccccctggaggtgaccaagctgatctactgcagcagaaccgtgcccgagatcgagaaggtgatcgaggagctgagaaagctgctgaacttctacgagaagcaggagggcgagaagctgcccttcctgggcctggccctgagcagcagaaagaacctgtgcatccaccccgagatcctgcacgccaacgtggtggtgtacagctaccactacctgctggaccccaagatcgccgacctggtgagcaaggagctggccagaaaggccgtggtggtgttcgacgaggcccacaacatcgacaacgtgtgcatcgacagcatgagcgtgaacctgaccagaagaaccctggacagatgccagggcaacctggagaccctgcagaagaccgtgctgagaatcaaggagaccgacgagcagagactgagagacgagtacagaagactggtggagggcctgagagaggccagcgccgccagagagaccgacgcccacctggccaaccccgtgctgcccgacgaggtgctgcaggaggccgtgcccggcagcatcagaaccgccgagcacttcctgggcttcctgagaagactgctggagtacgtgaagtggagactgagagtgcagcacgtggtgcaggagagcccccccgccttcctgagcggcctggcccagagagtgtgcatccagagaaagcccctgagattctgcgccgagagactgagaagcctgctgcacaccctggagatcaccgacctggccgacttcagccccctgaccctgctggccaacttcgccaccctggtgagcacctacgccaagggcttcaccatcatcatcgagcccttcgacgacagaacccccaccatcgccaaccccatcctgcacttcagctgcatggacgccagcctggccatcaagcccgtgttcgagagattccagagcgtgatcatcaccagcggcaccctgagccccctggacatctaccccaagatcctggacttccaccccgtgaccatggccaccttcaccatgaccctggccagagtgtgcctgtgccccatgatcatcggcagaggcaacgaccaggtggccatcagcagcaagttcgagaccagagaggacatcgccgtgatcagaaactacggcaacctgctgctggagatgagcgccgtggtgcccgacggcatcgtggccttcttcaccagctaccagtacatggagagcaccgtggccagctggtacgagcagggcatcctggagaacatccagagaaacaagctgctgttcatcgagacccaggacggcgccgagaccagcgtggccctggagaagtaccaggaggcctgcgagaacggcagaggcgccatcctgctgagcgtggccagaggcaaggtgagcgagggcatcgacttcgtgcaccactacggcagagccgtgatcatgttcggcgtgccctacgtgtacacccagagcagaatcctgaaggccagactggagtacctgagagaccagttccagatcagagagaacgacttcctgaccttcgacgccatgagacacgccgcccagtgcgtgggcagagccatcagaggcaagaccgactacggcctgatggtgttcgccgacaagagattcgccagaggcgacaagagaggcaagctgcccagatggatccaggagcacctgaccgacgccaacctgaacctgaccgtggacgagggcgtgcaggtggccaagtacttcctgagacagatggcccagcccttccacagagaggaccagctgggcctgagcctgctgagcctggagcagctggagagcgaggagaccctgaagagaatcgagcagatcgcccagcagctgtag

SEQ ID NO: 319311 - DNA, 2133 bp, Artificial Sequence
  derived and/or modified sequence
atgagggagttgaagcggacgttagatgccaaagcataccccctcgaggtcacgaaacttatctattgttcaaggacagtaccggagatcgagaaagtcatagaggaactgagaaagctcctgaatttctatgaaaaacaagagggagaaaagctgccctttctaggacttgcattgtcaagcaggaagaatctgtgtatacatcccgaggtgacccccctccgatttggcaaagatgtagacgggaagtgtcattctctgaccgcctcttatgtcagagcacagtaccagcatgatacaagcctcccacactgtcgcttctacgaagagttcgacgcccacggccgagaggtgccattacccgcagggatttataacctagacgatctgaaagctctcggaaggcggcagggctggtgcccatattttttggccaggtactcaatcctgcacgctaacgtcgtcgtgtattcgtatcactacctgctagatcctaaaatcgcggatttagtctctaaagaactggcccgaaaggctgtcgtcgtgtttgatgaggcgcacaacatcgacaatgtgtgtattgattccatgtccgtcaatttgactcgccgaacgttagatcggtgtcagggaaatttagagactcttcagaaaacagtcctccggattaaagaaactgatgaacagcgccttcgtgacgagtaccggcgcttggtagagggcctgagggaagcctctgctgcacgtgaaactgacgcacatttagccaacccagtgttgccggatgaggtgcttcaagaggcagtcccaggttcaattcggaccgcagagcattttcttgggtttctccggcggcttctcgagtacgtgaaatggagattaagggtccagcatgttgtgcaggagtcacctcccgctttcctgagtggcctggcccagagggtttgcattcagcggaagcctctacggttctgcgccgaaaggctgcgatcactgctgcatacactggagattaccgatctcgcagatttctcccccttgactttactggctaacttcgcaactctcgtgtcaacctacgctaagggctttacaatcatcattgagcccttcgatgataggactcccaccatagccaaccccatactccacttcagctgcatggacgctagtctggcaattaagcccgtcttcgagcgatttcaatctgttataatcacgagcgggaccctctcacccctggacatctaccctaagattctcgacttccaccctgtgacgatggccactttcacaatgacgctggcccgggtttgcctgtgtccgatgataatcgggagaggtaacgaccaagttgccatcagttctaagttcgaaactcgcgaggacattgccgtcatccgtaattatggcaacctcctcctggaaatgagcgcagtcgtaccagatggaattgtcgcattcttcacttcttaccagtatatggagtcgactgtagcgagctggtacgagcagggaatcttagagaacatccagcggaacaagcttctgtttatcgagacccaggatggcgcggagacatccgtcgctttggagaagtatcaggaagcctgcgagaatggccgtggggcgattttactctctgtggctcgcgggaaagtctcggaggggattgacttcgtccatcattacggcagggccgtgattatgtttggcgtgccttacgtctacacacagtcaaggatcctgaaggctagactggaatacctccgtgaccagttccagattcgggaaaatgactttttgacctttgacgcaatgcgacatgccgcccaatgtgtcggcagggcaatccggggtaaaactgattacggactgatggtcttcgctgataaacgctttgctaggggcgataagagaggtaaactgcctcgctggatccaagaacatctcacagacgcaaacctgaatttgactgtagatgaaggggtgcaagtggccaaatacttcctgcgtcagatggcccagccctttcaccgagaggaccagctcggactgtccctgctgtccttggaacaactggaaagcgaagagacgctgaagagaattgagcagatcgcgcagcaactgtag

SEQ ID NO: 319312 - DNA, 2049 bp, Artificial Sequence
  derived and/or modified sequence
atgaaactgaatgttgatggactgctggtatacttcccatatgactacatttaccctgagcaattctcttacatgcgggagctgaagcgcaccctcgacgccaagggccacggtgtgctggagatgcccagtgggactggaaaaacagtatccttgcttgcgcttattatggcttaccagcgagcctatcctcttgaggtgaccaaactcatttactgtagtagaacagtgcccgaaattgaaaaagttattgaagagctgcgcaaactgctaaatttctatgagaaacaggagggtgaaaagctcccattcctcgggctagccctgagttctcggaagaatctgtgtatccaccctgaaattctccatgccaacgtggtcgtgtactcctaccactaccttttagaccccaaaatcgccgacctggtgtctaaggagctcgcgaggaaagctgttgtggtcttcgacgaagcccacaacattgataatgtatgtatcgactctatgtctgttaacctcacacggcgcaccttggaccgatgccagggcaatctcgagaccctgcaaaaaaccgttctccgaattaaagagacagacgaacaacgcctgagggacgagtatcgaagacttgtggaggggctgagagaagcctctgcggccagggagactgatgcacacctggctaatcctgttttgcccgatgaggttcttcaggaagcagtgcctggctccattcgcacagccgaacatttccttggttttctgaggagactgctggaatatgttaaatggcgcctccgcgtccagcacgtggtccaggaatctccgccggcctttctgtctgggttggcacagcgggtgtgtatccagcgcaagcccttgcgcttctgcgccgaaagactgcgctcactcttgcacactttggaaatcaccgatctcgccgatttttcacctctaaccctgcttgccaatttcgccaccctggtgtctacttatgcaaagggatttacgatcataatagagcccttcgacgacaggactcccacgatcgccaatcctatcctgcatttctcttgcatggacgcttcacttgccatcaagcctgtcttcgaaagattccagtcggtgatcattacatcgggcactctgtctcctttggatatctatcccaagatcctagactttcacccagtcacaatggcgacatttactatgactctggccagagtatgtttgtgtcccatgatcatcgggcggggaaatgaccaggtggcgatttcctctaagttcgaaacacgcgaggatatcgctgtaatcagaaactacggtaacttgctccttgaaatgagtgctgtcgtccccgatgggatcgtggctttctttacaagttaccagtacatggaatctaccgtcgcttcttggtatgagcagggaattctcgaaaacatccagcgtaataaactgctgttcattgaaacccaagacggtgctgaaaccagcgtcgcactcgagaaataccaggaagcatgcgagaacggcagaggcgctatcctcttatccgtcgctaggggcaaggtgtcagaaggcatagactttgtgcatcactatggacgagccgtcatcatgttcggcgtgccatacgtttatacccagtcccgcatcctgaaggccagactcgagtacctgagggaccagtttcagataagagaaaacgactttctcaccttcgacgcaatgcggcacgccgcacaatgtgttgggcgcgccatcaggggcaagactgattatggtcttatggtctttgccgataagaggttcgcccgcggagataagcgcggaaagttacccaggtggattcaggagcaccttaccgatgccaacctgaatttgactgttgatgagggtgtgcaggttgcaaaatatttcctgcgccagatggcacaaccttttcacagagaagaccagttgggactgagcctactctccctcgaacagttggaatcagaagaaacactgaagcgtattgaacagatcgcccagcagctttag

SEQ ID NO: 319313 - DNA, 3137 bp, Artificial Sequence
  derived and/or modified sequence
gggggctgggggtcgcgctcgctagcgggcgcggggggtcttgaagatggggtcatcggtgggcgcgcctgggtccccaagggggcgaggggagggtgaaggggtgggacgggggcagccgcagggagcagcagtgatagcgaggagacactgagggggccccgaggctcctgaggacctgagggttaccgggggcgccgggcccgtcacccttctctgggctcgacgaccgggcactgtggaggcgggagaggggctgaggggacgggaactgacccagcagcccctgccgccaggctcaacgtggacgggctcctggtctacttcccgtacgactacatctaccccgagcagttctcctacatgcgggagctcaaacgcacgctggacgccaaggcatatccgctggaggtgaccaaactcatctactgctcaagaactgtgccagagattgagaaggtgattgaagagcttcgaaagttgctcaacttctatgagaagcaggagggcgagaagctgccgtttctgggactggctctgagctcccgcaaaaacttgtgtattcaccctgaggtgacacccctgcgctttgggaaggacgtcgatgggaaatgccacagcctcacagcctcctatgtgcgggcgcagtaccagcatgacaccagcctgccccactgccgattctatgaggaatttgatgcccatgggcgtgaggtgcccctccccgctggcatctacaacctggatgacctgaaggccctggggcggcgccagggctggtgcccatacttccttgctcgatactcaatcctgcatgccaatgtggtggtttatagctaccactacctcctggaccccaagattgcagacctggtgtccaaggaactggcccgcaaggccgtcgtggtcttcgacgaggcccacaacattgacaacgtctgcatcgactccatgagcgtcaacctcacccgccggacccttgaccggtgccagggcaacctggagaccctgcagaagacggtgctcaggatcaaagagacagacgagcagcgcctgcgggacgagtaccggcgtctggtggaggggctgcgggaggccagcgccgcccgggagacggacgcccacctggccaaccccgtgctgcccgacgaagtgctgcaggaggcagtgcctggctccatccgcacggccgagcatttcctgggcttcctgaggcggctgctggagtacgtgaagtggcggctgcgtgtgcagcatgtggtgcaggagagcccgcccgccttcctgagcggcctggcccagcgcgtgtgcatccagcgcaagcccctcagattctgtgctgaacgcctccggtccctgctgcatactctggagatcaccgaccttgctgacttctccccgctcaccctccttgctaactttgccacccttgtcagcacctacgccaaaggcttcaccatcatcatcgagccctttgacgacagaaccccgaccattgccaaccccatcctgcacttcagctgcatggacgcctcgctggccatcaaacccgtatttgagcgtttccagtctgtcatcatcacatctgggacactgtccccgctggacatctaccccaagatcctggacttccaccccgtcaccatggcaaccttcaccatgacgctggcacgggtctgcctctgccctatgatcatcggccgtggcaatgaccaggtggccatcagctccaaatttgagacccgggaggatattgctgtgatccggaactatgggaacctcctgctggagatgtccgctgtggtccctgatggcatcgtggccttcttcaccagctaccagtacatggagagcaccgtggcctcctggtatgagcaggggatccttgagaacatccagaggaacaagctgctctttattgagacccaggatggtgccgaaaccagtgtcgccctggagaagtaccaggaggcctgcgagaatggccgcggggccatcctgctgtcagtggcccggggcaaagtgtccgagggaatcgactttgtgcaccactacgggcgggccgtcatcatgtttggcgtcccctacgtctacacacagagccgcattctcaaggcgcggctggaatacctgcgggaccagttccagattcgtgagaatgactttcttaccttcgatgccatgcgccacgcggcccagtgtgtgggtcgggccatcaggggcaagacggactacggcctcatggtctttgccgacaagcggtttgcccgtggggacaagcgggggaagctgccccgctggatccaggagcacctcacagatgccaacctcaacctgaccgtggacgagggtgtccaggtggccaagtacttcctgcggcagatggcacagcccttccaccgggaggatcagctgggcctgtccctgctcagcctggagcagctagaatcagaggagacgctgaagaggatagagcagattgctcagcagctctgagtggggcgggtggggccataaacggttcctggtgactcctgagtcttgcctggccctggttcccagcggcggtggtgctagaaggtcttatgaagtcaggtgacatttctcactgtcacgtccacagcctttaatcgcaggagaaggcagctatccaccaggtacccagaggcaagggggggccaggagatgatagaccccctctcaccccaccagcccatccctcctgcactgttcccaagaagctgcggccagcgcagttcactggacgttagtgggggctcaggtcctgggtgctggcgctgagggtccgaggggccttgtccaggtgccagctgggaaactggagacaggcacaggggatggttggaggggaggtgaggggcaagtgttacatccaccctccagctccaggtccagcctggcagccaactatccaaccccctcgcctctaccccaagtaaaacccatctttgctcctgtcctgggtctcttctgacaccaacccaccacctgctgactccaccactggcccgaccgccctgcctttgcctcatctctgcacctacccacatggcctcctctatttttgacccagatgtccccctcacctgagtcccaggagcccttggagcatccac

SEQ ID NO: 319314 - DNA, 2103 bp, Artificial Sequence
  derived and/or modified sequence
gaccccgctgcacagtccggccggcgccatgaagctcaacgtggacgggctcctggtctacttcccgtacgactacatctaccccgagcagttctcctacatgcgggagctcaaacgcacgctggacgccaagggtcatggagtcctggagatgccctcaggcaccgggaagacagtatccctgttggccctgatcatggcataccagagagcatatccgctggaggtgaccaaactcatctactgctcaagaactgtgccagagattgagaaggtgattgaagagcttcgaaagttgctcaacttctatgagaagcaggagggcgagaagctgccgtttctgggactggctctgagctcccgcaaaaacttgtgtattcaccctgagatcctgcatgccaatgtggtggtttatagctaccactacctcctggaccccaagattgcagacctggtgtccaaggaactggcccgcaaggccgtcgtggtcttcgacgaggcccacaacattgacaacgtctgcatcgactccatgagcgtcaacctcacccgccggacccttgaccggtgccagggcaacctggagaccctgcagaagacggtgctcaggatcaaagagacagacgagcagcgcctgcgggacgagtaccggcgtctggtggaggggctgcgggaggccagcgccgcccgggagacggacgcccacctggccaaccccgtgctgcccgacgaagtgctgcaggaggcagtgcctggctccatccgcacggccgagcatttcctgggcttcctgaggcggctgctggagtacgtgaagtggcggctgcgtgtgcagcatgtggtgcaggagagcccgcccgccttcctgagcggcctggcccagcgcgtgtgcatccagcgcaagcccctcagattctgtgctgaacgcctccggtccctgctgcatactctggagatcaccgaccttgctgacttctccccgctcaccctccttgctaactttgccacccttgtcagcacctacgccaaaggcttcaccatcatcatcgagccctttgacgacagaaccccgaccattgccaaccccatcctgcacttcagctgcatggacgcctcgctggccatcaaacccgtatttgagcgtttccagtctgtcatcatcacatctgggacactgtccccgctggacatctaccccaagatcctggacttccaccccgtcaccatggcaaccttcaccatgacgctggcacgggtctgcctctgccctatgatcatcggccgtggcaatgaccaggtggccatcagctccaaatttgagacccgggaggatattgctgtgatccggaactatgggaacctcctgctggagatgtccgctgtggtccctgatggcatcgtggccttcttcaccagctaccagtacatggagagcaccgtggcctcctggtatgagcaggggatccttgagaacatccagaggaacaagctgctctttattgagacccaggatggtgccgaaaccagtgtcgccctggagaagtaccaggaggcctgcgagaatggccgcggggccatcctgctgtcagtggcccggggcaaagtgtccgagggaatcgactttgtgcaccactacgggcgggccgtcatcatgtttggcgtcccctacgtctacacacagagccgcattctcaaggcgcggctggaatacctgcgggaccagttccagattcgtgagaatgactttcttaccttcgatgccatgcgccacgcggcccagtgtgtgggtcgggccatcaggggcaagacggactacggcctcatggtctttgccgacaagcggtttgcccgtggggacaagcgggggaagctgccccgctggatccaggagcacctcacagatgccaacctcaacctgaccgtggacgagggtgtccaggtggccaagtacttcctgcggcagatggcacagcccttccaccgggaggatcagctgggcctgtccctgctcagcctggagcagctagaatcagaggagacgctgaagaggatagagcagattgctcagcagctctgagtggggcgggtggggccataaacggt

SEQ ID NO: 319315 - DNA, 2133 bp, Artificial Sequence
  derived and/or modified sequence
atgagggagctgaagaggaccctggatgccaaggcctaccccctggaggtgaccaagctgatctactgcagcaggacagtgcctgagattgagaaggtgattgaggagctgaggaagctgctgaacttctatgagaagcaggagggggagaagctgcccttcctgggcctggccctgagcagcaggaagaacctgtgcatccaccctgaggtgacccccctgcgctttgggaaggatgtggatggcaagtgccacagcctgacagccagctatgtgcgggcccagtaccagcacgacaccagcctgccccactgccgcttctatgaggagtttgatgcccacggccgggaggtgcccctgcctgctggcatctacaacctggatgacctgaaggccctgggccggcggcagggctggtgcccctacttcctggcccgctacagcatcctgcacgccaacgtggtggtgtacagctaccactacctgctggaccccaagattgctgacctggtgtccaaggagctggccaggaaggctgtggtggtgtttgatgaggcccacaacatcgacaacgtgtgcatcgacagcatgtctgtgaacctgaccaggaggaccctggaccgctgccagggcaacctggagaccctgcagaagacagtgctgcgcatcaaggagacagatgagcagaggctgagagatgagtaccgccgcctggtggagggcctgcgggaggccagcgctgcccgggagacagatgcccacctggccaaccctgtgctgcctgatgaggtgctgcaggaggccgtgcccggcagcatcagaacagctgagcacttcctgggcttcctgcggcggctgctggagtatgtgaagtggaggctgcgggtgcagcacgtggtgcaggagagccccccagccttcctgagcggcctggcccagagggtgtgcatccagaggaagcccctgcgcttctgtgccgagcggctgcggagcctgctgcacaccctggagatcacagacctggccgacttcagccccctgaccctgctggccaactttgccaccctggtgtccacctacgccaagggcttcaccatcatcatcgagccctttgatgacaggacccccaccatcgccaaccccatcctgcacttcagctgcatggatgccagcctggccatcaagcctgtgtttgagcgcttccagagcgtcatcatcaccagcggcaccctgagccccctggacatctaccccaagatcctggacttccaccctgtgaccatggccaccttcaccatgaccctggcccgggtgtgcctgtgccccatgatcatcggcagaggaaatgaccaggtggccatcagcagcaagtttgagacccgggaggacattgctgtgatccggaactacggcaacctgctgctggagatgtctgctgtggtgcctgatggcatcgtggccttcttcaccagctaccagtacatggagagcacagtggcctcctggtatgagcagggcatcctggagaacatccagaggaacaagctgctcttcatcgagacccaggatggagctgagacctctgtggccctggagaagtaccaggaggcctgtgaaaatggccgcggggccatcctgctgtctgtggcccggggcaaggtgtctgagggcatcgactttgtgcaccactacggccgggctgtgatcatgtttggagtgccctacgtgtacacccagagccgcatcctgaaggcccggctggagtacctgcgggaccagttccagatccgggagaatgacttcctgacctttgatgccatgagacatgctgcccagtgtgtgggccgggccatccggggcaagacagattatggcctgatggtgtttgctgacaagagatttgcccggggggacaagaggggcaagctgccccgctggatccaggagcacctgacagatgccaacctgaacctgactgtggatgaaggagtgcaggtggccaagtacttcctgcggcagatggcccagcccttccaccgggaggaccagctgggcctgagcctgctgagcctggagcagctggagagcgaggagaccctgaagagaattgagcagatcgcccagcagctgtag

SEQ ID NO: 319316 - DNA, 2049 bp, Artificial Sequence
  derived and/or modified sequence
atgaagctgaatgtggatggcctgctggtgtacttcccctatgactacatctacccagagcagttctcctacatgagggagctgaagaggaccctggatgccaagggccatggagtgctggagatgcccagcggcaccgggaagacagtgtccctgctggccctgatcatggcctaccagagggcctaccccctggaggtgaccaagctgatctactgcagcaggacagtgcctgagattgagaaggtgattgaggagctgaggaagctgctgaacttctatgagaagcaggagggggagaagctgcccttcctgggcctggccctgagcagcaggaagaacctgtgcatccaccctgagatcctgcacgccaacgtggtggtgtacagctaccactacctgctggaccccaagattgctgacctggtgtccaaggagctggccaggaaggctgtggtggtgtttgatgaggcccacaacatcgacaacgtgtgcatcgacagcatgtctgtgaacctgaccaggaggaccctggaccgctgccagggcaacctggagaccctgcagaagacagtgctgcgcatcaaggagacagatgagcagaggctgagagatgagtaccgccgcctggtggagggcctgcgggaggccagcgctgcccgggagacagatgcccacctggccaaccctgtgctgcctgatgaggtgctgcaggaggccgtgcccggcagcatcagaacagctgagcacttcctgggcttcctgcggcggctgctggagtatgtgaagtggaggctgcgggtgcagcacgtggtgcaggagagccccccagccttcctgagcggcctggcccagagggtgtgcatccagaggaagcccctgcgcttctgtgccgagcggctgcggagcctgctgcacaccctggagatcacagacctggccgacttcagccccctgaccctgctggccaactttgccaccctggtgtccacctacgccaagggcttcaccatcatcatcgagccctttgatgacaggacccccaccatcgccaaccccatcctgcacttcagctgcatggatgccagcctggccatcaagcctgtgtttgagcgcttccagagcgtcatcatcaccagcggcaccctgagccccctggacatctaccccaagatcctggacttccaccctgtgaccatggccaccttcaccatgaccctggcccgggtgtgcctgtgccccatgatcatcggcagaggaaatgaccaggtggccatcagcagcaagtttgagacccgggaggacattgctgtgatccggaactacggcaacctgctgctggagatgtctgctgtggtgcctgatggcatcgtggccttcttcaccagctaccagtacatggagagcacagtggcctcctggtatgagcagggcatcctggagaacatccagaggaacaagctgctcttcatcgagacccaggatggagctgagacctctgtggccctggagaagtaccaggaggcctgtgaaaatggccgcggggccatcctgctgtctgtggcccggggcaaggtgtctgagggcatcgactttgtgcaccactacggccgggctgtgatcatgtttggagtgccctacgtgtacacccagagccgcatcctgaaggcccggctggagtacctgcgggaccagttccagatccgggagaatgacttcctgacctttgatgccatgagacatgctgcccagtgtgtgggccgggccatccggggcaagacagattatggcctgatggtgtttgctgacaagagatttgcccggggggacaagaggggcaagctgccccgctggatccaggagcacctgacagatgccaacctgaacctgactgtggatgaaggagtgcaggtggccaagtacttcctgcggcagatggcccagcccttccaccgggaggaccagctgggcctgagcctgctgagcctggagcagctggagagcgaggagaccctgaagagaattgagcagatcgcccagcagctgtag

SEQ ID NO: 319317 - DNA, 2133 bp, Artificial Sequence
  derived and/or modified sequence
atgcgggagctgaagcggaccctggacgccaaggcctaccccctggaggtgaccaaattaatttactgtagcagaaccgtgcccgagatcgaaaaagtgatcgaagagctgcggaaattgctcaatttttacgagaagcaggaaggtgagaagctacctttcctgggactggctttgtctagccggaaaaatctgtgcatacatcctgaggtcaccccgctaaggttcggcaaggacgtggatgggaaatgtcattctttaaccgcctcttatgtgagggcccagtatcagcacgacacctcattacctcattgcagattctacgaagagtttgacgcccacggacgcgaggtcccgctccccgccggtatttacaacctcgacgatttaaaagcattgggacgccgccaagggtggtgtccctatttccttgctcggtactcgattctgcacgctaatgtagtggtctatagctaccattatctgcttgatcccaaaattgcagacctggtatccaaagagttggcgaggaaggctgtcgttgtgttcgacgaggctcacaatattgacaacgtttgtatagatagtatgtctgtgaatctgacccgcaggacacttgaccgctgtcagggaaacttagaaactttgcagaagacggttctgcggattaaagagacggacgagcagagactacgtgacgagtacagaaggctggtggaaggcctcagggaggcttcggccgccagagaaaccgacgctcatctggctaatcccgtattgccagatgaagtcctccaagaggccgtgccgggaagtatacgcacagctgagcactttctcggattcctaaggcgccttctcgagtacgttaaatggcgtctccgtgtgcaacatgttgtgcaggaaagtccgcccgcctttctttcagggcttgctcagagggtctgcatacagcggaaacctttaagattctgtgccgagcgtttgagaagcttgctgcatactctggagattaccgatttagccgatttttctcccctgacgctgctcgctaatttcgccaccctcgtcagcacctacgctaaagggtttacgatcatcatcgagccgtttgacgacaggaccccaaccatagcaaatccaatccttcatttttcttgcatggatgctagtctcgctattaagccagttttcgagcgatttcagtctgtcattatcaccagcggaaccctgtcacccctggatatttatccgaaaattctggattttcatcccgtgaccatggcgactttcacaatgactcttgctcgtgtgtgcctgtgtccaatgatcatcgggcgcggaaacgaccaagtggctatcagtagtaagttcgagacaagagaagatatcgccgtgatccggaactatggtaatcttctcttagagatgtctgcagttgtgcccgatggcattgtggcgttcttcacatcataccagtacatggagagcactgtggcttcttggtacgaacaggggattcttgaaaacatccagcgcaacaagctgctcttcatcgagacacaggacggcgccgaaacttccgtggccttagagaaatatcaggaagcttgcgagaatggcaggggcgccatactgcttagcgttgccagaggaaaggtgtctgaggggatcgattttgttcaccattacggccgcgctgttatcatgttcggcgtaccatacgtgtacacacaatcacgtatcctgaaagccagacttgaatatcttagagatcagttccagattcgagaaaatgactttttgactttcgacgccatgaggcacgctgctcaatgtgtgggacgggcaatccgcgggaaaacagactatggtttgatggtttttgccgacaaaaggttcgcacggggcgacaagcgtggaaagctcccccgatggattcaagagcacctgaccgacgccaacttaaatctcacagtcgacgagggcgtacaagttgcaaaatattttcttcgacagatggctcagccatttcaccgtgaggaccagctcgggctctcccttctgtccctcgaacagctggagagcgaggagacactgaagcggatagagcagattgcacagcagctctag

SEQ ID NO: 319318 - DNA, 2049 bp, Artificial Sequence
  derived and/or modified sequence
atgaagctgaacgtggacggcctgctggtgtacttcccctacgactatatctatcctgaacaattctcctacatgagagagctcaagcgcacactcgacgctaaggggcatggagtgctggagatgccctctggtacaggcaaaacggtgtctctcctggcgctcattatggcctaccaacgggcttatccccttgaagtgaccaaactcatctactgtagcaggacagtgcctgaaattgagaaagttatcgaggaattacgaaagctgttgaatttttacgagaaacaagagggggaaaagcttccttttcttggcctggctctgtctagtaggaagaacctctgtatccatcctgagattttgcatgccaacgtcgtggtatactcctaccattatctcctcgatccaaagattgccgatctagtttcgaaggagctggcccggaaggcggttgtcgtgttcgatgaagcccataacatcgacaacgtctgcattgacagtatgagtgtcaaccttactaggcggaccttggacaggtgtcagggaaatcttgaaacactccaaaagactgtacttcgcattaaagaaacagatgaacagcggttacgcgacgagtataggcgtcttgtggagggtttgagagaggcttcggcagcacgcgaaaccgacgcccaccttgctaaccccgtgctgccagacgaggtgctgcaggaagccgtcccgggatccattcggactgccgaacacttcttgggttttctgcggagactcctagagtacgtgaaatggagactgcgagttcaacacgtggtgcaggaatcccccccagctttcttaagcggcttggctcagcgtgtgtgtattcaaagaaaaccacttaggttctgtgcggaacgactgcgatctctcctccacacacttgagattacagacctggcggacttctctcccctgactctactcgcaaactttgcaaccttagtctcaacttacgccaagggctttactatcatcatagagcccttcgacgataggacacctaccattgcaaatcccatcttgcacttttcttgtatggatgccagcctggccattaagcccgtgtttgagcgatttcagtctgtcattatcacatctgggactctgtcacctctcgatatctacccaaagattctggacttccaccccgtaaccatggccactttcacaatgacactggctcgagtgtgtctttgccctatgataatcgggcgaggcaacgaccaagtcgcgatctcatccaagttcgagacaagagaagacatcgccgtcatcagaaattacgggaacctcctgttagagatgtccgcagtcgtgcccgatggcatagtggctttcttcacttcctaccaatacatggaatccaccgtcgcctcatggtacgaacagggcatactggaaaatattcagagaaataaactgttatttatcgaaacgcaggacggagccgaaacctcagtcgcgctggagaagtatcaggaggcatgtgaaaatgggcggggcgcaatactgttgtcggtagcccgcgggaaagtgagtgagggcatcgacttcgtccatcactacggtcgcgcagttattatgtttggtgtgccttacgtgtatacccagtcgcgcattcttaaggcacggctcgaatatctgcgggaccagtttcagatccgcgagaacgactttctcacatttgatgcgatgaggcacgccgctcagtgtgtggggcgggcaattagagggaaaacggattatggcttaatggtgtttgcagacaagaggttcgcacggggagacaagcgtgggaaactgcccaggtggatccaagaacacctgaccgatgccaatctgaacttgaccgtggatgagggagtgcaggtggcaaagtacttcctacgtcaaatggctcaaccctttcaccgggaagaccagttgggtttaagtctgctctctctggagcagttggagtccgaggaaaccctgaaacgcattgagcagatcgcacaacagttgtag

SEQ ID NO: 319319 - DNA, 2133 bp, Artificial Sequence
  derived and/or modified sequence
atgagagaactgaagaggacgttagacgccaaggcctaccccctcgaggtgaccaaactcatttattgctctcgcacagtcccggagatcgagaaagtaattgaagagttacgtaaactgcttaatttttatgaaaagcaggaaggagagaaactgccgtttctgggcctggccctaagtagcaggaaaaatctttgtattcatcccgaagtgactccactccggttcggaaaggatgtggatgggaagtgtcattccctgaccgccagctacgtgcgggctcagtaccagcatgatactagtctaccacactgccggttttacgaggaatttgatgcacacgggcgagaagtgcccctgccagccggtatttataatctggacgacctgaaagccttaggtagacgccagggatggtgcccttatttcctcgcacgctattccatactccacgcaaatgtggtcgtctattcatatcactatctgctcgatccaaagattgccgatcttgtgtcaaaggagttggcaaggaaggccgtggttgtgtttgatgaagcgcataatatcgacaacgtgtgcatcgactccatgtccgtgaacttgacaaggcgaaccctggataggtgccaggggaaccttgagaccctccagaaaacggtcctacgtattaaggagacggacgagcagcgtctccgtgacgagtatcggagacttgtggagggtctgagggaggcttcagccgctcgggagaccgacgctcacctggccaatccggtccttcctgatgaggtgctgcaggaggctgtacctgggtcaatccgtactgctgaacacttcctcggttttctccggcgactgctcgagtatgtcaagtggcggctcagggtgcagcacgtggtgcaggaatcgcctcccgctttcctcagtggcctggctcagagagtgtgtatccaacggaagccattgaggttctgtgcagaaagattgcgctccctgttacacacgctcgaaatcacagatttggcagatttcagtcccttgaccttgctcgcaaactttgccacactggtgtccacatacgccaaagggtttactattataattgaacccttcgacgatcggacaccaacaatcgccaacccgattctgcatttttcttgtatggatgctagtctcgcaattaagccagtgtttgagcggttccagtccgttataattacctcaggtacactgagcccacttgatatctatcccaagatactggacttccaccccgtgaccatggcgacattcactatgaccttagcaagggtctgcctgtgtcctatgattatcgggaggggcaatgaccaggttgcaatctcatccaagtttgaaacaagggaggatattgccgtaatcagaaattacggtaacctgcttctggaaatgtccgccgtcgtgcctgacggcatcgtcgcattttttaccagctaccagtacatggagagcacagtggcatcttggtacgagcaggggatactggagaatattcagcgaaataagctactgtttatagagacccaggatggggctgaaacctctgttgccctcgagaagtaccaggaggcttgcgaaaatggtcgcggtgccatattacttagtgtggccaggggaaaggtgagtgagggcatcgattttgtacatcactatgggcgtgccgtgatcatgttcggggtgccgtatgtgtatactcaatccagaatccttaaagcccgtcttgagtacctgcgcgatcagtttcagattcgtgaaaacgatttcctaacattcgatgccatgcgccatgccgctcagtgcgttggccgagccatcagagggaagactgactatggtttgatggtcttcgcggataaacggtttgctaggggtgataaacgaggcaagcttcccaggtggattcaggagcacttaaccgatgcgaatctcaacctcacagtagatgagggagttcaggttgctaagtactttctgaggcagatggcacaacccttccatcgcgaggaccagttgggactgtcacttctctcccttgagcagttggagtctgaggaaactcttaaacgaatcgagcagatcgcccaacagctctag

SEQ ID NO: 319320 - DNA, 2049 bp, Artificial Sequence
  derived and/or modified sequence
atgaagttaaatgtggacggactgctagtgtactttccatatgactacatctatccagagcagttttcatatatgcgcgagctgaagaggaccttggacgcaaagggccacggagtcctcgagatgcccagcggaacaggaaaaaccgtttccttgctcgccttgatcatggcttatcagcgcgcatacccacttgaagttaccaagcttatctattgctcacggaccgtgccagaaatcgaaaaagtgatagaggaactgagaaaattactgaacttttacgagaaacaggaaggtgaaaagttaccatttctggggctggccctttcatccaggaaaaatctctgcattcacccagaaattcttcacgctaatgtggtggtgtattcgtatcactacctgctggatccaaaaattgcagatctggtgagcaaggaactcgcccgaaaggcggtggttgtgttcgacgaggcccataacatcgataacgtctgtatcgactcaatgtccgtcaacctgaccagacgtaccctggaccgctgtcagggaaatctcgagactttgcagaagacggtgcttagaataaaagagacagacgaacagcggcttagggacgagtatcggaggctggtagagggcctcagagaggccagtgctgctcgcgagaccgatgcccatctggctaatcctgtcctacctgatgaagtcctgcaggaggctgtcccgggatcaatccgcaccgccgaacactttcttggcttccttcgacggttactggaatatgtgaagtggcgtcttcgagtgcagcacgtcgtacaagagtccccccctgcgtttttgtcaggcttggcgcagagggtgtgtatccagcgtaaaccgttacggttttgcgccgagcgcctgcgaagcctcttacataccttggagataaccgatctggcagatttctctccacttactctgctggcaaactttgcaaccctggtttccacttatgctaaaggcttcaccataattatcgagccatttgacgatcgtacgccaactattgcaaatcccatcctccacttctcttgtatggatgcttctttagccatcaagcctgtgttcgagcgatttcagtcggtgataattacaagcgggacattgtctcctctagatatttaccctaagatcttggattttcaccctgtgaccatggcgaccttcactatgactctggcgagggtgtgcctgtgccctatgattataggccgagggaatgaccaggtcgcgatttcaagcaagtttgaaaccagggaagatattgcagtgatccgcaactatggaaacctgctccttgagatgtcagccgtagtcccggacggtatagtggctttcttcaccagttatcaatacatggagagcacagttgcaagttggtatgagcaggggatcctggagaatatacagcgaaacaagttgttatttatcgaaacccaggacggtgctgaaacgtcagttgccctcgaaaagtatcaagaggcctgcgaaaacggcaggggagctatcctgctgagtgttgccaggggcaaggtttccgagggtatagactttgtgcatcattacggaagagcagttattatgtttggcgttccgtacgtctacactcagagccgcatcctgaaagcccgattagagtaccttcgcgatcaattccagattcgagaaaacgacttcctcacctttgatgcaatgagacatgcggctcaatgcgtgggccgagcaattaggggcaaaaccgactacggcctaatggtgttcgctgacaaacggttcgcgcgtggcgataaaaggggaaagttacccaggtggatccaagagcacctgacagacgccaatttgaatctcacggttgatgagggagtgcaggtggcaaagtacttcctgaggcagatggcgcagccgtttcatcgagaggaccagctcggattaagtctcctgtcactggaacagttagagtccgaggagacactgaaaaggatcgagcagatcgcccagcagctctag

SEQ ID NO: 319321 - protein, 438 aa, Artificial Sequence
  derived and/or modified sequence
MNEVSVIKEGWLHKRGEYIKTWRPRYFLLKSDGSFIGYKERPEAPDQTLPPLNNFSVAECQLMKTERPRPNTFVIRCLQWTTVIERTFHVDSPDEREEWMRAIQMVANSLKQRAPGEDPMDYKCGSPSDSSTTEEMEVAVSKARAKVTMNDFDYLKLLGKGTFGKVILVREKATGRYYAMKILRKEVIIAKDEVAHTVTESRVLQNTRHPFLTALKYAFQTHDRLCFVMEYANGGELFFHLSRERVFTEERARFYGAEIVSALEYLHSRDVVYRDIKVLEDNDYGRAVDWWGLGVVMYEMMCGRLPFYNQDHERLFELILMEEIRFPRTLSPEAKSLLAGLLKKDPKQRLGGGPSDAKEVMEHRFFLSINWQDVVQKKLLPPFKPQVTSEVDTRYFDDEFTAQSITITPPDRYDSLGLLELDQRTHFPQFSYSASIRE

SEQ ID NO: 319322 - protein, 147 aa, Artificial Sequence [sequence omitted]

SEQ ID NO: 319323 - protein, 481 aa, Artificial Sequence
  derived and/or modified sequence
MNEVSVIKEGWLHKRGEYIKTWRPRYFLLKSDGSFIGYKERPEAPDQTLPPLNNFSVAECQLMKTERPRPNTFVIRCLQWTTVIERTFHVDSPDEREEWMRAIQMVANSLKQRAPGEDPMDYKCGSPSDSSTTEEMEVAVSKARAKVTMNDFDYLKLLGKGTFGKVILVREKATGRYYAMKILRKEVIIAKDEVAHTVTESRVLQNTRHPFLTALKYAFQTHDRLCFVMEYANGGELFFHLSRERVFTEERARFYGAEIVSALEYLHSRDVVYRDIKLENLMLDKDGHIKITDFGLCKEGISDGATMKTFCGTPEYLAPEVLEDNDYGRAVDWWGLGVVMYEMMCGRLPFYNQDHERLFELILMEEIRFPRTLSPEAKSLLAGLLKKDPKQRLGGGPSDAKEVMEHRFFLSINWQDVVQKKLLPPFKPQVTSEVDTRYFDDEFTAQSITITPPDRYDSLGLLELDQRTHFPQFSYSASIRE

SEQ ID NO: 319324 - protein, 96 aa, Artificial Sequence
  derived and/or modified sequence
MNEVSVIKEGWLHKRGEYIKTWRPRYFLLKSDGSFIGYKERPEAPDQTLPPLNNFSVAECQLMKTERPRPNTFVIRCLQWTTVIERTFHVDSPDER

SEQ ID NO: 319325 - protein, 119 aa, Artificial Sequence
  derived and/or modified sequence
MNEVSVIKEGWLHKRGEYIKTWRPRYFLLKSDGSFIGYKERPEAPDQTLPPLNNFSVAECQLMKTERPRPNTFVIRCLQWTTVIERTFHVDSPDEREEWMRAIQMVANSLKQRAPGEDP

SEQ ID NO: 319326 - protein, 67 aa, Artificial Sequence
  derived and/or modified sequence
MNEVSVIKEGWLHKRGEYIKTWRPRYFLLKSDGSFIGYKERPEAPDQTLPPLNNFSVAECQLMKTER

SEQ ID NO: 319327 - protein, 47 aa, Artificial Sequence
  derived and/or modified sequence
MNEVSVIKEGWLHKRGEYIKTWRPRYFLLKSDGSFIGYKERPEAPDQ

SEQ ID NO: 319328 - protein, 134 aa, Artificial Sequence
  derived and/or modified sequence
MNEVSVIKEGWLHKRGEYIKTWRPRYFLLKSDGSFIGYKERPEAPDQTLPPLNNFSVAECQLMKTERPRPNTFVIRCLQWTTVIERTFHVDSPDEREEWMRAIQMVANSLKQRAPGEDPMDYKCGSPSDSSTTE

SEQ ID NO: 319329 - protein, 107 aa, Artificial Sequence
  derived and/or modified sequence
MNEVSVIKEGWLHKRGEYIKTWRPRYFLLKSDGSFIGYKERPEAPDQTLPPLNNFSVAECQLMKTERPRPNTFVIRCLQWTTVIERTFHVDSPDEREEWMRAIQMVA

SEQ ID NO: 319330 - protein, 288 aa, Artificial Sequence
  derived and/or modified sequence
MNEVSVIKEGWLHKRGEYIKTWRPRYFLLKSDGSFIGYKERPEAPDQTLPPLNNFSVAECQLMKTERPRPNTFVIRCLQWTTVIERTFHVDSPDEREEWMRAIQMVANSLKQRAPGEDPMDYKCGSPSDSSTTEEMEVAVSKARAKVTMNDFDYLKLLGKGTFGKVILVREKATGRYYAMKILRKEVIIAKDEVAHTVTESRVLQNTRHPFLTVSCPPLPRQCEASLWTELRERALIFWYKAQSWGRPGGQGKVLLRPAKSSEPRHVVGVSRLGEWEGDSFFIDGGFM

SEQ ID NO: 319331 - DNA, 1317 bp, Artificial Sequence
  derived and/or modified sequence
atgaacgaggtgagcgtgatcaaggagggctggctgcacaagagaggcgagtacatcaagacctggagacccagatacttcctgctgaagagcgacggcagcttcatcggctacaaggagagacccgaggcccccgaccagaccctgccccccctgaacaacttcagcgtggccgagtgccagctgatgaagaccgagagacccagacccaacaccttcgtgatcagatgcctgcagtggaccaccgtgatcgagagaaccttccacgtggacagccccgacgagagagaggagtggatgagagccatccagatggtggccaacagcctgaagcagagagcccccggcgaggaccccatggactacaagtgcggcagccccagcgacagcagcaccaccgaggagatggaggtggccgtgagcaaggccagagccaaggtgaccatgaacgacttcgactacctgaagctgctgggcaagggcaccttcggcaaggtgatcctggtgagagagaaggccaccggcagatactacgccatgaagatcctgagaaaggaggtgatcatcgccaaggacgaggtggcccacaccgtgaccgagagcagagtgctgcagaacaccagacaccccttcctgaccgccctgaagtacgccttccagacccacgacagactgtgcttcgtgatggagtacgccaacggcggcgagctgttcttccacctgagcagagagagagtgttcaccgaggagagagccagattctacggcgccgagatcgtgagcgccctggagtacctgcacagcagagacgtggtgtacagagacatcaaggtgctggaggacaacgactacggcagagccgtggactggtggggcctgggcgtggtgatgtacgagatgatgtgcggcagactgcccttctacaaccaggaccacgagagactgttcgagctgatcctgatggaggagatcagattccccagaaccctgagccccgaggccaagagcctgctggccggcctgctgaagaaggaccccaagcagagactgggcggcggccccagcgacgccaaggaggtgatggagcacagattcttcctgagcatcaactggcaggacgtggtgcagaagaagctgctgccccccttcaagccccaggtgaccagcgaggtggacaccagatacttcgacgacgagttcaccgcccagagcatcaccatcaccccccccgacagatacgacagcctgggcctgctggagctggaccagagaacccacttcccccagttcagctacagcgccagcatcagagagtag

SEQ ID NO: 319332 - DNA, 1446 bp, Artificial Sequence
  derived and/or modified sequence
atgaacgaggtgagcgtgatcaaggagggctggctgcacaagagaggcgagtacatcaagacctggagacccagatacttcctgctgaagagcgacggcagcttcatcggctacaaggagagacccgaggcccccgaccagaccctgccccccctgaacaacttcagcgtggccgagtgccagctgatgaagaccgagagacccagacccaacaccttcgtgatcagatgcctgcagtggaccaccgtgatcgagagaaccttccacgtggacagccccgacgagagagaggagtggatgagagccatccagatggtggccaacagcctgaagcagagagcccccggcgaggaccccatggactacaagtgcggcagccccagcgacagcagcaccaccgaggagatggaggtggccgtgagcaaggccagagccaaggtgaccatgaacgacttcgactacctgaagctgctgggcaagggcaccttcggcaaggtgatcctggtgagagagaaggccaccggcagatactacgccatgaagatcctgagaaaggaggtgatcatcgccaaggacgaggtggcccacaccgtgaccgagagcagagtgctgcagaacaccagacaccccttcctgaccgccctgaagtacgccttccagacccacgacagactgtgcttcgtgatggagtacgccaacggcggcgagctgttcttccacctgagcagagagagagtgttcaccgaggagagagccagattctacggcgccgagatcgtgagcgccctggagtacctgcacagcagagacgtggtgtacagagacatcaagctggagaacctgatgctggacaaggacggccacatcaagatcaccgacttcggcctgtgcaaggagggcatcagcgacggcgccaccatgaagaccttctgcggcacccccgagtacctggcccccgaggtgctggaggacaacgactacggcagagccgtggactggtggggcctgggcgtggtgatgtacgagatgatgtgcggcagactgcccttctacaaccaggaccacgagagactgttcgagctgatcctgatggaggagatcagattccccagaaccctgagccccgaggccaagagcctgctggccggcctgctgaagaaggaccccaagcagagactgggcggcggccccagcgacgccaaggaggtgatggagcacagattcttcctgagcatcaactggcaggacgtggtgcagaagaagctgctgccccccttcaagccccaggtgaccagcgaggtggacaccagatacttcgacgacgagttcaccgcccagagcatcaccatcaccccccccgacagatacgacagcctgggcctgctggagctggaccagagaacccacttcccccagttcagctacagcgccagcatcagagagtag

SEQ ID NO: 319333 - DNA, 1317 bp, Artificial Sequence
  derived and/or modified sequence
atgaacgaagtgtccgtgatcaaagagggctggctgcataaacgcggcgagtatatcaagacatggcgccccaggtacttcttgcttaagtcggatgggtcttttattggatacaaggaacgtcctgaagcccctgaccagactctgccccctctgaataatttttccgtcgctgaatgtcaactgatgaaaaccgaacgcccccgaccgaatacttttgtgatacggtgtctgcaatggacaacagttatagagcggacatttcacgtggactcacccgatgaaagggaggagtggatgcgagccatccaaatggtggccaacagcttgaagcagagagctcctggtgaggacccgatggattataaatgtggttcccccagtgattcatctacaaccgaagagatggaggtcgccgtgtctaaagcccgggcaaaggtaaccatgaatgattttgattatcttaaacttctgggtaaaggcactttcgggaaggtaatcctggtccgggagaaggctaccggtaggtattacgcaatgaagattcttcgcaaggaagtgatcatcgccaaagacgaggtagcgcacacagtgaccgaatccagggttctccagaatacacgccatccctttctgactgccctgaagtatgcctttcagacacatgatagattgtgctttgtcatggagtacgccaatggaggcgagctcttcttccatctgagtagggaacgggttttcaccgaggaacgagctcgcttttacggcgcggaaatcgtgagcgcactggagtacttgcattctagggatgtggtttatagagacataaaggtgctagaggataacgattatggaagagcggttgactggtggggtctcggtgtagtgatgtatgagatgatgtgcggccgcctgcctttctacaaccaggaccacgagcgcctgttcgaactgatccttatggaggaaattagatttccaaggaccctctcccccgaggctaagagcttactggctgggcttttgaaaaaggaccctaagcaacgtctggggggtgggccgagcgacgccaaagaagtcatggaacatagattcttccttagcatcaactggcaggacgtggtgcaaaagaagttgctacccccttttaagccccaggtcacctccgaggttgacacccgctactttgacgatgagttcactgcacagagtattacgatcacacccccagaccgctacgactccctcggccttctggaattggaccaacgtacccattttccccaattttcctatagcgccagtatcagagaatag

SEQ ID NO: 319334 - DNA, 1446 bp, Artificial Sequence
  derived and/or modified sequence
atgaacgaggttagcgtaatcaaagaaggatggctgcacaaacgcggcgaatacataaaaacctggcgaccacggtacttcttgctgaaatcggatgggtcattcatcggatataaggaacgacctgaggccccggatcagactctgcccccattgaataatttctcggtcgccgagtgtcagctgatgaaaaccgagcgcccccgacccaacacttttgttattcggtgcctgcagtggactactgtcatcgagcgaaccttccacgttgattcgcccgacgagagagaggaatggatgcgcgcaatacagatggtcgccaactctctgaaacagagagctccaggggaggaccccatggactacaagtgcgggagtccttcggactcgagcacgacagaagagatggaggtggcagtcagtaaagcgagggcaaaagtgaccatgaatgattttgattacctgaagctactgggaaaaggaacttttgggaaggtgatactagtccgcgaaaaagctaccggacgctattacgcaatgaaaattcttagaaaagaggtgattattgctaaggacgaagtggcccacacagtgacagaatccagggttctgcagaatacccggcacccattcctcacggccttaaagtacgctttccaaactcacgacagactgtgttttgtgatggaatatgccaacggcggagaattgttttttcatctgagtagggagcgggtgtttactgaggaacgggcgagattttatggcgcggaaattgtgtccgcactggagtatctgcattccagggacgtagtgtacagggatatcaagttggagaatttaatgctggataaagatggccatattaaaattacggactttggactctgcaaggagggaatatctgacggtgcaaccatgaaaaccttttgtggcactcccgagtacctggctccagaggttctggaggataatgactatggacgagctgttgattggtgggggctcggagtggtaatgtacgaaatgatgtgtggtcggttgcctttttacaatcaggaccacgagcgcctcttcgaactcatactcatggaggaaattcgattcccccggaccctgagcccagaggcgaaaagcctgctggccggacttcttaagaaggaccctaagcagcgactcggcggcggcccgtctgatgccaaggaagtgatggaacatcgcttcttcctgagcataaattggcaagatgttgttcagaaaaagctgctgccaccttttaagccccaagtaacttccgaggtcgacaccaggtactttgatgacgagttcaccgcccagtcgatcacgattacgcctcccgaccgttacgatagtctcggcctgctggaacttgaccagcggactcactttcctcaattctcctattcagcctctatcagagagtag

SEQ ID NO: 319335 - DNA, 1446 bp, Artificial Sequence
  derived and/or modified sequence
atgaatgaggtgtccgtgatcaaagaaggttggctacacaagcgcggggagtatatcaaaacttggcggccaaggtacttccttctgaaatctgatggtagtttcattgggtacaaggagaggcccgaggcccccgatcagactctgcctccgctcaataacttctctgtcgccgaatgtcagctcatgaagaccgaacggcctcgcccgaatactttcgttatccgttgtctacaatggaccactgtgattgagcggacgttccatgtagactcacccgatgagcgcgaagagtggatgagagccatccaaatggtcgccaatagtctgaaacagcgagcacctggcgaagatcctatggactataagtgcggatccccctccgatagcagcaccactgaggaaatggaggttgccgtcagcaaagctagggcaaaggtcaccatgaatgatttcgattatctaaagctgcttggaaagggaacattcggtaaagtgatcttagtccgggagaaggcaacaggcagatattatgctatgaagatccttaggaaagaggtgattatcgccaaggatgaagttgcccacacagtgacagaaagtagggtactgcagaacactcgacatccgttcctcaccgccttgaagtacgctttccagactcatgaccggctttgctttgtgatggagtacgcgaacggaggcgaacttttcttccacctgtctcgcgagcgggtgttcactgaggagagagccaggttctacggagcggaaatcgttagcgcactggagtatttacacagcagggatgtggtttacagagatatcaaactggagaatcttatgttagataaagatggccatatcaagatcacggactttgggctctgcaaagaaggcatatctgatggcgccacaatgaaaactttctgtggtacgcctgaatatttagcgcccgaagtgctcgaggacaacgattacgggagagccgtggactggtggggcctcggcgtggtcatgtacgaaatgatgtgcggacgtctccccttctataaccaggatcacgagagactgtttgaacttatactaatggaagagattcgctttccgaggacactctccccagaggccaaatccctccttgctggactgctgaaaaaggaccccaaacaaaggttaggtggaggcccctcagacgcaaaagaggttatggagcacaggttcttcctgtcaattaattggcaggacgtggtccagaagaaactcttgccaccctttaaaccccaggtgaccagcgaggtggatacacgatacttcgacgacgagtttacggctcagagcatcacgattactcccccagacagatacgacagccttgggcttttagagctcgaccagaggacacacttccctcagttcagctacagtgcttctataagggagtag

SEQ ID NO: 319336 - DNA, 1317 bp, Artificial Sequence
  derived and/or modified sequence
atgaatgaggtgtctgtcatcaaggagggctggctgcacaagagaggagagtacatcaagacctggaggccccgctacttcctgctgaagagtgatggcagcttcatcggctacaaggagaggcctgaggccccagaccagaccctgccccccctgaacaacttctctgtggccgagtgccagctgatgaagacagagcggccccggcccaacacctttgtgatccgctgcctgcagtggaccaccgtcatcgagaggaccttccacgtggacagcccagatgagcgggaggagtggatgagggccatccagatggtggccaacagcctgaagcagagggcccctggagaggaccccatggactacaagtgtggcagccccagcgacagcagcaccacagaggagatggaggtggccgtgtccaaggcccgggccaaggtgaccatgaatgactttgactacctgaagctgctgggcaagggcaccttcggcaaggtgatcctggtgcgggagaaggccaccggccgctactatgccatgaagatcctgaggaaggaggtgatcatcgccaaggatgaggtggcccacacagtgacagagagccgggtgctgcagaacaccaggcaccccttcctgacagccctgaagtatgccttccagacccatgaccggctgtgctttgtgatggagtatgccaatggaggagagctgttcttccacctgagccgggagagggtcttcacagaggagcgggcccgcttctatggagctgagatcgtgtctgccctggagtacctgcacagcagagatgtggtgtacagagacatcaaggtgctggaggacaatgactatggccgggctgtggactggtggggcctgggcgtggtgatgtatgagatgatgtgtggccgcctgcccttctacaaccaggaccacgagcggctgtttgagctgatcctgatggaggagatccgcttccccaggaccctgagccctgaggccaagagcctgctggccggcctgctgaagaaggaccccaagcagaggctgggcggcggccccagtgatgccaaggaggtgatggagcaccgcttcttcctgagcatcaactggcaggatgtggtgcagaagaagctgctgccccccttcaagccccaggtgaccagcgaggtggacacccgctactttgatgatgagttcaccgcccagagcatcaccatcaccccaccagacagatatgacagcctgggcctgctggagctggaccagaggacccacttcccccagttctcctacagcgccagcatccgggagtag

SEQ ID NO: 319337 - DNA, 1446 bp, Artificial Sequence
  derived and/or modified sequence
atgaatgaggtgtctgtcatcaaggagggctggctgcacaagagaggagagtacatcaagacctggaggccccgctacttcctgctgaagagtgatggcagcttcatcggctacaaggagaggcctgaggccccagaccagaccctgccccccctgaacaacttctctgtggccgagtgccagctgatgaagacagagcggccccggcccaacacctttgtgatccgctgcctgcagtggaccaccgtcatcgagaggaccttccacgtggacagcccagatgagcgggaggagtggatgagggccatccagatggtggccaacagcctgaagcagagggcccctggagaggaccccatggactacaagtgtggcagccccagcgacagcagcaccacagaggagatggaggtggccgtgtccaaggcccgggccaaggtgaccatgaatgactttgactacctgaagctgctgggcaagggcaccttcggcaaggtgatcctggtgcgggagaaggccaccggccgctactatgccatgaagatcctgaggaaggaggtgatcatcgccaaggatgaggtggcccacacagtgacagagagccgggtgctgcagaacaccaggcaccccttcctgacagccctgaagtatgccttccagacccatgaccggctgtgctttgtgatggagtatgccaatggaggagagctgttcttccacctgagccgggagagggtcttcacagaggagcgggcccgcttctatggagctgagatcgtgtctgccctggagtacctgcacagcagagatgtggtgtacagagacatcaagctggagaacctgatgctggacaaggatggccacatcaagatcacagactttggcctgtgcaaggagggcatcagtgatggagccaccatgaagaccttctgtggcaccccagagtacctggcccctgaggtgctggaggacaatgactatggccgggctgtggactggtggggcctgggcgtggtgatgtatgagatgatgtgtggccgcctgcccttctacaaccaggaccacgagcggctgtttgagctgatcctgatggaggagatccgcttccccaggaccctgagccctgaggccaagagcctgctggccggcctgctgaagaaggaccccaagcagaggctgggcggcggccccagtgatgccaaggaggtgatggagcaccgcttcttcctgagcatcaactggcaggatgtggtgcagaagaagctgctgccccccttcaagccccaggtgaccagcgaggtggacacccgctactttgatgatgagttcaccgcccagagcatcaccatcaccccaccagacagatatgacagcctgggcctgctggagctggaccagaggacccacttcccccagttctcctacagcgccagcatccgggagtag

SEQ ID NO: 319338 - DNA, 1317 bp, Artificial Sequence
  derived and/or modified sequence
atgaacgaggtgagcgtgatcaaggagggctggctgcacaagcggggtgaatacatcaaaacctggcgtccgcgctattttctgcttaagtctgatggatcgttcatcgggtacaaagagcgtcctgaagcgccagaccaaactctccctccacttaataacttctcagtggccgagtgtcagcttatgaagaccgagcggccccgccccaatacttttgtaataagatgcctgcagtggaccactgttatcgagcgtacctttcacgtggactctccagacgagagggaagagtggatgagggcaatacagatggtggctaattccctcaagcagagggcaccaggcgaagacccaatggattataagtgtggttcccccagtgactcctcaaccacggaggaaatggaggtagccgtgtcaaaggcccgggccaaagtgaccatgaacgattttgactacctgaaattactcggcaaagggactttcgggaaggtgattcttgtgcgggagaaggccactggccgatattacgccatgaaaatcctgagaaaggaagtcattatcgctaaggatgaagtggcccataccgtaacggagtctcgtgtgttgcaaaacacaagacaccccttcctgaccgcactgaagtatgcttttcagacccacgaccgtctgtgcttcgttatggaatatgccaatggaggggagctgttcttccatctcagccgtgagagagtttttaccgaagagcgggctagattttacggtgcagagatcgtgtccgccctggagtatctccactctcgggatgtcgtgtaccgagatattaaggtattagaggacaacgattacggcagggccgtggactggtggggcctcggtgtggtaatgtatgaaatgatgtgcggacgcctacccttctacaatcaggaccacgagcggctgttcgaactgatcctcatggaggagatacgattccctcggactctatcacccgaggctaagtccttgttggccggcttactgaagaaggatcctaaacaaagattgggcggtggccctagcgatgcaaaagaagtcatggagcatcgcttctttctgtccatcaattggcaagatgtggtgcaaaagaagctgctacccccatttaagccacaggtgacaagtgaggtggacactagatacttcgatgacgaatttaccgctcaaagcatcaccattacaccccccgataggtacgacagcctggggctgctggaacttgaccaaagaacccactttcctcagttttcctacagcgctagcatcagggaatag

SEQ ID NO: 319339 - DNA, 1446 bp, Artificial Sequence
  derived and/or modified sequence
atgaacgaggtgagcgtgatcaaggagggctggctgcacaagcggggggaatacataaagacctggaggccccgctacttcctgctcaagagcgacggatctttcatcgggtataaggagagaccggaggcccctgaccagactttaccgcccttgaataatttcagcgtggccgagtgtcagctgatgaaaaccgaaaggcctagacccaacacatttgtgatccgctgcttgcagtggacaaccgtgatcgaaagaacttttcacgttgattcccctgacgagagagaggaatggatgcgagcgatacagatggtagccaattctctaaaacagcgggcacctggtgaagaccctatggactacaagtgtggaagcccgagtgattcttctacgaccgaggaaatggaggtcgccgtgagcaaggcccgggcaaaagtcaccatgaatgattttgactacctcaaactgttgggcaagggaaccttcggcaaagttattctggtcagggaaaaggccactgggaggtactacgcgatgaaaattctgcgaaaagaagtcatcatagccaaggacgaggtcgcacatacggtgaccgaatctcgggtccttcagaatacaaggcatcctttcctcactgccctcaagtatgcttttcagactcacgacaggttatgttttgttatggaatacgcaaatggcggagagctcttctttcatttgtctcgcgaacgggttttcactgaagaacgagcacggttctatggcgccgaaattgtatctgcattggagtacctccactcccgggacgtggtctaccgggacattaagctggagaacctgatgctagacaaggacggccacatcaagataactgacttcggattatgtaaagaaggtatttctgatggtgcaacaatgaagaccttttgcggaacacctgagtacctggctcccgaggtgctggaagataacgactacggcagagccgtggattggtggggattgggagtggtaatgtatgagatgatgtgcggaagactccccttttataatcaggaccatgagcggctgtttgagctgatcctcatggaagagattcgcttccccagaacgttatctcctgaggccaagtcactgctggccggactcctaaaaaaagacccgaagcaaaggctgggaggcggtccctctgacgcgaaggaggtgatggagcaccgcttttttttaagcatcaactggcaggatgtggttcagaagaagctgctgcctccatttaaaccacaggtgacttcagaggttgataccagatattttgatgatgaattcactgctcagagtatcactatcaccccacccgatcgctatgattcactaggcctcctggagctggatcagaggacacatttcccacagttttcctacagcgctagtatcagagaatag

SEQ ID NO: 319340 - DNA, 1446 bp, Artificial Sequence
  derived and/or modified sequence
atgaacgaggtgagcgtgatcaaggagggctggctgcacaagcggggcgaatacatcaaaacttggcgcccacggtatttccttctcaagtctgatgggtcgtttatcggatataaagagcgcccggaagcccctgatcaaactctgccgcccttaaataacttttcagtggcagagtgccagttaatgaaaacagagcggcctagacccaacacattcgttatcagatgtctgcagtggaccacggttatcgaacgcacattccacgtagactcccctgatgagcgcgaggagtggatgcgtgctattcaaatggttgctaactctctgaaacaaagagcccccggagaggaccctatggactataaatgcggaagtcccagtgactcgagtaccactgaggaaatggaagtcgctgtttcaaaagcacgggcaaaggtgacgatgaacgattttgactacctgaaactcctaggtaagggcactttcggaaaggtgattctcgtgcgagagaaggccactgggcgttattatgccatgaagatcttgcggaaggaggtcatcattgccaaggatgaggtggcgcatactgtcacagaaagtcgcgtcctgcaaaacaccagacacccttttttgaccgccctgaagtacgcttttcaaacacacgatcgactatgttttgtcatggagtacgccaacggcggggagctcttcttccacctcagccgcgaacgtgtatttaccgaggaacgcgctagattttatggagcagagatcgtctctgccctggagtacctccattcccgcgacgtagtctacagggacatcaaactggagaatctcatgctagacaaggatggtcacatcaagataacggactttggcctgtgtaaggagggcataagcgatggagccaccatgaaaactttttgcgggacccccgagtatcttgcccctgaggtattggaagacaatgactatggaagggctgtggattggtggggcttgggtgtcgttatgtacgagatgatgtgcggcaggttacccttctacaatcaagaccacgaacgactttttgagcttatcttaatggaggagattcgatttccacgaacactgtcccctgaggcaaaatctctgctggcgggactgctaaagaaagaccccaagcagcgcctgggcggtggaccttccgacgcgaaagaagtcatggaacatcggttcttcttgtctatcaattggcaggatgtggtccagaaaaagttgctcccccctttcaagccccaggtgacctctgaagtagatacacgctatttcgacgacgagttcacagcccagtcaattaccatcacgcctcccgatcgctatgacagtctggggctgctcgaactggatcagagaacacacttcccccaattcagttatagtgcttcaatacgagaatag

SEQ ID NO: 319341 - DNA, 1317 bp, Artificial Sequence
  derived and/or modified sequence
atgaacgaggtatcagttattaaagaaggctggttgcataaacgcggagaatatataaagacctggaggcctaggtacttcctattgaagtcagatggcagctttatcggttacaaagagcggcctgaggccccagaccaaaccctgccccctctcaacaacttttcagtggctgagtgccagctcatgaaaactgagcgacccagacctaatacattcgtgattcggtgcctgcaatggactacagtgatcgaacgcacttttcacgtggactcccctgacgagcgggaggaatggatgcgggcaatccagatggtcgctaactctctaaaacagagggcccctggagaggaccccatggattacaagtgcggcagtccttctgactccagcactactgaagaaatggaggttgcagtttccaaagcccgtgctaaggtgactatgaatgatttcgattatctgaaattgctcggcaaaggcacgttcggcaaggtaatcctcgtgcgcgagaaggccaccggacgctactatgcgatgaagattctgagaaaagaggtcattattgcgaaggatgaggtggcccacaccgtcaccgagtctagagtcctgcagaacacgcgacaccccttcctcacggcactgaagtatgccttccaaacacacgacagattatgtttcgttatggaatacgctaatggtggggagctcttttttcatcttagtagagagcgcgtgttcacagaggaaagagcgaggttttacggggctgaaatagtgagtgctttagagtatttacactcgagggatgtggtctacagggatataaaggttctagaagataatgactacggcagggccgttgactggtggggcttgggagtcgtgatgtacgagatgatgtgcggacggctacctttctataaccaagaccatgagcgcctgttcgagcttatcctgatggaagagatacgttttcctcgcacgctatcccctgaggctaaaagtctgctcgcaggactcctgaagaaggatcccaaacagcggctgggaggagggccatccgacgcgaaggaggtaatggagcacagattttttttgagcataaactggcaggatgtggtccaaaagaaactgctgccacctttcaagccgcaagttacatcagaggtggatactagatacttcgacgacgaattcactgcgcagagcattaccatcactccccctgatcgctatgactcactgggtttgctggaattagatcagaggacacatttcccccaattctcgtattccgcaagcatccgcgaatag

SEQ ID NO: 319342 - DNA, 1446 bp, Artificial Sequence
  derived and/or modified sequence
atgaacgaggtttccgtgatcaaagagggatggttgcataagaggggggagtacattaagacctggagacctcggtactttctcctgaagtccgacgggtcttttattggatacaaggaaaggccagaagctccagatcagactctacctccgctgaataacttttccgttgctgagtgtcaactgatgaagacagaacgtcccaggccaaacacctttgtaattcgatgcctccaatggaccactgtcatcgagcgcaccttccacgttgatagtcccgatgagcgggaggagtggatgcgggcaatccaaatggtggctaactccttgaaacagagagccccaggcgaggacccaatggactacaagtgtggtagcccttccgacagcagcactacggaggagatggaagtggctgtttccaaggcccgagcaaaagttacaatgaacgatttcgactatctgaaacttctgggaaagggcaccttcggcaaagtgatcttagttcgcgaaaaagctacggggaggtattacgctatgaaaatattgcgaaaggaagtcatcattgcaaaagatgaggtggcacataccgtgacagagtcgagggtgctgcagaataccagacacccatttctgaccgcattgaaatatgcctttcagacccacgatcgcttgtgctttgtgatggaatatgccaatggaggcgagttgttttttcatttgtctcgtgagcgggtttttaccgaagaacgcgctaggttctacggtgctgagatcgtctcagctcttgaatatcttcattccagagacgtcgtttacagggatatcaagctggaaaacttgatgctcgacaaggacggtcatatcaagatcactgactttgggttgtgcaaggaagggatcagtgacggcgctactatgaagacattttgtggaactcccgagtacctggctcctgaagttcttgaagataatgactatggcagagcagtggattggtggggccttggcgttgttatgtacgagatgatgtgcggcagactgcccttttataatcaggaccacgagagactttttgaactgattctcatggaggagatcagatttccacgaacactcagtccagaagccaagtccctgttagctggcctgctgaagaaagaccccaagcagcgtttgggcggagggccaagcgacgcgaaagaagtgatggagcaccgcttcttcttgtcaattaattggcaggacgtggttcagaaaaagttgctaccaccatttaaaccacaggtgacatctgaagtggacaccagatattttgatgatgagtttaccgctcaatcaatcaccatcactccccctgatagatatgattccctggggctgctggagctggatcagagaacccactttccccagttttcatattccgcttctatccgggagtag

SEQ ID NO: 319343 - DNA, 1446 bp, Artificial Sequence
  derived and/or modified sequence
atgaatgaagtgtcagttatcaaagaaggctggctgcacaagcgaggcgagtatatcaagacgtggagaccacgctatttcctgctcaagtccgatggctcattcattgggtataaagagcggccagaggcccctgatcagacactgccacccctgaacaacttcagcgtcgctgagtgtcagctcatgaaaactgagaggcccaggcctaacacgtttgtgatcaggtgcctccaatggaccaccgtcattgaaaggacctttcatgtggatagtccagacgaacgagaagagtggatgcgcgctatacagatggtggctaactccctgaaacagcgtgcgccaggtgaagaccccatggattataagtgcggtagtccatcagatagctcgacaactgaggagatggaggtggcagtgtccaaggcaagagcgaaggtaacaatgaacgacttcgattaccttaagttgttgggaaagggtacgtttggtaaggtgattctggtgcgggaaaaggcaactgggagatactacgcaatgaagattcttcgtaaagaggtgatcatagccaaagacgaggttgcccatactgtcacagagtctagggtgctccagaatacccggcatcccttcctcactgcactcaagtatgcctttcagacgcatgacaggctgtgttttgtgatggagtacgctaacggaggagagctcttctttcacctgtctcgagagcgagtttttaccgaggaaagggccagattttacggtgcagagatcgtctctgcgttggaatacctgcactcccgggatgttgtctatcgcgatatcaagttggagaatttgatgttagataaagatggacatatcaaaattacagatttcgggctttgcaaggaagggatctccgacggtgctaccatgaagacattttgtggcaccccggaatacctcgcccctgaggtccttgaggataatgactatggaagggccgtcgactggtggggccttggtgtcgtcatgtacgagatgatgtgcggaagactacctttctacaaccaggatcacgaaaggctgttcgagctcattctgatggaagaaatccgctttccacggacgctcagccccgaagcaaagagtttgctggcaggactcctgaaaaaagatccaaaacagaggctggggggagggccatcagatgctaaggaggtgatggaacataggttctttctctcgattaattggcaggatgttgtgcagaaaaagctactgccccctttcaagccacaggtgacgtcagaagttgacaccaggtattttgatgacgagttcacggcccaatccattaccattacacctccagacaggtacgatagtctgggtttactggaactcgatcagaggacgcactttccccagttttcctattctgcctccatccgagagtag

SEQ ID NO: 319344 - DNA, 1393 bp, Artificial Sequence
  derived and/or modified sequence
ccctgagctgtcccgagctaggtgacagcgtaccacgctgccaccatgaatgaggtgtctgtcatcaaagaaggctggctccacaagcgtggtgaatacatcaagacctggaggccacggtacttcctgctgaagagcgacggctccttcattgggtacaaggagaggcccgaggcccctgatcagactctaccccccttaaacaacttctccgtagcagaatgccagctgatgaagaccgagaggccgcgacccaacacctttgtcatacgctgcctgcagtggaccacagtcatcgagaggaccttccacgtggattctccagacgagagggaggagtggatgcgggccatccagatggtcgccaacagcctcaagcagcgggccccaggcgaggaccccatggactacaagtgtggctcccccagtgactcctccacgactgaggagatggaagtggcggtcagcaaggcacgggctaaagtgaccatgaatgacttcgactatctcaaactccttggcaagggaacctttggcaaagtcatcctggtgcgggagaaggccactggccgctactacgccatgaagatcctgcggaaggaagtcatcattgccaaggatgaagtcgctcacacagtcaccgagagccgggtcctccagaacaccaggcacccgttcctcactgcgctgaagtatgccttccagacccacgaccgcctgtgctttgtgatggagtatgccaacgggggtgagctgttcttccacctgtcccgggagcgtgtcttcacagaggagcgggcccggttttatggtgcagagattgtctcggctcttgagtacttgcactcgcgggacgtggtataccgcgacatcaaggtgctggaggacaatgactatggccgggccgtggactggtgggggctgggtgtggtcatgtacgagatgatgtgcggccgcctgcccttctacaaccaggaccacgagcgcctcttcgagctcatcctcatggaagagatccgcttcccgcgcacgctcagccccgaggccaagtccctgcttgctgggctgcttaagaaggaccccaagcagaggcttggtggggggcccagcgatgccaaggaggtcatggagcacaggttcttcctcagcatcaactggcaggacgtggtccagaagaagctcctgccacccttcaaacctcaggtcacgtccgaggtcgacacaaggtacttcgatgatgaatttaccgcccagtccatcacaatcacaccccctgaccgctatgacagcctgggcttactggagctggaccagcggacccacttcccccagttctcctactcggccagcatccgcgagtgagcagtctgcccacgcagaggacgcacgctcg

SEQ ID NO: 319345 - DNA, 5300 bp, Artificial Sequence
  derived and/or modified sequence
tgggagggggcggtaagcgggggctggggggagggggcggggggggccgcgccgtgctagccgttgggcctgcctcggaggaggcgtcgccgccgccgctgccgctgccggcgccgttgccgctgccgggaaacacaaggaaagggaaccagcgcagcgtggcgatgggcgggggtagagccccgccggagaggctgggcggctgccggtgacagactgtgccctgtccacggtgcctcctgcatgtcctgctgccctgagctgtcccgagctaggtgacagcgtaccacgctgccaccatgaatgaggtgtctgtcatcaaagaaggctggctccacaagcgtggtgaatacatcaagacctggaggccacggtacttcctgctgaagagcgacggctccttcattgggtacaaggagaggcccgaggcccctgatcagactctaccccccttaaacaacttctccgtagcagaatgccagctgatgaagaccgagaggccgcgacccaacacctttgtcatacgctgcctgcagtggaccacagtcatcgagaggaccttccacgtggattctccagacgagagggaggagtggatgcgggccatccagatggtcgccaacagcctcaagcagcgggccccaggcgaggaccccatggactacaagtgtggctcccccagtgactcctccacgactgaggagatggaagtggcggtcagcaaggcacgggctaaagtgaccatgaatgacttcgactatctcaaactccttggcaagggaacctttggcaaagtcatcctggtgcgggagaaggccactggccgctactacgccatgaagatcctgcggaaggaagtcatcattgccaaggatgaagtcgctcacacagtcaccgagagccgggtcctccagaacaccaggcacccgttcctcactgcgctgaagtatgccttccagacccacgaccgcctgtgctttgtgatggagtatgccaacgggggtgagctgttcttccacctgtcccgggagcgtgtcttcacagaggagcgggcccggttttatggtgcagagattgtctcggctcttgagtacttgcactcgcgggacgtggtataccgcgacatcaagctggaaaacctcatgctggacaaagatggccacatcaagatcactgactttggcctctgcaaagagggcatcagtgacggggccaccatgaaaaccttctgtgggaccccggagtacctggcgcctgaggtgctggaggacaatgactatggccgggccgtggactggtgggggctgggtgtggtcatgtacgagatgatgtgcggccgcctgcccttctacaaccaggaccacgagcgcctcttcgagctcatcctcatggaagagatccgcttcccgcgcacgctcagccccgaggccaagtccctgcttgctgggctgcttaagaaggaccccaagcagaggcttggtggggggcccagcgatgccaaggaggtcatggagcacaggttcttcctcagcatcaactggcaggacgtggtccagaagaagctcctgccacccttcaaacctcaggtcacgtccgaggtcgacacaaggtacttcgatgatgaatttaccgcccagtccatcacaatcacaccccctgaccgctatgacagcctgggcttactggagctggaccagcggacccacttcccccagttctcctactcggccagcatccgcgagtgagcagtctgcccacgcagaggacgcacgctcgctgccatcaccgctgggtggttttttccccctaactttttacttagcctttttggtttgtgtccccacccccacctcctcaccccctttccagttcttcttcaggcccctcccagacgcaccccagcggcccctgcagcccctgcctccagcctccagcctcacctttgtgcccagactcgcatttggaagactccacctcccgcccaggcctgggctgttgggcggttggagattcaggttttaatccacacaagccccagtgaggggtgaagcatggcgcctggggcctgcctgagtttctggcctgggtgtcgtgctggtgtctgcctccgcgctgctgcatctggacgaaggctgccttctggtgggacgcgacacccggcagacagtggtgctgccttccaggccccgtggcctaggctcggagtggccaggcacggggcggtccaatcccccacccgctgtccccctatgggggcagaaaagcaataatgtccaggggcaggcaggggcccttgggagctgcagggctgggggttagggctgctccctggtgaatggagtcagatcctaggatctgtaccatggggaaccaggagtggccgggctgggtgccgcctcctggtccggcctcctccccaccaaactgtcctcaccctatggatgaggcaggaggaacatttggggccaaacctgcctgcctcccagccccgtgccttactagggcttccttccagctggccttacctcccgctggaccctgggcctggcctggccccactgggggctatgggctgggctcaccctctcctctgcgggggtggagggccaccagccttggctgttacaatcttacaccggacagtattgggccccatggacttggtcagggaggggtgggggtgggcatctctggtacctattggggtggggggcctctgaaaagggaggctcctaggcccccctcacccctccctctccccagggccccacgttctgcagccttaaggttgaacatgagtgcacgtccatgtcagtgctgtgggactcctgtgcgtgcctcggactgcgtgtgtcggcgggacgcaggcacacgtgggtgtgtgtgcatgtgtgtttgtgtgagggcagcgtgtcctccagtgtgcatggtgtgtgggcttgggccccatccctggcccgagcatttcatcctgtgggggaggggtgctgacctagtgggaggagccccactgtgatccatgagctgccctgcccacgcctcccctccctgtagcaacacctctgggtgtttggagtttagcttttgtgggtttgctctccctatcccatctcctgtactacacagttcatggcagggtggggaggggtggggttggttcgggtgggtgagggtctttttcctctgtgtgcgatgttgttatctgacagttctccgtccctactggcctttctcctcgtcttcatatttgtacggtacaagcaataaagacactcatttcagaccagggcccagcctgcactcacgccagcccaaccactctgggctttgccttggtgatggagtcagacccctgggccccagctcctcctgtactagccgttcccttcagcaaggagggcactgagctcagggtgagggcagctggggtgtgtgcaggagctcaggctggagagggtgggtggagctggtgctgtggggctgaggggtatgggaaggctccccgcatgtgggggtggggtggacagagaccactccaggccctcagtgctgcttaggctaagagaggtggggtggagggacagggctggaagatctgggtagcccagaatgaggagggtgcctgtgctgtcactgaatgagagggagtggttcattccacccggctgccgagcctcagaggggggcattcctatcctgccccacctccctgtttatgctgccacctggaagccttgaggcccccaaattccagtacagacccagtggtgtgttcatggtggcgtggttgctgtcacctgggagctcctgagcgtttggttagaaccctgttcagcttggggtcagccctcccctagtcactgccctttagcctggatgtgtctgggcccctgcacttcccgtgcttgagtcacgtggctgcatggccgggcgctggccggatggaacacctcccccagcaagggaccagggaccagagccctggcctgccctgctgagccctgctgtgcagagggcctggcacagatgaatttgagattttgccgcaaggtgttagcacttcacacccattgagtctttgagattttaagtgaatgtaagcagaaaaagtcagatccaatttacagaaatcagagttagctacagctaggactcgtttggttggggttttttagtttgtctttctaaagtcatgtggaccttaatttaattacaaaagtctaccctggtggtcataaaataggcaggcctatgaagaaaggccttttactcttccatctcatcccagccccgagttgacccacgttgctgctcctcacaccatggtgatgcaggtctcgtagtgtgggcacaggcctggctacctcatctttttagtgcctctctcctcttccacaggatggggtcccacagctgcagcagctggccccgtagttgagcatgtgtggttatcctgtagagcttttcccaagaagggtgtttgaacttagagtcttaataaaatcttaccaaataaattttgagtagaataatcgtcttttgcaatgtacattttaaaaatttcacacattcttttttgtatataaagaacagtgactgggcacagtggctcatgcctgtaatcccagcaatttgggaggccgaggcgggcgggtctcttgaggccaggggttcgagaccagcctgggcatcatagggagaccttcatctctacaaaaaatacaaaaattagctgggcatggtggtgcatgcctgcaatcccagctaacttggaaggctgaggtgaggtgggaagatcacttgagcccaggagtttgaggctgcagtgagctatgattgcggcactgcactgcagcctgggacaatgagactgtgtctctaaaaataaaaaaaaaaaaaacatgatacatgctattaaaaaagacagcaaagcaggagtataagaaaggaaattcacccgaggtcgcagggccttgagtactcattttggtgctgattacctctctgcaaatggacacggcatcataaattggtagtttcctgctctttttgtgtaatcttttccagttaatgtgaagcctctgggggctgccctcgtgcactgatggttgtgtggagtcgggggcggcagtgcgattcccttttagctgctgcatggggggaactcaggctttccagctgcttcctggggttccatggggtagacccctcaaccgcttcagctgccccgttaacaggaattgacttggtttcgtttggtgctaccagcagtcctgtaataaactagctatccatctgta

SEQ ID NO: 319346 - DNA, 1497 bp, Artificial Sequence
  derived and/or modified sequence
atgaatgaggtgtctgtcatcaaagaaggctggctccacaagcgtggtgaatacatcaagacctggaggccacggtacttcctgctgaagagcgacggctccttcattgggtacaaggagaggcccgaggcccctgatcagactctaccccccttaaacaacttctccgtagcagaatgccagctgatgaagaccgagaggccgcgacccaacacctttgtcatacgctgcctgcagtggaccacagtcatcgagaggaccttccacgtggattctccagacgagagggaggagtggatgcgggccatccagatggtcgccaacagcctcaagcagcgggccccaggcgaggaccccatggactacaagtgtggctcccccagtgactcctccacgactgaggagatggaagtggcggtcagcaaggcacgggctaaagtgaccatgaatgacttcgactatctcaaactccttggcaagggaacctttggcaaagtcatcctggtgcgggagaaggccactggccgctactacgccatgaagatcctgcggaaggaagtcatcattgccaaggatgaagtcgctcacacagtcaccgagagccgggtcctccagaacaccaggcacccgttcctcactgcgctgaagtatgccttccagacccacgaccgcctgtgctttgtgatggagtatgccaacgggggtgagctgttcttccacctgtcccgggagcgtgtcttcacagaggagcgggcccggttttatggtgcagagattgtctcggctcttgagtacttgcactcgcgggacgtggtataccgcgacatcaagctggaaaacctcatgctggacaaagatggccacatcaagatcactgactttggcctctgcaaagagggcatcagtgacggggccaccatgaaaaccttctgtgggaccccggagtacctggcgcctgaggtgctggaggacaatgactatggccgggccgtggactggtgggggctgggtgtggtcatgtacgagatgatgtgcggccgcctgcccttctacaaccaggaccacgagcgcctcttcgagctcatcctcatggaagagatccgcttcccgcgcacgctcagccccgaggccaagtccctgcttgctgggctgcttaagaaggaccccaagcagaggcttggtggggggcccagcgatgccaaggaggtcatggagcacaggttcttcctcagcatcaactggcaggacgtggtccagaagaagctcctgccacccttcaaacctcaggtcacgtccgaggtcgacacaaggtacttcgatgatgaatttaccgcccagtccatcacaatcacaccccctgaccgctatgacagcctgggcttactggagctggaccagcggacccacttcccccagttctcctactcggccagcatccgcgagtgagcagtctgcccacgcagaggacgcacgctcgctgccatcaccgctgggtgg

SEQ ID NO: 319347 - protein, 133 aa, Artificial Sequence
  derived and/or modified sequence
MNEVSVIKEGWLHKRGEYIKTWRPRYFLLKSDGSFIGYKERPEAPDQTLPPLNNFSVAECQLMKTERPRPNTFVIRCLQWTTVIERTFHVDSPDEREEWMRAIQMVANSLKQRAPGEDPMDYKCGSPSDSSTT

SEQ ID NO: 319348 - DNA, 444 bp, Artificial Sequence
  derived and/or modified sequence
atgagatgcctgagcagcaagaaggccggcagcaccagcgtggtgaagtacatcaagacctggagacccagatacttcctgctgaagagcgacggcagcttcatcggctacaaggagagacccgaggcccccgaccagaccctgccccccctgaacaacttcagcgtggccgagtgccagctgatgaagaccgagagacccagacccaacaccttcgtgatcagatgcctgcagtggaccaccgtgatcgagagaaccttccacgtggacagccccgacgagagagaggagtggatgagagccatccagatggtggccaacagcctgcagccccacctgtgcgcccagaccagaatctggaagacccccccccccgcccaggcctgggccgtgggcagactggagatccaggtgctgatccacaccagccccagcgagggctag

SEQ ID NO: 319349 - DNA, 402 bp, Artificial Sequence
  derived and/or modified sequence
atgaacgaggtgagcgtgatcaaggagggctggctgcacaagagaggcgagtacatcaagacctggagacccagatacttcctgctgaagagcgacggcagcttcatcggctacaaggagagacccgaggcccccgaccagaccctgccccccctgaacaacttcagcgtggccgagtgccagctgatgaagaccgagagacccagacccaacaccttcgtgatcagatgcctgcagtggaccaccgtgatcgagagaaccttccacgtggacagccccgacgagagagaggagtggatgagagccatccagatggtggccaacagcctgaagcagagagcccccggcgaggaccccatggactacaagtgcggcagccccagcgacagcagcaccacctag

SEQ ID NO: 319350 - DNA, 291 bp, Artificial Sequence
  derived and/or modified sequence
atgaacgaggtgagcgtgatcaaggagggctggctgcacaagagaggcgagtacatcaagacctggagacccagatacttcctgctgaagagcgacggcagcttcatcggctacaaggagagacccgaggcccccgaccagaccctgccccccctgaacaacttcagcgtggccgagtgccagctgatgaagaccgagagacccagacccaacaccttcgtgatcagatgcctgcagtggaccaccgtgatcgagagaaccttccacgtggacagccccgacgagagatag

SEQ ID NO: 319351 - DNA, 360 bp, Artificial Sequence
  derived and/or modified sequence
atgaacgaggtgagcgtgatcaaggagggctggctgcacaagagaggcgagtacatcaagacctggagacccagatacttcctgctgaagagcgacggcagcttcatcggctacaaggagagacccgaggcccccgaccagaccctgccccccctgaacaacttcagcgtggccgagtgccagctgatgaagaccgagagacccagacccaacaccttcgtgatcagatgcctgcagtggaccaccgtgatcgagagaaccttccacgtggacagccccgacgagagagaggagtggatgagagccatccagatggtggccaacagcctgaagcagagagcccccggcgaggacccctag

SEQ ID NO: 319352 - DNA, 204 bp, Artificial Sequence
  derived and/or modified sequence
atgaacgaggtgagcgtgatcaaggagggctggctgcacaagagaggcgagtacatcaagacctggagacccagatacttcctgctgaagagcgacggcagcttcatcggctacaaggagagacccgaggcccccgaccagaccctgccccccctgaacaacttcagcgtggccgagtgccagctgatgaagaccgagagatag

SEQ ID NO: 319353 - DNA, 144 bp, Artificial Sequence
  derived and/or modified sequence
atgaacgaggtgagcgtgatcaaggagggctggctgcacaagagaggcgagtacatcaagacctggagacccagatacttcctgctgaagagcgacggcagcttcatcggctacaaggagagacccgaggcccccgaccagtag

SEQ ID NO: 319354 - DNA, 405 bp, Artificial Sequence
  derived and/or modified sequence
atgaacgaggtgagcgtgatcaaggagggctggctgcacaagagaggcgagtacatcaagacctggagacccagatacttcctgctgaagagcgacggcagcttcatcggctacaaggagagacccgaggcccccgaccagaccctgccccccctgaacaacttcagcgtggccgagtgccagctgatgaagaccgagagacccagacccaacaccttcgtgatcagatgcctgcagtggaccaccgtgatcgagagaaccttccacgtggacagccccgacgagagagaggagtggatgagagccatccagatggtggccaacagcctgaagcagagagcccccggcgaggaccccatggactacaagtgcggcagccccagcgacagcagcaccaccgagtag

SEQ ID NO: 319355 - DNA, 324 bp, Artificial Sequence
  derived and/or modified sequence
atgaacgaggtgagcgtgatcaaggagggctggctgcacaagagaggcgagtacatcaagacctggagacccagatacttcctgctgaagagcgacggcagcttcatcggctacaaggagagacccgaggcccccgaccagaccctgccccccctgaacaacttcagcgtggccgagtgccagctgatgaagaccgagagacccagacccaacaccttcgtgatcagatgcctgcagtggaccaccgtgatcgagagaaccttccacgtggacagccccgacgagagagaggagtggatgagagccatccagatggtggcctag

SEQ ID NO: 319356 - DNA, 867 bp, Artificial Sequence
  derived and/or modified sequence
atgaacgaggtgagcgtgatcaaggagggctggctgcacaagagaggcgagtacatcaagacctggagacccagatacttcctgctgaagagcgacggcagcttcatcggctacaaggagagacccgaggcccccgaccagaccctgccccccctgaacaacttcagcgtggccgagtgccagctgatgaagaccgagagacccagacccaacaccttcgtgatcagatgcctgcagtggaccaccgtgatcgagagaaccttccacgtggacagccccgacgagagagaggagtggatgagagccatccagatggtggccaacagcctgaagcagagagcccccggcgaggaccccatggactacaagtgcggcagccccagcgacagcagcaccaccgaggagatggaggtggccgtgagcaaggccagagccaaggtgaccatgaacgacttcgactacctgaagctgctgggcaagggcaccttcggcaaggtgatcctggtgagagagaaggccaccggcagatactacgccatgaagatcctgagaaaggaggtgatcatcgccaaggacgaggtggcccacaccgtgaccgagagcagagtgctgcagaacaccagacaccccttcctgaccgtgagctgcccccccctgcccagacagtgcgaggccagcctgtggaccgagctgagagagagagccctgatcttctggtacaaggcccagagctggggcagacccggcggccagggcaaggtgctgctgagacccgccaagagcagcgagcccagacacgtggtgggcgtgagcagactgggcgagtgggagggcgacagcttcttcatcgacggcggcttcatgtag

SEQ ID NO: 319357 - DNA, 444 bp, Artificial Sequence
  derived and/or modified sequence
atgcgctgtctgtcatccaagaaagctggttcaaccagcgtggtgaaatatatcaaaacctggagaccacggtacttccttcttaaaagtgatgggtccttcattggttacaaagagcgacccgaagcacctgaccagacacttcccccactaaacaactttagtgtggcagagtgccagctgatgaagacggaacgaccacgaccaaacactttcgttataaggtgcctgcaatggacgactgtgatcgaacgcacctttcatgtggattccccagatgaaagggaagagtggatgcgcgctattcagatggttgcaaactcactccagccacatctgtgcgctcaaacacggatctggaaaaccccccctccagcccaggcctgggcagtaggcaggctggagatccaagtcctaatccacacatctccttctgagggatag

SEQ ID NO: 319358 - DNA, 402 bp, Artificial Sequence
  derived and/or modified sequence
atgaatgaggtttctgtgatcaaagaggggtggctccacaaacgcggggaatatattaagacctggcgaccgcgttactttttgttaaaaagtgacgggtcttttatcggctataaggagagacccgaggcacctgatcagacccttccgccgctgaataacttttctgttgcagaatgccagttaatgaagactgagcggccccgaccgaatactttcgtaatccgatgcctgcagtggactacagtcatcgagcgaacctttcatgtggatagcccagacgagcgcgaggagtggatgcgcgctatccaaatggtggctaactcactgaagcagagggctcctggggaggatcctatggactataaatgcggaagtccgtcagacagcagcacgacctag

SEQ ID NO: 319359 - DNA, 402 bp, Artificial Sequence
  derived and/or modified sequence
atgaatgaggtctccgtcataaaggagggctggctgcacaaacggggggaatacataaagacctggagaccccgctattttttgctgaaaagtgacggctcatttatcggctataaggaacgcccagaggctccggaccagacattgccccccctgaacaacttcagcgttgcagaatgccagctcatgaaaacagaaaggcccaggcccaacacttttgtgattcggtgtcttcagtggacgactgtgatcgagcgcacattccacgtcgatagtccagatgagagggaggagtggatgagagcaatccagatggttgcgaatagcctaaagcaaagagctcctggtgaggatccgatggattacaaatgtggctcccccagcgattcttctaccacctag

SEQ ID NO: 319360 - DNA, 291 bp, Artificial Sequence
  derived and/or modified sequence
atgaatgaggtgtcagtgattaaggaagggtggctgcacaaaaggggggaatatatcaagacctggagaccaagatattttctcctgaagtcggatggctcgttcataggctacaaagaacgtccagaagccccggaccagaccctcccacccctcaacaattttagcgtggccgagtgtcagcttatgaagacagagaggcccaggcccaacacattcgtgattagatgcctgcaatggacaacagtgattgaaaggaccttccatgtagacagccccgacgaaagatag

SEQ ID NO: 319361 - DNA, 360 bp, Artificial Sequence
  derived and/or modified sequence
atgaatgaggtgagcgtgatcaaagagggctggctgcacaaacggggtgaatacataaagacttggagaccgcggtatttcctgttaaagtccgacggcagctttataggttacaaggaaaggcccgaggcaccagatcagacactgcctccacttaacaacttttcagtggcagagtgtcaactgatgaaaacagagcggccccgacctaataccttcgtcatcaggtgcctccagtggactaccgtgatagagcgcacgttccacgttgatagtccagacgagcgggaggagtggatgcgcgccatccagatggtggcaaactcattgaagcagagggcccctggcgaagacccgtag

SEQ ID NO: 319362 - DNA, 204 bp, Artificial Sequence
  derived and/or modified sequence
atgaacgaggtatctgtcatcaaggaaggctggctgcataaacgaggggagtatatcaagacgtggcgcccaaggtatttcctgctgaagagtgatgggagtttcatcggatacaaggaaagacctgaagctcccgatcagacgctcccaccattgaacaactttagtgtagccgaatgccagttaatgaagaccgagcgctag

SEQ ID NO: 319363 - DNA, 144 bp, Artificial Sequence
  derived and/or modified sequence
atgaatgaggtatctgtcattaaagaagggtggctccacaaaagaggggagtatattaagacctggcgtcctagatattttctcctcaaatcagatggctcatttataggatacaaggaaagacctgaagcacccgaccagtag

SEQ ID NO: 319364 - DNA, 405 bp, Artificial Sequence
  derived and/or modified sequence
atgaacgaggtctctgtgattaaagaaggatggctccataagagaggcgagtacattaaaacttggagacccaggtacttcctcctgaaaagcgacggcagtttcattggatacaaggagagacctgaagccccagatcaaacactgccaccgctcaataacttcagtgtcgctgaatgccagctgatgaagacagaaagaccaagacctaacacctttgtcattaggtgcctccaatggaccaccgtgatcgaacgcacatttcacgtggactcgcccgatgagcgcgaggaatggatgcgagctatccaaatggttgccaactcactcaagcagagggcacctggagaggaccccatggactacaaatgcgggtcgccatctgacagttccactactgaatag

SEQ ID NO: 319365 - DNA, 324 bp, Artificial Sequence
  derived and/or modified sequence
atgaatgaggtgtccgtaatcaaggagggctggctgcacaaaaggggagagtacataaagacatggaggcccagatatttcctgctcaagagcgacggctcctttataggatataaagaacggcccgaggcccctgaccagactctcccaccattgaacaacttctccgtggcggagtgccagctcatgaagaccgagaggccaagacccaacacatttgtgattcgttgcttacagtggacaacagtcatcgagcgcacattccacgtagattccccagacgagagagaggagtggatgagggcaatccaaatggttgcttag

SEQ ID NO: 319366 - DNA, 867 bp, Artificial Sequence
  derived and/or modified sequence
atgaacgaagtaagtgtcatcaaggaaggctggctgcacaagagaggtgaatacatcaagacctggagacctcggtactttctgttgaaaagtgatggcagtttcataggttacaaggaacggcccgaagctccagatcagactctaccacctctgaataacttcagcgtagctgagtgccaactcatgaaaaccgaacgccctcgcccaaacacgtttgtgatacggtgcctgcagtggaccaccgtgatcgagagaaccttccatgtggattctccggacgaacgcgaggaatggatgagagcaattcagatggtcgccaacagtcttaaacaaagggcacccggggaagaccctatggattataagtgcggaagtccttcagacagctccaccacagaagagatggaagttgcagtctcaaaggctcgcgccaaggttacgatgaacgatttcgactatctcaaattactgggtaaaggcacatttggtaaagtaatcctggttagagagaaagccaccggccggtactatgccatgaagatactgcgcaaggaagtcattatcgcgaaagacgaggttgcccacactgtcacggagtcccgggtacttcaaaacacacgtcatcccttcctcacggtaagttgtccccccctaccccgccaatgcgaagcttccctgtggaccgaactgcgggagcgggctctcatcttctggtataaagcccagtcgtggggccgccccggcgggcagggcaaggtactccttagaccggctaaaagtagcgaaccacgccacgtggtaggggtgtcccgactgggggagtgggaaggagattcattcttcatcgacggagggtttatgtag

SEQ ID NO: 319367 - DNA, 444 bp, Artificial Sequence
  derived and/or modified sequence
atgcgctgcctgagcagcaagaaggccggcagcacctctgtggtgaagtacatcaagacctggaggccccgctacttcctgctgaagagtgatggcagcttcatcggctacaaggagaggcctgaggccccagaccagaccctgccccccctgaacaacttctctgtggccgagtgccagctgatgaagacagagcggccccggcccaacaccttcgtcatccgctgcctgcagtggaccaccgtgattgaaagaaccttccacgtggacagcccagatgagcgggaggagtggatgagggccatccagatggtggccaacagcctgcagccccacctgtgtgcccagacccgcatctggaagaccccacctccagcccaggcctgggccgtgggccgcctggagatccaggtgctgatccacaccagccccagcgagggctag

SEQ ID NO: 319368 - DNA, 402 bp, Artificial Sequence
  derived and/or modified sequence
atgaatgaggtgtctgtcatcaaggagggctggctgcacaagagaggagagtacatcaagacctggaggccccgctacttcctgctgaagagtgatggcagcttcatcggctacaaggagaggcctgaggccccagaccagaccctgccccccctgaacaacttctctgtggccgagtgccagctgatgaagacagagcggccccggcccaacacctttgtgatccgctgcctgcagtggaccaccgtcatcgagaggaccttccacgtggacagcccagatgagcgggaggagtggatgagggccatccagatggtggccaacagcctgaagcagagggcccctggagaggaccccatggactacaagtgtggcagccccagcgacagcagcaccacctag

SEQ ID NO: 319369 - DNA, 291 bp, Artificial Sequence
  derived and/or modified sequence
atgaatgaggtgtctgtcatcaaggagggctggctgcacaagagaggagagtacatcaagacctggaggccccgctacttcctgctgaagagtgatggcagcttcatcggctacaaggagaggcctgaggccccagaccagaccctgccccccctgaacaacttctctgtggccgagtgccagctgatgaagacagagcggccccggcccaacacctttgtgatccgctgcctgcagtggaccaccgtcatcgagaggaccttccacgtggacagcccagatgagaggtag

SEQ ID NO: 319370 - DNA, 360 bp, Artificial Sequence
  derived and/or modified sequence
atgaatgaggtgtctgtcatcaaggagggctggctgcacaagagaggagagtacatcaagacctggaggccccgctacttcctgctgaagagtgatggcagcttcatcggctacaaggagaggcctgaggccccagaccagaccctgccccccctgaacaacttctctgtggccgagtgccagctgatgaagacagagcggccccggcccaacacctttgtgatccgctgcctgcagtggaccaccgtcatcgagaggaccttccacgtggacagcccagatgagcgggaggagtggatgagggccatccagatggtggccaacagcctgaagcagagggcccctggagaggacccctag

SEQ ID NO: 319371 - DNA, 204 bp, Artificial Sequence
  derived and/or modified sequence
atgaatgaggtgtctgtcatcaaggagggctggctgcacaagagaggagagtacatcaagacctggaggccccgctacttcctgctgaagagtgatggcagcttcatcggctacaaggagaggcctgaggccccagaccagaccctgccccccctgaacaacttctctgtggccgagtgccagctgatgaagacagaaagatag

SEQ ID NO: 319372 - DNA, 144 bp, Artificial Sequence
  derived and/or modified sequence
atgaatgaggtgtctgtcatcaaggagggctggctgcacaagagaggagagtacatcaagacctggaggccccgctacttcctgctgaagagtgatggcagcttcatcggctacaaggagaggcctgaggccccagaccagtag

SEQ ID NO: 319373 - DNA, 405 bp, Artificial Sequence
  derived and/or modified sequence
atgaatgaggtgtctgtcatcaaggagggctggctgcacaagagaggagagtacatcaagacctggaggccccgctacttcctgctgaagagtgatggcagcttcatcggctacaaggagaggcctgaggccccagaccagaccctgccccccctgaacaacttctctgtggccgagtgccagctgatgaagacagagcggccccggcccaacacctttgtgatccgctgcctgcagtggaccaccgtcatcgagaggaccttccacgtggacagcccagatgagcgggaggagtggatgagggccatccagatggtggccaacagcctgaagcagagggcccctggagaggaccccatggactacaagtgtggcagccccagcgacagcagcaccacagaatag

SEQ ID NO: 319374 - DNA, 324 bp, Artificial Sequence
  derived and/or modified sequence
atgaatgaggtgtctgtcatcaaggagggctggctgcacaagagaggagagtacatcaagacctggaggccccgctacttcctgctgaagagtgatggcagcttcatcggctacaaggagaggcctgaggccccagaccagaccctgccccccctgaacaacttctctgtggccgagtgccagctgatgaagacagagcggccccggcccaacacctttgtgatccgctgcctgcagtggaccaccgtcatcgagaggaccttccacgtggacagcccagatgagcgggaggagtggatgagggccatccagatggtggcctag

SEQ ID NO: 319375 - DNA, 867 bp, Artificial Sequence
  derived and/or modified sequence
atgaatgaggtgtctgtcatcaaggagggctggctgcacaagagaggagagtacatcaagacctggaggccccgctacttcctgctgaagagtgatggcagcttcatcggctacaaggagaggcctgaggccccagaccagaccctgccccccctgaacaacttctctgtggccgagtgccagctgatgaagacagagcggccccggcccaacacctttgtgatccgctgcctgcagtggaccaccgtcatcgagaggaccttccacgtggacagcccagatgagcgggaggagtggatgagggccatccagatggtggccaacagcctgaagcagagggcccctggagaggaccccatggactacaagtgtggcagccccagcgacagcagcaccacagaggagatggaggtggccgtgtccaaggcccgggccaaggtgaccatgaatgactttgactacctgaagctgctgggcaagggcaccttcggcaaggtgatcctggtgcgggagaaggccaccggccgctactatgccatgaagatcctgaggaaggaggtgatcatcgccaaggatgaggtggcccacacagtgacagagagccgggtgctgcagaacaccaggcaccccttcctgactgtgtcctgcccccccctgccccggcagtgtgaggccagcctgtggacagagctgcgggagcgggccctgatcttctggtacaaggcccagagctggggccggcctgggggccagggcaaggtgctgctgcggcctgccaagagcagcgagcccaggcatgtggtgggcgtgtcccggctgggggagtgggagggggacagcttcttcattgatggcggcttcatgtag

SEQ ID NO: 319376 - DNA, 444 bp, Artificial Sequence
  derived and/or modified sequence
atgcggtgcctgagcagcaagaaggccggcagcaccagcgtggtgaagtacatcaagacctggcggcctaggtatttcctgttaaaaagcgacgggtcctttattgggtacaaggagagaccagaagcccctgaccagaccctgcctcctctaaacaacttttctgtggctgaatgtcagttgatgaagactgagcgccccaggccaaatacctttgttattcgctgtctgcagtggacaactgtaatcgaacgaacctttcatgtggactctcctgacgaaagggaggaatggatgcgcgccatccagatggtggcgaatagcttacagccgcacctgtgcgcccaaacccggatctggaagaccccccccccagcccaggcctgggccgtggggcgtcttgaaatccaggttctgatacatacctccccatccgagggctag

SEQ ID NO: 319377 - DNA, 402 bp, Artificial Sequence
  derived and/or modified sequence
atgaacgaggtgagcgtgatcaaggagggctggctgcacaagcggggggagtacatcaagacgtggagacctcgttactttctgctaaagtcggacggatccttcatcggatacaaggagagaccagaggccccagatcagaccctccctcccttaaacaattttagcgtcgctgagtgccagttgatgaaaacagaaagaccaaggcccaatactttcgtgatcaggtgtctgcagtggaccactgtgatcgagcggactttccacgtggacagccctgacgagcgggaagagtggatgcgcgcgatccagatggtcgcaaatagtctcaaacaaagggctccaggagaagacccaatggactacaaatgcggaagtccttcagattcgtcaaccacgtag

SEQ ID NO: 319378 - DNA, 402 bp, Artificial Sequence
  derived and/or modified sequence
atgaacgaggtgagcgtgatcaaggagggctggctgcacaagcggggagaatacattaagacttggcgtccgagatattttttgctcaagtcagatgggtctttcattggatacaaggaaaggcctgaagcacccgatcagaccttgccaccactcaataacttcagcgtagcggaatgccagctgatgaagacagagagacccagaccaaacacattcgtgatccgctgccttcagtggacaaccgttatcgagcggacttttcatgtggattctcctgatgaacgagaggaatggatgcgggctatccagatggtcgctaacagtctcaaacagagggctccaggagaggacccaatggactacaagtgcggtagtccaagcgactctagcaccacttag

SEQ ID NO: 319379 - DNA, 291 bp, Artificial Sequence
  derived and/or modified sequence
atgaacgaggtgagcgtgatcaaggagggctggctgcacaagcggggcgagtacataaaaacgtggagaccccggtattttctactgaagagcgacggtagctttattggatataaagaacgccccgaagcccccgaccagaccttaccaccactgaacaatttttccgtcgctgagtgccagctcatgaagactgagcgcccgaggcctaacacttttgtgatccgttgcctgcagtggaccactgtcatcgagcgcacattccatgtggattctcccgatgaacggtag

SEQ ID NO: 319380 - DNA, 360 bp, Artificial Sequence
  derived and/or modified sequence
atgaacgaggtgagcgtgatcaaggagggctggctgcacaagcggggggaatacattaagacctggagaccgcgctactttctgctgaagtctgacgggagctttatcggctacaaggagagaccggaggctccagaccagacactacctcccctgaacaatttctcagttgccgaatgccaattaatgaaaaccgagagaccccgccctaacacgttcgtcattcgctgtctgcagtggaccactgtgatcgagagaacatttcacgtggacagccctgacgagcgagaggagtggatgcgtgcgatccaaatggtcgctaacagtctgaagcagcgggcccctggcgaggacccctag

SEQ ID NO: 319381 - DNA, 204 bp, Artificial Sequence
  derived and/or modified sequence
atgaacgaggtgagcgtgatcaaggagggctggctgcacaagcggggcgaatacattaagacctggagaccacgctatttcctcctgaaatctgatggctcctttatcggctataaagagagacctgaagcaccagaccagactctccccccactgaataactttagtgttgcggagtgtcagctaatgaagacagagaggtag

SEQ ID NO: 319382 - DNA, 144 bp, Artificial Sequence
  derived and/or modified sequence
atgaacgaggtgagcgtgatcaaggagggctggctgcacaagcggggggagtatattaagacgtggcggcctcggtacttcctgctgaaatcggatggctcgttcatcggctataaagagcgccctgaagctcctgaccagtag

SEQ ID NO: 319383 - DNA, 405 bp, Artificial Sequence
  derived and/or modified sequence
atgaacgaggtgagcgtgatcaaggagggctggctgcacaagcggggggaatacattaagacctggcggcctagatattttctcctgaaatccgatggctcattcatcggctacaaagaacggccagaggcacccgatcagacactgcctcctttaaataacttctctgtcgccgagtgtcagctgatgaaaacagagcgcccgaggccaaacacgttcgtgattcgctgcctgcaatggacgacagttatagaacgaactttccatgtggatagccccgacgaaagagaagaatggatgagggcaatccagatggtcgccaactccttaaagcaacgcgctccaggcgaggatccaatggattacaagtgcggctctccatccgacagcagcaccacagagtag

SEQ ID NO: 319384 - DNA, 324 bp, Artificial Sequence
  derived and/or modified sequence
atgaacgaggtgagcgtgatcaaggagggctggctgcacaagcggggagagtacatcaagacctggagaccccgctactttctcctgaagtcagacggctccttcataggctataaggagcgaccggaggcacctgaccagaccttgccccccttaaacaacttctccgtggctgagtgccagctaatgaagacagaacgccctcgccccaacactttcgtgattcggtgcctgcagtggaccactgtgatcgagaggacctttcatgtcgatagccctgatgagagagaagagtggatgcgcgcaatccagatggttgcctag

SEQ ID NO: 319385 - DNA, 867 bp, Artificial Sequence
  derived and/or modified sequence
atgaacgaggtgagcgtgatcaaggagggctggctgcacaagcggggagaatatattaaaacatggcggcccagatactttctcctgaaatctgatggaagcttcattgggtataaagagagaccagaggcccccgatcagacccttccaccactcaacaatttctccgttgcagagtgccagctcatgaagactgagcgacctcggcccaacacttttgtgattcggtgtcttcagtggaccactgtcatcgagcggacatttcatgtcgattcccccgatgagagggaagaatggatgagagcaatccaaatggttgcgaacagtctcaagcagagggctccaggcgaggaccctatggattacaaatgcggttcgccaagcgatagcagtaccaccgaagagatggaggtggccgtttccaaagccagagccaaggttaccatgaacgatttcgattacctgaaattactcggaaaggggacctttggaaaagtcattctagtacgcgagaaggccacagggcgatactacgccatgaagatcctccgaaaagaggtaatcatagcaaaggatgaggtggctcacactgtgactgagagccgcgtgctgcaaaacacccgccatcctttcctgacagtctcttgtcctccattgccccgacagtgtgaagcgagcctgtggacggaactgcgggagcgagccttaattttttggtataaggcccagtcatggggcaggcccggggggcaaggtaaggtgctgctgagacctgccaaatcttcagaacctaggcacgtcgttggcgtctctcggcttggagagtgggagggggatagttttttcatcgatggggggttcatgtag

SEQ ID NO: 319386 - DNA, 444 bp, Artificial Sequence
  derived and/or modified sequence
atgcgttgcctatcctccaaaaaagccggatctacttctgttgttaagtatattaagacgtggcgaccgagatactttttactgaagtcagatgggtcgttcatcggatacaaagagcggcctgaggcgcctgaccagactctgccacctctcaacaacttctccgtggctgagtgccagcttatgaagactgaaagaccaagaccgaatacctttgtgattaggtgtttacagtggaccaccgtgatagaacgaaccttccatgtggactcgcccgacgagagagaggaatggatgagggctatacagatggtggcaaactccttacagccccatttgtgtgcccaaacaagaatctggaaaaccccgcctcccgctcaagcttgggctgttggacgcctggagatacaggtgcttatccacaccagtccatcagagggctag

SEQ ID NO: 319387 - DNA, 402 bp, Artificial Sequence
  derived and/or modified sequence
atgaatgaagtgagcgtgattaaggagggctggttgcacaaaagaggcgagtacattaaaacgtggcggcctcgctacttcctgctgaagtcagacggctctttcatcgggtacaaggaacgccctgaggccccagatcaaacgctgcccccactgaataacttttctgtagcagaatgccagctgatgaaaactgaacgtcccagaccaaacacattcgttatccgttgcctgcagtggactaccgttatagaacgcacgttccatgtggattcaccagacgagcgggaagagtggatgcgggcaattcagatggtagcaaattccttaaaacaaagagcacctggagaagatccaatggactataagtgtggctcaccgtcggactcgagcactacctag

SEQ ID NO: 319388 - DNA, 402 bp, Artificial Sequence
  derived and/or modified sequence
atgaacgaagtgtctgttatcaaggaagggtggctgcacaagcgtggagagtatataaagacctggcgcccaagatatttcctgctcaagtcagacgggagtttcatcggctacaaggagcgaccagaagcccctgaccagaccctgcctccacttaataacttttccgtcgcagaatgccagttaatgaagacggagagacctaggccaaacaccttcgtgattagatgcttgcaatggactacagtgattgagcgcacgtttcacgtggactcaccagacgagcgcgaggagtggatgagagctatccagatggtcgccaactctctgaagcaaagagcccctggcgaggaccccatggattataagtgcgggagtcccagtgattcttctaccacttag

SEQ ID NO: 319389 - DNA, 291 bp, Artificial Sequence
  derived and/or modified sequence
atgaatgaagtttccgtcattaaagaaggatggttacacaaaaggggagagtacatcaagacttggcgcccacgctattttctcctgaaaagcgacgggtcttttattgggtataaagagcggccagaagcaccggaccagacgctaccgcctcttaacaatttctcagtggccgaatgtcagctgatgaagaccgagcggccacgccctaataccttcgtgataagatgcctgcagtggaccaccgtcattgagagaacttttcatgttgattctcctgatgagcgatag

SEQ ID NO: 319390 - DNA, 360 bp, Artificial Sequence
  derived and/or modified sequence
atgaatgaagtgagtgtgataaaagagggttggctgcataaacggggagagtatataaaaacttggaggccgcgatattttctcctcaagagtgacgggagctttataggctacaaagagagacccgaagccccagaccagactctgcctccgttaaataactttagcgttgccgaatgccagctcatgaaaactgagcggccaaggcccaatacattcgtgattaggtgcctgcagtggaccactgttattgagcgcaccttccacgtggacagccctgacgagagagaggagtggatgcgtgccattcagatggttgctaacagcctcaagcaacgcgctcctggcgaggacccttag

SEQ ID NO: 319391 - DNA, 204 bp, Artificial Sequence
  derived and/or modified sequence
atgaacgaggtaagcgtgattaaagaagggtggctgcacaaaaggggagagtacataaaaacctggcggcctcgctatttcctgctgaaatcagacggcagtttcatcggctataaagagaggcccgaggcccctgaccagaccttgccaccactgaacaactttagcgtggcagagtgccagctgatgaaaaccgaaagatag

SEQ ID NO: 319392 - DNA, 144 bp, Artificial Sequence
  derived and/or modified sequence
atgaatgaggtctccgttatcaaggagggctggctccacaagcgcggagaatacatcaaaacatggcgcccacgttattttctcctgaaatctgatggaagtttcatcggatataaagagcgacccgaggccccagatcagtag

SEQ ID NO: 319393 - DNA, 405 bp, Artificial Sequence
  derived and/or modified sequence
atgaacgaagtcagcgtgatcaaggagggttggctgcataagcgaggggaatacatcaagacctggaggcctagatattttctgttaaagtcagacggcagctttatagggtataaagagcgaccagaggctcctgaccagacgctgccaccgctaaataacttttcagtggctgagtgccagctgatgaaaaccgaacgcccacgtcccaacactttcgttatccgatgcttgcagtggaccaccgtgattgagaggacatttcatgtggattccccagacgagcgcgaagaatggatgagagcgattcagatggtggcgaactcccttaagcaaagagcccctggagaggatcccatggattacaagtgcgggtcaccctccgactcctctacaacagaatag

SEQ ID NO: 319394 - DNA, 324 bp, Artificial Sequence
  derived and/or modified sequence
atgaatgaggtctctgtgatcaaggagggctggctgcacaagcgaggcgagtacataaagacgtggagaccacgttactttctgttaaagagcgatggctcattcattggatacaaagagagacctgaagctcctgaccagacgttgcctcctcttaataacttctcagtggccgaatgtcagctgatgaaaaccgagcgcccaaggcccaacacattcgtcattcgatgccttcagtggacaactgtcatcgaacggacatttcacgtggatagccccgatgaaagggaagagtggatgagggcaatccagatggtcgcctag

SEQ ID NO: 319395 - DNA, 867 bp, Artificial Sequence
  derived and/or modified sequence
atgaatgaagtttctgtgatcaaagagggatggctgcataagcgcggtgagtatattaagacgtggcggccacgttatttcctcctgaagagcgatgggtccttcattggctacaaggagcgtcctgaagcccctgaccagacgcttccaccactgaataacttctctgtggccgagtgtcagttgatgaagacagagcgcccacggcctaatacatttgtgataagatgtctgcagtggaccacagttattgagagaacctttcacgtggacagcccagacgagagggaagaatggatgagagcaattcagatggtagctaattcactcaagcagcgggctcccggtgaggacccaatggactataagtgtggaagcccgagcgactctagcacaaccgaggaaatggaagtggctgtttccaaggctcgcgcaaaagtcaccatgaatgattttgactatctaaagcttctgggaaaaggtacctttggcaaggtgatacttgtgcgagaaaaagccacggggaggtactatgccatgaagatcctacgaaaggaggttatcatcgccaaggacgaagtagcccacactgtcacagagagccgggttctgcagaacacgcggcatccttttctgacagtgagttgcccacctttgccaaggcagtgcgaagcctccctgtggacagagcttagggagcgtgcacttatattctggtataaagcccagagttgggggaggcctggagggcaggggaaggtgctgcttagacctgcaaagtcctcagaaccaagacatgtggtgggagtgtcacggttgggcgaatgggaaggggactctttttttattgatgggggtttcatgtag

SEQ ID NO: 319396 - DNA, 1873 bp, Artificial Sequence
  derived and/or modified sequence
cggtaagcgggggctggggggagggggcggggggggccgcgccgtgctagccgttgggcctgcctcggaggaggcgtcgccgccgccgctgccgctgccggcgccgttgccgctgccgggaaacacaaggaaagggaaccagcgcagcgtggcgatgggcgggggtagagccccgccggagaggctgggcggctgccggtgacagactgtgccctgtccacggtgcctcctgcatgtcctgctgccctgagctgtcccgagctaggtgacagcgtaccacgctgccaccatgaatgaggtgtctgtcatcaaagaaggctggctccacaagcgtggtaaaatacatcaagacctggaggccacggtacttcctgctgaagagcgacggctccttcattgggtacaaggagaggcccgaggcccctgatcagactctaccccccttaaacaacttctccgtagcagaatgccagctgatgaagaccgagaggccgcgacccaacacctttgtcatacgctgcctgcagtggaccacagtcatcgagaggaccttccacgtggattctccagacgagagggaggagtggatgcgggccatccagatggtcgccaacagcctccagcctcacctttgtgcccagactcgcatttggaagactccacctcccgcccaggcctgggctgttgggcggttggagattcaggttttaatccacacaagccccagtgaggggtgaagcatggcgcctggggcctgcctgagtttctggcctgggtgtcgtgctggtgtctgcctccgcgctgctgcatctggacgaaggctgccttctggtgggacgcgacacccggcagacagtggtgctgccttccaggccccgtggcctaggctcggagtggccaggcacggggcggtccaatcccccacccgctgtccccctatgggggcagaaaagcaataatgtccaggggcaggcaggggcccttgggagctgcagggctgggggttagggctgctccctggtgaatggagtcagatcctaggatctgtaccatggggaaccaggagtggccgggctgggtgccgcctcctggtccggcctcctccccaccaaactgtcctcaccctatggatgaggcaggaggaacatttggggccaaacctgcctgcctcccagccccgtgccttactagggcttccttccagctggccttacctcccgctggaccctgggcctggcctggccccactgggggctatgggctgggctcaccctctcctctgcgggggtggagggccaccagccttggctgttacaatcttacaccggacagtattgggcccctccctctccccagggccccacgttctgcagccttaaggttgaacatgagtgcacgtccatgtcagtgctgtgggactcctgtgcgtgcctcggactgcgtgtgtcggcgggacgcaggcacacgtgggtgtgtgtgcatgtgtgtttgtgtgagggcagcgtgtcctccagtgtgcatggtgtgtgggcttgggccccatccctggcccgagcatttcatcctgtgggggaggggtgctgacctagtgggaggagccccactgtgatccatgagctgccctgcccacgcctcccctccctgtagcaacacctctgggtgtttggagtttagcttttgtgggtttgctctccctatcccatctcctgtactacacagttcatggcagggtggggaggggtggggttggttcgggtgggtgagggtctttttcctctgtgtgcgatgttgttatctgacagttctccgtccctactggcctttctcctcgtcttcatatttgtacggtacaagcaataaagacactcatttc

SEQ ID NO: 319397 - DNA, 681 bp, Artificial Sequence
  derived and/or modified sequence
ttggggtcgctggggacattgccacatctctctgctcagaatgggtccttgagagcgggctccacgccacccttgctggccttaccctttgctgagtgggcagaacagccagagggcctcagagcccggcgtcctcagggaaggggctggtgtggaatcccctcccgccctgaccagctcctctcttgtcttgcagactgtgccctgtccacggtgcctcctgcatgtcctgctgccctgagctgtcccgagctaggtgacagcgtaccacgctgccaccatgaatgaggtgtctgtcatcaaagaaggctggctccacaagcgtggtgaatacatcaagacctggaggccacggtacttcctgctgaagagcgacggctccttcattgggtacaaggagaggcccgaggcccctgatcagactctaccccccttaaacaacttctccgtagcagaatgccagctgatgaagaccgagaggccgcgacccaacacctttgtcatacgctgcctgcagtggaccacagtcatcgagaggaccttccacgtggattctccagacgagagggaggagtggatgcgggccatccagatggtcgccaacagcctcaagcagcgggccccaggcgaggaccccatggactacaagtgtggctcccccagtgactcctccacgactga

SEQ ID NO: 319398 - DNA, 974 bp, Artificial Sequence
  derived and/or modified sequence
aagtgctgggattacacgcgtgagccaccacgtccagcttcctgttgtctttgaatttatctcctgagcaagtcttcctccgggcgctgtggaaaggcacagatctgagtgcaggcgacagaggctcctgagggggtcgctgccacctccccaatgagcctccgcagcaccaggaaggagccccacccaccagctccagctccaagagacgcagatctctgcttccccacctgcctccctagcccatctgtgctgtctggcatcaaaatcagttttccacagtagttgaaccattttgcacctcccaccaataatgagtaagggttctggttcctctacatccgagccagcagttggccttgtcagtttttaaaattcgagccatcccagctgtgctgactccttagttgctgagatgagcttgtaaaaagcagctctgttgatcccagcagcggccagggcctccgctgcttctcggctgggagacccgagactgtgccctgtccacggtgcctcctgcatgtcctgctgccctgagctgtcccgagctaggtgacagcgtaccacgctgccaccatgaatgaggtgtctgtcatcaaagaaggctggctccacaagcgtggtgaatacatcaagacctggaggccacggtacttcctgctgaagagcgacggctccttcattgggtacaaggagaggcccgaggcccctgatcagactctaccccccttaaacaacttctccgtagcagaatgccagctgatgaagaccgagaggccgcgacccaacacctttgtcatacgctgcctgcagtggaccacagtcatcgagaggaccttccacgtggattctccagacgagagggaggagtggatgcgggccatccagatggtcgccaacagcctcaagcagcgggccccaggcgaggaccccatggactacaagtgtggctcccccagtgactcctccacgac

SEQ ID NO: 319399 - DNA, 592 bp, Artificial Sequence
  derived and/or modified sequence
gtgggaggggcgctgggtgggagctcagcctggcccccttggggcaggacccactgccaactcggcacccacagcagggcccaggtgctctgactgtgccgagcgagggacagcaagccgggtcggccaagaggagactgcatgtcagaggtcccagcaggagtttcttcagcccagccgtcctgctggagaagctcgttcgcagatgttgtttctaaggactgtgccctgtccacggtgcctcctgcatgtcctgctgccctgagctgtcccgagctaggtgacagcgtaccacgctgccaccatgaatgaggtgtctgtcatcaaagaaggctggctccacaagcgtggtgaatacatcaagacctggaggccacggtacttcctgctgaagagcgacggctccttcattgggtacaaggagaggcccgaggcccctgatcagactctaccccccttaaacaacttctccgtagcagaatgccagctgatgaagaccgagaggccgcgacccaacacctttgtcatacgctgcctgcagtggaccacagtcatcgagaggaccttccacgtggattctccagacgagagg

SEQ ID NO: 319400 - DNA, 798 bp, Artificial Sequence
  derived and/or modified sequence
gtagagggctgtacctttttggcgctgtggaagccgttgctgtgctgtatttacagggagtccgaaattgaagttcagaggaagaattgccttccaccgcatcttatcagaccctatgggtgccagggtgtgtgctgggagaagaagacagcaagagagccatgcagggggtgacacagctaccagggacctgcgttagctagcagcaggacggtgaagtcggttctagctctgcgaccttggaccacactgttcactcccatacagtggtctcagaaggacgtccaccttgggctgttgtgaggattaaatgaattaatccacgagaagctcctagaatggtgcctggtactgtactgtgccctgtccacggtgcctcctgcatgtcctgctgccctgagctgtcccgagctaggtgacagcgtaccacgctgccaccatgaatgaggtgtctgtcatcaaagaaggctggctccacaagcgtggtgaatacatcaagacctggaggccacggtacttcctgctgaagagcgacggctccttcattgggtacaaggagaggcccgaggcccctgatcagactctaccccccttaaacaacttctccgtagcagaatgccagctgatgaagaccgagaggccgcgacccaacacctttgtcatacgctgcctgcagtggaccacagtcatcgagaggaccttccacgtggattctccagacgagagggaggagtggatgcgggccatccagatggtcgccaacagcctcaagcagcgggccccaggcgaggaccccat

SEQ ID NO: 319401 - DNA, 554 bp, Artificial Sequence
  derived and/or modified sequence
aggtcgtgggataggcatatattgagctttgattttgactgcttaacagttttccacagtagttgaaccattttgcacctcccaccaataatgagtaagggttctggttcctctacatccgagccagcagttggccttgtcagtttttaaaattcgagccatcccagctgtgctgactccttagttgctgagatgagcttgtaaaaagcagctctgttgatcccagcagcggccagggcctccgctgcttctcggctgggagacccgagactgtgccctgtccacggtgcctcctgcatgtcctgctgccctgagctgtcccgagctaggtgacagcgtaccacgctgccaccatgaatgaggtgtctgtcatcaaagaaggctggctccacaagcgtggtgaatacatcaagacctggaggccacggtacttcctgctgaagagcgacggctccttcattgggtacaaggagaggcccgaggcccctgatcagactctaccccccttaaacaacttctccgtagcagaatgccagctgatgaagaccgagagg

SEQ ID NO: 319402 - DNA, 564 bp, Artificial Sequence
  derived and/or modified sequence
gatgcccatggtgtccctagagccagctgccacttctctgggcgccaccgtagctcccgacctgctgtccgcaaataaccccaggctgggaaaggcaaaggcgccttggtctctgtggaccctggccaggccccaggctccaggtaggggcccagctggcgctgcctcgcgccctcctcccctccgttctgggaacctgagacgaagcagtggcctcggcgtccctcagtctgttggttgctggtccctgaggacagaagtgaaggtcttggggtagggatcagggcctcggtcaagcccccaggactggcttctaggccccagaccgtgcatacgcaactgtgccctgtccacggtgcctcctgcatgtcctgctgccctgagctgtcccgagctaggtgacagcgtaccacgctgccaccatgaatgaggtgtctgtcatcaaagaaggctggctccacaagcgtggtgaatacatcaagacctggaggccacggtacttcctgctgaagagcgacggctccttcattgggtacaaggagaggcccgaggcccctgatcaga

SEQ ID NO: 319403 - DNA, 577 bp, Artificial Sequence
  derived and/or modified sequence
gctgcaagtttgcgggacggggagcgcaggccgcagcgtgcgcgggccgggggctggacctttcgggcgcggcgggcagatcgagcctggcactgtgccctgtccacggtgcctcctgcatgtcctgctgccctgagctgtcccgagctaggtgacagcgtaccacgctgccaccatgaatgaggtgtctgtcatcaaagaaggctggctccacaagcgtggtgaatacatcaagacctggaggccacggtacttcctgctgaagagcgacggctccttcattgggtacaaggagaggcccgaggcccctgatcagactctaccccccttaaacaacttctccgtagcagaatgccagctgatgaagaccgagaggccgcgacccaacacctttgtcatacgctgcctgcagtggaccacagtcatcgagaggaccttccacgtggattctccagacgagagggaggagtggatgcgggccatccagatggtcgccaacagcctcaagcagcgggccccaggcgaggaccccatggactacaagtgtggctcccccagtgactcctccacgactgag

SEQ ID NO: 319404 - DNA, 582 bp, Artificial Sequence
  derived and/or modified sequence
gcaagtttgcgggacggggagcgcaggccgcagcgtgcgcgggccgggggctggacctttcgggcgcggcgggcagatcgagcctggctggtctcagaaggacgtccaccttgggctgttgtgaggattaaatgaattaatccacgagaagctcctagaatggtgcctggtactgtactgtgccctgtccacggtgcctcctgcatgtcctgctgccctgagctgtcccgagctaggtgacagcgtaccacgctgccaccatgaatgaggtgtctgtcatcaaagaaggctggctccacaagcgtggtgaatacatcaagacctggaggccacggtacttcctgctgaagagcgacggctccttcattgggtacaaggagaggcccgaggcccctgatcagactctaccccccttaaacaacttctccgtagcagaatgccagctgatgaagaccgagaggccgcgacccaacacctttgtcatacgctgcctgcagtggaccacagtcatcgagaggaccttccacgtggattctccagacgagagggaggagtggatgcgggccatccagatggtcgcca

SEQ ID NO: 319405 - DNA, 1402 bp, Artificial Sequence
  derived and/or modified sequence
gagtgtgggaggggcgctgggtgggagctcagcctggcccccttggggcaggacccactgccaactcggcacccacagcagggcccaggtgctctgactgtgccgagcgagggacagcaagccgggtcggccaagaggagactgcatgtcagaggtcccagcaggagtttcttcagcccagccgtcctgctggagaagctcgttcgcagatgttgtttctaaggactgtgccctgtccacggtgcctcctgcatgtcctgctgccctgagctgtcccgagctaggtgacagcgtaccacgctgccaccatgaatgaggtgtctgtcatcaaagaaggctggctccacaagcgtggtgaatacatcaagacctggaggccacggtacttcctgctgaagagcgacggctccttcattgggtacaaggagaggcccgaggcccctgatcagactctaccccccttaaacaacttctccgtagcagaatgccagctgatgaagaccgagaggccgcgacccaacacctttgtcatacgctgcctgcagtggaccacagtcatcgagaggaccttccacgtggattctccagacgagagggaggagtggatgcgggccatccagatggtcgccaacagcctcaagcagcgggccccaggcgaggaccccatggactacaagtgtggctcccccagtgactcctccacgactgaggagatggaagtggcggtcagcaaggcacgggctaaagtgaccatgaatgacttcgactatctcaaactccttggcaagggaacctttggcaaagtcatcctggtgcgggagaaggccactggccgctactacgccatgaagatcctgcggaaggaagtcatcattgccaaggatgaagtcgctcacacagtcaccgagagccgggtcctccagaacaccaggcacccgttcctcactgtgagttgccctccccttcccagacagtgtgaggccagcctttggacagagctcagagagagagccctaatcttctggtacaaagcacagtcttggggtaggccaggcgggcagggcaaggtgttgctgcgccctgccaagtcatccgaaccaagacatgtggtgggggtgagcaggctcggggagtgggagggtgacagcttcttcatagatggtggcttcatgtaagcatttgaactaactgaagatatcacattatttgctggctgctgtctctatgagttaggagcacttagcccagctggttgaagtggaaacattattttttttgtttttgttttcagatatgctcatagaagcagatgtgttagcattgtgttgtctgtcagcctggactgagtagatgcctgtttgggctgcagtctccatcaaggccagtggccaccagttaaatg

SEQ ID NO: 319406 - DNA, 1164 bp, Artificial Sequence
  derived and/or modified sequence
gcgtcacgcagcgcacgtcgccgcgcgcctgcgctcttttccacgtgcgaaagccccggactcgtggagttgtgaacgccgcggactccggagccgcacaaaccagggctcgccatgaagccaggattcagtccccgtgggggtggctttggcggccgagggggctttggtgaccgtggtggtcgtggaggccgagggggctttggcgggggccgaggtcgaggcggaggctttagaggtcgtggacgaggaggaggtggaggcggcggcggcggtggaggaggaggaagaggtggtggaggcttccattctggtggcaaccggggtcgtggtcggggaggaaaaagaggaaaccagtcggggaagaatgtgatggtggagccgcatcggcatgagggtgtcttcatttgtcgaggaaaggaagatgcactggtcaccaagaacctggtccctggggaatcagtttatggagagaagagagtctcgatttcggaaggagatgacaaaattgagtaccgagcctggaaccccttccgctccaagctagcagcagcaatcctgggtggtgtggaccagatccacatcaaaccgggggctaaggttctctacctcggggctgcctcgggcaccacggtctcccatgtctctgacatcgttggtccggatggtctagtctatgcagtcgagttctcccaccgctctggccgtgacctcattaacttggccaagaagaggaccaacatcattcctgtgatcgaggatgctcgacacccacacaaataccgcatgctcatcgcaatggtggatgtgatctttgctgatgtggcccagccagaccagacccggattgtggccctgaatgcccacaccttcctgcgtaatggaggacactttgtgatttccattaaggccaactgcattgactccacagcctcagccgaggccgtgtttgcctccgaagtgaaaaagatgcaacaggagaacatgaagccgcaggagcagttgacccttgagccatatgaaagagaccatgccgtggtcgtgggagtgtacaggccaccccccaaggtgaagaactgaagttcagcgctgtcaggattgcgagagatgtgtgttgatactgttgcacgtgtgtttttctattaaaagactcatccgtctccc

SEQ ID NO: 319407 - DNA, 966 bp, Artificial Sequence
  derived and/or modified sequence
atgaaaccaggattttctcccagaggcggtggctttggagggaggggaggcttcggagaccgagggggacggggcggccgaggtggatttgggggcggcaggggcaggggcgggggatttcgagggcggggcagagggggtggggggggcggcgggggcggagggggtggcggcaggggaggaggaggattccattcaggtggaaaccggggtcgcggtaggggaggcaagcgggggaaccaaagtggtaagaatgttatggttgaaccccatcgacacgagggggtgtttatctgcagaggcaaagaagacgccctcgtgactaagaaccttgttcccggggagtcagtctacggggagaaacgggtatcaattagcgaaggcgacgataagattgagtatagggcatggaatccttttcggagtaagctggctgccgctatattaggaggggtggatcagatccacatcaagcccggagccaaggtgttgtacctgggtgctgcttccgggacaacggtcagtcatgtttcggatatcgtgggccccgatggcctggtgtacgctgtcgaattcagtcacagaagcggcagagacctcatcaacttagccaagaagcggaccaacattatcccagtcatagaggacgctcggcatccccacaaatacagaatgctgatagctatggtcgacgttatttttgccgacgttgcacagcctgatcaaacaaggatcgtcgcgttgaatgctcatacattcttgcggaatgggggccactttgtgatcagtatcaaggccaattgtatcgacagcaccgcctctgcagaggctgtgtttgccagcgaggtgaaaaaaatgcagcaggaaaatatgaagccacaagaacagctcacactagagccctatgagcgcgaccacgccgtcgtcgtgggcgtgtatcgcccacctcccaaagtgaaaaattag

SEQ ID NO: 319408 - DNA, 966 bp, Artificial Sequence
  derived and/or modified sequence
atgaagccaggcttcagcccccggggcggcggctttggaggccggggcggctttggagaccggggcggccggggcggccggggcggctttggaggcggccggggccggggcggcggcttccggggccggggccggggcggcggcggcggcggcggcggcggcggcggcggcggccggggcggcggcggcttccacagcggcggcaacagaggccggggccggggcggcaagaggggcaaccagagcggcaagaatgtgatggtggagccccacagacatgaaggagtcttcatctgccggggcaaggaggatgccctggtgaccaagaacctggtgcctggagagagcgtgtatggagagaagagggtgtccatcagtgaaggagatgacaagattgagtaccgggcctggaaccccttccgcagcaagctggccgccgccatcctgggcggcgtggaccagatccacatcaagccaggggccaaggtgctgtacctgggcgccgccagcggcaccaccgtgagccacgtgtctgacatcgtgggcccagatggcctggtgtatgctgtggagttcagccacaggagcggccgggacctgatcaacctggccaagaagaggaccaacatcatccctgtgattgaagatgcccggcacccccacaagtacaggatgctgattgccatggtggatgtgatctttgctgatgtggcccagcctgaccagaccagaattgtggccctgaatgcccacaccttcctgagaaatggaggccacttcgtcatcagcatcaaggccaactgcatcgacagcacagccagcgctgaggccgtgtttgccagcgaggtgaagaagatgcagcaggagaacatgaagccccaggagcagctgaccctggagccctatgaaagagaccatgctgtggtggtgggcgtgtacagacctccacccaaggtgaagaactag

SEQ ID NO: 319409 - DNA, 966 bp, Artificial Sequence
  derived and/or modified sequence
atgaagcccggcttcagcccccggggcggcggcttcggcggccggggaggctttggcgaccggggagggagagggggccggggggggtttggaggggggcgcggcagaggcggcggtttccgtgggcggggcagaggtggcggaggaggcgggggcggcggtggaggcggaggccgaggcggcggtgggttccacagcggcgggaatcgcggccgcggccgtggcgggaaaagggggaatcagagcggcaagaacgtaatggtggaaccccaccggcacgagggagtgtttatctgtcgcggaaaggaggatgccctggtgaccaagaatcttgtcccaggcgagagcgtgtatggagaaaaaagggtgtccatctcggagggcgacgacaaaatcgaatatagagcatggaacccctttcgcagtaaacttgccgcagcaatcctcggtggggttgatcagatccacatcaaacctggcgccaaggtgttgtatctgggtgcagcatctgggacaacagtgtcgcacgtgtctgatatcgtagggcccgacggactggtgtacgccgtggagttttctcaccgatcaggccgggacctgattaacctggccaaaaagcggacaaatatcattcccgtcatcgaggatgcccgccatcctcacaagtacagaatgctcatcgccatggtggacgtgatattcgccgatgtcgcccagccagatcagaccaggattgtagctctgaatgcgcacacatttctgagaaatggcgggcacttcgtgatcagtatcaaggccaactgcattgactcgactgcctccgccgaagcggtgtttgccagcgaggtcaagaaaatgcagcaagaaaatatgaaaccacaagaacaattaacccttgagccttacgaacgggaccacgctgttgtggtgggcgtgtataggcccccacccaaggtcaagaattag

SEQ ID NO: 319410 - DNA, 966 bp, Artificial Sequence
  derived and/or modified sequence
atgaaacccggattctcaccacgtggtgggggtttcggtgggagaggcggatttggcgatagaggaggaagaggaggtcgtgggggattcggcggaggcaggggccgtggtggaggcttcaggggtagaggacgtggaggaggtggcggtgggggaggaggcggaggtggagggagaggtggcggagggttccacagcggtggaaacagaggcagaggccgaggcggaaaaagggggaatcaaagcggaaaaaacgtcatggttgaaccacatcggcacgaaggcgtctttatctgtaggggaaaagaagacgccttagtgactaaaaacctggtccccggagaaagcgtgtatggagagaaacgcgtgagtatcagtgagggagacgataagatagagtaccgggcttggaaccccttccggtccaagcttgcagctgccatactcggcggtgtagatcaaatacacataaagcctggagccaaggtcttatatctaggcgcagcctctggtactaccgtcagccatgtctcggatatagtcggcccagacgggctggtgtatgccgtggaattttcccatcggagcggtagagatctgattaacctggcaaagaagcgaactaacattatccctgtgattgaggatgcacggcaccctcataaatacaggatgttgatcgctatggtcgacgtgattttcgcagacgtggcccagcccgaccagacaagaatcgtggcactcaatgcgcacacattccttagaaatgggggtcactttgttatatcaatcaaagcgaattgtatcgactcaaccgcttctgccgaggcagtcttcgcatccgaagtgaaaaaaatgcagcaggagaacatgaagcctcaggagcagctgacgctcgagccctatgaacgggatcacgctgtggtcgtgggcgtttatagacctccccctaaagtcaaaaactag

SEQ ID NO: 319411 - DNA, 966 bp, Artificial Sequence
  derived and/or modified sequence
atgaagcccggcttcagccccagaggcggcggcttcggcggcagaggcggcttcggcgacagaggcggcagaggcggcagaggcggcttcggcggcggcagaggcagaggcggcggcttcagaggcagaggcagaggcggcggcggcggcggcggcggcggcggcggcggcggcagaggcggcggcggcttccacagcggcggcaacagaggcagaggcagaggcggcaagagaggcaaccagagcggcaagaacgtgatggtggagccccacagacacgagggcgtgttcatctgcagaggcaaggaggacgccctggtgaccaagaacctggtgcccggcgagagcgtgtacggcgagaagagagtgagcatcagcgagggcgacgacaagatcgagtacagagcctggaaccccttcagaagcaagctggccgccgccatcctgggcggcgtggaccagatccacatcaagcccggcgccaaggtgctgtacctgggcgccgccagcggcaccaccgtgagccacgtgagcgacatcgtgggccccgacggcctggtgtacgccgtggagttcagccacagaagcggcagagacctgatcaacctggccaagaagagaaccaacatcatccccgtgatcgaggacgccagacacccccacaagtacagaatgctgatcgccatggtggacgtgatcttcgccgacgtggcccagcccgaccagaccagaatcgtggccctgaacgcccacaccttcctgagaaacggcggccacttcgtgatcagcatcaaggccaactgcatcgacagcaccgccagcgccgaggccgtgttcgccagcgaggtgaagaagatgcagcaggagaacatgaagccccaggagcagctgaccctggagccctacgagagagaccacgccgtggtggtgggcgtgtacagacccccccccaaggtgaagaactag

SEQ ID NO: 319412 - DNA, 1731 bp, Artificial Sequence
  derived and/or modified sequence
gtgccccctcccgccccaggtcgtcctctcagcatgggggtcccgcggcctcagccctgggcgctggggctcctgctctttctccttcctgggagcctgggcgcagaaagccacctctccctcctgtaccaccttaccgcggtgtcctcgcctgccccggggactcctgccttctgggtgtccggctggctgggcccgcagcagtacctgagctacaatagcctgcggggcgaggcggagccctgtggagcttgggtctgggaaaaccaggtgtcctggtattgggagaaagagaccacagatctgaggatcaaggagaagctctttctggaagctttcaaagctttggggggaaaaggtccctacactctgcagggcctgctgggctgtgaactgggccctgacaacacctcggtgcccaccgcctgcgggagcacctggagaggggccgcggaaacctggagtggaaggagcccccctccatgcgcctgaaggcccgacccagcagccctggcttttccgtgcttacctgcagcgccttctccttctaccctccggagctgcaacttcggttcctgcggaatgggctggccgctggcaccggccagggtgacttcggccccaacagtgacggatccttccacgcctcgtcgtcactaacagtcaaaagtggcgatgagcaccactactgctgcattgtgcagcacgcggggctggcgcagcccctcagggtggagctgggtgaggtcccgccaggtggtgatgctcctggtttcccgttgccttgtctcactgctgcgccggtccttcctgagtctgaccttcctccccactgctgccacctccttgaatctgactgccttgaacctcacgcctgtcagtgcccccaaaacctgatggcttgtccttcccaaggccaactgccttccgtctcctgctgcttctggcctcactgagtctgaagagctgttaactaccatggccagtcctccctgagtctgaccatcttccatcctgctgctgctgctgctgctgctgcgggtcttcctggaatctgaccattcgttgtctgctatgcccgtcctcaccaagactgactgcctgctgctttgctactgcccgggcccatgagactgacttcccactgctctgcctgcctctccccactgcccatcagacacttggtgctggaatctccgaggctgggagggactgggagcgccccagttctgtgtcctgactgggtggggtggaggggctgctccacatctcacagcgttctctggctgcagaatctccagccaagtcctccgtgctcgtggtgggaatcgtcatcggtgtcttgctactcacggcagcggctgtaggaggagctctgttgtggagaaggatgaggagtgggctgccagccccttggatctcccttcgtggagacgacaccggggtcctcctgcccaccccaggggaggcccaggatgctgatttgaaggatgtaaatgtgattccagccaccgcctgaccatccgccattccgactgctaaaagcgaatgtagtcaggcccctttcatgctgtgagacctcctggaacactggcatctctgagcctccagaaggggttctgggcctagttgtcctccctctggagccccgtcctgtggtctgcctcagtttcccctcctaatacatatggctgttttccacctcgataatataacacgagtttgggcccg

SEQ ID NO: 319413 - DNA, 1351 bp, Artificial Sequence
  derived and/or modified sequence
ctcagcatgggggtcccgcggcctcagccctgggcgctggggctcctgctctttctccttcctgggagcctgggcgcagaaagccacctctccctcctgtaccaccttaccgcggtgtcctcgcctgccccggggactcctgccttctgggtgtccggctggctgggcccgcagcagtacctgagctacaatagcctgcggggcgaggcggagccctgtggagcttgggtctgggaaaaccaggtgtcctggtattgggagaaagagaccacagatctgaggatcaaggagaagctctttctggaagctttcaaagctttggggggaaaaggtccctacactctgcagggcctgctgggctgtgaactgggccctgacaacacctcggtgcccaccgccaagttcgccctgaacggcgaggagttcatgaatttcgacctcaagcagggcacctggggtggggactggcccgaggccctggctatcagtcagcggtggcagcagcaggacaaggcggccaacaaggagctcaccttcctgctattctcctgcccgcaccgcctgcgggagcacctggagaggggccgcggaaacctggagtggaagggctgctggacaaagatagataccagctggggatgtgcacagatattcattccaagtgccacaaaggagaagttgagactcaaccagagcccccctccatgcgcctgaaggcccgacccagcagccctggcttttccgtgcttacctgcagcgccttctccttctaccctccggagctgcaacttcggttcctgcggaatgggctggccgctggcaccggccagggtgacttcggccccaacagtgacggatccttccacgcctcgtcgtcactaacagtcaaaagtggcgatgagcaccactactgctgcattgtgcagcacgcggggctggcgcagcccctcagggtggagctgggtgaggtcccgccaggtggtgatgctcctggtttcccgttgccttgtctcactgctgcgccggtccttcctgagtctgaccttcctccccactgctgccacctccttgaatctgactgccttgaacctcacgcctgtcagtgcccccaaaacctgatggcttgtccttcccaaggccaactgccttccgtctcctgctgcttctggcctcactgagtctgaagagctgttaactaccatggccagtcctccctgagtctgaccatcttccatcctgctgctgctgctgctgctgctgcgggtcttcctggaatctgaccattcgttgtctgctatgcccgtcctcaccaagactgactgcctgctgctttgctactgcccgggcccat

SEQ ID NO: 319414 - DNA, 459 bp, Artificial Sequence
  derived and/or modified sequence
atgggggtgcctcgccctcaaccatgggcccttggtctgctgctgttccttctgccaggttccctgggtgcggagtctcacctgtcgctgctttatcatctgaccgccgtgtcttctcctgctccaggaacccctgctttctgggtgtcaggctggttggggccccagcagtatctatcatacaattctctccgtggtgaggctgagccctgcggcgcatgggtgtgggagaatcaggtgtcttggtactgggaaaaagagacaacagacttaagaattaaggaaaaactgtttttggaagcctttaaggcgttgggtggtaagggaccgtacactcttcaggggctgttaggctgtgagttgggcccggataacacaagcgtgcctactgcctgcgggagtacctggaggggcgcagccgagacttggtcaggtcgatcaccaccaccatgcgcatag

SEQ ID NO: 319415 - DNA, 708 bp, Artificial Sequence
  derived and/or modified sequence
atgggcgtcccacggccgcagccttgggccctgggactcctgctcttcttgttgcctggatccctcggggcagagtctcacctcagcctactttaccatctgacggccgtctcatcccctgctcctgggacaccagcattctgggtgagtggttggttagggccgcaacaatacctgagctacaatagtctgagaggcgaggccgagccctgcggggcttgggtttgggaaaaccaggtcagttggtactgggagaaggagacaaccgacctcaggattaaggagaagctctttctggaagcttttaaggcgttgggtggaaaggggccatatacactgcaggggcttctcggttgtgagctgggtccggacaataccagtgtaccaacagccaaatttgccctcaacggtgaagaatttatgaattttgacctaaagcaggggacgtggggtggagactggccagaggccttagctatatctcagaggtggcagcagcaagacaaggccgctaacaaggagttaacattcctgctgttcagttgtcctcaccggctgagggagcacctcgaacgtggacggggaaatctggagtggaagggctgttggactaagatcgatacttcttggggctgtgctcagatatttattccaagtgcaaccaaggagaaactgcgcctgaatcagagcccaccaccttgcgcttag

SEQ ID NO: 319416 - DNA, 459 bp, Artificial Sequence
  derived and/or modified sequence
atgggcgtgccccggccccagccctgggccctgggcctgctgctcttcctgctgcccggcagcctgggcgctgagagccacctgagcctgctgtaccacctgacagctgtgagcagccctgcccctggcaccccagccttctgggtgtctggctggctgggcccccagcagtacctgagctacaacagcctgcggggggaggccgagccctgtggggcctgggtgtgggagaaccaggtgtcctggtactgggagaaggagaccacagacctgcgcatcaaggagaagctgttcctggaggccttcaaggccctgggcggcaagggcccctacaccctgcagggcctgctgggctgtgagctgggccctgacaacacctctgtgcccacagcctgtggcagcacctggagaggagctgctgagacctggagcggccgcagccccccaccctgtgcctag

SEQ ID NO: 319417 - DNA, 708 bp, Artificial Sequence
  derived and/or modified sequence
atgggcgtgccccggccccagccctgggccctgggcctgctgctcttcctgctgcccggcagcctgggcgctgagagccacctgagcctgctgtaccacctgacagctgtgagcagccctgcccctggcaccccagccttctgggtgtctggctggctgggcccccagcagtacctgagctacaacagcctgcggggggaggccgagccctgtggggcctgggtgtgggagaaccaggtgtcctggtactgggagaaggagaccacagacctgcgcatcaaggagaagctgttcctggaggccttcaaggccctgggcggcaagggcccctacaccctgcagggcctgctgggctgtgagctgggccctgacaacacctctgtgcccacagccaagtttgccctgaatggagaggagttcatgaactttgacctgaagcagggcacctggggcggggactggccagaggccctggccatcagccagcgctggcagcagcaggacaaggccgccaacaaggagctgaccttcctgctcttcagctgcccccaccggctgcgggagcacctggagcggggccggggcaacctggagtggaagggctgctggaccaagattgacacctcctggggctgtgcccagatcttcatccccagcgccaccaaggagaagctgcggctgaaccagagccccccaccctgtgcctag

SEQ ID NO: 319418 - DNA, 459 bp, Artificial Sequence
  derived and/or modified sequence
atgggcgtgccccggccccagccctgggccctgggcctgctgctgttccttctcccgggaagcctgggagccgaatcacacctatccctcctctatcatttaaccgcggtaagcagtccagcacctggaacccccgcgttttgggtctccggatggttaggcccacagcagtacttaagctacaactccctccgtggcgaggctgaaccctgtggggcctgggtctgggaaaatcaggtgagttggtattgggagaaagagactacggatctcagaatcaaagagaaactgttcttggaggcatttaaggccctcgggggaaaggggccttacacattacagggccttctcgggtgtgagctgggccctgacaatacttcggtccccactgcgtgcggtagcacttggcgaggcgccgcagagacctggtccgggagatctccacctccgtgcgcctag

SEQ ID NO: 319419 - DNA, 708 bp, Artificial Sequence
  derived and/or modified sequence
atgggcgtgccccggccccagccctgggccctgggcctgctgctgtttctgctgccgggaagcctgggtgctgaatcccatttatccctgttgtatcacctcaccgcagttagcagccctgctccagggacaccagcattttgggtcagtgggtggctggggcctcagcagtatctatcatacaacagtctgcggggtgaggcggagccatgcggtgcttgggtatgggagaatcaggtcagttggtactgggaaaaagagaccaccgacctccgaataaaggagaagctgttcctcgaggccttcaaagcattggggggaaagggcccttatactctccagggcctcttaggttgtgagctcggccctgataatacctctgtgcctacggccaagttcgccctgaatggcgaggaatttatgaattttgacctcaagcaagggacatggggaggggattggcccgaggccctggccataagtcagcgatggcaacagcaggacaaggctgcaaataaagaacttacattcctgctcttttcatgcccacatcgcctaagggaacatttagagagaggcaggggaaatctggaatggaaaggctgctggactaagatagataccagttggggatgcgcccagatcttcataccttcagctacaaaggagaagctaaggctgaaccagtctcctcctccctgcgcctag

SEQ ID NO: 319420 - DNA, 459 bp, Artificial Sequence
  derived and/or modified sequence
atgggagttccacgaccgcagccttgggccctcggactccttctgttccttctgccaggctccctgggggctgagagccacctcagtctgctgtaccatcttactgccgtgtccagtccagcgccaggtacacctgcgttctgggtttccgggtggctcggtcctcaacagtatctaagttacaactcactgaggggggaagctgaaccatgcggcgcttgggtctgggaaaatcaagtgtcttggtactgggagaaggaaacaacagacctgcgcattaaagagaaattattcctggaggcatttaaggcactcggagggaagggaccctatactctgcagggtttgctcgggtgcgagcttggtcctgacaatacgtcagtacctacagcctgtggaagcacttggcgcggagcggctgaaacttggtccgggagatccccgcctccttgcgcatag

SEQ ID NO: 319421 - DNA, 708 bp, Artificial Sequence
  derived and/or modified sequence
atgggggtaccacggcctcagccgtgggcgttggggcttctcctattcctattgcccggaagcctaggtgcagaaagccatctaagtttgctctaccacttaacagcagtgagctctcccgcaccaggcacgccagccttctgggtttccggatggctcggcccacagcagtacctttcctataatagcttgcgtggggaggcagaaccgtgcggtgcatgggtctgggaaaatcaagttagttggtattgggaaaaagagactactgatttgcgaatcaaagagaagctttttctcgaggcgttcaaggcattaggaggcaagggcccatacactctccaaggtttgctgggctgcgaacttggcccagacaatacgtccgtgcctaccgccaaatttgcattgaatggagaggagttcatgaacttcgacctgaaacaaggaacctggggcggtgattggcccgaggccctggctattagccagcgttggcagcaacaggataaggccgcaaataaggagctgacttttctgctattttcctgtccacaccggctcagggagcaccttgaacgcggacgcggtaatctggaatggaaaggctgctggaccaagattgatacctcctggggctgcgctcagattttcattccttcagcaaccaaggaaaaactgaggctgaaccagagtccacccccttgcgcttag

SEQ ID NO: 319422 - DNA, 459 bp, Artificial Sequence
  derived and/or modified sequence
atgggcgtgcccagaccccagccctgggccctgggcctgctgctgttcctgctgcccggcagcctgggcgccgagagccacctgagcctgctgtaccacctgaccgccgtgagcagccccgcccccggcacccccgccttctgggtgagcggctggctgggcccccagcagtacctgagctacaacagcctgagaggcgaggccgagccctgcggcgcctgggtgtgggagaaccaggtgagctggtactgggagaaggagaccaccgacctgagaatcaaggagaagctgttcctggaggccttcaaggccctgggcggcaagggcccctacaccctgcagggcctgctgggctgcgagctgggccccgacaacaccagcgtgcccaccgcctgcggcagcacctggagaggcgccgccgagacctggagcggcagaagcccccccccctgcgcctag

SEQ ID NO: 319423 - DNA, 708 bp, Artificial Sequence
  derived and/or modified sequence
atgggcgtgcccagaccccagccctgggccctgggcctgctgctgttcctgctgcccggcagcctgggcgccgagagccacctgagcctgctgtaccacctgaccgccgtgagcagccccgcccccggcacccccgccttctgggtgagcggctggctgggcccccagcagtacctgagctacaacagcctgagaggcgaggccgagccctgcggcgcctgggtgtgggagaaccaggtgagctggtactgggagaaggagaccaccgacctgagaatcaaggagaagctgttcctggaggccttcaaggccctgggcggcaagggcccctacaccctgcagggcctgctgggctgcgagctgggccccgacaacaccagcgtgcccaccgccaagttcgccctgaacggcgaggagttcatgaacttcgacctgaagcagggcacctggggcggcgactggcccgaggccctggccatcagccagagatggcagcagcaggacaaggccgccaacaaggagctgaccttcctgctgttcagctgcccccacagactgagagagcacctggagagaggcagaggcaacctggagtggaagggctgctggaccaagatcgacaccagctggggctgcgcccagatcttcatccccagcgccaccaaggagaagctgagactgaaccagagcccccccccctgcgcctag

SEQ ID NO: 319424 - protein, 434 aa, Artificial Sequence
  derived and/or modified sequence
MARDLVMFRDVAVDFSQEEWECLNSYQRNLYRDVILENYSNLVSLGCSISKPDVITLLEQGKEPWMVVRDEKRRWTLDLESRYDTKKLFQGKDIYEMNLSQWKVMERIKSCGLEEQESPHEVCFRQVTKTTSEKMPTYRKLTSLPLYQKSHNREKPYECGECGKAFRVRQQLTFHQRIHTGEKPYECKECGKAFRQCAHLSRHQRIHTSDKLYECKKCGKIFTCGSDLRLHHKLHTGEKPYECKECGKAFRVRQQLTLHQRIHTGEKPYDCKECGKTFSRGYHLTLHQRIHTGEKPYECKECQKFFRRYSELISHQGIHIGEKPYECKECGKAFRLFSQLTQHQSIHFGEKPFKCKECEKTFRLLSQLTQHQSIHTGEKPYDCKECGKAFRLHSSLIQHQRIHSGEKPYKCKECKKAFRQHSHLTYHQRIHNVT

SEQ ID NO: 319425 - DNA, 1305 bp, Artificial Sequence
  derived and/or modified sequence
atggccagagacctggtgatgttcagagacgtggccgtggacttcagccaggaggagtgggagtgcctgaacagctaccagagaaacctgtacagagacgtgatcctggagaactacagcaacctggtgagcctgggctgcagcatcagcaagcccgacgtgatcaccctgctggagcagggcaaggagccctggatggtggtgagagacgagaagagaagatggaccctggacctggagagcagatacgacaccaagaagctgttccagggcaaggacatctacgagatgaacctgagccagtggaaggtgatggagagaatcaagagctgcggcctggaggagcaggagagcccccacgaggtgtgcttcagacaggtgaccaagaccaccagcgagaagatgcccacctacagaaagctgaccagcctgcccctgtaccagaagagccacaacagagagaagccctacgagtgcggcgagtgcggcaaggccttcagagtgagacagcagctgaccttccaccagagaatccacaccggcgagaagccctacgagtgcaaggagtgcggcaaggccttcagacagtgcgcccacctgagcagacaccagagaatccacaccagcgacaagctgtacgagtgcaagaagtgcggcaagatcttcacctgcggcagcgacctgagactgcaccacaagctgcacaccggcgagaagccctacgagtgcaaggagtgcggcaaggccttcagagtgagacagcagctgaccctgcaccagagaatccacaccggcgagaagccctacgactgcaaggagtgcggcaagaccttcagcagaggctaccacctgaccctgcaccagagaatccacaccggcgagaagccctacgagtgcaaggagtgccagaagttcttcagaagatacagcgagctgatcagccaccagggcatccacatcggcgagaagccctacgagtgcaaggagtgcggcaaggccttcagactgttcagccagctgacccagcaccagagcatccacttcggcgagaagcccttcaagtgcaaggagtgcgagaagaccttcagactgctgagccagctgacccagcaccagagcatccacaccggcgagaagccctacgactgcaaggagtgcggcaaggccttcagactgcacagcagcctgatccagcaccagagaatccacagcggcgagaagccctacaagtgcaaggagtgcaagaaggccttcagacagcacagccacctgacctaccaccagagaatccacaacgtgacctag

SEQ ID NO: 319426 - DNA, 1305 bp, Artificial Sequence
  derived and/or modified sequence
atggcccgcgacctcgtgatgtttcgcgatgttgcagtcgacttctcccaggaggagtgggagtgtctcaattcttaccagcggaatctgtaccgcgatgtcatcctggagaattacagtaatctggtgagtcttggctgcagtatttctaagccagacgtaattacacttctcgagcagggcaaagaaccttggatggtggtccgggacgagaaacgacggtggaccttagacttagagagccgctatgacacaaagaaactgttccaaggaaaggacatctatgaaatgaacctgtcccagtggaaagtgatggaaaggattaagtcctgcgggctggaagagcaggaatctccacacgaagtctgttttaggcaggtcaccaaaaccacaagcgagaaaatgcccacgtaccgcaaacttacttctctgcctctgtatcagaagtcgcataatcgtgagaaaccctacgaatgcggcgaatgtgggaaagcctttcgcgtgaggcagcaactgactttccaccagaggatccataccggggagaaaccttatgagtgtaaagaatgcggaaaagctttccgccagtgcgcacacctgtcgagacaccaacggatacacacatccgataagctatatgagtgtaagaagtgtggaaagatctttacttgtggcagcgaccttaggctgcaccacaagctgcatacaggtgagaaaccatacgaatgtaaggaatgcggtaaagcctttcgggttcgacaacaactcacactgcaccagcgaatccatacaggagagaaaccttacgactgtaaagaatgcggaaagacattctccagggggtaccacctgacgctccatcagaggatccacaccggtgagaaaccctatgaatgtaaagagtgccagaagtttttcaggagatattcagagctcatcagtcaccaaggaattcatatcggggaaaagccctatgaatgtaaggagtgtggaaaggccttccgcttgttctctcagctgacccagcatcagtcaattcactttggcgagaagccgtttaaatgtaaagagtgcgagaagacgttcagattgctttctcagctgacacagcaccagagcatacacacaggggaaaaaccatatgattgtaaagagtgtggtaaggctttccgcctgcattccagccttatccagcatcagcgaatccattctggcgagaagccctacaaatgcaaggaatgcaagaaggccttccgacagcactcacatctcacctatcatcagcggatacataatgtgacttag

SEQ ID NO: 319427 - DNA, 1305 bp, Artificial Sequence
  derived and/or modified sequence
atggcccgggacctggtgatgttcagagatgtggccgtggacttcagccaggaggagtgggagtgcctgaacagctaccagaggaacctgtacagagatgtgatcctggagaactacagcaacctggtgtccctgggctgcagcatcagcaagccagatgtgatcaccctgctggagcagggcaaggagccctggatggtggtgagagatgagaagaggcgctggaccctggacctggagagccgctatgacaccaagaagctgttccagggcaaggacatctatgagatgaacctgagccagtggaaggtgatggagcgcatcaagagctgtggcctggaggagcaggagagcccccatgaggtgtgcttccggcaggtgaccaagaccaccagcgagaagatgcccacctacaggaagctgaccagcctgcccctgtaccagaagagccacaaccgggagaagccctatgaatgtggagaatgtgggaaggccttccgggtgcggcagcagctgaccttccaccagaggatccacactggagagaagccctatgagtgcaaggaatgtgggaaggccttccggcagtgtgcccacctgagccgccaccagaggatccacaccagtgacaagctgtatgagtgcaagaagtgtgggaagatcttcacctgtggcagtgacctgcggctgcaccacaagctgcacactggagagaagccctatgagtgcaaggaatgtgggaaggccttccgggtgcggcagcagctgaccctgcaccagaggatccacactggagagaagccctatgactgcaaggaatgtgggaagaccttcagccggggctaccacctgaccctgcaccagaggatccacactggagagaagccctatgagtgcaaggagtgccagaagttcttccgccgctacagcgagctgatcagccaccagggcatccacatcggggagaagccctatgagtgcaaggaatgtgggaaggccttccgcctcttcagccagctgacccagcaccagagcatccactttggagagaagcccttcaagtgcaaggaatgtgagaagaccttccggctgctgagccagctgacccagcaccagagcatccacactggagagaagccctatgactgcaaggaatgtgggaaggccttccggctgcacagcagcctcatccagcaccagaggatccacagcggggagaagccctacaagtgcaaggagtgcaagaaggccttccggcagcacagccacctgacctaccaccagaggatccacaacgtgacctag

SEQ ID NO: 319428 - DNA, 1305 bp, Artificial Sequence
  derived and/or modified sequence
atggcccgggacctggtgatgttccgggacgtggccgtggacttcagtcaggaagagtgggagtgtttgaacagctaccagcgaaacctgtaccgggatgtgattctcgagaactattccaacctcgtttccctcggctgttctatatccaagccagacgtcataaccttattggagcaggggaaagagccttggatggtggtaagagacgaaaaacgtaggtggacactggaccttgagagtaggtatgacactaagaagctcttccagggcaaggatatctatgagatgaacctttctcagtggaaggtgatggagagaatcaagagttgcggacttgaagaacaggaaagtcctcatgaagtctgcttcagacaagtcacaaagaccacttcggaaaagatgccgacttaccgaaagctaactagtttgcccctatatcaaaaatcccacaacagagagaaaccctacgagtgcggggagtgcggtaaggcttttagggttaggcagcagctcacattccaccagcgtatacatactggagaaaaaccatatgagtgcaaggaatgcggtaaagcattccgccagtgtgctcatctgtcccggcatcagcgcattcatacctctgacaaattatatgagtgcaagaagtgtggcaaaattttcacatgcggttctgatttacggctgcaccacaagctgcataccggggagaagccgtacgaatgtaaggagtgcggcaaggcgttccgcgtccgtcagcagttaacactgcaccaacgaatccataccggtgagaagccctacgattgcaaggaatgcggcaagacgttttcacggggataccatttgaccttacaccagagaatccacacaggcgagaagccatatgagtgtaaggagtgccaaaaattcttccggcggtacagcgaactcatttcacaccaggggattcacatcggggaaaaaccatacgagtgcaaagaatgcggcaaggccttcagattatttagccagctgacgcaacatcaaagcatccacttcggcgaaaagccattcaagtgtaaggagtgcgaaaagacctttagattgctgtctcagctgacccagcaccagtctatccatacaggcgagaaaccttatgattgcaaggaatgcggcaaggcttttcggctccattcttccctgatccaacaccaacgcatccactccggtgaaaaaccttataagtgcaaggaatgcaagaaggcgtttcgccagcacagtcatcttacgtaccatcaacggatacacaacgttacctag

SEQ ID NO: 319429 - DNA, 1305 bp, Artificial Sequence
  derived and/or modified sequence
atggcaagagacctcgtcatgtttagagatgttgccgtcgacttttctcaggaagagtgggagtgcctcaatagctaccaaaggaacctttatagagacgtgattctcgagaattactcgaacctagtgagtttgggctgcagtatcagcaaaccagatgtcattaccctgttggagcagggcaaggagccttggatggtggtacgggatgaaaagaggcggtggacgttagatctggagtcgcgctatgacaccaagaagctgtttcaagggaaggatatttacgaaatgaacttgtcacagtggaaagtgatggagcggatcaagtcatgcggactggaagagcaggaatctccacatgaggtgtgctttagacaggtcactaagacaaccagtgagaaaatgccaacctacaggaagttgacttcacttccactgtatcaaaagtctcacaatcgcgagaagccctatgagtgtggcgaatgcggcaaggcattcagggtgcggcagcagctcacgttccatcagcggatccacactggcgagaagccatacgagtgtaaggaatgtggaaaagctttccggcagtgcgcgcacctgtcaaggcaccagcgaatacacactagtgataaactctatgagtgcaagaaatgcggcaaaattttcacgtgtggctccgaccttcggctacaccacaagctccacaccggagaaaaaccctatgagtgtaaggagtgcgggaaagcctttagggttcgccaacagttgactctacaccaaaggattcataccggcgaaaaaccgtacgattgcaaagaatgcggaaagacttttagtaggggctaccacctgacactgcatcaacgaatccacactggtgagaaaccttacgaatgcaaagagtgtcaaaagttcttccggagatacagtgagctgatctcacatcagggtatccatattggagagaagccgtacgagtgtaaggagtgcggcaaagctttcaggctgttttcccagttaacacaacatcagagcatacactttggagaaaagccatttaagtgcaaggaatgcgagaagaccttccggttgctctcgcagctgacccagcaccagagtatccataccggcgaaaagccttacgattgtaaagaatgcggaaaggccttccgcctgcatagttctttaattcagcaccagcgcattcactcgggagaaaaaccctataaatgcaaagagtgcaaaaaagcgtttcgccaacatagccatctgacataccatcaacgaattcacaatgtgacctag

SEQ ID NO: 319430 - DNA, 1832 bp, Artificial Sequence
  derived and/or modified sequence
gtattctggcgccgctgactcccagggctgggctatcctctgagtcggccctgccagtttccagagaaggcgcttgagaaggagaaacgaatcgctgctgctcttctaaaagccggttccctctctggtgtctgtggaccctgcttctgaagtacatgaaccttgaggaaaattgaccagttctagcagttctaaaatcatggctcgtgatttggtgatgttcagagatgtggctgtagacttttctcaggaagaatgggaatgcctgaactcatatcagaggaatttgtacagagatgtgatattagagaactatagcaacttggtgtcactgggatgttctatttctaagccagatgtgatcaccctattggaacaagggaaagagccctggatggttgtgagggatgagaaaagaagatggactctagatttggaatccagatatgacactaaaaagttatttcaaggaaaggatatttatgaaatgaacttatctcagtggaaggtaatggaaagaattaaaagctgtggacttgaagaacaagaaagtcctcatgaggtgtgtttcaggcaagtgacaaaaaccacctctgaaaaaatgcctacttacagaaaactcacatctcttcctctgtatcagaaaagtcataacagagagaaaccctacgaatgtggggaatgtgggaaggcttttagagtacgacaacaacttactttccatcaaagaattcatactggtgagaaaccctatgaatgtaaagaatgtggaaaagcctttagacagtgtgcccacctcagtcgacatcagagaattcatacttctgacaaactctatgaatgtaaaaaatgtggaaagatcttcacatgtggctcagaccttcgactacatcacaaacttcatactggagaaaaaccctatgaatgtaaggagtgtggaaaggcctttagagtgcggcagcaacttactctccatcagagaattcacactggtgagaagccttatgattgtaaggaatgtgggaagactttcagtcgtggctatcatctaactctccatcagagaatacatactggtgaaaagccctatgaatgtaaggaatgtcagaagttctttcgtcgttactcagaacttatttcacatcagggtattcacattggagagaaaccttatgaatgtaaggaatgtgggaaggcatttaggctgttctcacagcttactcaacatcagagtattcattttggtgagaaaccctttaagtgtaaggaatgtgagaagacttttagactgctttcacaacttacccaacatcaaagtattcatactggtgaaaagccctatgactgtaaggaatgtggaaaggcctttagacttcattcatcactgattcaacatcagagaattcattctggtgagaaaccatacaaatgtaaggaatgtaaaaaggcatttagacaacattcacatcttacttaccatcagcgaattcataatgtaacttaataattattagaactcttcctttgcgaattttatgttgagcataggaagtacattctagaggaaaggtttttgaacgtgggaatcccttttgcttcatgctcacaactaagcataggaagttttatttaaaggaaagaatatgttaatgaacatatagaagcctttcatcacctttgaaaccatgttaaactttaggaaattcatcctagaaaagaactttattacaggactgaatgtggaaaagcttttgatcttacctattattatctccatattcttccatctgtgtatatacacacgaaggttgctagggaaccacttcattctg

SEQ ID NO: 319431 - DNA, 108 bp, Artificial Sequence
  derived and/or modified sequence
atagtgctgcttttatttatttgctttctctccaaactgaactttactgtgttggagaagttccctaaatctactttcctctgcaaaatccagcacgagagcctatag

SEQ ID NO: 319432 - DNA, 1890 bp, Artificial Sequence
  derived and/or modified sequence
acagagcagcctggcagtgtccaagcaacaagcctccgctcctccttcctgcaccctggggctcctgaaactcacatgggtaaaaaagatacagtaaagacataaataccacatttgacaaatggaaaaaaaggagtgtccagaaaagagtagcagcagtgaggaagagctgccgagacgggtatacagggagctaccctgtgtttctgagaccctttgtgacatctcacattttttccaagaagatgatgagacagaggcagagccattattgttccgtgctgttcctgagtgtcaactatctgggggggacattcccaggagacatttgctcagaagagaatcaaatagtttcctcttatgcttctaaagtctgttttgagatcgaagaagattataaaaatcgtcagtttctggggcctgaaggaaatgtggatgttgagttgattgataagagcacaaacagatacagcgtttggttccccactgctggctggtatctgtggtcagccacaggcctcggcttcctggtaagggatgaggtcacagtgacgattgcgtttggttcctggagtcagcacctggccctggacctgcagcaccatgaacagtggctggtgggcggccccttgtttgatgtcactgcagagccagaggaggctgtcgccgaaatccacctcccccacttcatctccctccaagcaggtgaggtggacgtctcctggtttctcgttgcccattttaagaatgaagggatggtcctggagcatccagcccgggtggagcctttctatgctgtcctggaaagccccagcttctctctgatgggcatcctgctgcggatcgccagtgggactcgcctctccatccccatcacttccaacacattgatctattatcacccccaccccgaagatattaagttccacttgtaccttgtccccagcgacgccttgctaacaaaggcgatagatgatgaggaagatcgcttccatggtgtgcgcctgcagacttcgcccccaatggaacccctgaactttggttccagttatattgtgtctaattctgctaacctgaaagtaatgcccaaggagttgaaattgtcctacaggagccctggagaaattcagcacttctcaaaattctatgctgggcagatgaaggaacccattcaacttgagattactgaaaaaagacatgggactttggtgtgggatactgaggtgaagccagtggatctccagcttgtagctgcatcagcccctcctcctttctcagggttactgtggcaacgccaacctttgaatccccctcctgcgcgctgagcggctcgtaaccatggagaccgaagcaggtttcccgcgtccgcctcctcacccagagactgcagccccggcgcccagaccctttggacaaggagatccaagcgggccccacaatgctcagcgggtaaagagctcctccccactcctctcccgccagcagacgaaggaaacaccccgcagcctgcacatgctcagatggagctctgggcccgcgggttctactgcgcaggccctcacactcagcaaagggacttggacgcgaaagcgctggtggcgctcagccggctgggagttgtagctttctggctgctacagcaggagatacaggtggccaatgggtgagctggctggaggtaggaacaaggttaaggaagctgggatcttcgtgcagactggatcgtcactatagcaacaatgaaacatcgggaagggctagttctgctaggcagtctgccattttcattctttcatctttttttttaactcaaagcttactttgcaacaggcactgttctaggcactggggatacaatggaaaacaaaatagagcttctattttggcggg

SEQ ID NO: 319433 - DNA, 5215 bp, Artificial Sequence
  derived and/or modified sequence
ctagttctcaacttcttttgaaataatgttcatagagaaggagggctgtctgagattcgagggaaacaagctctcaggacttccggtcgccatgatggctgtgggcggtaaacgcggttagtgcaagcatctgggccatcttcaatggtaaaaaagatacagtaaagacataaataccacatttgacaaatggaaaaaaaggagtgtccagaaaagagtagcagcagtgaggaagagctgccgagacgggtatacagggagctaccctgtgtttctgagaccctttgtgacatctcacattttttccaagaagatgatgagacagaggcagagccattattgttccgtgctgttcctgagtgtcaactatctgggggggacattcccaggagacatttgctcagaagagaatcaaatagtttcctcttatgcttctaaagtctgttttgagatcgaagaagattataaaaatcgtcagtttctggggcctgaaggaaatgtggatgttgagttgattgataagagcacaaacagatacagcgtttggttccccactgctggctggtatctgtggtcagccacaggcctcggcttcctggtaagggatgaggtcacagtgacgattgcgtttggttcctggagtcagcacctggccctggacctgcagcaccatgaacagtggctggtgggcggccccttgtttgatgtcactgcagagccagaggaggctgtcgccgaaatccacctcccccacttcatctccctccaaggtgaggtggacgtctcctggtttctcgttgcccattttaagaatgaagggatggtcctggagcatccagcccgggtggagcctttctatgctgtcctggaaagccccagcttctctctgatgggcatcctgctgcggatcgccagtgggactcgcctctccatccccatcacttccaacacattgatctattatcacccccaccccgaagatattaagttccacttgtaccttgtccccagcgacgccttgctaacaaaggcgatagatgatgaggaagatcgcttccatggtgtgcgcctgcagacttcgcccccaatggaacccctgaactttggttccagttatattgtgtctaattctgctaacctgaaagtaatgcccaaggagttgaaattgtcctacaggagccctggagaaattcagcacttctcaaaattctatgctgggcagatgaaggaacccattcaacttgagattactgaaaaaagacatgggactttggtgtgggatactgaggtgaagccagtggatctccagcttgtagctgcatcagcccctcctcctttctcaggtgcagcctttgtgaaggagaaccaccggcaactccaagccaggatgggggacctgaaaggggtgctcgatgatctccaagacaatgaggttcttactgagaatgagaaggagctggtggagcaggaaaagacacggcagagcaagaatgaggccttgctgagcatggtggagaagaaaggggacctggccctggacgtgctcttcagaagcattagtgaaagggacccttacctcgtgtcctatcttagacagcagaatttgtaaaatgagtcagttaggtagtctggaagagagaatccagcgttctcattggaaatggataaacagaaatgtgatcattgatttcagtgttcaagacagaagaagactgggtaacatctatcacacaggctttcaggacagacttgtaacctggcatgtacctattgactgtatcctcatgcattttcctcaagaatgtctgaagaaggtagtaatattccttttaaattttttccaaccattgcttgatatatcactattttatccattgacatgattcttgaagacccaggataaaggacatccggataggtgtgtttatgaaggatggggcctggaaaggcaacttttcctgattaatgtgaaaaataattcctatggacactccgtttgaagtatcaccttctcataactaaaagcagaaaagctaacaaaagcttctcagctgaggacactcaaggcatacatgatgacagtcttttttttttttgtatgttaggactttaacactttatctatggctactgttattagaacaatgtaaatgtatttgctgaaagagagcacaaaaatgggagaaaatgcaaacatgagcagaaaatattttcccactggtgtgtagcctgctacaaggagttgttgggttaaatgttcatggtcaactccaaggaatactgagatgaaatgtggtaaatcaactccacagaaccaccaaaaagaaaatgagggtaattcagcttattctgagacagacattcctggcaatgtaccatacaaaaaataagccaactctgacatttggattctaccatagactctgtcattttgtagccatttcagctgtcttttgattaatgttttcgtggcacacatatttccatccttttatgtttaatctgtttaaaacaagttcctagtagacaccatctggttgagtcagttttttttatggtgtattttgaacccattctgatagtctcttttaactggaagatttcaattacttacgttaatgtaattattaatatgttaggatttatcctcagtcagccagtttgttatgtcttttctattctactgttatcacatttgtaccacttaaagtggaatctaggcactttatcaccatttagatcctattaccttttctcatctaggatatagttatcttctacataatctttctgtatcttaaaacccatcaataaattattatatattttctacttttaatcactcagaagatttaaaaaactcatgagaagagtaatctgttatgtttttccagatatttaccatttctgttgctcttccttcattattttccaaatttcgttctgcaaatttccacttcctctgatagacgttttttagttcttttagagtggttctgataggtacagattctcttattttttgcttcctctgaggacatctttttctcaccttcattctcagtgatgttttttgcttgtagtatttttagttgacattgttttctgttcagcagtttccttttagcttccgtatttcctgatgagaaatctgcagtcattcaaattgttgtttccctgtatgtagtgtgtcatttttctgtcagatttcaaggtatttatctttagtttttagccatttcattatgttggggatgagtttccttgttttattccctttggaatttgctccaattcataaatttgcagttttatgtcttttaccaaacttagaggttttcagcctaatttctaaaaatactttttattagcctgattttcatctttataggaaatagtttaagtgatgacaagttccaatagcttatatgcccagaaggccttcaaaataagaattttgaaagaatacagaaaacaaacttttatatccttctcatgtcttctactgtaaaattcatatgctttgctactctaaacctagtttgaaatcaacagtcttgagaatagatgaaaattttgatgaatagtggaattcttttaaatggaaacctcttacatgtgattttccttgccatctagaaataaaccatagtatttatgttgaatcaatcaatattatattttgtttttttcctcctcttctgagactcttattgtggaaatgttagacttttatgttttcctaaatgtccctgatattctacttatttagaacatcttttcattttttccattattctgattgggtaattttaatttgtctattttcaaatttgctggagtgttcacctgttgttatctgtgtcgtcccactgagtgcattcaccaccttttaaattttggtcactgtatgtatcagttctaaaatttccattttgttctctatattttaaatttcttgccttatattctattttcctgcaaatgtgtcagcatttgcttgtttgagctttttttttttcaagacagggtctcaactctgttacccaggctggagtgcagtggtgcgatctcagctcactgcaacctctgcctcctggttcaagcgattattgtgcctcagcctccagagtagctgggattacaggcatgcaccaccacagcccagctaattttttgtatttttagtagagacagagttttgctatgttggccaggctggttttgaactcctggcctcaagtgatccacccacctcagcctcccaaagtgctgggattacaggccactacacctggcacatttgagtatttttttttttttttttttttttttgagatggagtctcgctctgtcatctaggctggagtgcagtggtgtgatctcagctcactgcagcctctgtctcccgggctcaagcgattctcttgcctcagcctcctgagtagctaggactacaggtgcatgccaacacgcccggctaatttttttttaaaaatatttttagtagagacagggtttcaccattttggccaggatggtcttgatctcctgacctcatgatccacccgcctcggccttccaaagtgctgggattacaggcatgagccaccgtgcctggcctcatttgagtatttttataatgtctcttttaaagtctttgtcagataatttcactgtacatgttattcagtgtttggtgtccactgagttgtcatttgccagacaagtggagatttttgcagctcatccttgtattctcagtagttccgatatgtaccctcgaaatgtgaatgttatcttatgagactctgttttatttgtatccaacagaagatgtttattatttatttggctttctgtgaactgaggtcttaatatcagctcattttaaaagtctttgcagtggtattcggatctatcctgtgtgtgcctatgagattgggtgcagtgtatcctgttagctccattctcagggcgtttgaatgtgaattaggaccagcgcaatgaatgctcaagttggggttgggcgttagaattcataaaagtctttatatgctcagattctgcagctccatcctcttcatgattgtgatcgtaaggacagtggaattttgcagttgtctataccttatcttgaagtagaactaaattgttacatttgaagaatgtacttcataaatttacaaaaataaaaaaataggttaatgttatt

SEQ ID NO: 319434 - protein, 189 aa, Artificial Sequence
  derived and/or modified sequence
MVLEHPARVEPFYAVLESPSFSLMGILLRIASGTRLSIPITSNTLIYYHPHPEDIKFHLYLVPSDALLTKAIDDEEDRFHGVRLQTSPPMEPLNFGSSYIVSNSANLKVMPKELKLSYRSPGEIQHFSKFYAGQMKEPIQLEITEKRHGTLVWDTEVKPVDLQLVAASAPPPFSGLLWQRQPLNPPPAR

SEQ ID NO: 319435 - DNA, 570 bp, Artificial Sequence
  derived and/or modified sequence
atggtgctggagcaccctgcccgagtggaaccattttacgcggtgctcgagtcacccagctttagtctgatgggtatcctactcagaatcgcctctggcacccgactgagcatccctatcacttctaatactttgatctactatcatccacacccagaagatatcaagttccacttgtatcttgtgccaagcgacgccctgctgaccaaggcaattgatgatgaggaggaccggttccatggggtgcggctccagacgagtcctccaatggaacctttgaacttcgggagttcctacattgtgagcaactctgccaacctgaaggtgatgccgaaggagttgaagctgtcctatagatcccccggcgagatacaacatttctcgaaattttacgccggccagatgaaagagcccatccaacttgaaatcacagagaagagacatggcacccttgtatgggacactgaagtgaagccagtcgacctgcagttagtcgccgcatccgcccctccacccttttcgggcctgctctggcagcgccagccccttaatcccccacctgcccggtag

SEQ ID NO: 319436 - DNA, 570 bp, Artificial Sequence
  derived and/or modified sequence
atggtgctggagcacccagcccgggtggagcccttctatgctgtgctggagagccccagcttcagcctgatgggcatcctgctgcgcatcgccagcggcacccggctgagcatccccatcaccagcaacaccctcatctactaccacccccaccctgaggacatcaagttccacctgtacctggtgcccagtgatgccctgctgaccaaggccattgatgatgaggaggaccgcttccacggcgtgcggctgcagaccagcccccccatggagcccctgaactttggcagcagctacatcgtgagcaacagcgccaacctgaaggtgatgcccaaggagctgaagctgagctaccgcagccctggagagatccagcacttcagcaagttctacgccggccagatgaaggagcccatccagctggagatcacagagaagagacatggcaccctggtgtgggacacagaggtgaagcctgtggacctgcagctggtggccgccagcgcccccccacccttcagcggcctgctgtggcagaggcagcccctgaaccccccaccagccaggtag

SEQ ID NO: 319437 - DNA, 570 bp, Artificial Sequence
  derived and/or modified sequence
atggtgctggagcaccccgcccgggtggagcccttctacgccgtgttggagagtccaagcttttcactgatgggaattctgctgaggatagcttcaggtacccgcctgagcatcccaataaccagcaacacactcatttattaccacccacacccagaggacattaagttccacttgtacctggtcccctccgacgctctcttgactaaggccattgatgacgaggaggatcggttccacggcgtccgcctgcagacgtcccctccaatggagccactgaactttggaagtagttacattgtttctaattctgcaaatttgaaggtgatgccaaaggaactgaaactttcctatcgaagtcccggtgagatccagcatttctccaaattttacgccgggcagatgaaggaaccaatccagctcgagattacagagaagaggcacggaaccctggtgtgggatacggaggtgaagccagtggacttgcagttagtggctgcatctgcaccaccaccgttcagcggactcctgtggcaacgacagccgctgaaccccccacctgcaaggtag

SEQ ID NO: 319438 - DNA, 570 bp, Artificial Sequence
  derived and/or modified sequence
atggtacttgaacatcctgcacgagtcgaaccattttatgccgtgttagagtcaccttccttctctcttatgggtattctgcttcgcatcgcatccggtacaaggctcagcattcctattacttctaatactctgatctattatcatccccatcctgaggacatcaagttccatctttatcttgtaccctcagacgccctcctgaccaaggcaatcgatgacgaagaggatcggtttcacggagtgaggcttcagacaagtcccccaatggagcccctgaattttggcagctcttacattgtgagcaacagtgccaatttaaaggtgatgcccaaggagctgaagttaagttaccgctcacccggtgagatacagcacttcagtaagttctatgcaggacaaatgaaggagcctatacagctggagattacggagaaacggcatggtaccttagtgtgggacacagaggtgaagcccgtggatttgcagcttgtggccgcatcagcccctcccccattttccggcctgctgtggcagcggcaacctctaaatccaccgcctgccagatag

SEQ ID NO: 319439 - DNA, 570 bp, Artificial Sequence
  derived and/or modified sequence
atggtgctggagcaccccgccagagtggagcccttctacgccgtgctggagagccccagcttcagcctgatgggcatcctgctgagaatcgccagcggcaccagactgagcatccccatcaccagcaacaccctgatctactaccacccccaccccgaggacatcaagttccacctgtacctggtgcccagcgacgccctgctgaccaaggccatcgacgacgaggaggacagattccacggcgtgagactgcagaccagcccccccatggagcccctgaacttcggcagcagctacatcgtgagcaacagcgccaacctgaaggtgatgcccaaggagctgaagctgagctacagaagccccggcgagatccagcacttcagcaagttctacgccggccagatgaaggagcccatccagctggagatcaccgagaagagacacggcaccctggtgtgggacaccgaggtgaagcccgtggacctgcagctggtggccgccagcgcccccccccccttcagcggcctgctgtggcagagacagcccctgaaccccccccccgccagatag

SEQ ID NO: 319440 - DNA, 1059 bp, Artificial Sequence
  derived and/or modified sequence
atggacttcctgagaaacctgttcagccagaccctgagcctgggcagccagaaggagagactgctggacgagctgaccctggagggcgtggccagatacatgcagagcgagagatgcagaagagtgatctgcctggtgggcgccggcatcagcaccagcgccggcatccccgacttcagaagccccagcaccggcctgtacgacaacctggagaagtaccacctgccctaccccgaggccatcttcgagatcagctacttcaagaagcaccccgagcccttcttcgccctggccaaggagctgtaccccggccagttcaagcccaccatctgccactacttcatgagactgctgaaggacaagggcctgctgctgagatgctacacccagaacatcgacaccctggagagaatcgccggcctggagcaggaggacctggtggaggcccacggcaccttctacaccagccactgcgtgagcgccagctgcagacacgagtaccccctgagctggatgaaggagaagatcttcagcgaggtgacccccaagtgcgaggactgccagagcctggtgaagcccgacatcgtgttcttcggcgagagcctgcccgccagattcttcagctgcatgcagagcgacttcctgaaggtggacctgctgctggtgatgggcaccagcctgcaggtgcagcccttcgccagcctgatcagcaaggcccccctgagcacccccagactgctgatcaacaaggagaaggccggccagagcgaccccttcctgggcatgatcatgggcctgggcggcggcatggacttcgacagcaagaaggcctacagagacgtggcctggctgggcgagtgcgaccagggctgcctggccctggccgagctgctgggctggaagaaggagctggaggacctggtgagaagagagcacgccagcatcgacgcccagagcggcgccggcgtgcccaaccccagcaccagcgccagccccaagaagagccccccccccgccaaggacgaggccagaaccaccgagagagagaagccccagtag

SEQ ID NO: 319441 - DNA, 1059 bp, Artificial Sequence
  derived and/or modified sequence
atggatttcctgcgcaatctgttctctcaaaccttgtctctcggaagccagaaagaacgccttctggacgaactcactctggagggtgtggcacggtatatgcaaagtgaacggtgccgccgggtgatctgcctggtgggggcaggaatctcaacctccgctggcatccctgattttcggtcgccctcaaccggactgtacgacaatttggagaagtaccacctgccctacccggaagccatcttcgagatctcttattttaaaaaacaccccgagccgttttttgccctagcaaaggaactttaccccggtcagttcaaacctaccatttgtcattattttatgcggctcctgaaagataagggtctcctgctgcgctgctatacccaaaacatcgacaccttggaacggattgcaggtctcgaacaggaagacctggttgaggcccacggtacattctatacctcccactgcgtttccgcgagttgcaggcacgaataccctctgagctggatgaaggagaagatctttagcgaagtgacccctaagtgtgaggactgccagtctctagtgaaacctgacatcgttttctttggggagagtctgcccgcaaggtttttcagctgcatgcagagcgatttcttaaaggttgacctacttctggtgatgggtacttctctccaggttcagccatttgccagcctgatctctaaagctcccctttctaccccaaggctgcttattaacaaagagaaagcaggacagagtgacccttttctgggaatgatcatgggcctggggggaggcatggatttcgactccaaaaaggcgtaccgcgacgtggcttggcttggagagtgtgaccagggttgcttggctttggctgagttgctgggatggaaaaaagaattggaagacctcgttaggcgggagcacgcttctatcgatgctcagagtggggctggcgtgccgaacccctctactagcgctagccctaaaaaaagtcctccccctgctaaagacgaagcaagaacgaccgaacgggagaaacctcagtag

SEQ ID NO: 319442 - DNA, 1059 bp, Artificial Sequence
  derived and/or modified sequence
atggacttcctgaggaacctcttcagccagaccctgagcctgggcagccagaaggagcggctgctggatgagctgaccctggagggcgtggcccgctacatgcagagcgagcgctgccggcgggtcatctgcctggtgggcgccggcatcagcaccagcgctggcatcccagacttccgcagccccagcacaggcctgtatgacaacctggagaagtaccacctgccctacccagaggccatctttgagatctcctacttcaagaagcaccctgagcccttctttgccctggccaaggagctgtacccaggccagttcaagcccaccatctgccactacttcatgaggctgctgaaggacaagggcctgctgctgcgctgctacacccagaacatcgacaccctggagagaattgctggcctggagcaggaggacctggtggaggcccacggcaccttctacaccagccactgtgtgtctgccagctgcagacatgagtaccccctgtcctggatgaaggagaagatcttcagcgaggtgacccccaagtgtgaggactgccagagcctggtgaagccagacatcgtgttcttcggggagagcctgcctgcccgcttcttcagctgcatgcagagcgacttcctgaaggtggacctgctgctggtgatgggcaccagcctgcaggtgcagccctttgccagcctcatcagcaaggcccccctgagcaccccccggctgctgatcaacaaggagaaggccggccagagcgaccccttcctgggcatgatcatgggcctgggcggcggcatggactttgacagcaagaaggcctacagagatgtggcctggctgggggagtgtgaccagggctgcctggccctggccgagctgctgggctggaagaaggagctggaggacctggtgagaagagagcacgccagcattgatgcccagagcggggccggcgtgcccaaccccagcaccagcgccagccccaagaagagccccccaccagccaaggatgaggcccggaccacagagcgggagaagccccagtag

SEQ ID NO: 319443 - DNA, 1059 bp, Artificial Sequence
  derived and/or modified sequence
atggacttcctgcggaacctgttcagccagaccctgagcctgggctcgcagaaggagcgtttactcgacgaactgacgctggagggcgtcgctaggtacatgcagtctgaacgatgtcgtcgtgtgatctgcctcgtgggtgctggcatatctacatctgctgggattcccgactttcgaagtccctcaaccggtttatatgataacctcgaaaagtaccatctcccctatccagaggccatcttcgaaattagttactttaaaaaacatccggaaccattctttgcgctggccaaagagctgtatcctggtcagttcaaaccaaccatttgccattactttatgagactactgaaggataaagggctgttgctgagatgctatacacaaaatattgacaccctcgagagaatcgccgggctggagcaggaagacctggtggaggcacacgggactttctacactagccactgcgtgagcgcaagctgcagacatgaataccctttaagctggatgaaggaaaagatcttttcagaggtaacacctaagtgcgaggactgccagtccctggtaaagccggacattgtctttttcggggaatccttgccagcccggttcttctcctgcatgcagagtgattttctgaaagtagaccttctgctcgttatgggaacttccttgcaggttcagccctttgccagcctaatctccaaagcccctctgtcaaccccacgcctgctgataaacaaggagaaagcgggtcagtcggaccctttcctcggcatgatcatggggcttggcggtgggatggatttcgattccaagaaagcctatagggacgtcgcgtggttgggcgaatgcgaccagggctgcttagccctcgccgaactcctcgggtggaaaaaagagctggaggatctagtaaggcgggaacacgcatctattgatgcccagtcgggcgcaggggtgcctaacccgtctacgtctgcatcccctaagaagtccccccctcccgcaaaagacgaagctagaaccacagaaagggagaagccacagtag

SEQ ID NO: 319444 - DNA, 1059 bp, Artificial Sequence
  derived and/or modified sequence
atggattttttgagaaacctcttctcccagactttatctctcggcagccagaaagaacgactgctggacgagctcactctggagggagtcgctcgctatatgcagtccgaacggtgcaggcgtgtcatctgcctggtgggggctgggattagcacctcagctggcatacctgattttaggagtccgtccacgggactttatgataacctggagaaataccatctaccctacccagaggctatctttgaaataagctactttaaaaaacatcccgagccttttttcgctctcgcaaaagaactgtaccctgggcagttcaagccaaccatttgtcattatttcatgcggttactcaaagataagggactcctattgcggtgctacacacagaacattgacaccttggaaagaattgctggcctcgagcaggaagacttggtggaggcccacggaacattttataccagtcactgcgtgtctgcaagttgtcgtcatgagtacccattgagttggatgaaggaaaagatcttcagcgaagttacccctaagtgcgaagactgtcaatctctcgtcaaacctgatatcgtgttctttggggagagtctgcccgcacgatttttctcatgtatgcagagcgacttcctgaaagttgaccttctactcgtcatgggcacctcactccaggtgcagccatttgcctccctgatcagcaaggcgcctctgagcactcctagactgttgatcaataaggagaaagcagggcaatccgacccattcctgggcatgatcatgggactgggaggtgggatggactttgacagcaagaaggcctaccgggacgtcgcttggctgggagaatgtgaccaaggttgcctagcattagcagagctgctggggtggaagaaagaactagaggatttggtgcggcgagagcatgccagcatagacgcccagagtggggcaggtgtcccgaacccttccacttctgcgtccccgaagaagagcccaccccctgccaaggatgaagccagaaccactgaacgcgagaagccacagtag

SEQ ID NO: 319445 - DNA, 2062 bp, Artificial Sequence
  derived and/or modified sequence
agagtattcgggaggactacaactctctagccgttcccacattttccgggcgccctttaccaacatggctgctgacgccacgccttctgggactcgtagtccggtcctcgcgcgctttcttacctaactggggcgctctgggtgttgtacgaaagcgcgtctgcggccgcaatgtctgctgagagttgtagttctgtgccctatcacggccactcccatttctggtgccgtcacgggacagagcagtcggtgacaggacagagcagtcggtgacgggacacagtggttggtgacgggacagagcggtcggtgacagcctcaagggcttcagcaccgcgcccatggcagagccagaccgactcagattcagactctgagggaggagccgctggtggagaagcagacatggacttcctgcggaacttattctcccagacgctcagcctgggcagccagaaggagcgtctgctggacgagctgaccttggaaggggtggcccggtacatgcagagcgaacgctgtcgcagagtcatctgtttggtgggagctggaatctccacatccgcaggcatccccgactttcgctctccatccaccggcctctatgacaacctagagaagtaccatcttccctacccagaggccatctttgagatcagctatttcaagaaacatccggaacccttcttcgccctcgccaaggaactctatcctgggcagttcaagccaaccatctgtcactacttcatgcgcctgctgaaggacaaggggctactcctgcgctgctacacgcagaacatagataccctggagcgaatagccgggctggaacaggaggacttggtggaggcgcacggcaccttctacacatcacactgcgtcagcgccagctgccggcacgaatacccgctaagctggatgaaagagaagatcttctctgaggtgacgcccaagtgtgaagactgtcagagcctggtgaagcctgatatcgtcttttttggtgagagcctcccagcgcgtttcttctcctgtatgcagtcagacttcctgaaggtggacctcctcctggtcatgggtacctccttgcaggtgcagccctttgcctccctcatcagcaaggcacccctctccacccctcgcctgctcatcaacaaggagaaagctggccagtcggaccctttcctggggatgattatgggcctcggaggaggcatggactttgactccaagaaggcctacagggacgtggcctggctgggtgaatgcgaccagggctgcctggcccttgctgagctccttggatggaagaaggagctggaggaccttgtccggagggagcacgccagcatagatgcccagtcgggggcgggggtccccaaccccagcacttcagcttcccccaagaagtccccgccacctgccaaggacgaggccaggacaacagagagggagaaaccccagtgacagctgcatctcccaggcgggatgccgagctcctcagggacagctgagccccaaccgggcctggccccctcttaaccagcagttcttgtctggggagctcagaacatcccccaatctcttacagctccctccccaaaactggggtcccagcaaccctggcccccaaccccagcaaatctctaacacctcctagaggccaaggcttaaacaggcatctctaccagccccactgtctctaaccactcctgggctaaggagtaacctccctcatctctaactgcccccacggggccagggctaccccagaacttttaactcttccaggacagggagcttcgggcccccactctgtctcctgcccccgggggcctgtggctaagtaaaccatacctaacctaccccagtgtgggtgtgggcctctgaatataacccacacccagcgtagggggagtctgagccgggagggctcccgagtctctgccttcagctcccaaagtgggtggtgggcccccttcacgtgggacccacttcccatgctggatgggcagaagacattgcttattggagacaaattaaaaacaaaaacaactaacaatcc

SEQ ID NO: 319446 - protein, 271 aa, Artificial Sequence
  derived and/or modified sequence
MAEPDPSHPLETQAGKVQEAQDSDSDSEGGAAGGEADMDFLRNLFSQTLSLGSQKERLLDELTLEGVARYMQSERCRRVICLVGAGISTSAGIPDFRSPSTGLYDNLEKYHLPYPEAIFEISYFKKHPEPFFALAKELYPGQFKPTICHYFMRLLKDKGLLLRCYTQNIDTLERIAGLEQEDLVEAHGTFYTSHCVSASCRHEYPLSWMKEKIFSEVTPKCEDCQSLVKPDIVFFGESLPARFFSCMQSDFLKVDLLLVMGTSLQGRGLAG

SEQ ID NO: 319447 - protein, 78 aa, Artificial Sequence
  derived and/or modified sequence
MDFLRNLFSQTLSLGSQKERLLDELTLEGVARYMQSERCRRVICLVGAGISTSAGIPDFRSPSTGLYDNLEKYHLPYP

SEQ ID NO: 319448 - DNA, 816 bp, Artificial Sequence
  derived and/or modified sequence
atggccgagcccgaccccagccaccccctggagacccaggccggcaaggtgcaggaggcccaggacagcgacagcgacagcgagggcggcgccgccggcggcgaggccgacatggacttcctgagaaacctgttcagccagaccctgagcctgggcagccagaaggagagactgctggacgagctgaccctggagggcgtggccagatacatgcagagcgagagatgcagaagagtgatctgcctggtgggcgccggcatcagcaccagcgccggcatccccgacttcagaagccccagcaccggcctgtacgacaacctggagaagtaccacctgccctaccccgaggccatcttcgagatcagctacttcaagaagcaccccgagcccttcttcgccctggccaaggagctgtaccccggccagttcaagcccaccatctgccactacttcatgagactgctgaaggacaagggcctgctgctgagatgctacacccagaacatcgacaccctggagagaatcgccggcctggagcaggaggacctggtggaggcccacggcaccttctacaccagccactgcgtgagcgccagctgcagacacgagtaccccctgagctggatgaaggagaagatcttcagcgaggtgacccccaagtgcgaggactgccagagcctggtgaagcccgacatcgtgttcttcggcgagagcctgcccgccagattcttcagctgcatgcagagcgacttcctgaaggtggacctgctgctggtgatgggcaccagcctgcagggcagaggcctggccggctag

SEQ ID NO: 319449 - DNA, 714 bp, Artificial Sequence
  derived and/or modified sequence
atggacttcctgagaaacctgttcagccagaccctgagcctgggcagccagaaggagagactgctggacgagctgaccctggagggcgtggccagatacatgcagagcgagagatgcagaagagtgatctgcctggtgggcgccggcatcagcaccagcgccggcatccccgacttcagaagccccagcaccggcctgtacgacaacctggagaagtaccacctgccctaccccgaggccatcttcgagatcagctacttcaagaagcaccccgagcccttcttcgccctggccaaggagctgtaccccggccagttcaagcccaccatctgccactacttcatgagactgctgaaggacaagggcctgctgctgagatgctacacccagaacatcgacaccctggagagaatcgccggcctggagcaggaggacctggtggaggcccacggcaccttctacaccagccactgcgtgagcgccagctgcagacacgagtaccccctgagctggatgaaggagaagatcttcagcgaggtgacccccaagtgcgaggactgccagagcctggtgaagcccgacatcgtgttcttcggcgagagcctgcccgccagattcttcagctgcatgcagagcgacttcctgaaggtggacctgctgctggtgatgggcaccagcctgcaggtgcagcccttcgccagcctgatcagctag

SEQ ID NO: 319450 - DNA, 816 bp, Artificial Sequence
  derived and/or modified sequence
atggccgagccggatccgagtcatccccttgagacgcaggctggtaaggtacaagaggcccaagactctgactccgacagcgagggcggcgcagctggcggggaagcagatatggatttcctgcgcaatttgttttcacagaccctatcgctgggatctcagaaagagcggcttctggacgagctgacccttgagggtgtagcccgctatatgcagagtgaacgatgtcggcgggtaatctgtctcgtgggggctggcatttccacctccgccggcatccccgacttccgatctccatctacaggactctacgacaatctggagaagtaccacctgccatacccagaggccatcttcgaaatctcatactttaaaaagcaccccgagccattcttcgcattggccaaggagttatatcctggacaattcaagccgacgatttgtcattatttcatgcggctccttaaagataagggtttgctcttgagatgttatacccaaaatatagacacgctggagcggatcgcaggtttggaacaagaggatctggtcgaggcccacggtacgttttacacttcacactgtgtctccgcaagctgccgccacgagtatcctctgtcgtggatgaaggagaagatattttctgaagtgaccccaaaatgtgaggactgtcaatcacttgtgaaacccgacatcgtgtttttcggggaatcattgccggcccggttcttcagttgcatgcagtcagatttcctcaaagttgacctgctgctagtaatggggacgagcttgcaaggcaggggtctcgcaggctag

SEQ ID NO: 319451 - DNA, 714 bp, Artificial Sequence
  derived and/or modified sequence
atggattttctgcgcaacctgttctcacaaaccctgtctttgggaagccagaaggaaaggcttctggacgaactaaccttagagggtgtcgctcggtatatgcaatcagagcggtgcagacgggtcatatgcctcgtcggagccgggatctccacaagtgccggcataccggacttccggtctccctctaccgggctgtatgacaacctggagaagtatcatttaccatacccagaggccatttttgagatcagctatttcaagaagcaccccgaacctttttttgcccttgctaaggaactttatcctggccagttcaaaccaaccatctgtcactattttatgagactgctaaaggacaagggacttctcctgcggtgctacacgcagaatattgatacactggagcggatcgcggggcttgaacaggaagacttggtcgaggctcatgggacattttacacgtctcattgcgtgtccgcaagctgccgtcacgaatatcctctgagctggatgaaggagaaaattttcagcgaggtcacgcccaaatgtgaggattgccagagtctcgtaaaacctgacattgtcttcttcggggagagcctgccagccagatttttctcctgcatgcagtcggacttcctcaaggtggaccttctgcttgtaatgggcacatcccttcaggtgcagccattcgcatctctcatcagctag

SEQ ID NO: 319452 - DNA, 816 bp, Artificial Sequence
  derived and/or modified sequence
atggccgagccagaccccagccaccccctggagacccaggccggcaaggtgcaggaggcccaggacagcgacagcgacagcgagggcggggccgccggcggggaggccgacatggacttcctgaggaacctcttcagccagaccctgagcctgggcagccagaaggagcggctgctggatgagctgaccctggagggcgtggcccgctacatgcagagcgagcgctgcagaagagtcatctgcctggtgggcgccggcatcagcaccagcgctggcatcccagacttccgcagccccagcacaggcctgtatgacaacctggagaagtaccacctgccctacccagaggccatctttgagatctcctacttcaagaagcaccctgagcccttctttgccctggccaaggagctgtacccaggccagttcaagcccaccatctgccactacttcatgaggctgctgaaggacaagggcctgctgctgcgctgctacacccagaacatcgacaccctggagagaattgctggcctggagcaggaggacctggtggaggcccacggcaccttctacaccagccactgtgtgtctgccagctgcagacatgagtaccccctgtcctggatgaaggagaagatcttcagcgaggtgacccccaagtgtgaggactgccagagcctggtgaagccagacatcgtgttctttggagagagcctgcctgcccgcttcttcagctgcatgcagagcgacttcctgaaggtggacctgctgctggtgatgggcaccagcctgcagggccggggcctggccggctag

SEQ ID NO: 319453 - DNA, 714 bp, Artificial Sequence
  derived and/or modified sequence
atggacttcctgaggaacctcttcagccagaccctgagcctgggcagccagaaggagcggctgctggatgagctgaccctggagggcgtggcccgctacatgcagagcgagcgctgccggcgggtcatctgcctggtgggcgccggcatcagcaccagcgctggcatcccagacttccgcagccccagcacaggcctgtatgacaacctggagaagtaccacctgccctacccagaggccatctttgagatctcctacttcaagaagcaccctgagcccttctttgccctggccaaggagctgtacccaggccagttcaagcccaccatctgccactacttcatgaggctgctgaaggacaagggcctgctgctgcgctgctacacccagaacatcgacaccctggagagaattgctggcctggagcaggaggacctggtggaggcccacggcaccttctacaccagccactgtgtgtctgccagctgcagacatgagtaccccctgtcctggatgaaggagaagatcttcagcgaggtgacccccaagtgtgaggactgccagagcctggtgaagccagacatcgtgttcttcggggagagcctgcctgcccgcttcttcagctgcatgcagagcgacttcctgaaggtggacctgctgctggtgatgggcaccagcctgcaggtgcagccctttgccagcctcatctcctag

SEQ ID NO: 319454 - DNA, 816 bp, Artificial Sequence
  derived and/or modified sequence
atggccgagcccgaccccagccaccccctggagacccaggccggcaaggtccaggaagcgcaggactctgatagtgattccgagggcggggctgccggcggcgaagctgacatggacttcctccgcaacctctttagtcagacattatccctgggtagccaaaaggagcgcctgctcgacgagctcaccctcgaaggcgtagcacgctatatgcagtcagagcggtgcagacgggttatttgcctggtaggggccgggattagcacttccgcaggcatcccagatttccggagccctagtacaggcctgtatgataacctggaaaaatatcatcttccgtatcccgaggccatctttgagatctcctattttaagaagcaccccgagcctttcttcgctcttgccaaggaactctatcctggccagtttaagccgacgatatgtcactacttcatgcgcctattgaaagataaaggactcctccttagatgctatacacaaaacatcgacacactggagaggattgcaggccttgagcaagaagacctggtagaggcacacggcaccttctatacatcccactgcgtgtctgcaagctgccgccatgaatatccactctcttggatgaaggagaagatcttcagtgaggtcaccccgaagtgcgaggactgtcagtcactggtgaaacctgacattgtttttttcggcgaaagcctcccggcacggttcttctcatgtatgcagagtgactttctgaaggtggatctgctgctggtaatgggcacgagcctgcaaggtcggggcctggcggggtag

SEQ ID NO: 319455 - DNA, 714 bp, Artificial Sequence
  derived and/or modified sequence
atggacttcctgcggaacctgttcagccagaccctgagcctgggctcccagaaagaaaggctgctggatgagctgaccctcgagggcgtggctaggtatatgcaaagtgaacggtgtcgccgggttatatgtttggtaggcgcgggcatcagtacaagtgccggtatccctgatttccgtagcccctcaactggactgtacgacaatttagagaagtatcatctgccttaccccgaggctatctttgagatcagttacttcaaaaagcacccagagcccttctttgccttggctaaagagctgtacccagggcagttcaagccgaccatttgtcattattttatgagacttctaaaagacaagggccttttgctaagatgttacacccaaaacattgacaccctcgagagaatcgctggcctggagcaagaagacttggtagaagcccatggcacattctacaccagtcattgtgtgagtgcctcctgtcgacatgaatatcctctgtcttggatgaaggaaaagatcttcagcgaagttactcctaaatgtgaggattgccaaagtttagtgaaacccgatattgttttcttcggggaatcactgcctgctcggttcttttcctgcatgcagtcagatttcctgaaagtcgacttgttgcttgtcatggggacctcgctgcaggtccagccattcgccagtctcatctcctag

SEQ ID NO: 319456 - DNA, 816 bp, Artificial Sequence
  derived and/or modified sequence
atggccgagcctgatccgtcccatccccttgagacccaggccggaaaagtgcaggaggctcaggactccgattcagactcagagggtggagccgctggaggcgaggcagatatggactttctgcgcaacctgttttcccagacactgagtctgggctcccagaaggaaagactcctggatgagctgactcttgagggagtggcgcgatacatgcagtccgagagatgtaggcgggtaatttgtctggttggtgccggtattagcaccagcgctggcatccccgattttagatctccatctactggcctttacgataaccttgaaaagtaccacctgccttatcccgaagcgattttcgaaattagttactttaagaagcatcctgagccattcttcgcactggccaaggaactataccccggacagtttaaacctacaatatgccactactttatgagactcctgaaagacaagggattgctcttaagatgttatacccagaacatcgatacactggagaggatcgctggcctggaacaggaggacctcgttgaagcacatggcactttttacacatctcactgtgtgtccgcctcgtgtaggcacgagtatcccctaagctggatgaaagaaaagattttctcagaagtaacgcccaaatgcgaggactgccagtccttggtaaagcctgatatcgtttttttcggcgagtcactccccgctagattcttcagctgcatgcagagtgactttcttaaagtggatctgcttttggttatgggtacctcgctgcagggaagaggcctcgctggctag

SEQ ID NO: 319457 - DNA, 714 bp, Artificial Sequence
  derived and/or modified sequence
atggatttccttaggaatctattctcccagacgttgtcccttggatctcagaaagaaaggctgctggacgagctcactctggagggagtcgccaggtatatgcagtcggagaggtgtcgtcgtgtcatctgtctggtcggcgctggcataagtaccagtgccggtattcccgattttcgctcaccctctacaggtttatatgacaacctggaaaagtatcaccttccctatcctgaggctatctttgaaatttcatacttcaagaagcaccctgagcccttttttgcgttggccaaggaactgtatcccggacagtttaagccaaccatttgtcactacttcatgcggttactgaaggataagggtttgctgctccgttgctacacacagaacatcgacaccttagagaggatagctgggctggagcaagaggacctcgttgaggcccacggcaccttctatacatcccactgcgtcagcgcatcctgtcgccacgagtacccacttagttggatgaaggagaaaatcttttcagaagtgacgcctaaatgcgaggactgtcagagtcttgtgaaacccgacattgttttttttggtgaatctctccctgctagattcttctcttgcatgcagagtgactttctaaaggtggatctcttactcgttatgggtacaagccttcaggtccagccattcgcctctctcatatcctag

SEQ ID NO: 319458 - DNA, 1784 bp, Artificial Sequence
  derived and/or modified sequence
cgaaagcgcgtctgcggccgcaatgtctgctgagagttgtagttctgtgccctatcacggccactcccatttctggtgccgtcacgggacagagcagtcggtgacaggacagagcagtcggtgacgggacacagtggttggtgacgggacagagcggtcggtgacagcctcaagggcttcagcaccgcgcccatggcagagccagacccctctcaccctctggagacccaggcagggaaggtgcaggaggctcaggactcagattcagactctgagggaggagccgctggtggagaagcagacatggacttcctgcggaacttattctcccagacgctcagcctgggcagccagaaggagcgtctgctggacgagctgaccttggaaggggtggcccggtacatgcagagcgaacgctgtcgcagagtcatctgtttggtgggagctggaatctccacatccgcaggcatccccgactttcgctctccatccaccggcctctatgacaacctagagaagtaccatcttccctacccagaggccatctttgagatcagctatttcaagaaacatccggaacccttcttcgccctcgccaaggaactctatcctgggcagttcaagccaaccatctgtcactacttcatgcgcctgctgaaggacaaggggctactcctgcgctgctacacgcagaacatagataccctggagcgaatagccgggctggaacaggaggacttggtggaggcgcacggcaccttctacacatcacactgcgtcagcgccagctgccggcacgaatacccgctaagctggatgaaagagaagatcttctctgaggtgacgcccaagtgtgaagactgtcagagcctggtgaagcctgatatcgtcttttttggtgagagcctcccagcgcgtttcttctcctgtatgcagtcagacttcctgaaggtggacctcctcctggtcatgggtacctccttgcagggacgtggcctggctgggtgaatgcgaccagggctgcctggcccttgctgagctccttggatggaagaaggagctggaggaccttgtccggagggagcacgccagcatagatgcccagtcgggggcgggggtccccaaccccagcacttcagcttcccccaagaagtccccgccacctgccaaggacgaggccaggacaacagagagggagaaaccccagtgacagctgcatctcccaggcgggatgccgagctcctcagggacagctgagccccaaccgggcctggccccctcttaaccagcagttcttgtctggggagctcagaacatcccccaatctcttacagctccctccccaaaactggggtcccagcaaccctggcccccaaccccagcaaatctctaacacctcctagaggccaaggcttaaacaggcatctctaccagccccactgtctctaaccactcctgggctaaggagtaacctccctcatctctaactgcccccacggggccagggctaccccagaacttttaactcttccaggacagggagcttcgggcccccactctgtctcctgcccccgggggcctgtggctaagtaaaccatacctaacctaccccagtgtgggtgtgggcctctgaatataacccacacccagcgtagggggagtctgagccgggagggctcccgagtctctgccttcagctcccaaagtgggtggtgggcccccttcacgtgggacccacttcccatgctggatgggcagaagacattgcttattggagacaaatt

SEQ ID NO: 319459 - DNA, 1251 bp, Artificial Sequence
  derived and/or modified sequence
cattttccgggcgccctttaccaacatggctgctgacgccacgccttctgggactcgtagtccggtcctcgcgcgctttcttacctaactggggcgctctgggtgttgtacgaaagcgcgtctgcggccgcaatgtctgctgagagttgtagttctgtgccctatcacggccactcccatttctggtgccgtcacgggacagagcagtcggtgacaggacagagcagtcggtgacgggacacagtggttggtgacgggacagagcggtcggtgacagcctcaagggcttcagcaccgcgcccatggcagagccagaccgtaggaggaggaggatcgcttgagcccaggaatttgaggctgcagtgagctatgatcgcactattgcactccaacctgggtgacatgagcgagaccctttctctaaaaagtaaaaaagaaagaaacctctcaccctctggagacccaggcagggaaggtgcaggaggctcaggactcagattcagactctgagggaggagccgctggtggagaagcagacatggacttcctgcggaacttattctcccagacgctcagcctgggcagccagaaggagcgtctgctggacgagctgaccttggaaggggtggcccggtacatgcagagcgaacgctgtcgcagagtcatctgtttggtgggagctggaatctccacatccgcaggcatccccgactttcgctctccatccaccggcctctatgacaacctagagaagtaccatcttccctacccagaggccatctttgagatcagctatttcaagaaacatccggaacccttcttcgccctcgccaaggaactctatcctgggcagttcaagccaaccatctgtcactacttcatgcgcctgctgaaggacaaggggctactcctgcgctgctacacgcagaacatagataccctggagcgaatagccgggctggaacaggaggacttggtggaggcgcacggcaccttctacacatcacactgcgtcagcgccagctgccggcacgaatacccgctaagctggatgaaagagaagatcttctctgaggtgacgcccaagtgtgaagactgtcagagcctggtgaagcctgatatcgtcttttttggtgagagcctcccagcgcgtttcttctcctgtatgcagtcagacttcctgaaggtggacctcctcctggtcatgggtacctccttgcaggtgcagccctttgcctccctcatcagcaa

SEQ ID NO: 319460 - DNA, 123 bp, Artificial Sequence
  derived and/or modified sequence
atgcttttacgggaaataacatactccattactcccctgagcctgcatggcacctccctgctgaattgcaattggagagccactggacttgtgacactggaagggcacaggccttttcagtag

SEQ ID NO: 319461 - DNA, 93 bp, Artificial Sequence
  derived and/or modified sequence
atgtctttcagaaaggtcaatatcataatcctggtcttggcagtggcattattcttgctcgttctccaccacaacttcttgagcctctcgtag

SEQ ID NO: 319462 - DNA, 333 bp, Artificial Sequence
  derived and/or modified sequence
atgtcttgccaacagaaccagcagcaatgtcaaccaccccccaagtgcccccccaaatgtactccaaaatgtcctcctaagtgcccccccaagtgtccaccacagtgtcccgccccatgttcgccagctgtgtcgagctgctgtggcccgtcgtccggctcttgttgcgggccgagcagcggcggctgctgctcttccggaggcggcggctgctgtctatcgcatcacagaccacgcctctttcatcggcgcagacaccaatcccccgattgttgtgaatctgaacccagtggtgcctcaggctgctgccactcctcaggcggctgttgctag

SEQ ID NO: 319463 - DNA, 1188 bp, Artificial Sequence
  derived and/or modified sequence
gaattccacaaggaaatcatctcaggaggaagggctcatacttggatccagaaaatatcaacatagccaaagaaaaacaatcaagacatacctccaggagctgtgtaacagcaaccggaaagagaaacaatggtgtgttcctatgtgggatataaagagccggggctcagggggctccacacctgcacctccttctcacctgctcctctacctgctccaccctcaatccaccagaaccatgggctgctgtggctgctccggaggctgtggctccagctgtggaggctgtgactccagctgtgggagctgtggctctggctgcaggggctgtggccccagctgctgtgcacccgtctactgctgcaagcccgtgtgctgctgtgttccagcctgttcctgctctagctgtggcaagcggggctgtggctcctgtgggggctccaagggaggctgtggttcttgtggctgctcccagtgcagttgctgcaagccctgctgttgctcttcaggctgtgggtcatcctgctgccagtgcagctgctgcaagccctactgctcccagtgcagctgctgtaagccctgttgctcctcctcgggtcgtgggtcatcctgctgccaatccagctgctgcaagccctgctgctcatcctcaggctgtgggtcatcctgctgccagtccagctgctgcaagccctgctgctcccagtccagatgctgtgtccctgtgtgctaccagtgcaagatctgaggctctagtgggaaacctcaggtagctcctgaagatctgtgctttccaacaagtgactacccttgaagcacatccccttctggatctgaaaagagcccttggctcagggcgtctttttccagcccctgaggaaatggaatgaaccactccctgcccattccctataagaatatcccaagacccaggcaattttgcccctctttcccacatgcccccatatgtctgagccaaactgcactgggggctgccctcatgccaagcaagagcctggaattccccttcttgataattccatgggagacagcaaacccttctttcctttgcctgccaggagcttcacgacatttgcagatggatgtcctgcaacccaaatgatcacatgtatctatggaaatccaaaatgcatctgggtgcagcactaaataaattctccatccctc

SEQ ID NO: 319464 - protein, 178 aa, Artificial Sequence
  derived and/or modified sequence
MTVLAPAWSPTTYLLLLLLLSSGLSGTQDCSFQHSPISSDFAVKIRELSDYLLQDYPVTVASNLQDEELCGGLWRLVLAQRWMERLKTVAGSKMQGLLERVNTEIHFVTKCAFQPPPSCLRFVQTNISRLLQETSEQLVALKPWITRQNFSRCLELQCQPVETVFHRVSQDGLDLLTS

SEQ ID NO: 319465 - DNA, 537 bp, Artificial Sequence
  derived and/or modified sequence
atgaccgtgctggcccccgcctggagccccaccacctacctgctgctgctgctgctgctgagcagcggcctgagcggcacccaggactgcagcttccagcacagccccatcagcagcgacttcgccgtgaagatcagagagctgagcgactacctgctgcaggactaccccgtgaccgtggccagcaacctgcaggacgaggagctgtgcggcggcctgtggagactggtgctggcccagagatggatggagagactgaagaccgtggccggcagcaagatgcagggcctgctggagagagtgaacaccgagatccacttcgtgaccaagtgcgccttccagcccccccccagctgcctgagattcgtgcagaccaacatcagcagactgctgcaggagaccagcgagcagctggtggccctgaagccctggatcaccagacagaacttcagcagatgcctggagctgcagtgccagcccgtggagaccgtgttccacagagtgagccaggacggcctggacctgctgaccagctag

SEQ ID NO: 319466 - DNA, 537 bp, Artificial Sequence
  derived and/or modified sequence
atgacggtgctggcaccagcatggagcccgaccacctatttactcctgttgctcttgttgtctagcggcctctcggggacgcaggactgttccttccagcacagtccaatcagctctgattttgctgtgaaaattcgagaactttcagactatctcctccaagattacccggtaacagtggcttctaacctccaggacgaggaactttgcggcgggctgtggcggctcgttttggcccagcgctggatggagcggctgaagacagttgctggcagcaaaatgcagggacttctggaacgggtcaatacagagattcactttgttacaaaatgcgcatttcagccgccaccctcctgtctgcggttcgtgcagactaacatttcacgtctgctgcaggagacaagcgagcaactggtcgctctaaagccctggattacaagacagaacttttcacgctgtctcgagctgcaatgccaacccgtggagactgtgttccacagggtctcgcaagatggcttagacctgttaacatcatag

SEQ ID NO: 319467 - DNA, 627 bp, Artificial Sequence
  derived and/or modified sequence
tctctggctgtcacccggcttggccccttccacacccaactggggcaagcctgacccggcgacaggaggcatgaggggcccccggccgaaatgacagtgctggcgccagcctggagcccaacaacctatctcctcctgctgctgctgctgagctcgggactcagtgggacccaggactgctccttccaacacagccccatctcctccgacttcgctgtcaaaatccgtgagctgtctgactacctgcttcaagattacccagtcaccgtggcctccaacctgcaggacgaggagctctgcgggggcctctggcggctggtcctggcacagcgctggatggagcggctcaagactgtcgctgggtccaagatgcaaggcttgctggagcgcgtgaacacggagatacactttgtcaccaaatgtgcctttcagcccccccccagctgtcttcgcttcgtccagaccaacatctcccgcctcctgcaggagacctccgagcagctggtggcgctgaagccctggatcactcgccagaacttctcccggtgcctggagctgcagtgtcagcccgtagagacggtgtttcaccgtgtcagccaggatggtctcgatctcctgacctcgtga

SEQ ID NO: 319468 - DNA, 537 bp, Artificial Sequence
  derived and/or modified sequence
atgacagtgctggccccagcctggagccccaccacctacctgctgctgctgctgctgctgagcagcggcctgagcggcacccaggactgcagcttccagcacagccccatcagcagtgactttgctgtgaagatccgggagctgagtgactacctgctgcaggactaccctgtgacagtggccagcaacctgcaggatgaggagctgtgtggcggcctgtggaggctggtgctggcccagcgctggatggagcggctgaagacagtggccggcagcaagatgcagggcctgctggagcgggtgaacacagagatccactttgtgaccaagtgtgccttccagcccccacccagctgcctgcgctttgtgcagaccaacatcagccggctgctgcaggagaccagcgagcagctggtggccctgaagccctggatcacccggcagaacttcagccgctgcctggagctgcagtgccagcctgtggagaccgtcttccaccgggtgtcccaggacggcctggacctgctgaccagctag

SEQ ID NO: 319469 - DNA, 537 bp, Artificial Sequence
  derived and/or modified sequence
atgaccgtgctggcccccgcctggagccccaccacctacctgctgctcctgctgctgctcagcagtggcctctcaggcacccaagactgttcttttcagcattcaccaattagttcagattttgctgtgaaaattcgggagcttagcgactatctgctccaggactatccagtcaccgtcgctagtaatctgcaggatgaagaattgtgcggcggactgtggcgcctcgtgttagctcagcgttggatggagcggctcaagacagtggccggttcaaagatgcagggcctgctggagcgggtgaacacagaaatccactttgtgaccaaatgtgcctttcagcctcccccatcatgcttgcggttcgtccaaacaaacatttcaaggctgttacaggaaacgtcagagcaactggtcgctctgaaaccatggatcactcgtcagaacttttctaggtgtctcgaactccagtgccagccagttgaaaccgtctttcatcgagtctctcaggacggcctggacctactgacttcgtag

SEQ ID NO: 319470 - DNA, 537 bp, Artificial Sequence
  derived and/or modified sequence
atgaccgtgcttgctcccgcatggtctccaaccacttatctgctgctgcttctgcttctttcgagcggcctcagcggtacacaggattgctcttttcagcacagccctatatcaagcgacttcgcagtgaaaattcgggagttaagtgactaccttctgcaggactaccccgtcaccgttgcctcgaacctccaagatgaggaattgtgcggaggactctggcgtctggttctggcacagcgctggatggagaggctaaagaccgtcgccggttccaaaatgcaagggctgttagaaagggtgaacactgagatccacttcgtgactaagtgtgctttccaacccccaccttcttgtctcaggttcgtccaaacaaatatttcccgtctcctgcaggaaacctctgaacaattagtggcccttaaaccatggattactcgtcaaaacttctccagatgcctggagttgcaatgccaacctgttgaaacggtcttccatcgcgtaagccaggacgggctggatctgttgacttcctag

SEQ ID NO: 319471 - DNA, 537 bp, Artificial Sequence
  derived and/or modified sequence
atgacggttttagctccagcttggagccccaccacttacctacttttgcttctgttgttgtcctctggcctctctggcacccaggattgctcctttcagcacagtcctatctcctccgacttcgccgtcaaaattagagagctctcagactaccttctccaggattatcctgtgacagttgcctccaatctccaggacgaagaactgtgtgggggcctctggcgactcgtgctggctcagaggtggatggaaagacttaaaactgtggccggctcaaagatgcaaggtcttctggagagagttaatactgagattcatttcgtgacaaagtgcgcttttcagccaccaccttcctgcttaagattcgtccagaccaatatcagccgcttgctgcaggaaacttcagaacagctcgtcgccctcaagccttggataacccgccagaactttagtaggtgcttagaactccagtgccagcccgtcgaaacagtttttcatagagttagccaggatggcctggacctactgacgtcttag

SEQ ID NO: 319472 - DNA, 537 bp, Artificial Sequence
  derived and/or modified sequence
atgaccgttctcgccccagcttggtcccctaccacttacttattgctgctactgctgctcagctccggattaagcgggacccaagactgctcgttccaacatagtcccatttcttctgacttcgctgtgaagattcgcgaactaagtgattatctcctgcaggattatcccgtgactgtggccagcaacttacaggatgaagaactgtgcggaggactgtggagattagttctggcacaaagatggatggaacggcttaagacagtggccggatctaaaatgcagggcttgcttgaaagggtaaatactgagatccatttcgtcacaaaatgtgctttccagcctcccccctcatgtcttcgcttcgtgcaaacaaacatcagtagactcctccaggagaccagcgaacagctagtggccctgaaaccctggataacccgccagaacttttcccgctgcctcgagctacagtgtcaacccgtcgagacagtgttccatcgagtcagtcaggacggccttgatctactcaccagctag

SEQ ID NO: 319473 - RNA, 537 nt, Artificial Sequence
  derived and/or modified sequence
augacgguuuuagcuccagcuuggagccccaccacuuaccuacuuuugcuucuguuguuguccucuggccucucuggcacccaggauugcuccuuucagcacaguccuaucuccuccgacuucgccgucaaaauuagagagcucucagacuaccuucuccaggauuauccugugacaguugccuccaaucuccaggacgaagaacugugugggggccucuggcgacucgugcuggcucagagguggauggaaagacuuaaaacuguggccggcucaaagaugcaaggucuucuggagagaguuaauacugagauucauuucgugacaaagugcgcuuuucagccaccaccuuccugcuuaagauucguccagaccaauaucagccgcuugcugcaggaaacuucagaacagcucgucgcccucaagccuuggauaacccgccagaacuuuaguaggugcuuagaacuccagugccagcccgucgaaacaguuuuucauagaguuagccaggauggccuggaccuacugacgucuuag

SEQ ID NO: 319474 - RNA, 537 nt, Artificial Sequence
  derived and/or modified sequence
augaccguucucgccccagcuugguccccuaccacuuacuuauugcugcuacugcugcucagcuccggauuaagcgggacccaagacugcucguuccaacauagucccauuucuucugacuucgcugugaagauucgcgaacuaagugauuaucuccugcaggauuaucccgugacuguggccagcaacuuacaggaugaagaacugugcggaggacuguggagauuaguucuggcacaaagauggauggaacggcuuaagacaguggccggaucuaaaaugcagggcuugcuugaaaggguaaauacugagauccauuucgucacaaaaugugcuuuccagccuccccccucaugucuucgcuucgugcaaacaaacaucaguagacuccuccaggagaccagcgaacagcuaguggcccugaaacccuggauaacccgccagaacuuuucccgcugccucgagcuacagugucaacccgucgagacaguguuccaucgagucagucaggacggccuugaucuacucaccagcuag

SEQ ID NO: 319475 - DNA, 93 bp, Artificial Sequence
  derived and/or modified sequence
ggcatggatgtgctgggccggcccaagatccccctggagaccccagcctacacaggccagccctggcactgccagcactgcttcctgctgtag

SEQ ID NO: 319476 - protein, 603 aa, Artificial Sequence
  derived and/or modified sequence
MGVIPEGPLWVSGSDDNLSGTSGMEVDDRVSALEQRLQLQEDELAVLKAALADALRRLRACEEQGAALRARGTPKGRAPPRLGTTASVCQLLKGLPTRTPLNGSGPPRRVGGYATSPSSPKKEATSGRSSVRRYLSPERLASVRREDPRSRTTSSSSNCSAKKEGKTKEVIFSVEDGSVKMFLRGRPVPMMIPDELAPTYSLDTRSELPSCRLKLEWVYGYRGRDCRANLYLLPTGEIVYFVASVAVLYSVEEQRQRHYLGHNDDIKCLAIHPDMVTIATGQVAGTTKEGKPLPPHVRIWDSVSLSTLHVLGLGVFDRAVCCVGFSKSNGGNLLCAVDESNDHMLSVWDWAKETKVVDVKCSNEAVLVATFHPTDPTVLITCGKSHIYFWTLEGGSLSKRQGLFEKHEKPKYVLCVTFLEGGDVVTGDSGGNLYVWGKGGNRITQAVLGAHDGGVFGLCALRDGTLVSGGGRDRRVVLWGSDYSKLQEVEVPEDFGPVRTVAEGHGDTLYVGTTRNSILQGSVHTGFSLLVQGHVEELWGLATHPSRAQFVTCGQDKLVHLWSSDSHQPLWSRIIEVESRSVTQAGGQWHDLGSLQPPPPGFK

SEQ ID NO: 319477 - DNA, 1812 bp, Artificial Sequence
  derived and/or modified sequence
atgggcgtgatccccgagggccccctgtgggtgagcggcagcgacgacaacctgagcggcaccagcggcatggaggtggacgacagagtgagcgccctggagcagagactgcagctgcaggaggacgagctggccgtgctgaaggccgccctggccgacgccctgagaagactgagagcctgcgaggagcagggcgccgccctgagagccagaggcacccccaagggcagagccccccccagactgggcaccaccgccagcgtgtgccagctgctgaagggcctgcccaccagaacccccctgaacggcagcggcccccccagaagagtgggcggctacgccaccagccccagcagccccaagaaggaggccaccagcggcagaagcagcgtgagaagatacctgagccccgagagactggccagcgtgagaagagaggaccccagaagcagaaccaccagcagcagcagcaactgcagcgccaagaaggagggcaagaccaaggaggtgatcttcagcgtggaggacggcagcgtgaagatgttcctgagaggcagacccgtgcccatgatgatccccgacgagctggcccccacctacagcctggacaccagaagcgagctgcccagctgcagactgaagctggagtgggtgtacggctacagaggcagagactgcagagccaacctgtacctgctgcccaccggcgagatcgtgtacttcgtggccagcgtggccgtgctgtacagcgtggaggagcagagacagagacactacctgggccacaacgacgacatcaagtgcctggccatccaccccgacatggtgaccatcgccaccggccaggtggccggcaccaccaaggagggcaagcccctgcccccccacgtgagaatctgggacagcgtgagcctgagcaccctgcacgtgctgggcctgggcgtgttcgacagagccgtgtgctgcgtgggcttcagcaagagcaacggcggcaacctgctgtgcgccgtggacgagagcaacgaccacatgctgagcgtgtgggactgggccaaggagaccaaggtggtggacgtgaagtgcagcaacgaggccgtgctggtggccaccttccaccccaccgaccccaccgtgctgatcacctgcggcaagagccacatctacttctggaccctggagggcggcagcctgagcaagagacagggcctgttcgagaagcacgagaagcccaagtacgtgctgtgcgtgaccttcctggagggcggcgacgtggtgaccggcgacagcggcggcaacctgtacgtgtggggcaagggcggcaacagaatcacccaggccgtgctgggcgcccacgacggcggcgtgttcggcctgtgcgccctgagagacggcaccctggtgagcggcggcggcagagacagaagagtggtgctgtggggcagcgactacagcaagctgcaggaggtggaggtgcccgaggacttcggccccgtgagaaccgtggccgagggccacggcgacaccctgtacgtgggcaccaccagaaacagcatcctgcagggcagcgtgcacaccggcttcagcctgctggtgcagggccacgtggaggagctgtggggcctggccacccaccccagcagagcccagttcgtgacctgcggccaggacaagctggtgcacctgtggagcagcgacagccaccagcccctgtggagcagaatcatcgaggtggagagcagaagcgtgacccaggccggcggccagtggcacgacctgggcagcctgcagccccccccccccggcttcaagtag

SEQ ID NO: 319478 - DNA, 1812 bp, Artificial Sequence
  derived and/or modified sequence
atgggggtcattcctgaaggccctctatgggtgagcggcagcgatgataatctttccggtacgtctggcatggaggttgacgacagagtgagtgccttggagcagcggctccagctgcaggaggacgaattggctgttctgaaggccgctcttgccgatgccctgcggagactgagagcttgcgaagaacagggagccgcgctgagggccagaggtactccaaaaggccgcgcaccaccacggttagggactactgcttcagtgtgccagctgttgaaaggcctgcctaccagaacacccctgaatggcagcggccccccacgccgcgtcggcggctacgcaaccagcccttcctctccaaaaaaagaggctacaagcgggagatcttcagttcgcaggtacctgtcacccgaacggcttgctagcgtgcgtcgggaggacccgcgtagcaggacaaccagctcttctagcaactgttctgcaaagaaggagggcaagacaaaagaagtgatttttagcgtggaggatgggtctgttaaaatgttcctgagaggccgaccagtgcccatgatgatccctgacgaactagctcccacgtactcactcgataccaggtccgaactgccttcatgtaggctcaagcttgagtgggtttatggatacagaggaagggattgccgagcaaacctctacttactccctacaggcgagattgtgtactttgtcgccagcgtggcggtgctctatagtgtcgaagaacagaggcagcgacactatttggggcacaatgatgatattaagtgtttagctatccatccggatatggtgacaatcgctaccgggcaagtggccggtaccactaaagagggcaaacctctacctccacatgtgcggatttgggactctgtgtctctgtccacattgcatgttctggggctcggggtctttgacagagctgtgtgctgcgtggggttttctaaatctaatggtgggaacttgctgtgtgccgttgacgagagtaatgatcacatgctgtcagtttgggactgggcaaaggaaacaaaggtcgtcgatgttaagtgcagtaacgaagccgtcctagttgccacgttccacccaactgaccccacagtcctaattacgtgcggcaagtcacatatttatttctggacacttgagggaggatccctttccaaaaggcagggcctgttcgagaagcacgagaagccaaaatacgtgctttgcgtgacattcctggaaggcggtgatgtcgtgacaggcgattctggtggcaatctgtacgtttggggaaaaggcggaaataggatcacccaggccgtcctgggcgctcacgatggtggagtcttcggcctgtgcgcgctgcgagacgggactctcgtgtccggaggcgggcgagaccggagggtcgtcctgtggggtagcgattattccaaactgcaggaagtggaggtcccagaagactttggcccagtgcggaccgtagcggaaggacacggtgacactttgtacgtcgggacgacccgaaacagcatattacagggtagtgtccacactggattttcactgctggtgcagggtcatgtggaggagctttggggtctggccacacatccatctcgggcacagtttgtaacgtgtggccaggataaactcgttcatctgtggtcctccgacagtcaccagccgctgtggtcaaggattatagaagtggaaagccgcagtgttacacaggcaggggggcagtggcacgacttgggcagtcttcagccaccaccacccgggttcaagtag

SEQ ID NO: 319479 - DNA, 1812 bp, Artificial Sequence
  derived and/or modified sequence
atgggcgtcatccctgagggccccctgtgggtgtctggcagtgatgacaacctgagcggcaccagcggcatggaggtggatgacagagtgtctgccctggagcagaggctgcagctgcaggaggatgagctggccgtgctgaaggccgccctggctgatgccctgcggcggctgcgggcctgtgaggagcagggcgccgccctgcgggcccggggcacccccaagggccgggccccaccccggctgggcaccacagcctctgtgtgccagctgctgaagggcctgcccaccaggacccccctgaatggcagcggccccccccggcgggtgggcggctacgccaccagccccagcagccccaagaaggaggccaccagcggccgcagctctgtgcggcgctacctgagccctgagcggctggcctctgtgcggcgggaggaccccaggagcaggaccaccagcagcagcagcaactgcagcgccaagaaggagggcaagaccaaggaggtgatcttctctgtggaggatggctctgtgaagatgttcctgcggggccggcctgtgcccatgatgatcccagatgagctggcccccacctacagcctggacaccaggtctgagctgcccagctgccgcctgaagctggagtgggtgtatggctaccggggccgggactgccgggccaacctgtacctgctgcccactggagagatcgtgtactttgtggcctctgtggccgtgctgtacagcgtggaggagcagaggcagaggcactacctgggccacaatgatgacatcaagtgcctggccatccacccagacatggtgaccatcgccaccggccaggtggccggcaccaccaaggagggcaagcccctgcccccccacgtgcgcatctgggacagcgtgtccctgagcaccctgcacgtgctgggcctgggcgtgtttgacagagctgtgtgctgcgtgggcttcagcaagagcaatggaggcaacctgctgtgtgctgtggatgagagcaatgaccacatgctgtctgtgtgggactgggccaaggagaccaaggtggtggatgtgaagtgcagcaatgaagctgtgctggtggccaccttccaccccacagaccccaccgtgctgatcacctgtgggaagagccacatctacttctggaccctggagggcggcagcctgagcaagaggcagggcctgtttgagaagcatgagaagcccaagtatgtgctgtgtgtgaccttcctggagggcggagatgtggtgactggagacagcggcggcaacctgtatgtgtggggcaagggcggcaaccgcatcacccaggccgtgctgggcgcccatgatggcggcgtgtttggcctgtgtgccctgagagatggcaccctggtgtctgggggcggccgggaccggcgggtggtgctgtggggcagtgactacagcaagctgcaggaggtggaggtgcctgaagattttggacctgtgaggacagtggccgagggccatggagacaccctgtatgtgggcaccaccagaaattccatcctgcagggctctgtgcacacaggcttcagcctgctggtgcagggccacgtggaggagctgtggggcctggccacccaccccagccgggcccagtttgtgacctgtggccaggacaagctggtgcacctgtggagcagtgacagccaccagcccctgtggagccgcatcatcgaggtggagagccgctctgtgacccaggccggcggccagtggcatgacctgggcagcctgcagcccccacctcctggcttcaagtag

SEQ ID NO: 319480 - DNA, 1812 bp, Artificial Sequence
  derived and/or modified sequence
atgggcgtgatccccgagggccccctgtgggtgagcggcagcgacgataacctgtcaggaacatccgggatggaggttgatgaccgtgtgtctgcattggagcagaggctgcagttgcaggaagatgaacttgccgtgcttaaggcagccctcgccgacgcccttagacgtttacgcgcctgcgaggagcaaggagcggccctgagggcccgcgggacccccaaaggcagagcccctccccggctgggaacaactgcatcagtgtgtcagctccttaaggggctcccaactaggacgccactgaatggctccggaccgcctcgacgggtgggtggatatgctactagcccatccagccctaaaaaagaagccacctcaggcaggtccagcgtgagacgatacttgagcccagagagattagcatcggtaagacgagaagatccccggtcacgtactacatcctcatcctccaactgttctgccaagaaagaaggcaagacaaaggaagtgatttttagcgttgaagatgggagcgtcaaaatgttcctgcgtggaagaccagtgcctatgatgattccagatgagcttgccccgacctactctctggacaccaggtctgagctcccctcctgccggcttaagctggagtgggtctacggttataggggtcgcgactgtagagctaacctctatctgctcccgaccggggaaatagtgtacttcgtggcctctgtggcagtgctgtattctgtggaagagcagcgccaacgacactacctgggtcacaacgacgatataaaatgcttggctattcaccccgatatggtgacgatagcaacaggacaggtcgccggtacaactaaggaagggaagccactaccgcctcatgttagaatctgggatagtgtgtccctgagtactctgcacgtcttaggccttggtgtattcgacagagccgtatgctgtgttgggtttagcaagagcaacggagggaaccttctgtgcgcagttgacgagtccaacgaccacatgctgtcagtttgggattgggccaaggagacgaaggttgtggatgtaaagtgttccaacgaagccgtcctggtggcaacattccaccccaccgacccgactgtcctcattacgtgtgggaagtctcacatttacttctggaccctggaaggtgggtccctgagcaagagacaggggctgtttgagaaacatgagaaacctaagtacgtgttatgcgtgacattcttggagggaggagatgtggtaacgggtgactccggcgggaatctgtacgtctggggtaagggcggtaaccgcatcacccaggctgtgctgggtgcgcacgacggcggtgtgtttggtctttgtgcgctacgagatgggactctggtttccggaggcgggcgcgaccgccgtgtagtgctctgggggagcgactacagtaagcttcaggaggtcgaagtacccgaggacttcgggcctgtgagaactgtcgcggagggacacggcgacaccctgtatgtgggaacaacccggaacagcatcctgcaggggagcgtgcatacaggtttctccctcttggtacaaggccacgttgaggagctttggggcctggccacacatccaagccgcgcccaattcgtgacatgtgggcaggataagctagtacacctctggagttccgactcacaccagccactgtggagcagaattattgaagtcgagagtcggagtgtgactcaggcgggtggccagtggcacgatcttggctccctgcagcctccgcccccaggatttaaatag

SEQ ID NO: 319481 - DNA, 2232 bp, Artificial Sequence
  derived and/or modified sequence
atagcagggggacagacagagggggtgggggtggatttggtgttgagttgagggcagagtgtgggactggaaagggacggccagaggactttgcttctaggatacctcccaaatcctctggccctggccctcccatgcattagcaccatcccttctccctagacaaatgggtgtgataccagaaggaccactgtgggtgtcgggctcagatgacaatttgtcgggcacgagcggtatggaagtggacgaccgcgtgtcggcgctggagcagcggctgcagttacaggaagacgagctggcggtcctaaaggcggcgctggcggatgctctgcgtcgcctgcgggcatgcgaagaacagggagcggcgctacgcgcgcggggcacccccaagggccgggcgcctccgcgcttaggcaccactgcctcggtgtgtcagctcttgaaaggccttcccaccaggacgccccttaatggctcgggacccccgcggcgcgtgggtggctatgccacgtccccatcctctcccaagaaggaggcgacctccgggcgcagcagtgtccgccgctacttgtcaccagagcgcctcgcctcggtgcgccgtgaggacccccgcagccggaccacatcctccagcagcaactgtagcgccaaaaaggaaggcaaaaccaaagaagttatcttcagtgtggaggatggctccgtgaaaatgttcctgaggggccgccctgtgcccatgatgatcccagacgagctggcacccacctacagcctggacacacgctcggagctgccttcttgccggctcaagctggagtgggtctatggctaccgtggccgagactgccgggccaacctttatttgctgcccaccggggagatagtgtactttgtggcctccgtagccgtgctatacagcgtggaggagcagaggcagcgacactacctgggacacaacgatgacatcaaatgcttggccatccacccagatatggtcaccatcgccacgggacaggtggcgggaaccactaaggaagggaagccgctgccgccccacgtgcgcatctgggactcagtttccctctccaccttacacgtgctgggcttgggggtgtttgacagagccgtgtgctgtgtgggcttctccaaatctaatggaggcaacctgctgtgtgcagtggatgaatccaatgatcacatgctctcggtgtgggactgggccaaggagaccaaggtggtggatgtcaagtgctccaatgaggctgtattggtggccaccttccaccccacggaccccactgtgcttatcacctgcgggaaatctcacatctacttctggaccttggaggggggcagcttgagcaagcggcaaggcctctttgagaaacatgagaaaccgaagtatgtgctgtgtgtgacctttttggaaggtggcgacgtggtcacgggggactctggggggaacctctatgtttggggcaaaggtgggaaccgtatcacacaggcggtgctgggcgcccacgacggcggcgtgtttgggctctgcgccctgcgggacgggacgctggtgtctggagggggccgtgatcggcgggtggtcctctggggttctgactacagcaagctgcaggaagtggaggtccctgaggactttggccctgtgcgcaccgtggcagagggccacggagacacactgtacgtggggaccacccgcaattccatcctgcagggctccgtgcacacaggcttctcactgctggtccagggccatgtggaagagctgtggggcctggccacacaccccagtcgggcccagtttgtgacctgcgggcaggataagctggtgcatctatggagctcagattcccaccagcccctgtggagcaggatcatcgaggtggagtctcgctctgtcacccaggctggagggcaatggcacgatctcggctcactgcaacctccgcctcccgggttcaagtgattcttctgcctcagcctcccgagtagctgggattacaggaccctgcccgctcagccggcttccaccccagtggctctgtcctggctgtgggtacagtgactggcagatggctgctgctggacacggagacccatgacctggtggctatccacacagacggcaatgaacagatctcagtggtcagcttctccccagacggggcgtacctggccgtgggctcccacgacaacttggtgtacgtgtacacggtggac

SEQ ID NO: 319482 - DNA, 1812 bp, Artificial Sequence
  derived and/or modified sequence
atgggcgtgattcctgagggcccactttgggtcagcgggtccgatgacaatctctcaggtacgagcggcatggaggtggacgatagagtctctgccctcgaacaaagactgcagctccaggaggatgaactggcagtgctgaaggctgccctcgctgatgcgcttcgcagattaagggcttgtgaggaacagggggctgccctgcgagcaagggggaccccgaaagggcgtgcaccgccacgccttggcacgaccgctagcgtgtgccagcttctgaaaggcctgcctacacgaacccccctgaacgggagcggaccacctcgcagagtcggaggctatgccacaagtccttcatcccccaagaaagaggcgacgtctggtcgatcatctgtgagaagatatctctcgcctgaacgtctggctagtgtgcggcgagaagacccgagatcacgcaccacatcatcgagcagtaattgctcagcaaaaaaagagggcaagacgaaggaagtcatattctcagtggaggacgggtccgttaaaatgttcctcaggggtcgcccagttcctatgatgattccggacgagctggcaccaacttacagcctggacactaggtctgaactgccaagctgccgcctgaagctggaatgggtttatgggtacaggggaagagattgcagagcaaacttgtatctgctccccaccggtgagattgtctacttcgtcgcatcagtagcagtgctgtactcagtcgaggagcagcgccagaggcactacctcgggcacaatgatgatatcaaatgtctcgctatccacccggatatggtgacaatcgcgacaggtcaggtagctggcactaccaaagagggaaaaccactaccaccccacgtgaggatctgggactccgtttccctgagcaccttacacgtacttggactgggcgtgtttgacagagctgtttgttgcgtggggttcagtaaatcaaacggcggaaacttgctgtgtgccgtggatgagtccaatgaccatatgctcagcgtgtgggactgggcgaaggaaactaaggtggtggatgttaaatgtagtaatgaggccgtccttgtagccacttttcatcctactgacccgaccgtgctgattacctgtggaaagtctcacatctacttctggactctggaggggggttcccttagcaaaagacagggtctattcgagaagcatgagaaaccaaaatacgtgctttgcgtcacatttttagaaggcggagatgttgtcaccggcgacagcggcggaaatctgtacgtgtggggaaaaggaggaaaccggatcactcaagcagttctcggagcacacgatggtggggtgttcggactgtgcgcacttagggacggtaccctagtgtctggcggtgggagggatcgacgagtcgttttatggggaagtgactatagcaagcttcaagaggtggaggtgccggaagatttcgggccagttcggacggttgctgagggtcatggagacacactgtacgtcggaactacgaggaacagcatcctgcaggggagtgtgcacacgggcttcagtttattggtacaaggccatgtagaagaactgtggggattggcaactcatccttcccgggctcagttcgtgacctgtggacaggacaaactggtgcacctgtggtcctctgactcccaccagccgctatggtccaggataattgaggtggagagtcggtcagtgacccaggcgggaggccaatggcatgatctgggctcactgcagccaccccctcctggtttcaagtag

SEQ ID NO: 319483 - DNA, 315 bp, Artificial Sequence
  derived and/or modified sequence
atgggcttgggcgaccgccgagggcggagacgcgccagcgcctcagctgcctttaggacagcctccagcagctcttgcaattgcagtcggtgctcatccgccgatactagatcatcaacctccatccctctggtgcctgataaattgtcctccggccgaaggggatccgccggatgtcgcgcaactcaggagctccagtgtcccagggggccctcacggctgccggggtccaaacgaggggcaagccacgcccctttcctgtcccggtatctggggttaggccatctcgacatgtcgcaggggcgaggcctgtag

SEQ ID NO: 319484 - DNA, 886 bp, Artificial Sequence
  derived and/or modified sequence
ggggtcctcacggcgcaccgaggcgaggcgctctggtgacaagtagcggcggacactgctaaaagagagcacacaggtcttggaagaggctgggggtcccggccttgtgccttacctgcgcccggaggtcgcctccttcttgggagaggatggggacgtggcatagccacccacgcgccgcgggggtcccgagccattaaggggcgtcctggtgggaaggcctttcaagagctgacacactggagggatggggttaggggacagaagagggcgacgcagagcatccgccagcgccgcctttaggaccgccagctcgtcttcctgtaactgcagccgctgctccagcgccgacacgcggtcgtccacttccataccgctcgtgcccgacaaattgtcatctggaagacgggggagtgccggctgcagggccacccaggagctccagtgcccaaggggtccctcccgccttcctgggtctaagcggggggccagccacgcccctttcctgtcccgctacctggggctgggacacttggacatgagccaaggaagaggactctgaagggggaaggaaatccccacagctctccaacccatccgcacactcctctctgccacagcgcgctggccgtgtgaccttggggaagtcccttccctcttattttctaagagtctgtgaacccaggagcctctcgctctggctttaagatgctatgactaagacgtgaccaggcgcagtggctcacgcctgtaaccccagcactttgggaggccgaggcgggcgtatcacgaggtcaggagatcgagaccatcctggccaacatggtgaaaccccgtctctactaaaataaaattaaattaaaaataaaataaaatttaaaaaaaa

SEQ ID NO: 319485 - protein, 193 aa, Artificial Sequence
  derived and/or modified sequence
MARARQEGSSPEPVEGLARDGPRPFPLGRLVPSAVSCGLCEPGLAAAPAAPTLLPAAYLCAPTAPPAVTAALGGSRWPGGPRSRPRGPRPDGPQPSLSLAEQHLESPVPSAPGALAGGPTQAAPGVRGEEEQWAREIGAQLRRMADDLNAQYERRRQEEQQRHRPSPWRVLYNLIMGLLPLPRGHRAPEMEPN

SEQ ID NO: 319486 - DNA, 1843 bp, Artificial Sequence
  derived and/or modified sequence
gcggcgcgagccacatgcgagcgggcgcctggcggcggcggcggcggcaccagcgatcccagcagcggccacgacgcggacgcgcctgcggcccggggagcagcagcagccacagccacagcagccgccactgcagttagagcggcagcagcagcgacagccacagcagcagccgccgcggagagcggcgctcggcgggcgcgccctcctgaaggaagccgcccgccccccaccgccgccccctccggcgtgttcatgcccccggggccccagggagcgccatggcccgcgcacgccaggagggcagctccccggagcccgtagagggcctggcccgcgacggcccgcgccccttcccgctcggccgcctggtgccctcggcagtgtcctgcggcctctgcgagcccggcctggctgccgcccccgccgcccccaccctgctgcccgctgcctacctctgcgcccccaccgccccacccgccgtcaccgccgccctggggggttcccgctggcctgggggtccccgcagccggccccgaggcccgcgcccggacggtcctcagccctcgctctcgctggcggagcagcacctggagtcgcccgtgcccagcgccccgggggctctggcgggcggtcccacccaggcggccccgggagtccgcggggaggaggaacagtgggcccgggagatcggggcccagctgcggcggatggcggacgacctcaacgcacagtacgagcggcggagacaagaggagcagcagcggcaccgcccctcaccctggagggtcctgtacaatctcatcatgggactcctgcccttacccaggggccacagagcccccgagatggagcccaattaggtgcctgcacccgcccggtggacgtcagggactcggggggcaggcccctcccacctcctgacaccctggccagcgcgggggactttctctgcaccatgtagcatactggactcccagccctgcctgtcccgggggcgggccggggcagccactccagccccagcccagcctggggtgcactgacggagatgcggactcctgggtccctggccaagaagccaggagagggacggctgatggactcagcatcggaaggtggcggtgaccgagggggtggggactgagccgcccgcctctgccgcccaccaccatctcaggaaaggctgttgtgctggtgcccgttccagctgcaggggtgacactgggaggggggggctctcctctcggtgctccttcactctgggcctggcctcaggcccctggtgcttccccccctcctcctgggagggggcccgtgaagagcaaatgagccaaacgtgaccactagcctcctggagccagagagtggggctcgtttgccggttgctccagcccggcgcccagccatcttccctgagccagccggcgggtggtgggcatgcctgcctcaccttcatcagggggtggccaggaggggcccagactgtgaatcctgtgctctgcccgtgaccgccccccgccccatcaatcccattgcataggtttagagagagcacgtgtgaccactggcattcatttggggggtgggagattttggctgaagccgccccagccttagtccccagggccaagcgctggggggaagacggggagtcagggagggggggaaatctcggaagagggaggagtctgggagtggggagggatggcccagcctgtaagatactgtatatgcgctgctgtagataccggaatgaattttctgtacatgtttggttaattttttttgtacatgatttttgtatgtttccttttcaataaaatcagattggaacagtgga

SEQ ID NO: 319487 - DNA, 1827 bp, Artificial Sequence
  derived and/or modified sequence
gaggcgattgcgattgggtgagacccagtaaggatggaaagtgtagaggagacaggaatccacggctttggaaaaaggaaggacaaaactcaccaaaccagagcagggcaggaagtaacaatgagaaactgaaaaagaaacggaatggaaagctatgagacaggatgaaatttggcatggggtctgcccaggcatgtccatgccaggtgcccagggctgcttccacgacgtgggtcccctgccagatttgtggccccagggagcgccatggcccgcgcacgccaggagggcagctccccggagcccgtagagggcctggcccgcgacggcccgcgccccttcccgctcggccgcctggtgccctcggcagtgtcctgcggcctctgcgagcccggcctggctgccgcccccgccgcccccaccctgctgcccgctgcctacctctgcgcccccaccgccccacccgccgtcaccgccgccctggggggttcccgctggcctgggggtccccgcagccggccccgaggcccgcgcccggacggtcctcagccctcgctctcgctggcggagcagcacctggagtcgcccgtgcccagcgccccgggggctctggcgggcggtcccacccaggcggccccgggagtccgcggggaggaggaacagtgggcccgggagatcggggcccagctgcggcggatggcggacgacctcaacgcacagtacgagcggcggagacaagaggagcagcagcggcaccgcccctcaccctggagggtcctgtacaatctcatcatgggactcctgcccttacccaggggccacagagcccccgagatggagcccaattaggtgcctgcacccgcccggtggacgtcagggactcggggggcaggcccctcccacctcctgacaccctggccagcgcgggggactttctctgcaccatgtagcatactggactcccagccctgcctgtcccgggggcgggccggggcagccactccagccccagcccagcctggggtgcactgacggagatgcggactcctgggtccctggccaagaagccaggagagggacggctgatggactcagcatcggaaggtggcggtgaccgagggggtggggactgagccgcccgcctctgccgcccaccaccatctcaggaaaggctgttgtgctggtgcccgttccagctgcaggggtgacactgggaggggggggctctcctctcggtgctccttcactctgggcctggcctcaggcccctggtgcttccccccctcctcctgggagggggcccgtgaagagcaaatgagccaaacgtgaccactagcctcctggagccagagagtggggctcgtttgccggttgctccagcccggcgcccagccatcttccctgagccagccggcgggtggtgggcatgcctgcctcaccttcatcagggggtggccaggaggggcccagactgtgaatcctgtgctctgcccgtgaccgccccccgccccatcaatcccattgcataggtttagagagagcacgtgtgaccactggcattcatttggggggtgggagattttggctgaagccgccccagccttagtccccagggccaagcgctggggggaagacggggagtcagggagggggggaaatctcggaagagggaggagtctgggagtggggagggatggcccagcctgtaagatactgtatatgcgctgctgtagataccggaatgaattttctgtacatgtttggttaattttttttgtacatgatttttgtatgtttccttttcaataaaatcagattggaacagtg

SEQ ID NO: 319488 - DNA, 459 bp, Artificial Sequence
  derived and/or modified sequence
atggaggccgaggcctggggcagccaggcccgggccggcctgggcgccgctgaaaactgcctcgaagggggtaaccaggctttcctcttagagcgagtgactggcactaaaggaagggggcaggggcagcctttagaaagggcaggagaagaaggcgaggcgggtggggatcccagaagggacccgggagaagtggtcgccaagtcacgcgtacgcgccagacctcacttgtcactctaccctgcactgccaggagtggccctggccttgctgtgttgccccttgcaggaccgatgtctgagactagtacctgcatgcccaactgcgggaccccaacacccacaggttctgccctgggccctgcagaagcagggcgtcgtgagatccggaccctgggccaccgaggaaatggtgtggggaactagaactggagtcggtggcctcaccgctgtgttctag

SEQ ID NO: 319489 - protein, 147 aa, Artificial Sequence
  derived and/or modified sequence
MGLLSLILFLGAKVTTANKTDSFLFSTGLTVLSSPGLKMRVLGCPPTPPQLTQGHTSGYVDLHKGPFLSPMRHPRGHTGPQILPQAWEPIGRRVRQCRGPQTFLKGPESKYFRLCRPDVLCCKTQFCYCSSKAAIDNSEVNECVVSQ

SEQ ID NO: 319490 - DNA, 444 bp, Artificial Sequence
  derived and/or modified sequence
atgggactactgagtctaatcctttttctcggggcgaaggtgaccaccgcaaacaaaacagattctttcctcttttcgaccgggctgaccgtgctgagttctccgggactcaagatgagagttctgggatgcccccctacccctccccagctgacccaaggtcacacgtctggctatgtggacctgcataagggtccattcctttctccaatgcgtcatccaagagggcacaccggacctcagatcctgccccaggcttgggaaccgattggccgccgggtgcggcagtgtaggggacctcagactttcctgaagggacctgagtctaagtacttccgcctgtgccgaccggatgtactgtgttgcaaaacccagttttgttattgctcatcaaaggccgccatagacaacagcgaggtgaacgagtgtgtggtgtcacaatag

SEQ ID NO: 319491 - DNA, 444 bp, Artificial Sequence
  derived and/or modified sequence
atgggcctgctgagcctcatcctcttcctgggcgccaaggtgaccacagccaacaagacagacagcttcctgttcagcacaggcctgactgtgctgagcagccctggcctgaagatgagggtgctgggctgcccccccaccccaccccagctgacccagggccacaccagcggctacgtggacctgcacaagggccccttcctgagccccatgaggcacccccggggccacacaggcccccagatcctgccccaggcctgggagcccatcggccggcgggtgcggcagtgccggggcccccagaccttcctgaagggccctgagagcaagtacttccggctgtgcaggccagatgtgctgtgctgcaagacccagttctgctactgcagcagcaaggccgccatcgacaacagcgaggtgaatgaatgtgtggtgtcccagtag

SEQ ID NO: 319492 - DNA, 444 bp, Artificial Sequence
  derived and/or modified sequence
atggggcttttgtcattgattctgtttctgggcgcaaaggttaccactgctaataagaccgacagctttctgttctcaactggtctcaccgtgttgagttctcctggtctgaagatgcgcgtgctgggttgccctccaactcccccacagctcactcaagggcatacctccgggtatgtagacctccataagggccctttcttgtctccaatgagacatcctcgagggcacacagggcctcagatcctgccccaggcttgggagcctatagggagacgagtgcgacagtgcagggggccacaaaccttcttgaaaggaccggaaagtaaatacttccgcctgtgtaggcctgatgtgctctgttgtaaaacacagttttgttactgctcttctaaggcagccatagacaactccgaggttaatgagtgtgtagtgtcccagtag

SEQ ID NO: 319493 - protein, 406 aa, Artificial Sequence
  derived and/or modified sequence
MLLLLLLLPLLWGTKGMEGDRQYGDGYLLQVQELVTVQEGLCVHVPCSFSYPQDGWTDSDPVHGYWFRAGDRPYQDAPVATNNPDREVQAETQGRFQLLGDIWSNDCSLSIRDARKRDKGSYFFRLERGSMKWSYKSQLNYKTKQLSVFVTDPPWNLTMTVFQGDATASTALGNGSSLSVLEGQSLRLVCAVNSNPPARLSWTRGSLTLCPSRSSNPGLLELPRVHVRDEGEFTCRAQNAQGSQHISLSLSLQNEGTGTSRPVSQVTLAAVGGAGATALAFLSFCIIFIIVRSCRKKSARPAAGVGDTGMEDAKAIRGSASQGPLTESWKDGNPLKKPPPAVAPSSGEEGELHYATLSFHKVKPQDPQGQEATDSEYSEIKIHKRETAETQACLRNHNPSSKEVRG

SEQ ID NO: 319494 - protein, 390 aa, Artificial Sequence
  derived and/or modified sequence
MLLLLLLLPLLWGTKGMEGDRQYGDGYLLQVQELVTVQEGLCVHVPCSFSYPQDGWTDSDPVHGYWFRAGDRPYQDAPVATNNPDREVQAETQGRFQLLGDIWSNDCSLSIRDARKRDKGSYFFRLERGSMKWSYKSQLNYKTKQLSVFVTASTALGNGSSLSVLEGQSLRLVCAVNSNPPARLSWTRGSLTLCPSRSSNPGLLELPRVHVRDEGEFTCRAQNAQGSQHISLSLSLQNEGTGTSRPVSQVTLAAVGGAGATALAFLSFCIIFIIVRSCRKKSARPAAGVGDTGMEDAKAIRGSASQGPLTESWKDGNPLKKPPPAVAPSSGEEGELHYATLSFHKVKPQDPQGQEATDSEYSEIKIHKRETAETQACLRNHNPSSKEVRG

SEQ ID NO: 319495 - DNA, 1221 bp, Artificial Sequence
  derived and/or modified sequence
atgttactgctcctgctcctgctccccctgctttggggcacaaaaggaatggagggagaccgccagtacggagacgggtatctgctccaagtacaggagttggtgaccgtgcaggaaggcctgtgcgtccatgtcccttgcagtttttcctacccacaggatggatggactgacagtgatccggtccatggctattggtttcgcgctggcgaccgaccttaccaggatgcccccgtcgccaccaataacccagaccgagaagtgcaggccgagacccagggccggtttcagctgctgggcgatatctggtctaatgattgctcgctgagtatcagggatgcaaggaagcgggacaagggctcttactttttcagattagaacgcggctcaatgaagtggtcttataagagccagctaaattacaaaacaaaacagttatccgttttcgtcactgatcctccttggaacctgaccatgaccgtctttcagggggatgccacggcttccaccgctctgggtaatggctccagcctgtccgtactcgaggggcagtccctcaggctggtgtgcgctgtgaatagcaatccccctgcccgactctcctggaccagaggcagtctgacgctgtgtccttcccgatcgtcaaatcctggcttgctggagttaccacgggtccacgtaagagacgagggcgagtttacctgcagagcccagaatgcacaaggaagccagcatatttccctgtccctttcacttcagaacgagggaactggcaccagccgccccgtctctcaggtgactcttgcggcggtcggcggggctggagccacagccctcgcattcctgagcttctgcataatcttcatcattgtgcgctcctgccgaaaaaaatctgctcgccccgccgctggggtcggggacacaggaatggaggatgctaaagcaattagaggtagcgcttctcaaggccccctgaccgagagctggaaggatggaaatccgcttaagaagcctccaccagcggtggctccaagcagcggggaagaaggggagttgcactacgcaaccttaagcttccataaggtgaagcctcaggacccccaggggcaggaggcgactgactcagaatacagcgagatcaagattcacaagcgcgaaacagctgaaacacaggcctgcctgagaaaccacaacccttcttcaaaagaggtgcgtggatag

SEQ ID NO: 319496 - DNA, 1173 bp, Artificial Sequence
  derived and/or modified sequence
atgctgctgttgctgctgttactgccattgttgtggggtactaaaggcatggagggagacaggcagtacggagacgggtacttactccaggttcaagaactggtgaccgtccaggaagggttgtgcgtccacgtgccctgttccttctcctatccccaggatgggtggacagatagcgaccctgtccatggatattggttcagggccggggatcggccctatcaggacgccccagtcgccactaacaatcccgacagagaggtacaagccgagacccaggggcgctttcagctactgggagatatctggagcaatgactgttctctcagtattagggacgcacgcaagagagacaaggggtcatatttctttcggctggaacggggcagcatgaagtggtcctacaaatcacagctgaactacaaaaccaagcagctgagcgtcttcgtgacagcatcgacggcattagggaacgggtcttcgttgtcagtgttggagggtcagtccctcagactggtgtgtgctgtaaattcgaacccccctgcgaggctgtcctggacaagaggctccctcaccctctgcccgtcaagatcctctaatcccgggctgcttgagctgcctcgcgtgcacgtccgggacgaaggggaatttacatgtcgagcccagaatgctcagggaagccagcacataagcctgtccctgagtctccaaaacgagggcaccggcacctctagacctgtgagccaggtaacgctggccgctgtgggcggagcaggcgccactgctcttgcgtttcttagtttttgtatcatttttatcatcgtcaggtcctgtaggaagaaaagcgcgcgcccggctgcgggagtcggtgatactggtatggaggatgcgaaagcaatacgggggagtgcaagccagggccctctgaccgagtcctggaaggacgggaatccactgaagaaacccccaccagccgtagctcccagcagcggagaggagggggaactccactacgctacactgtcgtttcataaagtcaaaccccaggacccccagggtcaggaggccaccgactctgaatattcagagattaaaatccacaagcgtgaaaccgctgagacccaggcctgcttgaggaatcataacccgtcctccaaagaagtacgcggctag

SEQ ID NO: 319497 - DNA, 1221 bp, Artificial Sequence
  derived and/or modified sequence
atgctgctgctgctgctgctgctgcccctgctgtggggcaccaagggcatggagggggaccggcagtatggagatggctacctgctgcaggtgcaggagctggtgacagtgcaggagggcctgtgtgtgcacgtgccctgcagcttctcctacccccaggacggctggacagacagcgaccctgtgcacggctactggttccgggccggggaccggccctaccaggatgcccctgtggccaccaacaacccagaccgggaggtgcaggccgagacccagggccgcttccagctgctgggggacatctggagcaatgactgcagcctgagcatcagagatgccaggaagagggacaagggcagctacttcttccggctggagcggggctccatgaagtggagctacaagagccagctgaactacaagaccaagcagctgtctgtgtttgtgacagatcctccctggaacctgaccatgaccgtcttccagggagatgccacagccagcacagccctgggcaatggcagcagcctgtctgtgctggagggccagagcctgcggctggtgtgtgctgtgaacagcaaccccccagcccggctgtcctggacccggggcagcctgaccctgtgccccagccgcagcagcaaccctggcctgctggagctgccccgggtgcacgtgagagatgaaggagagttcacctgccgggcccagaatgcccagggcagccagcacatcagcctgagcctgagcctgcagaatgaaggaacaggcaccagcaggcctgtgtcccaggtgaccctggccgctgtgggcggggccggggccacagccctggccttcctgtccttctgcatcatcttcatcatcgtgcgcagctgcaggaagaagagcgcccggcctgctgctggggtgggggacaccggcatggaggatgccaaggccatccggggcagcgccagccagggccccctgacagagagctggaaggatggcaaccccctgaagaagcccccacctgctgtggcccccagcagcggggaggagggggagctgcactacgccaccctgtccttccacaaggtgaagccccaggacccccagggccaggaggccacagattctgagtacagcgagatcaagatccacaagcgggagacagctgagacccaggcctgcctgaggaaccacaaccccagcagcaaggaggtgcggggctag

SEQ ID NO: 319498 - DNA, 1173 bp, Artificial Sequence
  derived and/or modified sequence
atgctgctgctgctgctgctgctgcccctgctgtggggcaccaagggcatggagggggaccggcagtatggagatggctacctgctgcaggtgcaggagctggtgacagtgcaggagggcctgtgtgtgcacgtgccctgcagcttctcctacccccaggacggctggacagacagcgaccctgtgcacggctactggttccgggccggggaccggccctaccaggatgcccctgtggccaccaacaacccagaccgggaggtgcaggccgagacccagggccgcttccagctgctgggggacatctggagcaatgactgcagcctgagcatcagagatgccaggaagagggacaagggcagctacttcttccggctggagcggggctccatgaagtggagctacaagagccagctgaactacaagaccaagcagctgtctgtgtttgtgacagccagcacagccctgggcaatggcagcagcctgtctgtgctggagggccagagcctgcggctggtgtgtgctgtgaacagcaaccccccagcccggctgtcctggacccggggcagcctgaccctgtgccccagccgcagcagcaaccctggcctgctggagctgccccgggtgcacgtgagagatgaaggagagttcacctgccgggcccagaatgcccagggcagccagcacatcagcctgagcctgagcctgcagaatgaaggaacaggcaccagcaggcctgtgtcccaggtgaccctggccgctgtgggcggggccggggccacagccctggccttcctgtccttctgcatcatcttcatcatcgtgcgcagctgcaggaagaagagcgcccggcctgctgctggggtgggggacaccggcatggaggatgccaaggccatccggggcagcgccagccagggccccctgacagagagctggaaggatggcaaccccctgaagaagcccccacctgctgtggcccccagcagcggggaggagggggagctgcactacgccaccctgtccttccacaaggtgaagccccaggacccccagggccaggaggccacagattctgagtacagcgagatcaagatccacaagcgggagacagctgagacccaggcctgcctgaggaaccacaaccccagcagcaaggaggtgcggggctag

SEQ ID NO: 319499 - DNA, 1221 bp, Artificial Sequence
  derived and/or modified sequence
atgctgctgctgctgctgctgctgcccctgctgtggggcaccaagggtatggagggagacaggcaatatggcgacgggtacctgcttcaggtccaggagttagtaactgttcaagaaggcctttgtgtgcatgtgccctgcagcttctcctacccacaagacggctggactgactcagatcctgtgcacggatattggtttagggcgggtgacagaccctatcaggatgcaccagtggccacaaacaaccccgatagagaggttcaggccgagacccagggaaggttccagctccttggggatatctggtccaacgattgtagtctgagcatcagagatgcccggaagcgagataaaggtagttacttcttccgtctcgagcgaggatctatgaagtggtcctataagtcacagctgaattataaaaccaaacaacttagcgtgtttgtgaccgatcccccgtggaatctgacaatgactgtttttcagggcgatgctaccgcctctaccgccttgggcaatgggtctagtctgtctgttctggagggccagagtttgcggctagtctgcgctgtcaatagtaatccgccagcacgtttgagctggacaaggggtagtttgacactgtgtccttccagaagctctaaccccgggctcttggagttgccacgcgtgcatgtgagagacgagggggaattcacatgtagagcccagaacgcgcagggctctcagcatatctccctcagtctgagcctgcagaacgagggcacaggcacctcgcgcccagtgtcacaggtgaccctcgccgccgtgggaggggccggcgccaccgctcttgcctttctctctttttgtattatattcatcattgtgcgttcatgccgaaagaagtccgcaagacctgccgccggggtaggtgatacagggatggaggacgccaaggcaattcgaggatcagcatcgcagggccccctgaccgaaagctggaaagacggcaatcctctcaagaaaccacctccggctgtcgctccgtcttccggcgaggaaggggagctgcactatgccacacttagttttcacaaggtgaaaccacaagacccccagggtcaagaggccaccgactcggaatatagcgaaatcaaaattcacaaaagagagacagctgagacacaggcctgtttacggaatcacaacccgtcctcaaaggaggttaggggctag

SEQ ID NO: 319500 - DNA, 1173 bp, Artificial Sequence
  derived and/or modified sequence
atgctgctgctgctgctgctgctgcccctgctgtggggcaccaagggcatggaaggcgatcgccagtatggggacgggtacctgctccaggtgcaagagctggtcactgtccaggagggcctttgcgtacatgtcccctgttcatttagctacccccaggatggatggacagactccgaccctgtccacggctattggttccgcgctggcgatcgcccatatcaagacgcaccggtagccacgaacaacccggaccgcgaggtgcaggccgaaacacaaggccgattccaactcctcggcgacatttggtccaatgactgttcgctgtccattcgggatgctcgtaagagagataagggctcatattttttccgacttgagcgcgggagtatgaaatggagctacaaatcccaattgaattacaagactaaacagctcagcgtcttcgtgacagctagcacagccctgggcaacggttctagcctttccgtgcttgaaggtcagagtttgcgactggtatgcgcagttaattctaatcctcctgcgagactgtcatggaccaggggctctctcactctttgtccttctagaagcagcaatccgggcctgctggaactccctcgggtacatgtgagggacgagggagaattcacctgtcgggcacagaatgctcagggcagccaacacatctcccttagtctgagcctgcagaacgaggggactggcacatcccggcccgtctctcaggtcactctggctgcggtgggtggggctggagcaaccgcattggccttcctgtccttttgcatcattttcattatagtgcgaagttgtagaaagaagagtgctcgccccgccgccggagttggggacaccggcatggaggacgctaaggctattcggggctcagcctcccagggcccccttaccgaatcatggaaggacgggaatcctctgaagaaaccgcccccagctgtggcaccatcctccggagaggagggggaactccactacgctacccttagctttcacaaggttaaaccccaggatccccaaggccaggaggccacggattccgaatattcagaaatcaaaatccataaacgagaaaccgcggagacacaagcctgcctgagaaaccataatccctcatcgaaagaggtgaggggctag

SEQ ID NO: 319501 - DNA, 1221 bp, Artificial Sequence
  derived and/or modified sequence
atgttactgctgctgctgctgctgcctttgctttggggcacaaagggaatggaaggcgatcgccagtacggcgacgggtacctgttgcaggtccaggagcttgtcacagtgcaggaaggcctctgcgtccatgtcccctgctccttcagctaccctcaggacggatggacagattctgaccccgtgcacgggtactggtttcgcgcaggtgacaggccatatcaggatgctccggtcgcgaccaacaatccagatcgtgaggttcaagccgaaactcaaggcaggttccagctcctcggcgacatctggagtaacgattgtagcttgtcaatcagggacgccagaaagcgagacaaagggtcgtatttcttccgcctcgagcgcggatctatgaaatggtcgtataaatcacagctgaactacaagacaaaacagcttagcgtctttgtgacggatcctccctggaacctgacaatgaccgtgttccagggagacgccactgcgtccacagctctgggaaatgggagctctctctcggtgctggaggggcagagtttaagactcgtgtgcgccgtgaactccaacccgccagctcgcctcagctggacaagggggtctttgacactctgcccctccagaagcagtaatcccggtctattagagcttccacgcgtccatgtccgggatgaaggcgagtttacctgtcgagcccagaatgcccaaggcagccagcacataagccttagcctgagcttacagaacgaagggaccggtactagtaggcccgtgagccaggtgacccttgccgcagttggcggtgctggagccacggctctcgcatttctgtccttctgtattatcttcataatcgtcagatcttgcaggaagaagagtgcccgacccgcagccggagtgggtgacacaggaatggaggacgcaaaagccatcagaggatctgccagccagggtcctttaacggagtcgtggaaggatggaaatccattaaagaaacctcctcccgctgtcgcgccaagtagcggcgaggagggcgagctgcactacgctactctgagtttccacaaagtcaaacctcaggatccccaaggccaggaggccacggacagtgaatactccgaaattaaaatccacaaaagggagactgccgagacacaggcatgcctccgaaaccacaaccccagcagcaaggaggttcggggatag

SEQ ID NO: 319502 - DNA, 1173 bp, Artificial Sequence
  derived and/or modified sequence
atgctcctcctgctgctcctgctgcctcttttgtgggggaccaagggcatggagggagacaggcagtatggagacgggtacctcctacaagtgcaggagctggttaccgtccaggagggcctttgcgtgcacgtcccctgctccttttcctacccgcaggatggttggactgattctgatccagtccacggttactggttcagagctggcgataggccataccaggacgcgcctgtggccaccaacaatcccgatagggaggtacaggccgaaacccagggccgattccagctgctgggcgacatctggtccaatgattgctcactctccataagggatgctcggaagcgcgacaagggttcctatttttttaggctcgagagaggatcaatgaagtggagctacaaatctcagttaaattacaagacgaaacagctgtcggtctttgtaacggcaagcacagccctgggcaatggtagcagcttatctgtccttgagggtcagagcctgaggcttgtttgcgctgtaaatagtaatccgcctgctagactgtcctggacacggggatcgttaactctgtgtccatcacgcagctcaaatccaggccttctggagctgccccgagtacatgttagggacgagggtgaattcacctgcagagctcagaatgcccagggatcacagcacatctccctaagcctcagtctgcagaatgagggcacaggcacctcaaggcccgtgtcccaggtgacgctggccgctgttggcggtgcgggtgccacagctctggctttcctgtcattctgcattatcttcatcattgtcagaagttgccgtaaaaagtctgcgcgacccgctgccggagtaggggatacaggaatggaagatgcgaaagccattcgcggatccgccagccagggcccacttactgagagttggaaagatggaaatcccctgaagaaaccgccacctgcagtggccccatcatctggtgaggaaggagaactgcactatgccactctgagtttccacaaggttaagccccaggacccacaggggcaagaagctaccgattcggagtacagcgagatcaagatccataagcgggaaaccgccgagactcaggcttgtttacgaaatcacaatccatcttcgaaggaggtgaggggttag

SEQ ID NO: 319503 - DNA, 2669 bp, Artificial Sequence
  derived and/or modified sequence
agtttctgagagaagaaccctgaggaacagacgttccctggcggccctggcgccttcaaacccagacatgctgctgctgctgctgctgctgcccctgctctgggggacaaaggggatggagggagacagacaatatggggatggttacttgctgcaagtgcaggagctggtgacggtgcaggagggcctgtgtgtccatgtgccctgctccttctcctacccccaggatggctggactgactctgacccagttcatggctactggttccgggcaggagacagaccataccaagacgctccagtggccacaaacaacccagacagagaagtgcaggcagagacccagggccgattccaactccttggggacatttggagcaacgactgctccctgagcatcagagacgccaggaagagggataaggggtcatatttctttcggctagagagaggaagcatgaaatggagttacaaatcacagttgaattacaaaactaagcagctgtctgtgtttgtgacagaccctccttggaacttgaccatgactgtcttccaaggagatgccacagcatccacagccctgggaaatggctcatctctttcagtccttgagggccagtctctgcgcctggtctgtgctgtcaacagcaatccccctgccaggctgagctggacccgggggagcctgaccctgtgcccctcacggtcctcaaaccctgggctgctggagctgcctcgagtgcacgtgagggatgaaggggaattcacctgccgagctcagaacgctcagggctcccagcacatttccctgagcctctccctgcagaatgagggcacaggcacctcaagacctgtatcacaagtgacactggcagcagtcgggggagctggagccacagccctggccttcctgtccttctgcatcatcttcatcatagtgaggtcctgcaggaagaaatcggcaaggccagcagcgggcgtgggggatacaggcatggaagatgcaaaggccatcaggggctcggcctctcagggacccctgactgaatcctggaaagatggcaaccccctgaagaagcctcccccagctgttgccccctcgtcaggggaggaaggagagctccattatgcaaccctcagcttccataaagtgaagcctcaggacccgcagggacaggaggccactgacagtgaatactcggagatcaagatccacaagcgagaaactgcagagactcaggcctgtttgaggaatcacaacccctccagcaaagaagtcagaggctgattctcatagaacaagaaccctctagagccccatgctatgcagtaggtcaccagggctccctcctcctgtctaaccaaaacttggaccaatgtctcccctttccccggctaccagggacccatccctgcctctagcttctactacccaccattctcctctcgacctctctgaggttgactattttagattccacatagagatgaggtcatgtggtacttgcctctctgtgtgtggctcattttacacaaaaaaatatcccctaggttcatccatgttctctcaaatgacagaatcaagcactgaatatttttttttctttgagagatggagtttcgctctgttgcccaggctggagtgcagtggttcaatctctgctcactgcaacctccacctcctgggttcaaacgattctcctgcctcagcttcccaagtagctggtactacaggcgtgtgtcaccacgcccagctaatttttgtattttttagtagagacggggtttcactataagtgggccaggctagtctcaaactcctgacctcaagtgatctgcctgccttggcctcccaaagtgctgggatttcaggcatgagccaccgcacccagcttgcattgaatattttcaaggagctaaaagaagattttaaatggtctcacaaaaacagataaatatttgcacagatgggtgtgctaatcattgtgccttgatggttccacgatgtatccgggtgtggaaatctcactgggtctctctcaaggccactcggctactcaggacagggctggaatttaaagcctgtccgattctgaggtctcttctctcatctagcactgagtcaagcaatcagcaggctgggcaccccttagccataagttttcaggaaataaattccttgagggcattgacttttacaaaagagggagcagcaatggcctagagtctcaggaacaagacaggtgcactgaggagatgaaggccgggaccccctgcccaacctgtatggcgggtctgtacttattttgtttacccccaatttaaaacgtttttttttattgcaggttgtttgtttgatatggtttggctgtgtccccacccaaatcttatctagaattgtaatcagaattataatccccatgtgttgggggagggacctggtgggaggtgataggatcatgggggtggttcccccatgctgttctgatagtgagtgagttatcacgagatctgatggttttgtaagtggtggtttcccctgctcttctctcttgcctgccaccatgtaagatgtgcctggttccccttccgccatgattgtaagtttcctgaggcctcccccgccatgtggaactgtgagtcaattacacctctttcatttataaatt

SEQ ID NO: 319504 - DNA, 1528 bp, Artificial Sequence
  derived and/or modified sequence
tttctgagagaagaaccctgaggaacagacgttccctggcggccctggcgccttcaaacccagacatgctgctgctgctgctgctgctgcccctgctctgggggacaaaggggatggagggagacagacaatatggggatggttacttgctgcaagtgcaggagctggtgacggtgcaggagggcctgtgtgtccatgtgccctgctccttctcctacccccaggatggctggactgactctgacccagttcatggctactggttccgggcaggagacagaccataccaagacgctccagtggccacaaacaacccagacagagaagtgcaggcagagacccagggccgattccaactccttggggacatttggagcaacgactgctccctgagcatcagagacgccaggaagagggataaggggtcatatttctttcggctagagagaggaagcatgaaatggagttacaaatcacagttgaattacaaaactaagcagctgtctgtgtttgtgacagcatccacagccctgggaaatggctcatctctttcagtccttgagggccagtctctgcgcctggtctgtgctgtcaacagcaatccccctgccaggctgagctggacccgggggagcctgaccctgtgcccctcacggtcctcaaaccctgggctgctggagctgcctcgagtgcacgtgagggatgaaggggaattcacctgccgagctcagaacgctcagggctcccagcacatttccctgagcctctccctgcagaatgagggcacaggcacctcaagacctgtatcacaagtgacactggcagcagtcgggggagctggagccacagccctggccttcctgtccttctgcatcatcttcatcatagtgaggtcctgcaggaagaaatcggcaaggccagcagcgggcgtgggggatacaggcatggaagatgcaaaggccatcaggggctcggcctctcagggacccctgactgaatcctggaaagatggcaaccccctgaagaagcctcccccagctgttgccccctcgtcaggggaggaaggagagctccattatgcaaccctcagcttccataaagtgaagcctcaggacccgcagggacaggaggccactgacagtgaatactcggagatcaagatccacaagcgagaaactgcagagactcaggcctgtttgaggaatcacaacccctccagcaaagaagtcagaggctgattctcatagaacaagaaccctctagagccccatgctatgcaatgtgcctggttccccttccgccatgattgtaagtttcctgaggcctcccccgccatgtggaactgtgagtcaattacacctctttcatttataaattactcagtctcaggtatttcttaatagcagtgtgaaaacaggctaacacattgttctttgaaatttaaaaatagcgttagcttttcagttgaatcacgcagctcttacatgtgccatgccatgagtgttgccaaacatgcacccctgtgtaa

SEQ ID NO: 319505 - DNA, 1221 bp, Artificial Sequence
  derived and/or modified sequence
atgctgctgctgctgctgctgctgcccctgctgtggggcaccaagggcatggagggcgacagacagtacggcgacggctacctgctgcaggtgcaggagctggtgaccgtgcaggagggcctgtgcgtgcacgtgccctgcagcttcagctacccccaggacggctggaccgacagcgaccccgtgcacggctactggttcagagccggcgacagaccctaccaggacgcccccgtggccaccaacaaccccgacagagaggtgcaggccgagacccagggcagattccagctgctgggcgacatctggagcaacgactgcagcctgagcatcagagacgccagaaagagagacaagggcagctacttcttcagactggagagaggcagcatgaagtggagctacaagagccagctgaactacaagaccaagcagctgagcgtgttcgtgaccgaccccccctggaacctgaccatgaccgtgttccagggcgacgccaccgccagcaccgccctgggcaacggcagcagcctgagcgtgctggagggccagagcctgagactggtgtgcgccgtgaacagcaacccccccgccagactgagctggaccagaggcagcctgaccctgtgccccagcagaagcagcaaccccggcctgctggagctgcccagagtgcacgtgagagacgagggcgagttcacctgcagagcccagaacgcccagggcagccagcacatcagcctgagcctgagcctgcagaacgagggcaccggcaccagcagacccgtgagccaggtgaccctggccgccgtgggcggcgccggcgccaccgccctggccttcctgagcttctgcatcatcttcatcatcgtgagaagctgcagaaagaagagcgccagacccgccgccggcgtgggcgacaccggcatggaggacgccaaggccatcagaggcagcgccagccagggccccctgaccgagagctggaaggacggcaaccccctgaagaagcccccccccgccgtggcccccagcagcggcgaggagggcgagctgcactacgccaccctgagcttccacaaggtgaagccccaggacccccagggccaggaggccaccgacagcgagtacagcgagatcaagatccacaagagagagaccgccgagacccaggcctgcctgagaaaccacaaccccagcagcaaggaggtgagaggctag

SEQ ID NO: 319506 - DNA, 1173 bp, Artificial Sequence
  derived and/or modified sequence
atgctgctgctgctgctgctgctgcccctgctgtggggcaccaagggcatggagggcgacagacagtacggcgacggctacctgctgcaggtgcaggagctggtgaccgtgcaggagggcctgtgcgtgcacgtgccctgcagcttcagctacccccaggacggctggaccgacagcgaccccgtgcacggctactggttcagagccggcgacagaccctaccaggacgcccccgtggccaccaacaaccccgacagagaggtgcaggccgagacccagggcagattccagctgctgggcgacatctggagcaacgactgcagcctgagcatcagagacgccagaaagagagacaagggcagctacttcttcagactggagagaggcagcatgaagtggagctacaagagccagctgaactacaagaccaagcagctgagcgtgttcgtgaccgccagcaccgccctgggcaacggcagcagcctgagcgtgctggagggccagagcctgagactggtgtgcgccgtgaacagcaacccccccgccagactgagctggaccagaggcagcctgaccctgtgccccagcagaagcagcaaccccggcctgctggagctgcccagagtgcacgtgagagacgagggcgagttcacctgcagagcccagaacgcccagggcagccagcacatcagcctgagcctgagcctgcagaacgagggcaccggcaccagcagacccgtgagccaggtgaccctggccgccgtgggcggcgccggcgccaccgccctggccttcctgagcttctgcatcatcttcatcatcgtgagaagctgcagaaagaagagcgccagacccgccgccggcgtgggcgacaccggcatggaggacgccaaggccatcagaggcagcgccagccagggccccctgaccgagagctggaaggacggcaaccccctgaagaagcccccccccgccgtggcccccagcagcggcgaggagggcgagctgcactacgccaccctgagcttccacaaggtgaagccccaggacccccagggccaggaggccaccgacagcgagtacagcgagatcaagatccacaagagagagaccgccgagacccaggcctgcctgagaaaccacaaccccagcagcaaggaggtgagaggctag

SEQ ID NO: 319507 - protein, 558 aa, Artificial Sequence
  derived and/or modified sequence
MAALTRDPQFQKLQQWYREHRSELNLRRLFDANKDRFNHFSLTLNTNHGHILVDYSKNLVTEDVMRMLVDLAKSRGVEAARERMFNGEKINYTEGRAVLHVALRNRSNTPILVDGKDVMPEVNKVLDKMKSFCQRVRSGDWKGYTGKTITDVINIGIGGSDLGPLMVTEALKPYSSGGPRVWYVSNIDGTHIAKTLAQLNPESSLFIIASKTFTTQETITNAETAKEWFLQAAKDPSAVAKHFVALSTNTTKVKEFGIDPQNMFEFWDWVGGRYSLWSAIGLSIALHVGFDNFEQLLSGAHWMDQHFRTTPLEKNAPVLLALLGIWYINCFGCETHAMLPYDQYLHRFAAYFQQGDMESNGKYITKSGTRVDHQTGPIVWGEPGTNGQHAFYQLIHQGTKMIPCDFLIPVQTQHPIRKGLHHKILLANFLAQTEALMRGKSTEEARKELQAAGKSPEDLERLLPHKVFEGNRPTNSIVFTKLTPFMLGALVAMYEHKIFVQGIIWDINSFDQWGVELGKQLAKKIEPELDGSAQVTSHDASTNGLINFIKQQREARVQ

SEQ ID NO: 319508 - protein, 520 aa, Artificial Sequence
  derived and/or modified sequence
SRHGRSHPGPPVPEAAAMVPRAPLRAEPAPPLRCQQGPLQPLQVRAGRRRGLPRAAPGTGHAGLGSGGGGSGARGPQSPTSRPRTGAQAESALRPWSLLGVRSWGLAASPGVSAPGLLRYEEKRAPPWGHFPSSSPCSSGHLSRGSFRSCEERPWLTQQAGKGCPFPSAPGHMSLGASAGRAARAGVFEGAGWKDGDVGRDSCRRHLCTTGKWEGVFEQIMGGSAAKGALITDTGGGGGGERLWLRARRPDGHPCHLDGCLSNLRQKVEALGRGGPPLQSGLLIQGLPASTVCEDGFFLWAAVADHPGGPAGDRHHHCAGWPRPLWGVGQGGCFFWEQLLLRAWLPARETRVWSAASPSFCSLTLNTNHGHILVDYSKNLVTEDVMRMLVDLAKSRGVEAARERMFNGEKINYTEVSRPHIPSGASFLPFGVYLTVSRITLCLHPFSWAMLLLNEGPEGLFPPACSRALGCAFHKIGLVSSLEWFPVSAWEEHISYPQGEFLKADIFLEKLTLIYPQCKF

SEQ ID NO: 319509 - DNA, 1563 bp, Artificial Sequence
  derived and/or modified sequence
tctcgacacggtagatcccaccccggaccccctgtgccggaagcggccgctatggtgccacgggcccccctgcgggctgaacctgcgccgcccttgcgctgtcagcagggcccactgcagcccctgcaggttcgtgccggcagacggcgaggacttcccagggcagcccccggaaccgggcacgctggcctcggctctggaggagggggtagtggagcaagggggcctcagtctcctacttccagaccgagaacgggagcccaggcagaaagcgctctcaggccatggtcattgcttggtgtccggtcctggggtctggctgctagcccaggcgtatccgccccgggtctgctgcgatacgaggagaagagggctccgccatggggccattttcccagcagcagcccttgctcctcaggtcacctcagccgcggaagtttccgctcgtgtgaggagcgtccttggctcactcagcaggccgggaagggttgcccattcccctctgcccctggccatatgtccctcggcgcttccgctggccgagcggcaagagccggcgtttttgagggggcagggtggaaagacggtgatgtgggccgagattcttgcaggcggcacctctgtacaaccggcaagtgggagggagtgttcgagcagataatgggtggctcagctgctaagggagcattgattaccgacactggcggaggtggtggcggggagcgcctatggttgcgcgcacgcagacctgatgggcacccatgccatctcgacgggtgcctttctaacttgcggcaaaaagtcgaggctctcgggagaggaggcccaccactccagtcgggactcctcatacagggtctccccgcatccacggtatgcgaggatggctttttcctgtgggctgccgttgcagaccatccaggtggcccggccggcgatagacaccatcactgcgccggttggccgagacctctgtggggcgttggccagggggggtgctttttctgggagcagctccttctaagggcttggcttccagcccgggagacgagagtgtggagtgctgcatctccgtctttttgcagtttgaccttgaatacaaaccacgggcacatccttgtggattatagcaagaacttggttactgaggacgtgatgagaatgctggtagatctggccaagtcccggggggtggaggccgcacgcgaacgcatgttcaacggcgaaaagatcaattatactgaggttagtcggcctcatataccttccggtgcctcgttcctgccattcggtgtttacttgaccgtaagcaggattactctttgcttgcaccccttcagctgggcaatgctgttgcttaacgagggacctgagggactgttccctccagcttgttcacgagccctgggatgcgcctttcacaagatcggtctagtaagttccctcgagtggtttcccgtgagtgcctgggaggaacacatctcatacccgcagggtgaatttttgaaggccgacatcttcctcgaaaagctcactctgatatacccccagtgtaagttttag

SEQ ID NO: 319510 - DNA, 4631 bp, Artificial Sequence
  derived and/or modified sequence
cgcgtctcactcagtgtaccttctagtcccgccatggccgctctcacccgggacccccagttccagaagctgcagcaatggtaccgcgagcaccgctccgagctgaacctgcgccgcctcttcgatgccaacaaggaccgcttcaaccacttcaggtgcgggcgggccggaggcgggggctgccacgcgcggcgcccggaaccgggcacgcgggcctggggtctggaggcgggggcagcggtgcccggggaccccagtccccgacctccaggccacggactggggcccaggccgagtccgcacttcgtccttggagtctccttggagtgcgttcctgggggcttgcagcctcgccgggagtctcggccccgggtctgcttcgttacgaggaaaaacgggcccctccgtggggacatttcccctcctcctccccgtgcagctctggccatttgagcaggggctcctttcgcagttgtgaagagaggccttggctgacgcagcaagcgggaaagggctgtccctttccatccgctcctggccacatgagcttgggagcgtctgcagggcgggcagcccgggcgggggtgtttgagggagctgggtggaaggatggagacgtcgggcgtgattcctgcagaagacacctgtgcacgaccgggaagtgggaaggagtgtttgagcaaatcatgggcgggagtgcggccaagggagctctgatcactgatactggtggaggcgggggaggggagcgactgtggctccgggctagacgtcccgatggccatccctgtcatctggatgggtgcctgagtaacttacggcagaaagtggaagccctgggaaggggtggtcccccacttcagtccgggctcctcatccagggtctgcctgcatctacggtctgtgaggatggcttctttctctgggctgctgttgcagatcatcctggtgggccagcaggtgacagacaccaccactgtgctgggtggccgcggcccttgtggggcgtgggtcagggaggatgtttcttctgggaacagctcctgcttagggcatggctccccgctagggagaccagggtgtggtcagcagcatctccatctttctgcagcttgaccctcaacaccaaccatgggcatatcctggtggattactccaagaacctggtgacggaggacgtgatgcggatgctggtggacttggccaagtccaggggcgtggaggccgcccgggagcggatgttcaatggtgagaagatcaactacaccgaggtgagcaggccccacataccctctggggcctccttccttccctttggggtttatctgactgttagccgcatcaccctgtgtcttcaccccttctcttgggcaatgcttttgcttaatgaggggcctgaaggcctttttcctcctgcttgtagcagggctttggggtgtgccttccacaagattggtttggtgagctccttggaatggttcccagtgtctgcctgggaggagcatatctcatacccacagggagagtttctcaaggctgacattttcttggagaagttaactctaatatatcctcaatgcaagttttagtagcgacaagaagaatcttagatcaccaaagacttcagcctactcaagcagtaggagtcaataggaagcagtggtgaggccaggcctgggggcccctgttcctgactcagtatgggagcccagcctggaggtataatggacactgagcacccagactctgtcctcatgatgtcattatcctcctcttacatgtgaggagtctgaggttcagaggtcacatcacttatctaagatgtcatagctgtaagaggcagaatggagattcacactcaacctgtcttgcattgtgggtctaagctgagagaggatgcaatcaaggaaggctttctggaggagtgcatttgccaataaaatgtggcgcaggagtggggtctggcagggtgagggtggggtggcatgaagccctccaccttagcaagcctctcactgggtcggaatcccaagatgatccttttcctgcccacctggggtcgttagaccttccctcaaggactcctctgctgacttcaggccatttcactcacgtggctgggccagccgcctggcacccgtcacagacttcaagtctggtttggttcctggcagttggtagttatcgggctgcttggtgagggaagcttgagttgcatgccttgctgcaaatccaaggagctgaggacactgcctaaaacgtgccagcaaacaccatggacacacattgggaggatgaggttacttcaggcttcatgagcactcatcttcggaaagcgtttatttatttatttattttgagatggagtcttgctctgtcgcccaggctggagtgcagtggtgcgatcttggctcactgcaacctctgtctaatgggttcaggcgattctctgcctcagattcctgagtagctggaactacaggtgtgtgccacccccacctggctgatttttgtatttttagtagagacaggatgtcaccatgttggccaggctggtctcgaattcatgacctcaagttatccacctgccatggcctcccagagttccgggattacaggcgtgagccatggcgcccggcctctgaaagcatttattgcttgtttctgacatgtattgttgccattctctgcctttgctcactgttcctcttttctctcactgttcatgccctgagcatctctggcaggccttcggggcctgtcctaggcatatatgggtcccctcctctcctcctgactgtctgcagcacataagtccttggggagctcctactcctctaagcatacagtgggttcttggaacaaggttatggtgctaacagagacctcagggcctgcctgtctagtggatagagggccgagctatggcaccatgcccagctgggagcatggctgcctggggttggggggggcagtctttatatcctgaccgtaatccccagggtcgagccgtgctgcacgtggctctgcggaaccggtcaaacacacccatcctggtagacggcaaggatgtgatgccagaggtcaacaaggttctggacaagatgaagtctttctgccaggtaagtggctactgggccggactcacccttggccgtgtgtgtgagttatttgggaatctgggagccctaaggggcagctcttccctcttcttgtaggcaggactcaggttctcactgcagcttaagggaggggttgcctgtgtgatcgctgaccctggagtctctgctgaggcctgaatttctcctggctctgctctgaaggaatctgctgctggcagaagtggggccagtttctttcctgaattgtagacacctatggactcatggtgacaaaccacagaggcttcaaatgaaaagtggggcccctgagagacaggacagtcaggaaaggaaggagctttttcttttttctttttttttttttgagatggagtctcactctctcgcccagagtggactgcagtcgtgctatctcagctcactgcaacttccgcctcctggattcaagctattctcctacctcagcctggccatcatggtgaaaccccatctccactaaaaatacaaaaattagccagttttggtgacatacgcctgcaatcccagctacttgggagactgaggcaggagaatcgcttgaacccgtgcggcagaggttgcagtgagctgcgattgcgccactgcactccagcctgggcgacagagggagactctgtcaaaaaaaaaaaaaaatttcctcatccccattcccagctaaccctccagaagcagcctttgtaaagtttcctgtagccaggcgcagcagctcatacctctattcccaactattcaggaggctgaggtgggaggatggcttgagcctgggaagttgaggctgcagtgagccatggtgacaccactgcactgcagcctgggcgacagcaagatcgtgtctctaaataaatttaaaaaatagaaaagttttcctgtgaagtcttccagaaagttcctgtgcacatacacatctgtcatctcctctttgaaacacgtacacatgtgcacatgcacacaggttggttttctccctgctcctctgaagcttatttccacctggaagtatgtaagcagtgtccgtgtgtcagtgacagtgcatgtaacatgccttcttttccttgtgtgtagggtggtaggggttgcctcagagaccagctaagtttccccacatcaagcacttgcctcagtgtctaccctagcggtgattctgcaggggtgggttggcagacatcctcacgtctggagaacgagggtgatgccggtgtgcctgtgtgggctgtgcatgctacgagggtgatcgtccaaactcttgtcagctgtgatcatttgctgcttgtcctaggagcagtggcctccatgtgtggctggtcagagtccagttactttggccaagagccactttcagacctgaaaatgggctgggtgcagtggctcacgcctgtaatcccagcactctgggaggctgaggcaggtggatcatgtgaggtcgggagtttgagatcagcctgatcaacatggtgaaacgccgtctgtact

SEQ ID NO: 319511 - DNA, 1563 bp, Artificial Sequence
  derived and/or modified sequence
agcagacatggccgcagccaccctggcccccctgtgcctgaggccgccgccatggtgccccgggcccccctgcgggcagagcccgccccacccctgcgctgccagcagggccccctgcagcccctgcaggtgcgggccggcagaagaagaggcctgcccagggctgcccctggcactggacatgctggcctgggcagcggcggcggcggcagcggggcccggggcccccagagccccaccagccggcccaggactggagcccaggccgagagcgccctgcggccctggagcctgctgggcgtgcgctcctggggcctggccgccagccctggggtgtctgcccctggcctgctgcgctatgaggagaagagggccccaccctggggccacttccccagcagcagcccctgcagcagcggccacctgagccggggcagcttccgcagctgtgaggagcggccctggctgacccagcaggccggcaagggctgccccttccccagcgcccctggccacatgagcctgggcgccagcgctggccgggccgcccgggccggcgtgtttgagggcgccggctggaaggatggagatgtgggccgggacagctgccgccgccacctgtgcaccaccgggaagtgggagggcgtgtttgagcagatcatgggcggcagcgctgccaagggggccctgatcacagacaccggcggcggcggcggcggggagcggctgtggctgcgggcccggcggccagatggccacccctgccacctggatggctgcctgagcaacctgcggcagaaggtggaggccctgggccggggcggcccccccctgcagagcggcctgctgatccagggcctgcctgccagcacagtgtgtgaagatggcttcttcctgtgggccgctgtggccgaccaccctgggggccctgctggggacagacaccaccactgtgccggctggccccggcccctgtggggcgtgggccagggcggctgcttcttctgggagcagctgctgctgcgggcctggctgcctgcccgggagaccagggtgtggagcgctgccagccccagcttctgcagcctgaccctgaacaccaaccacggccacatcctggtggactacagcaagaacctggtgacagaagatgtgatgaggatgctggtggacctggccaagagcagaggagtggaggccgcccgggagaggatgtttaatggagagaagatcaactacacagaggtgtcccggccccacatccccagcggggccagcttcctgcccttcggcgtgtacctgactgtgagccgcatcaccctgtgcctgcaccccttctcctgggccatgctgctgctgaatgaaggacctgagggcctcttccccccagcctgcagccgggccctgggctgtgccttccacaagattggcctggtgagcagcctggagtggttccctgtgtctgcctgggaggagcacatctcctacccccagggcgagttcctgaaggctgacatcttcctggagaagctgaccctcatctacccccagtgcaagttctag

SEQ ID NO: 319512 - DNA, 1563 bp, Artificial Sequence
  derived and/or modified sequence
agccggcacggccggagccaccccggcccccccgtgcccgaggccgcagccatggttccccgagctcccctgcgcgctgagcctgctccgccgctgaggtgccagcagggccctctccaacctctgcaagtgcgcgcgggcaggagaagggggctccctcgggccgccccagggaccggccatgctggactaggctccgggggcggcgggagcggggccagaggtcctcagtccccaacttccagacccaggaccggtgctcaagccgagagtgcccttcggccctggagtctgctcggcgtgagatcgtggggtctcgcagcctccccaggggttagtgctcccgggctcctcaggtatgaggagaaacgggcccccccgtgggggcactttcctagctcgtcaccttgctcatcaggacacttgtcccgcgggagttttcgttcttgcgaagaacgaccttggctgacacagcaggccggcaaaggatgtccttttccctctgcgcccggacacatgtctctgggtgcgtccgcggggcgggcggcacgggccggggtctttgaaggggccggatggaaggatggggacgtcgggcgtgactcatgtaggaggcacttgtgcacaaccggaaagtgggagggcgtgttcgagcagattatgggaggttccgcagctaagggcgctctgatcacagatacaggaggaggcgggggtggagaacggctgtggctgagggctcgtaggcccgacggtcacccttgtcatcttgacggatgtctgtccaacctgagacaaaaagtggaggcactgggacgcggcggcccacccctgcagtctgggttactcattcagggtctgcctgccagcacagtatgtgaagacggttttttcctttgggccgccgtggctgaccatccaggcggacccgccggtgaccgccatcaccattgtgcaggctggcctagaccattatggggcgtcgggcaaggtggatgtttcttctgggagcagctgctactgcgtgcctggcttccagcaagggagacccgtgtctggagcgcggcttcacccagtttttgttcattgaccctgaatacaaaccatggacacattctggtggattacagcaagaatctggtgacagaagacgttatgcgaatgttggttgatttggccaagtcccgcggcgtggaggctgcaagagagcgaatgttcaacggtgagaaaattaactataccgaggttagtcggccacacattcctagcggagcatcatttctgcccttcggagtctatctcacggtgtccaggattacgctgtgcctccaccccttcagttgggcgatgctcctgttgaacgaggggccggaggggctgttccctccagcatgctccagagcattgggatgtgcttttcacaagatcggcttggttagcagcctcgagtggttccctgtatctgcatgggaggagcacatttcctacccgcagggggaatttctaaaggccgatatctttctggagaaactgaccttaatttacccgcaatgtaagttttag

SEQ ID NO: 319513 - DNA, 1563 bp, Artificial Sequence
  derived and/or modified sequence
tctaggcacggcaggtcacatccgggtccaccggtcccagaggctgccgctatggtgccacgcgcacccctccgcgctgagcctgcccctcctcttcgctgtcaacaaggacccctgcaaccgctgcaggttcgagccggtcggaggaggggcctgcctcgggcagcccctggcaccggacatgcaggacttggatctggcggtggtgggtccggggcaagaggccctcaatcccccacaagtcgccctcgcacgggggcacaagccgagtctgccctccgaccatggtccttgctgggcgttagaagttggggcctcgcagcttctcccggagtttctgctcccggattgttaagatacgaggaaaaacgggcacccccatggggacacttccccagttcctcaccatgtagcagtggacatcttagtaggggaagcttcaggtcttgtgaagaacggccttggctcactcagcaagccggaaagggctgcccttttccatccgcgcctggtcatatgtcgctcggcgctagcgccggtcgcgcagctagagctggcgtcttcgagggtgcaggatggaaggatggcgacgtgggccgtgattcatgtagacgccatctatgcactactggcaagtgggagggcgtgttcgaacagatcatgggcggttcagccgcaaaaggagctctcataaccgatacaggagggggaggagggggtgagagattgtggctccgcgctcgccgacctgatggccacccgtgtcatctggatggttgcctttccaacttgcgccaaaaggtcgaagctctcggtcgtggaggtccacccctccaatccgggttgctgatccagggtctgccagcttcgaccgtatgcgaggatggatttttcctatgggcagctgttgcggaccatcctgggggaccagcaggggataggcaccatcattgcgccggatggcctcggcctctttggggagtgggccagggaggttgcttcttctgggaacagcttctcctcagggcctggctgcccgctagagagactagggtgtggtccgctgcctccccgtccttctgttcactgacactgaacacaaaccatggacacatcttggtggattacagcaaaaatctggtcactgaagatgttatgaggatgctcgtggacctagcaaaatcgcgcggagtggaagctgctcgcgagcggatgtttaacggcgagaaaattaactatacagaagttagccgtccacacatcccatccggggcaagttttttaccgtttggcgtgtacttaacggtaagcagaataaccctgtgtctgcacccgttttcttgggcgatgctgctgttaaacgaagggcctgagggcctgttccccccagcatgctctcgggctctgggctgcgcgttccataagataggactggtgtcctcgcttgaatggttccccgtgtccgcttgggaggagcatatttcctatccacagggggaattcctgaaagccgatatttttttggaaaaattaacactcatctacccccagtgtaagttttag

SEQ ID NO: 319514 - DNA, 1563 bp, Artificial Sequence
  derived and/or modified sequence
agcagacacggcagaagccaccccggcccccccgtgcccgaggccgccgccatggtgcccagagcccccctgagagccgagcccgccccccccctgagatgccagcagggccccctgcagcccctgcaggtgagagccggcagaagaagaggcctgcccagagccgcccccggcaccggccacgccggcctgggcagcggcggcggcggcagcggcgccagaggcccccagagccccaccagcagacccagaaccggcgcccaggccgagagcgccctgagaccctggagcctgctgggcgtgagaagctggggcctggccgccagccccggcgtgagcgcccccggcctgctgagatacgaggagaagagagcccccccctggggccacttccccagcagcagcccctgcagcagcggccacctgagcagaggcagcttcagaagctgcgaggagagaccctggctgacccagcaggccggcaagggctgccccttccccagcgcccccggccacatgagcctgggcgccagcgccggcagagccgccagagccggcgtgttcgagggcgccggctggaaggacggcgacgtgggcagagacagctgcagaagacacctgtgcaccaccggcaagtgggagggcgtgttcgagcagatcatgggcggcagcgccgccaagggcgccctgatcaccgacaccggcggcggcggcggcggcgagagactgtggctgagagccagaagacccgacggccacccctgccacctggacggctgcctgagcaacctgagacagaaggtggaggccctgggcagaggcggcccccccctgcagagcggcctgctgatccagggcctgcccgccagcaccgtgtgcgaggacggcttcttcctgtgggccgccgtggccgaccaccccggcggccccgccggcgacagacaccaccactgcgccggctggcccagacccctgtggggcgtgggccagggcggctgcttcttctgggagcagctgctgctgagagcctggctgcccgccagagagaccagagtgtggagcgccgccagccccagcttctgcagcctgaccctgaacaccaaccacggccacatcctggtggactacagcaagaacctggtgaccgaggacgtgatgagaatgctggtggacctggccaagagcagaggcgtggaggccgccagagagagaatgttcaacggcgagaagatcaactacaccgaggtgagcagaccccacatccccagcggcgccagcttcctgcccttcggcgtgtacctgaccgtgagcagaatcaccctgtgcctgcaccccttcagctgggccatgctgctgctgaacgagggccccgagggcctgttcccccccgcctgcagcagagccctgggctgcgccttccacaagatcggcctggtgagcagcctggagtggttccccgtgagcgcctgggaggagcacatcagctacccccagggcgagttcctgaaggccgacatcttcctggagaagctgaccctgatctacccccagtgcaagttctag

SEQ ID NO: 319515 - protein, 200 aa, Artificial Sequence
  derived and/or modified sequence
MKLDMTGDCTPVLVLMAAVLTVTGAVPVARLHGALPDARGCHIAQFKSLSPQELQAFKRAKDALEESLLLKDCRCHSRLFPRTWDLRQLQVRERPMALEAELALTLKVLEATADTDPALVDVLDQPLHTLHHILSQFRACIQPQPTAGPRTRGRLHHWLYRLQEAPKKESPGCLEASVTFNLFRLLTRDLNCVASGDLCV

SEQ ID NO: 319516 - DNA, 603 bp, Artificial Sequence
  derived and/or modified sequence
atgaagctggacatgaccggcgactgcacccccgtgctggtgctgatggccgccgtgctgaccgtgaccggcgccgtgcccgtggccagactgcacggcgccctgcccgacgccagaggctgccacatcgcccagttcaagagcctgagcccccaggagctgcaggccttcaagagagccaaggacgccctggaggagagcctgctgctgaaggactgcagatgccacagcagactgttccccagaacctgggacctgagacagctgcaggtgagagagagacccatggccctggaggccgagctggccctgaccctgaaggtgctggaggccaccgccgacaccgaccccgccctggtggacgtgctggaccagcccctgcacaccctgcaccacatcctgagccagttcagagcctgcatccagccccagcccaccgccggccccagaaccagaggcagactgcaccactggctgtacagactgcaggaggcccccaagaaggagagccccggctgcctggaggccagcgtgaccttcaacctgttcagactgctgaccagagacctgaactgcgtggccagcggcgacctgtgcgtgtag

SEQ ID NO: 319517 - DNA, 603 bp, Artificial Sequence
  derived and/or modified sequence
atgaaactggacatgactggcgattgcactcccgtgctggtgctgatggccgctgtgttgactgtgactggcgccgtgcccgtggctcggctccacggtgctttacccgacgcccgggggtgccatatcgctcagtttaagagcctgagcccacaggaactgcaagcgtttaaaagggccaaggacgcgctggaagaaagcctgctgcttaaagactgcaggtgccactcccggttattcccacgcacctgggaccttcggcagctgcaagtgcgggagcgccctatggctctggaagcggaattggcgcttacacttaaggtcttagaagccactgcagatacggatccagctcttgtagatgtgctggatcagcccttgcacactctccaccatatcctcagccaattccgcgcctgcattcaaccacagcccacggcaggaccccggacgagaggacgtctgcatcattggctgtacagactccaggaggcgcccaagaaagagtcgcccggctgcctcgaagcctccgtgactttcaacctgtttaggttgctcacccgggacctcaattgtgtcgccagcggggatctgtgcgtgtag

SEQ ID NO: 319518 - DNA, 603 bp, Artificial Sequence
  derived and/or modified sequence
atgaagctggacatgaccggggactgcacccctgtgctggtgctgatggctgctgtgctgactgtgactggagctgtgcctgtggcccggctgcacggggccctgcctgatgcccggggctgccacatcgcccagttcaagagcctgagcccccaggagctgcaggccttcaagagggccaaggatgccctggaggagagcctgctgctgaaggactgccgctgccacagccgcctcttccccaggacctgggacctgcggcagctgcaggtgcgggagcggcccatggccctggaggccgagctggccctgaccctgaaggtgctggaggccacagctgacacagatcctgccctggtggatgtgctggaccagcccctgcacaccctgcaccacatcctgagccagttccgggcctgcatccagccccagcccacagctggccccaggacccggggccgcctgcaccactggctgtaccgcctgcaggaggcccccaagaaggagagccctggctgcctggaggcctctgtgaccttcaacctcttccggctgctgacccgggacctgaactgtgtggccagcggggacctgtgtgtgtag

SEQ ID NO: 319519 - DNA, 603 bp, Artificial Sequence
  derived and/or modified sequence
atgaagctggacatgaccggcgactgcacccccgtgctggtgctgatggctgcggtcctgacagtgacaggcgccgtgccagtagcccggttacacggcgctttgcccgatgctcgaggctgccacattgctcagtttaaaagtctcagtccgcaggaacttcaagcctttaagagggccaaggacgccctggaggagagcctactgctcaaggattgcagatgccactcgaggctgttccccagaacatgggacctccgacaactccaagtaagagagcgtcctatggcacttgaggccgaactggccctaaccttgaaggtgctggaggccacggctgatactgatcctgcactcgtagacgtgctggaccagccgctccataccctccatcacatcttgtcccagttcagagcttgcattcaaccccaacctaccgccggcccacgtaccaggggacggctgcaccattggctctacaggttgcaagaggctcctaaaaaagaaagtcccggatgtctggaggcctcagttacatttaatctcttccgactgttgaccagagatctaaactgcgtggcaagcggtgacctgtgtgtctag

SEQ ID NO: 319520 - DNA, 603 bp, Artificial Sequence
  derived and/or modified sequence
atgaaactagacatgaccggcgattgtacccctgtgttggttctgatggcggcagtcctgaccgtaacaggcgcagtgccagtggcaaggctccatggagccttacctgacgccagaggatgtcatattgctcagtttaagtcgcttagtccccaggagctccaggcttttaagagagccaaggacgcccttgaggagtcactactgttaaaggactgcaggtgtcactctcggctctttcccagaacctgggacttgcgccaactccaggtccgtgagaggcccatggcattggaggcagaattggccctgactctgaaagtcctggaggcaactgccgatacagacccagctctcgtagacgtcctggatcagcctctgcacacactgcaccacatcctttcacagttccgagcctgcattcaaccgcagcccactgctggccctcgaacacggggtagactacaccattggctctaccggctccaggaagctcccaagaaagagtctcctggctgcctcgaagcgtctgtgacattcaatcttttccgcctgctgacccgggacctcaactgcgtggcaagcggtgacctgtgtgtgtag

SEQ ID NO: 319521 - DNA, 734 bp, Artificial Sequence
  derived and/or modified sequence
tgggtgacagcctcagagtgtttcttctgctgacaaagaccagagatcaggaatgaaactagacatgactggggactgcacgccagtgctggtgctgatggccgcagtgctgaccgtgactggagcagttcctgtcgccaggctccacggggctctcccggatgcaaggggctgccacatagcccagttcaagtccctgtctccacaggagctgcaggcctttaagagggccaaagatgccttagaagagtcgcttctgctgaaggactgcaggtgccactcccgcctcttccccaggacctgggacctgaggcagctgcaggtgagggagcgccccatggctttggaggctgagctggccctgacgctgaaggttctggaggccaccgctgacactgacccagccctggtggacgtcttggaccagccccttcacaccctgcaccatatcctctcccagttccgggcctgtatccagcctcagcccacggcagggcccaggacccggggccgcctccaccattggctgtaccggctccaggaggccccaaaaaaggagtcccctggctgcctcgaggcctctgtcaccttcaacctcttccgcctcctcacgcgagacctgaattgtgttgccagtggggacctgtgtgtctgaccctcccaccagtcatgcaacctgagattttatttataaattagccacttgtcttaatttattgccacccagtcgctat

SEQ ID NO: 319522 - protein, 196 aa, Artificial Sequence
  derived and/or modified sequence
MTGDCMPVLVLMAAVLTVTGAVPVARLRGALPDARGCHIAQFKSLSPQELQAFKRAKDALEESLLLKDCKCRSRLFPRTWDLRQLQVRERPVALEAELALTLKVLEATADTDPALGDVLDQPLHTLHHILSQLRACIQPQPTAGPRTRGRLHHWLHRLQEAPKKESPGCLEASVTFNLFRLLTRDLNCVASGDLCV

SEQ ID NO: 319523 - DNA, 656 bp, Artificial Sequence
  derived and/or modified sequence
ctgcattccctcagctccctttctctctgtgacacagacatgaccggggactgcatgccagtgctggtgctgatggccgcagtgctgaccgtgactggagcagttcctgtcgccaggctccgcggggctctcccggatgcaaggggctgccacatagcccagttcaagtccctgtctccacaggagctgcaggcctttaagagggccaaagatgccttagaagagtcgcttctgctgaaggactgcaagtgccgctcccgcctcttccccaggacctgggacctgaggcagctgcaggtgagggagcgccccgtggctttggaggctgagctggccctgacgctgaaggttctggaggccaccgctgacactgacccagccctgggggatgtcttggaccagccccttcacaccctgcaccatatcctctcccagctccgggcctgtatccagcctcagcccacggcagggcccaggacccggggccgcctccaccattggctgcaccggctccaggaggccccaaaaaaggagtcccctggctgcctcgaggcctctgtcaccttcaacctcttccgcctcctcacgcgagacctgaattgtgttgccagcggggacctgtgtgtctgacccttccgccagtcatgcaacctgag

SEQ ID NO: 319524 - protein, 474 aa, Artificial Sequence
  derived and/or modified sequence
MAAAALRAPTQGCVTFEDIAIYFSQDEWGLLDEAQRLLYLEVMLENFALVASLGCGHGTEDEETPSDQNVSVGVSQSKAGSSTQKTQSCEMCVPVLKDILHLADLPGQKPYLVGECTNHHQHQKHHSAKKSLKRDMDRASYVKCCLFCMSLKPFRKWEVGKDLPAMLRLLRSLVFPGGKKPGTITECGEDIRSQKSHYKSGECGKASRHKHTPVYHPRVYTGKKLYECSKCGKAFRGKYSLVQHQRVHTGERPWECNECGKFFSQTSHLNDHRRIHTGERPYECSECGKLFRQNSSLVDHQKIHTGARPYECSQCGKSFSQKATLVKHQRVHTGERPYKCGECGNSFSQSAILNQHRRIHTGAKPYECGQCGKSFSQKATLIKHQRVHTGERPYKCGDCGKSFSQSSILIQHRRIHTGARPYECGQCGKSFSQKSGLIQHQVVHTGERPYECNKCGNSFSQCSSLIHHQKCHNT

SEQ ID NO: 319525 - DNA, 1425 bp, Artificial Sequence
  derived and/or modified sequence
atggccgccgccgccctgagagcccccacccagggctgcgtgaccttcgaggacatcgccatctacttcagccaggacgagtggggcctgctggacgaggcccagagactgctgtacctggaggtgatgctggagaacttcgccctggtggccagcctgggctgcggccacggcaccgaggacgaggagacccccagcgaccagaacgtgagcgtgggcgtgagccagagcaaggccggcagcagcacccagaagacccagagctgcgagatgtgcgtgcccgtgctgaaggacatcctgcacctggccgacctgcccggccagaagccctacctggtgggcgagtgcaccaaccaccaccagcaccagaagcaccacagcgccaagaagagcctgaagagagacatggacagagccagctacgtgaagtgctgcctgttctgcatgagcctgaagcccttcagaaagtgggaggtgggcaaggacctgcccgccatgctgagactgctgagaagcctggtgttccccggcggcaagaagcccggcaccatcaccgagtgcggcgaggacatcagaagccagaagagccactacaagagcggcgagtgcggcaaggccagcagacacaagcacacccccgtgtaccaccccagagtgtacaccggcaagaagctgtacgagtgcagcaagtgcggcaaggccttcagaggcaagtacagcctggtgcagcaccagagagtgcacaccggcgagagaccctgggagtgcaacgagtgcggcaagttcttcagccagaccagccacctgaacgaccacagaagaatccacaccggcgagagaccctacgagtgcagcgagtgcggcaagctgttcagacagaacagcagcctggtggaccaccagaagatccacaccggcgccagaccctacgagtgcagccagtgcggcaagagcttcagccagaaggccaccctggtgaagcaccagagagtgcacaccggcgagagaccctacaagtgcggcgagtgcggcaacagcttcagccagagcgccatcctgaaccagcacagaagaatccacaccggcgccaagccctacgagtgcggccagtgcggcaagagcttcagccagaaggccaccctgatcaagcaccagagagtgcacaccggcgagagaccctacaagtgcggcgactgcggcaagagcttcagccagagcagcatcctgatccagcacagaagaatccacaccggcgccagaccctacgagtgcggccagtgcggcaagagcttcagccagaagagcggcctgatccagcaccaggtggtgcacaccggcgagagaccctacgagtgcaacaagtgcggcaacagcttcagccagtgcagcagcctgatccaccaccagaagtgccacaacacctag

SEQ ID NO: 319526 - DNA, 1425 bp, Artificial Sequence
  derived and/or modified sequence
atggccgcagccgccctgcgtgcacccacgcaggggtgtgtaacctttgaagacatcgctatctatttcagccaggacgaatggggcttactagacgaggcgcagcgattactctatctggaggtaatgttggagaatttcgccctggtagccagtcttggttgtggccatggaactgaggatgaggaaaccccttctgaccaaaacgtcagtgtcggcgtatctcagagcaaggcgggaagtagtacccagaaaacccaatcttgcgagatgtgcgttccagtcctgaaggatatcctgcacttagcagacctccccggacagaaaccctacctggttggggagtgtaccaatcatcaccaacaccagaagcatcatagcgctaaaaaaagcctcaagcgtgacatggaccgagcctcgtacgtgaagtgttgtctgttttgcatgtcccttaagccttttagaaaatgggaggttgggaaggacctgccagcgatgctcagattattgagatctttagtctttcctggagggaaaaagccaggcaccatcacagaatgcggggaggatatccgcagccagaagtcacattacaagtctggggaatgtggaaaagcatctaggcataagcacacaccagtatatcacccccgcgtgtacaccggaaagaaactgtacgagtgtagcaaatgtggcaaggcctttcgtggcaagtactccttggtccaacaccaacgtgtacatacaggagagcgcccttgggaatgtaacgagtgtgggaaattcttttcacagacctcacacctgaatgaccaccggcgaatccataccggcgagaggccctatgagtgctcagagtgcggcaagctgtttaggcaaaacagctcgctggttgatcatcagaagatccacacaggagcacgtccatatgaatgtagccagtgcgggaaatccttcagccagaaggccacgctcgtgaaacatcaaagggtccacacaggagaacggccctacaaatgtggcgagtgcggaaattctttttcgcagagcgctatcctgaatcagcacaggagaatccatactggcgccaagccgtatgagtgcggtcaatgtggcaagtcattcagtcagaaggcgaccctgatcaaacatcagcgagttcacacaggcgagaggccatataaatgcggcgattgcggtaaaagcttttctcagagcagtatactcatacaacatcgaagaatccatacaggcgctcgcccatatgaatgtgggcagtgtggaaaatcattttcacagaagtctgggcttattcagcaccaggtggtgcacactggggaacgaccttatgagtgcaataaatgtggcaacagcttctctcagtgcagttcactgatccaccaccagaagtgccataatacatag

SEQ ID NO: 319527 - DNA, 1425 bp, Artificial Sequence
  derived and/or modified sequence
atggctgctgctgccctgcgggcccccacccagggctgtgtgacctttgaagatattgccatctacttcagccaggatgagtggggcctgctggatgaggcccagaggctgctgtacctggaggtgatgctggagaactttgccctggtggccagcctgggctgcggccatggaacagaagatgaggagacccccagcgaccagaatgtgtctgtgggcgtgtcccagagcaaggccggcagcagcacccagaagacccagagctgtgagatgtgtgtgcctgtgctgaaggacatcctgcacctggccgacctgcccggccagaagccctacctggtgggagaatgtaccaaccaccaccagcaccagaagcaccacagcgccaagaagagcctgaagagggacatggaccgggccagctatgtgaagtgctgcctcttctgcatgagcctgaagcccttcaggaagtgggaggtgggcaaggacctgcctgccatgctgcggctgctgcggagcctggtgtttcctgggggcaagaagccaggcaccatcacagaatgtggggaggacatccgcagccagaagagccactacaagagcggggagtgtgggaaggccagccgccacaagcacacccctgtgtaccacccccgggtgtacacaggcaagaagctgtatgaatgttccaaatgtgggaaggccttccggggcaagtacagcctggtgcagcaccagagggtgcacactggagagcggccctgggagtgcaatgaatgtgggaagttcttcagccagaccagccacctgaatgaccaccggcgcatccacactggagagcggccctatgaatgttctgaatgtgggaagctgttccggcagaacagcagcctggtggaccaccagaagatccacactggagcccggccctatgaatgttcccagtgtgggaagagcttcagccagaaggccaccctggtgaagcaccagagggtgcacactggagagcggccctacaagtgtggggagtgtggcaacagcttcagccagagcgccatcctgaaccagcaccggcgcatccacactggagccaagccctatgaatgtggccagtgtgggaagagcttcagccagaaggccaccctcatcaagcaccagagggtgcacactggagagcggccctacaagtgtggggactgtgggaagagcttcagccagagcagcatcctgatccagcaccggcgcatccacactggagcccggccctatgaatgtggccagtgtgggaagagcttcagccagaagagcggcctcatccagcaccaggtggtgcacactggagagcggccctatgagtgcaacaagtgtggcaacagcttcagccagtgcagcagcctcatccaccaccagaagtgccacaacacctag

SEQ ID NO: 319528 - DNA, 1425 bp, Artificial Sequence
  derived and/or modified sequence
atggccgccgccgccctgcgggcccccacccagggctgcgtgaccttcgaagacattgctatctatttctctcaagacgagtggggcctgctcgacgaggcccaaaggctgctctacctggaagtgatgctggagaatttcgccttggtcgcctctctcggctgcggccacggcacagaggacgaggaaacaccatccgatcagaacgtgtcagtgggggtttcccagtcgaaggcagggagctctacacagaaaacccaatcttgcgaaatgtgtgtgccagttctaaaagatatattgcacttggctgacttacccgggcagaagccgtacctggtgggcgaatgtacaaatcaccaccagcaccagaaacaccattcagccaagaagtccttaaagagggatatggacagggcctcctacgtgaagtgttgtctcttttgcatgtcacttaagccttttagaaagtgggaggtgggaaaagacctgcccgccatgctgaggttgctaagatctttggtttttcccggcggaaagaagcccggcacaataaccgagtgcggtgaggatatccgttcccagaagtcccattacaagagcggagagtgcgggaaggcttcaagacacaagcacacacccgtgtatcacccacgagtttatactggcaaaaagttgtatgagtgtagtaaatgcggcaaggcgttcagaggaaagtattccttagtacagcatcagcgggtccacacaggcgaacgcccgtgggagtgtaatgaatgtggaaagtttttcagtcaaacgtcccacctaaacgaccaccgtcggatccataccggcgagcggccctatgagtgttccgagtgtggcaagcttttcaggcagaactccagcctggtcgaccatcagaaaatccatactggagcacgcccttacgaatgctcccaatgtggcaagagttttagtcagaaggccacactcgtcaaacatcaacgagtacatactggcgaaagaccgtacaagtgtggcgaatgtggaaactccttctcgcagtcagctattttaaaccagcataggagaattcacacaggggctaaaccatatgagtgcggccagtgtggcaaaagcttcagccagaaggctaccttaatcaaacatcagagggtacacaccggcgagcgaccctataagtgcggagattgcgggaagtcattttcacaaagcagtatcctcattcagcaccgccgaattcatacaggtgcacggccatatgagtgcgggcaatgtggtaaatcattcagccagaaatctggtttgatccaacaccaagtagtgcacaccggagaacggccgtatgaatgcaacaagtgtggtaactccttctcccagtgttccagtctcatccatcaccagaagtgccataatacctag

SEQ ID NO: 319529 - DNA, 1425 bp, Artificial Sequence
  derived and/or modified sequence
atggctgccgctgccttgcgggctccaactcagggctgtgtgacttttgaagacattgccatctattttagccaggatgaatggggtctgttggatgaggcccagcgattattgtacctggaggtgatgctcgaaaattttgccctcgtcgctagcctgggatgcggacatggtactgaggatgaggaaactcctagtgaccagaacgtgtctgttggtgtaagccagtccaaagctggaagctcaacccagaaaacccaatcttgcgagatgtgtgtgcctgtgttaaaggacatactccaccttgccgacctgccagggcagaaaccctacttggtgggggaatgcacaaaccaccaccagcatcagaaacaccacagtgcgaaaaagtcactcaagcgggatatggatcgcgcaagctacgtgaagtgctgtttattttgcatgtccctgaagccatttcggaaatgggaagtcggtaaggacttacctgccatgttgcgtctgctccgaagtcttgtgtttcccggagggaagaagccaggcaccatcaccgagtgcggagaggacatccgaagccagaaatctcattataagagcggggaatgcggtaaggcctccagacataagcacacccccgtctaccaccctagagtgtatacaggtaagaagctgtacgagtgcagcaaatgtggtaaggccttcagaggaaagtacagcctggtccaacaccagagagtccacactggggagagaccgtgggagtgtaatgagtgcgggaagtttttcagtcagacttcccatctcaacgaccaccggcgtatccacactggcgagaggccctacgaatgctccgagtgcggaaagctgttcagacaaaattcttcattggtggatcatcagaagatccacacgggggctcgcccatacgaatgcagtcagtgcggcaagtcattctcgcagaaggcaacactggttaaacatcaaagggtgcatactggggaacgcccttacaagtgcggcgagtgcggtaactcctttagccaaagcgcaattctgaaccagcacaggaggattcacactggtgctaagccttacgagtgtggacaatgcggtaaatcgttttcacagaaggcgactctgatcaagcaccagcgcgtgcacaccggcgagagaccttataaatgcggcgactgcggaaagagcttttcccagagctctattcttatccaacacagaagaatccacacaggtgcaaggccatacgagtgcgggcagtgtggaaaaagtttcagtcaaaagtcgggactcatccagcaccaggtggtccacacaggcgagcggccatacgaatgtaataaatgcggcaactcattctctcagtgtagcagcttgattcatcaccaaaaatgtcacaacacatag

SEQ ID NO: 319530 - DNA, 4252 bp, Artificial Sequence
  derived and/or modified sequence
acttcagtggcggtcatttttgcagcgcttgggtgcatccagaccgtcagagctttgggagcgctttgtttggcgacagtcggaaggcgcgaggggaggggtcctcccgctgaacagtgggggttctaagggtcggcggcggcggggttgacggctttgcctaggtccctccgcccgtagctgtcgggtcccggccccgctctgcccacagactccgatggctgcggccgcgctgagggccccgactcagggctgtgtgacctttgaggacatcgccatttacttctcacaggacgagtggggacttcttgatgaggctcagagactcctgtaccttgaagtgatgctggagaactttgcccttgtagcctcactgggttgtggccatggaacagaggatgaagagacaccttctgaccagaatgtttctgtaggagtgtcacagtcaaaggcaggttcatccacacagaagactcaatcctgtgagatgtgtgtcccagtcctgaaagatattttgcatctagctgatctccctgggcagaaaccatacttggttggagaatgtacaaaccatcaccagcaccagaagcatcacagtgcaaagaaatccttgaagagggacatggacagagcctcatatgtgaagtgctgcctattctgtatgtcattgaagccctttcgcaaatgggaggttggaaaggaccttccagccatgttgcggcttctgaggtccctggtctttcctggaggcaagaaacccggcacaattactgaatgtggggaggacattcgcagtcaaaaaagtcattacaagtcaggtgaatgtgggaaggcttccaggcacaaacacactcctgtttaccatccaagagtctacactggaaaaaagctttatgagtgtagcaaatgtgggaaagccttccgtggcaagtactcacttgttcagcaccagagagtccatactggagaaaggccttgggagtgcaatgaatgtggaaaattctttagccaaacctcccacctgaatgatcatcggagaatccacaccggagaaaggccttatgagtgcagcgaatgtggaaaattatttagacaaaactccagccttgttgaccaccagaaaatacacactggagcaaggccttatgagtgtagccagtgtgggaaatcctttagccaaaaagccacccttgttaaacaccaaagagttcacactggagaaaggccttataagtgtggtgaatgtgggaattcctttagtcaaagtgccattcttaatcaacaccgaagaattcacactggagcaaagccttatgagtgtggccagtgtgggaaatcctttagtcaaaaagctaccctcattaaacaccagagagttcacactggagaaaggccttataagtgtggtgactgtgggaaatcctttagtcaaagctccatccttattcaacaccggagaattcatactggagcaaggccttatgagtgtggccagtgtggaaagtcctttagccaaaagtctggtctcattcaacaccaagtggttcacactggagaaaggccttatgagtgcaacaaatgtgggaattcctttagccaatgctccagcctcatacatcaccaaaaatgtcataacacatagaggcctcatgaatgcagcaaatgtggaagcgccttcaactcaagatctatcatcatttagctcctgaaagtccacacttaagtagagccttagacctacagggaaagtgctgtctctgtagtattgtagcagtagagagcctttgtgagggagccatctgcctgaagttgaacctcattcttccttgtttctctggtagaaaccatctaccctctaccaccttgcacagtgggcactggtcactcctatgtgctaagacaaggcagacatctgtgtgttctcttaagtctttggaggaaatcttgagcagtctaagcctttagagaaaattcattcttttttctgactgatcacagcatacgtgtgacccagtttgggtcaggagggcccagccttggttctgctggacacttatgtgcaaggattcccttcatgtaaattcttggtctcacatgacacttggtcattcttccagcctccatgtcaccacgtggtgaatggctgcctcacattgctccagtttgtgcactaataaaagccttatatttgaatctacctgtagtcttggggttctgtttactgtgtggggtggctgggagacagacttcaactctatatgaaggaatggatggcttttgtgggcctctgcaggaaagtaagatgacagagtaattctaattctggttttggtcatacttgctttgctacctaaaatctcctaggaaaaaatgcaaggttttggttattctaatttgtggcctggatccctattctttctgtgagactagaggtcatcctgaggagaggccagctgttatgacaagcatgtgtgcttcagggaataggacaattttattccattgtttccagaggatgtcatatgatgcccagtgctgctgagaagcttttcatggggttctataaggaggcatgccctgatatcaaacattccataggccgatgtcacgcagaagacaacgcgagtcacatgtgaactgtaattggtacagaaatacctgggtatttctgtactgtgtgtactgtagcaaactagttggaatgtgcctcttataaaagtacatttacaaatcttcccgtgactgtggctttgagcagtcataggacctagaaatctgtgtatgtccaatagctgaggttattttcagcaaaaataattaaagggttttattttttaattcttgttggttttctaggttgttcacctcaagtgcattgctgtagaggcagaaaaaggaggataaagataacagaagtcctataggccagggatgtattgatagctcttgtgatttccaccagtgttgctgttgtctcaaattgccacagccttcattgcttgccaacatttcctgcatggagggactcatggttgcccttccccaggcctgaagagagagtgcagtcaacatgagattgctaggcattctggtttctgaaagttgggtgatcagatactttattgtgaaacatgttttacaaactttcttgatgtgtaagtgacatgccatagtttacatccatttatggtgtataatttgaagagtttgtcatacaagcctgtgaaaccataatcatgatcatgaacatattcatgattcacctcttgctgttttacaatctctgcgtgtactttccaggccttcaggagtcctgtcatttactttccctacaggagaatagtttgtgttttctaggattttatgtgaattgaaacgtaaaatacttactccatttttcctgatgatgcacaattttttttttttttttgagatggagtctcagtctgtcaccaggctggagtgcagtggcatgatcttggctcactccaacctcctcctgggttccagcgattctcctgcctcagcctcctgagaagctaggactacaggcatgcactaccacgcccaactaatttttgtatttttagtagagatgtggttttaccatgtttgccaggatggtcttgatctcttgacctcgtgatccgcccgcctcagcctcccgaagtgctgggattacaggcgtaagccaccacaccagctgatgcacaattacttttaagatttatcaatattgcttatgtgaatagttcatttgtattgctgagaaatagtctgtggatatgtcacaatttggataaacagttggatgctttccagttttgggctgttgcaaataatgctactatgaacataggcatataactcttaatatgcagaaatgctttatttctcctgtgtcagtagtacagtgtacgtgaatgcgtcacttttaaagacaaggccagactataacctaactgtaccatttgcattctcatcaacagtatgtgaaccttcttatttctctacattcttgccatacttggtatggttagtctttttaattttagttgttttaatagctgtataatagcatctgtctgtgattttattgcatttttctggtattttatggtattgaacatttgaacatcttgtatctagttgccacctgtatatcctctttggaagaatgtttattaatgtcttttgcttatttttaaatggatgttggtgatactttttcattaataaatagacgtataac

SEQ ID NO: 319531 - DNA, 1317 bp, Artificial Sequence
  derived and/or modified sequence
atggacctgaccaagggctgcgtgaccttcgaggacatcgccatctacttcagccaggacgagtggggcctgctggacgaggcccagagactgctgtacctggaggtgatgctggagaacttcgccctggtggccagcctgggctgcggccacggcaccgaggacgaggagacccccagcgaccagaacgtgagcgtgggcgtgagccagagcaaggccggcagcagcacccagaagacccagagctgcgagatgtgcgtgcccgtgctgaaggacatcctgcacctggccgacctgcccggccagaagccctacctggtgggcgagtgcaccaaccaccaccagcaccagaagcaccacagcgccaagaagagcctgaagagagacatggacagagccagctacgtgaagtgctgcctgttctgcatgagcctgaagcccttcagaaagtgggaggtgggcaaggacctgcccgccatgctgagactgctgagaagcctggtgttccccggcggcaagaagcccggcaccatcaccgagtgcggcgaggacatcagaagccagaagagccactacaagagcggcgagtgcggcaaggccagcagacacaagcacacccccgtgtaccaccccagagtgtacaccggcaagaagctgtacgagtgcagcaagtgcggcaaggccttcagaggcaagtacagcctggtgcagcaccagagagtgcacaccggcgagagaccctgggagtgcaacgagtgcggcaagttcttcagccagaccagccacctgaacgaccacagaagaatccacaccggcgagagaccctacgagtgcagccagtgcggcaagagcttcagccagaaggccaccctggtgaagcaccagagagtgcacaccggcgagagaccctacaagtgcggcgagtgcggcaacagcttcagccagagcgccatcctgaaccagcacagaagaatccacaccggcgccaagccctacgagtgcggccagtgcggcaagagcttcagccagaaggccaccctgatcaagcaccagagagtgcacaccggcgagagaccctacaagtgcggcgactgcggcaagagcttcagccagagcagcatcctgatccagcacagaagaatccacaccggcgccagaccctacgagtgcggccagtgcggcaagagcttcagccagaagagcggcctgatccagcaccaggtggtgcacaccggcgagagaccctacgagtgcaacaagtgcggcaacagcttcagccagtgcagcagcctgatccaccaccagaagtgccactag

SEQ ID NO: 319532 - DNA, 1317 bp, Artificial Sequence
  derived and/or modified sequence
atggatctaacaaaaggatgcgtgacctttgaggacattgccatttacttcagccaagatgagtggggtctacttgacgaggctcagcgcctgctgtatttggaagtcatgctagaaaattttgctctggttgcttctctggggtgcggacacgggacagaggatgaggagactccttccgatcagaatgtgagcgtaggcgtgtcccaatccaaggctggaagctcgacgcaaaagacacagagttgtgaaatgtgcgtgcctgttctgaaggacatactgcacttagcagacctgccaggccagaaaccatacctcgtgggtgagtgtaccaaccaccatcagcaccagaagcaccactctgcaaaaaaatcgctgaagcgggatatggaccgtgcgtcctatgtgaagtgctgcctgttttgtatgtccctaaagcccttccgcaaatgggaagttggtaaagatttgcctgctatgctgaggcttttgcgcagtctggtgtttcctggcggtaagaagccggggacaattactgagtgcggtgaagatattcggtcccagaagtcccattataagtccggcgaatgcggcaaggccagtcgacacaaacacacacctgtgtaccacccccgagtttacacaggcaagaaactatacgagtgcagcaagtgtggaaaggcattcagaggcaagtattcactggtccagcaccagcgcgtccacacgggggagcgtccctgggagtgcaatgagtgtggcaagttcttttctcagaccagccatttgaatgatcatcgaaggattcacacaggcgaacgtccgtacgagtgttctcagtgtggaaagtccttttcccagaaggctaccctggtgaagcaccaacgggttcataccggggagagaccttataagtgtggtgagtgtgggaacagttttagccagtctgctatcctgaatcagcacaggcgcatacacaccggcgccaaaccttatgagtgcggccagtgtggaaaatcattttcccagaaggcaacactcattaagcatcagcgagtacatactggggaacgcccatacaagtgtggcgactgcgggaagtccttttctcagtcctccattctcatacaacataggaggattcacaccggggcaagaccttacgagtgcggtcagtgtgggaaaagttttagtcagaaaagtggcttgatccagcaccaagttgtgcacaccggcgaaagaccttacgagtgcaacaaatgtgggaacagcttctcccaatgctcatcccttattcaccaccaaaaatgccactag

SEQ ID NO: 319533 - DNA, 1317 bp, Artificial Sequence
  derived and/or modified sequence
atggacctgaccaagggctgtgtgacctttgaagatattgccatctacttcagccaggatgagtggggcctgctggatgaggcccagaggctgctgtacctggaggtgatgctggagaactttgccctggtggccagcctgggctgcggccatggaacagaagatgaggagacccccagcgaccagaatgtgtctgtgggcgtgtcccagagcaaggccggcagcagcacccagaagacccagagctgtgagatgtgtgtgcctgtgctgaaggacatcctgcacctggccgacctgcccggccagaagccctacctggtgggagaatgtaccaaccaccaccagcaccagaagcaccacagcgccaagaagagcctgaagagggacatggaccgggccagctatgtgaagtgctgcctcttctgcatgagcctgaagcccttcaggaagtgggaggtgggcaaggacctgcctgccatgctgcggctgctgcggagcctggtgtttcctgggggcaagaagccaggcaccatcacagaatgtggggaggacatccgcagccagaagagccactacaagagcggggagtgtgggaaggccagccgccacaagcacacccctgtgtaccacccccgggtgtacacaggcaagaagctgtatgaatgttccaaatgtgggaaggccttccggggcaagtacagcctggtgcagcaccagagggtgcacactggagagcggccctgggagtgcaatgaatgtgggaagttcttcagccagaccagccacctgaatgaccaccggcgcatccacactggagagcggccctatgaatgttcccagtgtgggaagagcttcagccagaaggccaccctggtgaagcaccagagggtgcacactggagagcggccctacaagtgtggggagtgtggcaacagcttcagccagagcgccatcctgaaccagcaccggcgcatccacactggagccaagccctatgaatgtggccagtgtgggaagagcttcagccagaaggccaccctcatcaagcaccagagggtgcacactggagagcggccctacaagtgtggggactgtgggaagagcttcagccagagcagcatcctgatccagcaccggcgcatccacactggagcccggccctatgaatgtggccagtgtgggaagagcttcagccagaagagcggcctcatccagcaccaggtggtgcacactggagagcggccctatgagtgcaacaagtgtggcaacagcttcagccagtgcagcagcctcatccaccaccagaagtgccactag

SEQ ID NO: 319534 - DNA, 1317 bp, Artificial Sequence
  derived and/or modified sequence
atggacctgaccaagggctgcgtgaccttcgaggacatcgccatctacttctcgcaggatgagtggggtctgctcgacgaggcacagagactgctttatctggaggtgatgctggaaaatttcgcgttggtcgcctccttaggatgtggacatggcactgaggacgaggagactccaagcgaccagaatgtaagcgttggcgtttctcaatccaaagccggttcttccacacagaaaactcagagttgtgagatgtgcgttcctgtgttgaaagacattttacacctagccgaccttcccgggcagaagccgtatctggttggcgagtgcaccaaccaccatcagcaccagaagcaccacagtgcaaagaagtctttgaaacgcgatatggaccgggccagctacgtgaaatgctgcctgttttgtatgtctctgaagccatttcggaaatgggaagttgggaaagatctgcctgccatgctccgacttttgcgctcactcgtgttccctggcggtaaaaaaccgggaaccattaccgaatgtggggaagacatacggtctcaaaagtcccactacaagagcggtgagtgcggtaaagcttctaggcataaacatactccagtgtatcacccgagggtgtatacaggcaaaaagttgtacgagtgctccaaatgcggaaaggcttttcgcggcaaatatagcctggtgcagcatcagagagttcatactggagagaggccttgggaatgcaatgaatgtggcaaattttttagccagacatcgcacctcaacgaccatagaagaatccacaccggtgagagaccctatgaatgcagtcaatgcggcaagagcttctctcaaaaggccaccctggtgaagcatcagcgagtacatacaggcgagcgcccttacaagtgtggtgagtgcggcaattccttctctcagagcgccatcctaaaccaacaccgcagaatccataccggagccaaaccctatgaatgtggccaatgtgggaagagcttcagccaaaaagccactttaattaagcatcaaagagtacacaccggcgaacggccctacaaatgtggcgattgcgggaagagcttctctcagagttccatactcattcaacaccgacggatccacacaggggctcggccctacgaatgcggtcagtgcggcaagtcattttctcagaaatccggactcatccagcaccaggtcgtccataccggtgagaggccatatgagtgtaacaaatgcggtaactccttttcacagtgttcctccttgatccaccaccaaaagtgccattag

SEQ ID NO: 319535 - DNA, 1317 bp, Artificial Sequence
  derived and/or modified sequence
atggacttaacaaagggctgcgtgacattcgaggatatcgccatctacttttcacaggatgaatggggactgctggacgaagcccaacgtctgttatatttggaggtcatgctcgagaactttgcactggtcgcctctctcggctgcggtcacggtaccgaagatgaagaaacccccagcgatcagaatgtttcagtcggtgtcagccagagcaaagccggatcgtctacacaaaagacgcagagctgtgagatgtgtgtgccagtattgaaggacatccttcacctcgccgatttgccgggacaaaagccttacctcgtcggggaatgcactaatcaccatcagcaccaaaaacaccacagcgccaaaaagtcacttaagagagatatggacagagcatcttacgttaagtgctgcctgttctgtatgtccctcaagccattcagaaagtgggaagtcggcaaagatctcccagccatgttaagattgttaaggtcactcgtgttccctggcggaaaaaagcccggtacaattactgagtgcggggaagatatcagaagtcagaaatcccactacaaaagcggtgaatgtgggaaagccagccgccacaagcacaccccggtttaccatcccagggtttatacggggaaaaagctgtatgagtgttctaaatgtggaaaggctttccgtggaaagtattctcttgtgcagcatcagcgagtccataccggggagaggccatgggaatgcaatgagtgcggaaaatttttttcccagaccagtcacttaaatgaccaccgccgtattcacacaggggaacgcccatatgagtgttcacagtgcggcaagagcttctcacaaaaggccaccctggttaaacatcagagggtgcatactggggaacggccttataagtgcggcgaatgtgggaactcctttagccagtccgctatcttgaatcagcacaggagaattcacacaggcgcaaagccctacgaatgtggccagtgtggaaaaagcttttcacagaaagcaactctcatcaaacaccagcgggtacacaccggcgagaggccatataagtgtggcgactgtggtaaaagtttctcccaatccagcattctgatccaacacagacggatacatacaggagccaggccttacgagtgcggacagtgcggaaagtccttctcacaaaaatctggcttgatccagcaccaggtcgtgcacacgggagaacgcccttacgagtgtaataagtgcggtaattcattctcgcagtgctcgagtttgattcatcaccagaagtgccactag

SEQ ID NO: 319536 - protein, 350 aa, Artificial Sequence
  derived and/or modified sequence
MGPHFTLLCAALAGCLLPAEGCVICDPSVVLALKSLEKDYLPGHLDAKHHKAMMERVENAVKDFQELSLNEDAYMGVVDEATLQKGSWSLLKDLKRITDSDVKGDLFVKELFWMLHLQKETFATYVARFQKEAYCPNKCGVMLQTLIWCKNCKKEVHACRKSYDCGERNVEVPQMEDMILDCELNWHQASEGLTDYSFYRVWGNNTETLVSKGKEATLTKPMVGPEDAGSYRCELGSVNSSPATIINFHVTVLPKMIKEEKPSPNIVTPGEATTESSISLQPLQPEKMLASRLLGLLICGSLALITGLTFAIFRRRKVIDFIKSSLFGLGSGAAEQTQVPKEKATDSRQQ

SEQ ID NO: 319537 - DNA, 1053 bp, Artificial Sequence
  derived and/or modified sequence
atgggcccccacttcaccctgctgtgcgccgccctggccggctgcctgctgcccgccgagggctgcgtgatctgcgaccccagcgtggtgctggccctgaagagcctggagaaggactacctgcccggccacctggacgccaagcaccacaaggccatgatggagagagtggagaacgccgtgaaggacttccaggagctgagcctgaacgaggacgcctacatgggcgtggtggacgaggccaccctgcagaagggcagctggagcctgctgaaggacctgaagagaatcaccgacagcgacgtgaagggcgacctgttcgtgaaggagctgttctggatgctgcacctgcagaaggagaccttcgccacctacgtggccagattccagaaggaggcctactgccccaacaagtgcggcgtgatgctgcagaccctgatctggtgcaagaactgcaagaaggaggtgcacgcctgcagaaagagctacgactgcggcgagagaaacgtggaggtgccccagatggaggacatgatcctggactgcgagctgaactggcaccaggccagcgagggcctgaccgactacagcttctacagagtgtggggcaacaacaccgagaccctggtgagcaagggcaaggaggccaccctgaccaagcccatggtgggccccgaggacgccggcagctacagatgcgagctgggcagcgtgaacagcagccccgccaccatcatcaacttccacgtgaccgtgctgcccaagatgatcaaggaggagaagcccagccccaacatcgtgacccccggcgaggccaccaccgagagcagcatcagcctgcagcccctgcagcccgagaagatgctggccagcagactgctgggcctgctgatctgcggcagcctggccctgatcaccggcctgaccttcgccatcttcagaagaagaaaggtgatcgacttcatcaagagcagcctgttcggcctgggcagcggcgccgccgagcagacccaggtgcccaaggagaaggccaccgacagcagacagcagtag

SEQ ID NO: 319538 - DNA, 1053 bp, Artificial Sequence
  derived and/or modified sequence
atgggaccgcacttcactttgctctgtgccgcactggccggatgtctcctccctgcggagggatgtgttatatgcgatccatctgtcgtgctggcattaaaatcattggagaaggactatctacctggtcacctggatgcaaaacaccacaaggcgatgatggaaagagtggagaatgccgtgaaagactttcaggaactcagcctaaatgaagacgcatatatgggagttgtggatgaagccacactgcagaagggaagttggagtctgcttaaggacctgaaacgcatcaccgactccgatgtaaagggggatctattcgtgaaagaactgttttggatgttacatctccaaaaggagacgtttgccacatacgtggcacgatttcagaaagaggcatactgcccgaacaagtgtggtgtcatgctgcaaacgctgatctggtgtaagaattgcaagaaagaagtgcacgcctgccgaaaatcctatgattgtggagagcggaacgtggaagtgccccagatggaggacatgatcctggattgtgaactaaactggcatcaggcaagcgaaggacttaccgattattcattctatagggtatggggcaacaatacagaaactttagtgagtaagggtaaggaagctaccttaaccaaacccatggtgggtccagaagatgctggatcgtatcgctgcgaactaggctcagtgaatagctccccagccacgatcattaacttccacgtcactgtgctccctaagatgattaaagaggagaaaccctcacccaacattgtgacacctggcgaagccaccaccgaaagttctatctctctgcagcctttgcagcctgagaagatgctggccagtcggcttcttggcctgctgatatgcggctccctcgccctgatcaccgggctcacctttgcaatctttaggcgcagaaaagttatcgacttcattaagtctagcttgttcgggctgggctctggcgcagctgaacagacacaggtccccaaggagaaagccaccgattcccgccaacagtag

SEQ ID NO: 319539 - DNA, 1053 bp, Artificial Sequence
  derived and/or modified sequence
atgggcccccacttcaccctgctgtgtgccgccctggccggctgcctgctgcctgctgagggctgcgtcatctgtgaccccagcgtggtgctggccctgaagagcctggagaaggactacctgcccggccacctggatgccaagcaccacaaggccatgatggagcgggtggagaatgctgtgaaggacttccaggagctgagcctgaatgaagatgcctacatgggcgtggtggatgaggccaccctgcagaagggctcctggagcctgctgaaggacctgaagaggatcacagacagtgatgtgaagggggacctgtttgtgaaggagctgttctggatgctgcacctgcagaaggagacctttgccacctacgtggcccgcttccagaaggaggcctactgccccaacaagtgtggggtgatgctgcagaccctcatctggtgcaagaactgcaagaaggaggtgcacgcctgcaggaagagctatgactgtggggagagaaatgtggaggtgccccagatggaggacatgatcctggactgtgagctgaactggcaccaggccagcgagggcctgacagactacagcttctacagagtgtggggcaacaacacagagaccctggtgtccaagggcaaggaggccaccctgaccaagcccatggtgggcccagaagatgctggcagctaccgctgtgagctgggctctgtgaacagcagccctgccaccatcatcaacttccacgtgacagtgctgcccaagatgatcaaggaggagaagcccagccccaacatcgtgaccccaggagaggccaccacagagagcagcatcagcctgcagcccctgcagcctgagaagatgctggccagccggctgctgggcctgctgatctgtggcagcctggccctgatcaccggcctgacctttgccatcttcagaagaaggaaggtgattgacttcatcaagagcagcctgtttggcctgggcagcggggctgctgagcagacccaggtgcccaaggagaaggccacagacagccggcagcagtag

SEQ ID NO: 319540 - DNA, 1053 bp, Artificial Sequence
  derived and/or modified sequence
atgggcccccacttcaccctgctgtgcgccgccctggccggctgccttctgcctgcggagggatgtgtaatctgtgatccttcagtagtcttggctttaaagtctttggaaaaagactatctgcccggtcatctggatgctaagcaccataaggcaatgatggagagggtcgagaatgccgtcaaagactttcaggaactgtctctgaatgaagacgcgtacatgggcgtggttgatgaagctaccctgcagaaggggtcttggagcctactgaaagatctaaaacggatcactgactccgatgtgaagggcgatcttttcgtaaaagagctgttttggatgctgcacttgcagaaggaaaccttcgctacatacgtcgcgcggttccagaaggaggcctactgtccaaacaagtgtggggtgatgctgcagaccctgatttggtgcaagaactgtaaaaaagaagtgcatgcgtgcagaaagtcctatgactgtggcgagcgcaacgtggaagtgccccagatggaagatatgattctcgactgtgagctcaactggcaccaggcctccgaaggtctcacagattactccttttaccgcgtatgggggaataacaccgaaacgctggttagcaaaggaaaggaagctaccctcaccaagccaatggtaggcccggaggacgcgggaagctacagatgcgagctcggatccgtgaatagttcacctgccaccattattaacttccatgtgaccgtgctgcctaaaatgatcaaggaggagaagccttccccaaacattgtgacccccggggaggcaaccaccgagtcaagcatctccctgcagccactccagcccgaaaagatgcttgcttccagactgctcgggctcctgatttgtgggtccctggcgctgattaccggcctgacttttgctatattccgcagacggaaagtgattgacttcatcaaatcgagtttgttcggacttggctccggggccgctgaacagacacaagttccaaaggagaaggccactgactctcggcagcagtag

SEQ ID NO: 319541 - DNA, 1053 bp, Artificial Sequence
  derived and/or modified sequence
atgggccctcacttcacactgttatgcgctgcactggcagggtgtctccttccggcagaggggtgtgttatctgcgatccctccgtggtcctcgcccttaagtcattagagaaggattatctgcctggtcatttagatgctaagcatcataaggccatgatggagagagttgagaatgccgtcaaagactttcaagagctgtctcttaatgaagacgcgtacatgggggtggtcgatgaggcaactctccagaaaggctcctggtccctccttaaagacctgaagcgcatcacggattcagacgtgaaaggagacctgttcgtaaaggaacttttctggatgttacatttacagaaggaaacttttgcaacttatgtcgcaaggttccagaaagaggcctactgtccaaacaagtgcggcgtcatgctgcagacgctgatctggtgcaagaactgtaagaaagaggtgcatgcctgtcgcaagtcctatgactgcggggaacgaaacgtcgaagtgccccagatggaggatatgattttagattgtgaactgaactggcaccaggcatccgagggcttgactgactattcattctatcgcgtttggggaaacaatacggaaaccctggtaagcaagggcaaggaggcaaccctcacaaaacccatggtcggccctgaggatgcgggttcataccgttgcgagctgggttccgtaaattcaagcccggcaactatcatcaactttcacgtgacggtcttacctaaaatgatcaaagaagaaaagccctcacctaacatagtcaccccaggggaggcgaccacagagtcctccatcagtctgcagccgcttcagcccgaaaaaatgctcgcaagtcggctgctgggactgctaatttgcggaagtctggccctcatcaccggactcacgtttgccattttcaggaggcggaaagtaatagacttcattaaaagctccctgttcggcctcggatcaggggcagccgaacaaacccaggtcccaaaagagaaagcaactgattctcggcagcagtag

SEQ ID NO: 319542 - protein, 741 aa, Artificial Sequence
  derived and/or modified sequence
MTAQESLTLEDVAVDFTWEEWQFLSPAQKDLYRDVMLENYSNLVAVGYQASKPDALSKLERGEETCTTEDEIYSRICSDSGGASGGAYAEIRKIDDPLQHHLQNQSIQKSVKQCHEQNMFGNIVNQNKGHFLLKQDCDTFDLHEKPLKSNLSFENQKRSSGLKNSAEFNRDGKSLFHANHKQFYTEMKFPAIAKPINKSQFIKQQRTHNIENAHVCSECGKAFLKLSQFIDHQRVHTGEKPHVCSMCGKAFSRKSRLMDHQRTHTELKHYECTECDKTFLKKSQLNIHQKTHMGGKPYTCSQCGKAFIKKCRLIYHQRTHTGEKPHGCSVCGKAFSTKFSLTTHQKTHTGEKPYICSECGKGFIEKRRLTAHHRTHTGEKPFICNKCGKGFTLKNSLITHQQTHTGEKLYTCSECGKGFSMKHCLMVHQRTHTGEKPYKCNECGKGFALKSPLIRHQRTHTGEKPYVCTECRKGFTMKSDLIVHQRTHTAEKPYICNDCGKGFTVKSRLIVHQRTHTGEKPYVCGECGKGFPAKIRLMGHQRTHTGEKPYICNECGKGFTEKSHLNVHRRTHTGEKPYVCSECGKGLTGKSMLIAHQRTHTGEKPYICNECGKGFTMKSTLSIHQQTHTGEKPYKCNECDKTFRKKTCLIQHQRFHTGKTSFACTECGKFSLRKNDLITHQRIHTGEKPYKCSDCGKAFTTKSGLNVHQRKHTGERPYGCSDCGKAFAHLSILVKHRRIHR

SEQ ID NO: 319543 - protein, 685 aa, Artificial Sequence
  derived and/or modified sequence
MTAQESLTLEDVAVDFTWEEWQFLSPAQKDLYRDVMLENYSNLVAVGYQASKPDALSKLERGEETCTTEDEIYSRICSDSGGASGGAYAEIRKIDDPLQHHLQNQSIQKSVKQCHEQNMFGNIVNQNKGHFLLKQDCDTFDLHEKPLKSNLSFENQKRSSGLKNSAEFNRDGKSLFHANHKQFYTEMKFPAIAKPINKSQFIKQQRTHNIENAHVCSECGKAFLKLSQFIDHQRVHTGEKPHVCSMCGKAFSRKSRLMDHQRTHTELKHYECTECDKTFLKKSQLNIHQKTHMGGKPYTCSQCGKAFIKKCRLIYHQRTHTGEKPHGCSVCGKAFSTKFSLTTHQKTHTGEKPYICSECGKGFIEKRRLTAHHRTHTGEKPFICNKCGKGFTLKNSLITHQQTHTGEKLYTCSECGKGFSMKHCLMVHQRTHTGEKPYKCNECGKGFALKSPLIRHQRTHTGEKPYVCTECRKGFTMKSDLIVHQRTHTAEKPYICNDCGKGFTVKSRLIVHQRTHTGEKPYVCGECGKGFPAKIRLMGHQRTHTGEKPYICNECGKGFTMKSTLSIHQQTHTGEKPYKCNECDKTFRKKTCLIQHQRFHTGKTSFACTECGKFSLRKNDLITHQRIHTGEKPYKCSDCGKAFTTKSGLNVHQRKHTGERPYGCSDCGKAFAHLSILVKHRRIHR

SEQ ID NO: 319544 - protein, 742 aa, Artificial Sequence
  derived and/or modified sequence
MMQAQESLTLEDVAVDFTWEEWQFLSPAQKDLYRDVMLENYSNLVAVGYQASKPDALSKLERGEETCTTEDEIYSRICSDSGGASGGAYAEIRKIDDPLQHHLQNQSIQKSVKQCHEQNMFGNIVNQNKGHFLLKQDCDTFDLHEKPLKSNLSFENQKRSSGLKNSAEFNRDGKSLFHANHKQFYTEMKFPAIAKPINKSQFIKQQRTHNIENAHVCSECGKAFLKLSQFIDHQRVHTGEKPHVCSMCGKAFSRKSRLMDHQRTHTELKHYECTECDKTFLKKSQLNIHQKTHMGGKPYTCSQCGKAFIKKCRLIYHQRTHTGEKPHGCSVCGKAFSTKFSLTTHQKTHTGEKPYICSECGKGFIEKRRLTAHHRTHTGEKPFICNKCGKGFTLKNSLITHQQTHTGEKLYTCSECGKGFSMKHCLMVHQRTHTGEKPYKCNECGKGFALKSPLIRHQRTHTGEKPYVCTECRKGFTMKSDLIVHQRTHTAEKPYICNDCGKGFTVKSRLIVHQRTHTGEKPYVCGECGKGFPAKIRLMGHQRTHTGEKPYICNECGKGFTEKSHLNVHRRTHTGEKPYVCSECGKGLTGKSMLIAHQRTHTGEKPYICNECGKGFTMKSTLSIHQQTHTGEKPYKCNECDKTFRKKTCLIQHQRFHTGKTSFACTECGKFSLRKNDLITHQRIHTGEKPYKCSDCGKAFTTKSGLNVHQRKHTGERPYGCSDCGKAFAHLSILVKHRRIHR

SEQ ID NO: 319545 - DNA, 2226 bp, Artificial Sequence
  derived and/or modified sequence
atgaccgcccaggagagcctgaccctggaggacgtggccgtggacttcacctgggaggagtggcagttcctgagccccgcccagaaggacctgtacagagacgtgatgctggagaactacagcaacctggtggccgtgggctaccaggccagcaagcccgacgccctgagcaagctggagagaggcgaggagacctgcaccaccgaggacgagatctacagcagaatctgcagcgacagcggcggcgccagcggcggcgcctacgccgagatcagaaagatcgacgaccccctgcagcaccacctgcagaaccagagcatccagaagagcgtgaagcagtgccacgagcagaacatgttcggcaacatcgtgaaccagaacaagggccacttcctgctgaagcaggactgcgacaccttcgacctgcacgagaagcccctgaagagcaacctgagcttcgagaaccagaagagaagcagcggcctgaagaacagcgccgagttcaacagagacggcaagagcctgttccacgccaaccacaagcagttctacaccgagatgaagttccccgccatcgccaagcccatcaacaagagccagttcatcaagcagcagagaacccacaacatcgagaacgcccacgtgtgcagcgagtgcggcaaggccttcctgaagctgagccagttcatcgaccaccagagagtgcacaccggcgagaagccccacgtgtgcagcatgtgcggcaaggccttcagcagaaagagcagactgatggaccaccagagaacccacaccgagctgaagcactacgagtgcaccgagtgcgacaagaccttcctgaagaagagccagctgaacatccaccagaagacccacatgggcggcaagccctacacctgcagccagtgcggcaaggccttcatcaagaagtgcagactgatctaccaccagagaacccacaccggcgagaagccccacggctgcagcgtgtgcggcaaggccttcagcaccaagttcagcctgaccacccaccagaagacccacaccggcgagaagccctacatctgcagcgagtgcggcaagggcttcatcgagaagagaagactgaccgcccaccacagaacccacaccggcgagaagcccttcatctgcaacaagtgcggcaagggcttcaccctgaagaacagcctgatcacccaccagcagacccacaccggcgagaagctgtacacctgcagcgagtgcggcaagggcttcagcatgaagcactgcctgatggtgcaccagagaacccacaccggcgagaagccctacaagtgcaacgagtgcggcaagggcttcgccctgaagagccccctgatcagacaccagagaacccacaccggcgagaagccctacgtgtgcaccgagtgcagaaagggcttcaccatgaagagcgacctgatcgtgcaccagagaacccacaccgccgagaagccctacatctgcaacgactgcggcaagggcttcaccgtgaagagcagactgatcgtgcaccagagaacccacaccggcgagaagccctacgtgtgcggcgagtgcggcaagggcttccccgccaagatcagactgatgggccaccagagaacccacaccggcgagaagccctacatctgcaacgagtgcggcaagggcttcaccgagaagagccacctgaacgtgcacagaagaacccacaccggcgagaagccctacgtgtgcagcgagtgcggcaagggcctgaccggcaagagcatgctgatcgcccaccagagaacccacaccggcgagaagccctacatctgcaacgagtgcggcaagggcttcaccatgaagagcaccctgagcatccaccagcagacccacaccggcgagaagccctacaagtgcaacgagtgcgacaagaccttcagaaagaagacctgcctgatccagcaccagagattccacaccggcaagaccagcttcgcctgcaccgagtgcggcaagttcagcctgagaaagaacgacctgatcacccaccagagaatccacaccggcgagaagccctacaagtgcagcgactgcggcaaggccttcaccaccaagagcggcctgaacgtgcaccagagaaagcacaccggcgagagaccctacggctgcagcgactgcggcaaggccttcgcccacctgagcatcctggtgaagcacagaagaatccacagatag

SEQ ID NO: 319546 - DNA, 2058 bp, Artificial Sequence
  derived and/or modified sequence
atgaccgcccaggagagcctgaccctggaggacgtggccgtggacttcacctgggaggagtggcagttcctgagccccgcccagaaggacctgtacagagacgtgatgctggagaactacagcaacctggtggccgtgggctaccaggccagcaagcccgacgccctgagcaagctggagagaggcgaggagacctgcaccaccgaggacgagatctacagcagaatctgcagcgacagcggcggcgccagcggcggcgcctacgccgagatcagaaagatcgacgaccccctgcagcaccacctgcagaaccagagcatccagaagagcgtgaagcagtgccacgagcagaacatgttcggcaacatcgtgaaccagaacaagggccacttcctgctgaagcaggactgcgacaccttcgacctgcacgagaagcccctgaagagcaacctgagcttcgagaaccagaagagaagcagcggcctgaagaacagcgccgagttcaacagagacggcaagagcctgttccacgccaaccacaagcagttctacaccgagatgaagttccccgccatcgccaagcccatcaacaagagccagttcatcaagcagcagagaacccacaacatcgagaacgcccacgtgtgcagcgagtgcggcaaggccttcctgaagctgagccagttcatcgaccaccagagagtgcacaccggcgagaagccccacgtgtgcagcatgtgcggcaaggccttcagcagaaagagcagactgatggaccaccagagaacccacaccgagctgaagcactacgagtgcaccgagtgcgacaagaccttcctgaagaagagccagctgaacatccaccagaagacccacatgggcggcaagccctacacctgcagccagtgcggcaaggccttcatcaagaagtgcagactgatctaccaccagagaacccacaccggcgagaagccccacggctgcagcgtgtgcggcaaggccttcagcaccaagttcagcctgaccacccaccagaagacccacaccggcgagaagccctacatctgcagcgagtgcggcaagggcttcatcgagaagagaagactgaccgcccaccacagaacccacaccggcgagaagcccttcatctgcaacaagtgcggcaagggcttcaccctgaagaacagcctgatcacccaccagcagacccacaccggcgagaagctgtacacctgcagcgagtgcggcaagggcttcagcatgaagcactgcctgatggtgcaccagagaacccacaccggcgagaagccctacaagtgcaacgagtgcggcaagggcttcgccctgaagagccccctgatcagacaccagagaacccacaccggcgagaagccctacgtgtgcaccgagtgcagaaagggcttcaccatgaagagcgacctgatcgtgcaccagagaacccacaccgccgagaagccctacatctgcaacgactgcggcaagggcttcaccgtgaagagcagactgatcgtgcaccagagaacccacaccggcgagaagccctacgtgtgcggcgagtgcggcaagggcttccccgccaagatcagactgatgggccaccagagaacccacaccggcgagaagccctacatctgcaacgagtgcggcaagggcttcaccatgaagagcaccctgagcatccaccagcagacccacaccggcgagaagccctacaagtgcaacgagtgcgacaagaccttcagaaagaagacctgcctgatccagcaccagagattccacaccggcaagaccagcttcgcctgcaccgagtgcggcaagttcagcctgagaaagaacgacctgatcacccaccagagaatccacaccggcgagaagccctacaagtgcagcgactgcggcaaggccttcaccaccaagagcggcctgaacgtgcaccagagaaagcacaccggcgagagaccctacggctgcagcgactgcggcaaggccttcgcccacctgagcatcctggtgaagcacagaagaatccacagatag

SEQ ID NO: 319547 - DNA, 2229 bp, Artificial Sequence
  derived and/or modified sequence
atgatgcaggcccaggagagcctgaccctggaggacgtggccgtggacttcacctgggaggagtggcagttcctgagccccgcccagaaggacctgtacagagacgtgatgctggagaactacagcaacctggtggccgtgggctaccaggccagcaagcccgacgccctgagcaagctggagagaggcgaggagacctgcaccaccgaggacgagatctacagcagaatctgcagcgacagcggcggcgccagcggcggcgcctacgccgagatcagaaagatcgacgaccccctgcagcaccacctgcagaaccagagcatccagaagagcgtgaagcagtgccacgagcagaacatgttcggcaacatcgtgaaccagaacaagggccacttcctgctgaagcaggactgcgacaccttcgacctgcacgagaagcccctgaagagcaacctgagcttcgagaaccagaagagaagcagcggcctgaagaacagcgccgagttcaacagagacggcaagagcctgttccacgccaaccacaagcagttctacaccgagatgaagttccccgccatcgccaagcccatcaacaagagccagttcatcaagcagcagagaacccacaacatcgagaacgcccacgtgtgcagcgagtgcggcaaggccttcctgaagctgagccagttcatcgaccaccagagagtgcacaccggcgagaagccccacgtgtgcagcatgtgcggcaaggccttcagcagaaagagcagactgatggaccaccagagaacccacaccgagctgaagcactacgagtgcaccgagtgcgacaagaccttcctgaagaagagccagctgaacatccaccagaagacccacatgggcggcaagccctacacctgcagccagtgcggcaaggccttcatcaagaagtgcagactgatctaccaccagagaacccacaccggcgagaagccccacggctgcagcgtgtgcggcaaggccttcagcaccaagttcagcctgaccacccaccagaagacccacaccggcgagaagccctacatctgcagcgagtgcggcaagggcttcatcgagaagagaagactgaccgcccaccacagaacccacaccggcgagaagcccttcatctgcaacaagtgcggcaagggcttcaccctgaagaacagcctgatcacccaccagcagacccacaccggcgagaagctgtacacctgcagcgagtgcggcaagggcttcagcatgaagcactgcctgatggtgcaccagagaacccacaccggcgagaagccctacaagtgcaacgagtgcggcaagggcttcgccctgaagagccccctgatcagacaccagagaacccacaccggcgagaagccctacgtgtgcaccgagtgcagaaagggcttcaccatgaagagcgacctgatcgtgcaccagagaacccacaccgccgagaagccctacatctgcaacgactgcggcaagggcttcaccgtgaagagcagactgatcgtgcaccagagaacccacaccggcgagaagccctacgtgtgcggcgagtgcggcaagggcttccccgccaagatcagactgatgggccaccagagaacccacaccggcgagaagccctacatctgcaacgagtgcggcaagggcttcaccgagaagagccacctgaacgtgcacagaagaacccacaccggcgagaagccctacgtgtgcagcgagtgcggcaagggcctgaccggcaagagcatgctgatcgcccaccagagaacccacaccggcgagaagccctacatctgcaacgagtgcggcaagggcttcaccatgaagagcaccctgagcatccaccagcagacccacaccggcgagaagccctacaagtgcaacgagtgcgacaagaccttcagaaagaagacctgcctgatccagcaccagagattccacaccggcaagaccagcttcgcctgcaccgagtgcggcaagttcagcctgagaaagaacgacctgatcacccaccagagaatccacaccggcgagaagccctacaagtgcagcgactgcggcaaggccttcaccaccaagagcggcctgaacgtgcaccagagaaagcacaccggcgagagaccctacggctgcagcgactgcggcaaggccttcgcccacctgagcatcctggtgaagcacagaagaatccacagatag

SEQ ID NO: 319548 - DNA, 2226 bp, Artificial Sequence
  derived and/or modified sequence
atgacagctcaggagtccctcacgcttgaggacgtggccgtcgatttcacgtgggaggagtggcaatttctctctcccgcccaaaaggacttgtacagggacgtgatgctcgaaaactatagtaacctggtggccgttgggtatcaagcttccaagccggatgcactcagtaagcttgaaaggggtgaagagacctgcacaactgaggacgagatttactcgcgtatttgttctgatagtggaggcgcgtccgggggtgcttatgctgaaattcggaaaatagacgaccccctgcaacaccacctacagaatcaaagcatccagaaaagcgtcaagcagtgtcatgagcagaacatgttcggtaatattgtgaaccaaaataagggtcattttctactcaagcaggactgcgacacattcgacctccacgaaaagccactgaagagcaatctgagcttcgaaaaccagaaacggtcaagtgggctaaaaaactccgctgaatttaaccgggatggtaaatccctgttccatgccaatcataaacagttttacactgaaatgaaattccccgccatcgcgaaacctatcaataagtcgcagttcattaagcagcagcggacgcacaatatagagaatgcgcacgtgtgtagtgagtgcggaaaagccttcttgaaactcagtcaatttatcgatcaccaacgcgtacacacaggagagaagccacacgtgtgctccatgtgtggtaaggcgttctcaagaaagagcaggctgatggatcaccagagaacccacactgagctgaaacactacgagtgcaccgagtgtgataaaacttttctaaaaaagtcgcagctgaatattcaccagaagacacatatgggcggcaaaccttacacgtgcagccagtgtggaaaggcattcattaagaaatgtagactgatttatcatcagcgaacccataccggggaaaaaccacacgggtgtagcgtctgcggaaaggcattttctacaaaatttagtctgaccacacaccagaaaactcacaccggagagaagccttatatttgttcagaatgcgggaagggcttcattgaaaagaggaggctgactgcacaccaccgcacccacacaggagaaaaaccgttcatctgtaataagtgtgggaaaggcttcaccctgaagaactcactaattacccaccagcaaacgcataccggagagaagctttatacatgttcagagtgtggaaaggggttcagtatgaaacattgcctcatggtacatcagcgtacgcatacaggagaaaaaccatataagtgcaatgaatgtggtaaaggcttcgcactgaaatcgcctttaatccggcaccagcgcactcacacaggggagaaaccatacgtgtgcactgaatgtaggaagggttttaccatgaaatctgacctgattgtccaccagagaacccataccgcagagaagccctacatttgcaacgactgtgggaagggattcacagtcaagtcccggctgatcgtccatcagagaacacacaccggcgagaagccatacgtctgcggagagtgcggcaagggctttccagcaaaaattagactgatggggcatcagaggacacacacgggtgagaaaccttatatttgtaatgaatgtggaaagggatttacggaaaaatcccatctgaatgtgcatagaaggactcatacgggcgagaaaccatacgtttgctctgaatgcggtaagggtttgacaggcaaaagcatgctcatcgcccatcagcgaacccacaccggcgagaagccgtatatctgcaacgaatgtgggaaaggctttactatgaaaagtacactgtccatacaccagcagacccatacaggagagaagccttataagtgtaatgaatgtgacaagacattccgaaagaagacttgcctgatccaacatcagcgcttccacaccgggaagacaagcttcgcctgcactgaatgcggcaaattttccctccggaagaatgacctcataacacaccagcgcattcacactggagaaaagccctacaaatgctcggattgtgggaaggcgtttacgaccaagagcggacttaatgtgcaccagaggaagcacactggcgagcggccatatggctgcagtgactgcggaaaggctttcgctcatctaagtatcttggtaaagcatcggcggatccacagatag

SEQ ID NO: 319549 - DNA, 2058 bp, Artificial Sequence
  derived and/or modified sequence
atgaccgcacaggaaagtctgaccctcgaggacgtcgcagttgacttcacgtgggaggaatggcagttcctgtccccagcacagaaggacctctatcgcgacgttatgttggagaattatagcaatctggtggcggtgggctatcaggcatctaaacctgatgccctttctaagcttgagaggggggaggagacttgcactaccgaggacgaaatttacagccgcatctgttccgacagtggcggcgcatccggcggcgcctatgccgaaattagaaaaatcgatgatccactgcagcatcacttgcaaaaccagagtattcagaaaagtgtgaaacagtgccatgaacagaatatgttcggcaacatcgtcaatcagaataagggacatttcctgttaaagcaggattgtgacacattcgatttgcatgagaaacctctgaagagtaatctttcttttgaaaaccagaagcggagctcaggcctgaagaacagcgccgaattcaatcgagacggcaaaagtctgtttcatgcaaaccacaagcaattttacactgaaatgaaatttcctgccattgccaagcccatcaataagtcccaattcatcaaacagcagcgcacgcacaacatcgagaatgctcacgtgtgcagcgagtgcggcaaggctttcctcaagctgtctcaattcatagaccaccagagagtccacacaggtgagaagccccacgtgtgctctatgtgcggcaaagccttttcacgaaagtccaggctgatggatcaccagcgcacacacactgagctgaagcattacgaatgcacagagtgtgacaaaacatttctgaaaaagagccagctgaacatacaccagaaaacccatatgggcggaaagccatacacatgcagccagtgtgggaaggcatttataaagaaatgccgacttatctaccaccagcggactcatacgggagaaaaaccacacggttgcagcgtgtgcggaaaggcctttagcaccaagttttccctgaccacccatcagaagacccatacaggagaaaagccgtacatttgcagtgagtgcgggaaggggttcatcgaaaagcgcaggctcaccgcacatcacaggacccacaccggggagaaacccttcatctgtaataagtgcggcaaaggcttcactctcaagaatagcctgatcacccaccagcagacccatacaggtgaaaagttgtacacctgcagtgagtgcgggaaaggctttagtatgaagcactgtctcatggtccaccagaggacccatacaggcgagaaaccgtacaaatgcaacgagtgcggaaaaggattcgctctgaaaagccctctgataagacatcagcgcactcataccggagagaagccctacgtatgtacagagtgtcggaaaggcttcacaatgaaatcagaccttattgtgcaccagagaactcatacagcggagaagccgtatatatgcaatgattgtggaaagggctttaccgtaaagagccgcctcatcgttcaccaaaggacccataccggtgaaaagccgtatgtctgtggcgagtgcggcaaaggatttcccgccaagattcgattaatgggccaccaacgcacccataccggcgagaaaccttacatttgtaatgaatgtgggaaggggttcacgatgaagagcaccttgtccatccatcagcagactcacacaggcgagaagccttataagtgtaatgagtgcgataaaactttccgcaagaaaacatgcctaatccagcaccagagatttcatactgggaagacgagctttgcctgcactgaatgtggaaaattttctctaaggaaaaatgatcttattacccatcagaggatccacacaggtgaaaagccttacaaatgttcagactgcggtaaagcatttaccacaaagtcaggactgaatgtacatcagagaaaacacacaggggagcgaccatacggttgctcagactgcgggaaggcattcgcccacctgtctatactcgtcaagcaccgtagaatacacaggtag

SEQ ID NO: 319550 - DNA, 2229 bp, Artificial Sequence
  derived and/or modified sequence
atgatgcaagcccaggaaagcctgacactcgaggatgtggcagttgacttcacctgggaagagtggcagttcctgagtcctgcgcaaaaagatctctaccgagacgttatgcttgagaactattctaacttggtggccgtcgggtaccaggctagtaagccagatgctctctccaagctggagaggggcgaagaaacatgtactactgaggatgagatctacagccgtatctgttctgacagcggtggggccagtggaggcgcctacgccgaaattagaaaaatcgatgaccctctgcagcaccatctgcagaaccaatctattcaaaaaagcgtcaaacagtgtcacgagcagaatatgttcggaaatatagtcaaccagaacaagggtcactttctgctgaaacaggattgtgatactttcgatctacatgagaagcctctaaaatcaaacctgtcttttgagaatcaaaagcggtcgtctggactcaaaaacagtgctgaattcaacagggacgggaagtctctgtttcacgctaatcacaaacagttttatacagaaatgaaattccccgcaatcgctaaaccaatcaacaaaagccagtttattaaacagcagcgcacccacaacatcgagaacgcccacgtgtgctcagaatgcggaaaggcattcctcaagttgtcccagtttattgatcaccaacgtgtacataccggagagaaaccgcatgtctgctccatgtgcgggaaagcattttctaggaagtcccgcctcatggaccatcagcgtactcacactgaactcaaacattacgagtgtacggagtgcgacaaaacatttctaaagaaatcacagctgaacatccaccagaagacccacatgggcgggaaaccatacacatgctctcagtgtggcaaagcattcattaaaaaatgtcgtcttatttatcatcaaagaacacatacgggtgaaaagccacatggctgtagcgtgtgcggaaaggcattcagcaccaaattttcgttaacaacccaccagaaaacacacacaggggaaaaaccatacatctgctcagagtgtggtaagggcttcatagagaaacgtcgacttaccgcccatcataggacacatacaggtgagaagccctttatctgcaacaaatgcgggaaaggcttcacactcaagaattcattgataacgcaccagcagacacacaccggtgagaaactgtatacttgttcagaatgcggcaagggattctcaatgaagcattgtttgatggtgcaccaacggacacacaccggggagaagccttataagtgtaacgagtgcggtaagggatttgctctgaaatctccactgattagacaccagcggacacacaccggcgagaaaccctatgtttgcacagaatgccgcaagggattcacaatgaaatcagacctgatcgtacatcagcgcactcacactgccgaaaagccttacatttgtaatgactgcggcaaagggttcacggtgaagtctcgactcattgttcaccaaaggacacacaccggtgaaaagccctatgtgtgcggcgagtgcggcaaggggttccctgctaagatccgcctgatgggacatcagaggactcacacaggggaaaagccatatatatgtaatgagtgtggaaaaggttttactgagaagagccatctcaatgtgcaccgcagaactcacactggtgagaaaccatacgtgtgcagcgaatgcggtaaagggctgacaggcaagagtatgctaatcgcccaccagcgtactcacactggcgagaagccttacatttgtaatgaatgcggtaaaggattcactatgaagtctacgctgtcgatccatcagcagacccacacaggggaaaagccttacaagtgtaacgaatgtgataaaacttttaggaagaagacttgtcttatccaacaccagcggttccacacgggcaagacttcatttgcctgcaccgagtgtgggaaattcagtctgcgcaaaaatgatttaatcactcatcaacggattcataccggcgagaaaccatataagtgtagtgactgtgggaaagcatttactactaagagcggattgaacgtgcaccagagaaagcatactggcgaacgcccttacggatgctcagactgcggtaaggcatttgcccatctcagcattctggtcaaacaccggcggattcaccgctag

SEQ ID NO: 319551 - DNA, 2226 bp, Artificial Sequence
  derived and/or modified sequence
atgacagcccaggagagcctgaccctggaggatgtggccgtggacttcacctgggaggagtggcagttcctgagccctgcccagaaggacctgtacagagatgtgatgctggagaactacagcaacctggtggccgtgggctaccaggccagcaagccagatgccctgagcaagctggagcggggggaggagacctgcaccacagaagatgagatctacagccgcatctgcagcgacagcggcggggccagcggcggggcctatgcagagatcaggaagattgatgaccccctgcagcaccacctgcagaaccagagcatccagaagtctgtgaagcagtgccacgagcagaacatgtttggaaatattgtgaaccagaacaagggccacttcctgctgaagcaggactgtgacacctttgacctgcacgagaagcccctgaagagcaacctgagctttgagaaccagaagaggagcagcggcctgaagaacagcgctgagttcaacagagatggcaagagcctcttccacgccaaccacaagcagttctacacagagatgaagtttcctgccatcgccaagcccatcaacaagagccagttcatcaagcagcagaggacccacaacattgaaaatgcccacgtgtgcagtgaatgtgggaaggccttcctgaagctgagccagttcatcgaccaccagagggtgcacactggagagaagccccacgtgtgcagcatgtgtgggaaggccttcagcaggaagagccggctgatggaccaccagaggacccacacagagctgaagcactatgaatgtacagaatgtgacaagaccttcctgaagaagagccagctgaacatccaccagaagacccacatgggcggcaagccctacacctgcagccagtgtgggaaggccttcatcaagaagtgccgcctcatctaccaccagaggacccacactggagagaagccccacggctgcagcgtgtgtgggaaggccttcagcaccaagttcagcctgaccacccaccagaagacccacactggagagaagccctacatctgcagtgaatgtgggaagggcttcatcgagaagaggcggctgacagcccaccacaggacccacactggagagaagcccttcatctgcaacaagtgtgggaagggcttcaccctgaagaacagcctcatcacccaccagcagacccacactggagagaagctgtacacctgcagtgaatgtgggaagggcttctccatgaagcactgcctgatggtgcaccagaggacccacactggagagaagccctacaagtgcaatgaatgtgggaaaggatttgccctgaagagccccctcatccgccaccagaggacccacactggagagaagccctacgtgtgcacagagtgcaggaagggcttcaccatgaagagtgacctgattgtgcaccagaggacccacacagctgagaagccctacatctgcaatgactgtgggaagggcttcaccgtgaagagccgcctcatcgtgcaccagaggacccacactggagagaagccctacgtgtgtggggagtgtgggaagggcttccctgccaagatccggctgatgggccaccagaggacccacactggagagaagccctacatctgcaatgaatgtgggaagggcttcacagagaagagccacctgaatgtgcacaggaggacccacactggagagaagccctacgtgtgcagtgaatgtgggaagggcctgaccgggaagtccatgctgattgcccaccagaggacccacactggagagaagccctacatctgcaatgaatgtgggaagggcttcaccatgaagagcaccctgagcatccaccagcagacccacactggagagaagccctacaagtgcaatgaatgtgacaagaccttcaggaagaagacctgcctgatccagcaccagcgcttccacacaggcaagaccagctttgcctgcacagaatgtgggaagttcagcctgaggaagaatgacctgatcacccaccagaggatccacactggagagaagccctacaagtgcagcgactgtgggaaggccttcaccaccaagagcggcctgaatgtgcaccagaggaagcacactggagagcggccctacggctgcagcgactgtgggaaggcctttgcccacctgagcatcctggtgaagcaccggcgcatccacaggtag

SEQ ID NO: 319552 - DNA, 2058 bp, Artificial Sequence
  derived and/or modified sequence
atgacagcccaggagagcctgaccctggaggatgtggccgtggacttcacctgggaggagtggcagttcctgagccctgcccagaaggacctgtacagagatgtgatgctggagaactacagcaacctggtggccgtgggctaccaggccagcaagccagatgccctgagcaagctggagcggggggaggagacctgcaccacagaagatgagatctacagccgcatctgcagcgacagcggcggggccagcggcggggcctatgcagagatcaggaagattgatgaccccctgcagcaccacctgcagaaccagagcatccagaagtctgtgaagcagtgccacgagcagaacatgtttggaaatattgtgaaccagaacaagggccacttcctgctgaagcaggactgtgacacctttgacctgcacgagaagcccctgaagagcaacctgagctttgagaaccagaagaggagcagcggcctgaagaacagcgctgagttcaacagagatggcaagagcctcttccacgccaaccacaagcagttctacacagagatgaagtttcctgccatcgccaagcccatcaacaagagccagttcatcaagcagcagaggacccacaacattgaaaatgcccacgtgtgcagtgaatgtgggaaggccttcctgaagctgagccagttcatcgaccaccagagggtgcacactggagagaagccccacgtgtgcagcatgtgtgggaaggccttcagcaggaagagccggctgatggaccaccagaggacccacacagagctgaagcactatgaatgtacagaatgtgacaagaccttcctgaagaagagccagctgaacatccaccagaagacccacatgggcggcaagccctacacctgcagccagtgtgggaaggccttcatcaagaagtgccgcctcatctaccaccagaggacccacactggagagaagccccacggctgcagcgtgtgtgggaaggccttcagcaccaagttcagcctgaccacccaccagaagacccacactggagagaagccctacatctgcagtgaatgtgggaagggcttcatcgagaagaggcggctgacagcccaccacaggacccacactggagagaagcccttcatctgcaacaagtgtgggaagggcttcaccctgaagaacagcctcatcacccaccagcagacccacactggagagaagctgtacacctgcagtgaatgtgggaagggcttctccatgaagcactgcctgatggtgcaccagaggacccacactggagagaagccctacaagtgcaatgaatgtgggaaaggatttgccctgaagagccccctcatccgccaccagaggacccacactggagagaagccctacgtgtgcacagagtgcaggaagggcttcaccatgaagagtgacctgattgtgcaccagaggacccacacagctgagaagccctacatctgcaatgactgtgggaagggcttcaccgtgaagagccgcctcatcgtgcaccagaggacccacactggagagaagccctacgtgtgtggggagtgtgggaagggcttccctgccaagatccggctgatgggccaccagaggacccacactggagagaagccctacatctgcaatgaatgtgggaagggcttcaccatgaagagcaccctgagcatccaccagcagacccacactggagagaagccctacaagtgcaatgaatgtgacaagaccttcaggaagaagacctgcctgatccagcaccagcgcttccacacaggcaagaccagctttgcctgcacagaatgtgggaagttcagcctgaggaagaatgacctgatcacccaccagaggatccacactggagagaagccctacaagtgcagcgactgtgggaaggccttcaccaccaagagcggcctgaatgtgcaccagaggaagcacactggagagcggccctacggctgcagcgactgtgggaaggcctttgcccacctgagcatcctggtgaagcaccggcgcatccacaggtag

SEQ ID NO: 319553 - DNA, 2229 bp, Artificial Sequence
  derived and/or modified sequence
atgatgcaggcccaggagagcctgaccctggaggatgtggccgtggacttcacctgggaggagtggcagttcctgagccctgcccagaaggacctgtacagagatgtgatgctggagaactacagcaacctggtggccgtgggctaccaggccagcaagccagatgccctgagcaagctggagcggggggaggagacctgcaccacagaagatgagatctacagccgcatctgcagcgacagcggcggggccagcggcggggcctatgcagagatcaggaagattgatgaccccctgcagcaccacctgcagaaccagagcatccagaagtctgtgaagcagtgccacgagcagaacatgtttggaaacatcgtgaaccagaacaagggccacttcctgctgaagcaggactgtgacacctttgacctgcacgagaagcccctgaagagcaacctgagctttgagaaccagaagaggagcagcggcctgaagaacagcgctgagttcaacagagatggcaagagcctcttccacgccaaccacaagcagttctacacagagatgaagtttcctgccatcgccaagcccatcaacaagagccagttcatcaagcagcagaggacccacaacattgaaaatgcccacgtgtgcagtgaatgtgggaaggccttcctgaagctgagccagttcatcgaccaccagagggtgcacactggagagaagccccacgtgtgcagcatgtgtgggaaggccttcagcaggaagagccggctgatggaccaccagaggacccacacagagctgaagcactatgagtgcacagaatgtgacaagaccttcctgaagaagagccagctgaacatccaccagaagacccacatgggcggcaagccctacacctgcagccagtgtgggaaggccttcatcaagaagtgccgcctcatctaccaccagaggacccacactggagagaagccccacggctgcagcgtgtgtgggaaggccttcagcaccaagttcagcctgaccacccaccagaagacccacactggagagaagccctacatctgcagtgaatgtgggaagggcttcatcgagaagaggcggctgacagcccaccacaggacccacactggagagaagcccttcatctgcaacaagtgtgggaagggcttcaccctgaagaacagcctcatcacccaccagcagacccacactggagagaagctgtacacctgcagtgaatgtgggaagggcttctccatgaagcactgcctgatggtgcaccagaggacccacactggagagaagccctacaagtgcaatgaatgtgggaagggctttgccctgaagagccccctcatccgccaccagaggacccacactggagagaagccctacgtgtgcacagaatgtaggaagggcttcaccatgaagagtgacctgattgtgcaccagaggacccacacagctgagaagccctacatctgcaatgactgtgggaagggcttcaccgtgaagagccggctgattgtgcaccagaggacccacactggagagaagccctacgtgtgtggagaatgtgggaagggcttccctgccaagatccggctgatgggccaccagaggacccacactggagagaagccctacatctgcaatgaatgtgggaagggcttcacagagaagagccacctgaatgtgcacaggaggacccacactggagagaagccctacgtgtgcagtgaatgtgggaagggcctgaccgggaagtccatgctgattgcccaccagaggacccacactggagagaagccctacatctgcaatgaatgtgggaagggcttcaccatgaagagcaccctgagcatccaccagcagacccacactggagagaagccctacaagtgcaatgaatgtgacaagaccttcaggaagaagacctgcctgatccagcaccagcgcttccacacaggcaagaccagctttgcctgcacagaatgtgggaagttcagcctgaggaagaatgacctgatcacccaccagaggatccacactggagagaagccctacaagtgcagcgactgtgggaaggccttcaccaccaagagcggcctgaatgtgcaccagaggaagcacactggagagcggccctacggctgcagcgactgtgggaaggcctttgcccacctgagcatcctggtgaagcaccggcgcatccacaggtag

SEQ ID NO: 319554 - DNA, 2226 bp, Artificial Sequence
  derived and/or modified sequence
atgaccgcccaggagagcctgaccctggaggacgtggccgtggactttacgtgggaagagtggcagtttctgagccctgctcaaaaggatttatacagagacgttatgctggaaaattacagcaacctggtcgctgtcgggtaccaggcctctaagcctgacgctctctccaagttagaacggggcgaagaaacttgtacaaccgaggatgagatctactctcggatctgttcagactccgggggcgccagcggcggggcttatgcagaaattagaaagatcgacgaccctttgcagcaccatctgcagaaccagtctattcagaagtctgtgaagcagtgccatgaacaaaatatgtttggaaatattgtcaaccagaataaagggcactttttacttaaacaggattgcgatacatttgatctgcatgaaaagcccctcaaaagcaatttgagctttgaaaaccaaaagaggagcagcggcttaaagaatagtgccgaatttaatcgcgatggcaagagtctgttccacgccaaccataaacagttctacacggagatgaaattccccgccattgcaaagcccatcaataaaagccagttcatcaagcagcagaggacccacaatatcgaaaacgcccatgtttgttcagaatgcggcaaggccttcttaaagctttcccaatttattgatcatcagcgcgtacacacaggtgagaagcctcatgtgtgtagtatgtgcggcaaagccttcagcagaaagagtcgactgatggaccaccagcgaactcatacggaattgaagcattacgagtgcaccgaatgcgataagaccttcctgaagaaatcacagctgaatattcaccagaagacccacatgggtggaaagccgtatacctgttctcaatgcgggaaggccttcattaagaagtgcaggcttatctaccaccaaagaacccacacaggagaaaagcctcatggctgctctgtgtgcggcaaggccttctctaccaagttcagtctcactactcaccaaaaaactcatactggcgagaagccatatatctgcagtgaatgcggcaaagggtttattgaaaagcgtcgtctcacagcacatcaccggacacatacaggggagaaacccttcatatgtaacaagtgtggaaagggatttacactgaagaactccctaataactcatcagcagacgcacaccggggagaagctttacacttgctcggagtgtggaaagggcttctccatgaaacattgcctgatggtacatcaacgaacccatacgggagaaaagccctacaagtgcaatgagtgcggcaaaggattcgctcttaagagcccattaatccgccatcagcggactcacacgggagaaaagccctatgtgtgcacagaatgccgcaaggggttcacaatgaagagcgacttgatagtgcaccaacgaacacatactgccgagaagccctacatctgtaatgactgcggaaaaggatttactgtcaagtcccggcttatcgtgcatcagagaacccacacgggagaaaaaccttacgtgtgtggcgaatgtggtaagggcttcccagcaaaaattagattaatgggacaccagcgaactcacactggcgagaagccctatatatgtaatgagtgcggaaaggggtttaccgaaaagagccatctgaatgtgcatcgcagaactcataccggcgaaaaaccatatgtgtgcagcgaatgcggtaagggactcacagggaaaagtatgttaatcgctcaccagagaactcacacaggggagaaaccctatatctgtaacgagtgtgggaaagggtttaccatgaagtcaacgctttccatccaccagcagacccacacgggtgaaaagccctacaagtgtaacgagtgcgacaaaactttccggaagaaaacttgtctgatccagcaccaaaggttccacaccggcaagacttcatttgcttgtacggagtgtgggaaattttccttgagaaagaatgatttgattactcaccagaggattcacaccggagagaagccttataaatgtagcgattgtggaaaggcgtttaccactaagtcggggttgaatgttcaccagagaaagcacactggcgaacggccgtacggctgttccgactgtggaaaggcctttgcccacctatccatcctcgttaaacacaggcgaattcatcggtag

SEQ ID NO: 319555 - DNA, 2058 bp, Artificial Sequence
  derived and/or modified sequence
atgaccgcccaggagagcctgaccctggaggacgtggccgtggactttacctgggaggagtggcaatttttgtcccctgctcaaaaagatctttaccgcgacgtaatgttggaaaactacagcaatctggtggcggttggctatcaggcaagtaaaccggatgccttgtctaagcttgagcgaggggaggagacttgcacaaccgaggatgagatttactcccggatctgtagcgacagtgggggcgccagtgggggcgcctacgcagaaatacgtaagatcgacgaccctcttcagcatcaccttcagaatcagtccatccagaagtccgtgaagcagtgtcatgaacagaacatgttcggtaacattgtaaaccagaacaaagggcactttcttttgaagcaggactgtgataccttcgacctgcacgaaaagcccctgaaatctaatcttagctttgagaatcaaaagaggagtagcggtctgaagaacagcgcggaattcaatcgagacggaaaaagcctgtttcacgcgaaccacaaacagttctacacggaaatgaagttcccagccattgctaagcctatcaacaaatcccagttcattaaacagcaaagaacacataacatcgaaaatgcacacgtatgtagtgagtgtggaaaggcctttcttaagctgagccagttcatcgatcaccagcgcgtacacacgggggaaaagccccatgtctgctcaatgtgtggtaaagcctttagtagaaaatctcgcctgatggaccatcagcgcacacacacggaactgaagcattacgaatgcactgagtgtgacaagacatttcttaagaaatctcagcttaatattcaccagaagacccacatgggcggcaagccgtacacctgttcccagtgcggcaaggccttcattaaaaagtgtcggctcatctaccatcagagaacccacaccggagaaaaaccccacggatgctcggtatgtgggaaagccttcagcacgaaattctctctgacaacccaccaaaaaactcatacaggtgagaagccctacatttgcagcgagtgcggcaaagggtttattgaaaagagaaggcttaccgctcaccaccgaacccataccggcgaaaaaccttttatatgcaataaatgcggcaagggattcaccctgaagaactccctaattactcatcagcagacccacacaggagaaaagctgtacacttgttccgagtgcggcaagggctttagtatgaagcattgccttatggtgcaccagaggacccacacaggcgagaagccctacaaatgcaacgagtgcggcaaaggcttcgccctcaagtctcctcttatccgccatcaacgtacccacacaggggagaaaccgtacgtgtgcactgagtgcaggaagggcttcacaatgaagtcagatctgatagtgcatcaacggacccacaccgcagaaaaaccctacatatgtaatgactgcggcaagggtttcacagtgaaatctaggctaatcgtgcatcagaggacgcataccggagaaaagccctacgtctgcggggagtgcggcaagggatttccagcaaagattcggcttatgggccaccagaggacccacactggggaaaagccctacatctgcaacgagtgcggaaagggttttacaatgaagagcaccctgtccatccatcagcaaacccacacaggagagaaaccctacaagtgtaatgagtgcgataaaacttttcgcaagaaaacgtgcctgatacaacaccagcggttccatacgggcaagacgagttttgcttgcaccgagtgtgggaagttttcacttcggaagaatgacctgataacacaccagagaatccatactggggaaaaaccatacaaatgctctgactgcggcaaggccttcaccactaagagcggactgaatgtgcaccagcggaaacacactggcgagagaccttacggatgcagtgactgcggcaaagcctttgcccatttgagcatcttggttaagcaccgccggattcatcggtag

SEQ ID NO: 319556 - DNA, 2229 bp, Artificial Sequence
  derived and/or modified sequence
atgatgcaggcccaggagagcctgaccctggaggacgtggccgtggattttacctgggaagaatggcagttcctttcccctgcacagaaagacctctaccgggatgtgatgctggagaactattccaacctggtggcagtgggatatcaggcatccaagccagacgccctttcaaagctggagaggggagaggagacctgcacaacagaagatgagatctatagccgcatttgttccgacagcggaggcgcctcaggcggtgcatatgccgaaattcggaagatcgatgatcctttgcagcatcacctccagaatcaatccatccaaaagagtgttaagcaatgccacgagcaaaatatgttcggcaacatcgtcaaccagaacaagggtcatttcttgcttaaacaggactgtgatacctttgacctgcatgagaaacccttgaaatctaatttgagcttcgaaaatcaaaagaggtccagcggactgaagaattctgctgaattcaacagggacgggaagagtcttttccatgccaatcataaacagttttacacggaaatgaagttccccgccattgcgaagcctatcaacaagagtcagtttatcaaacagcaacgaacacacaacatagaaaacgctcacgtttgttccgaatgtggtaaggcttttcttaagctgagccagtttattgaccatcagcgggtgcataccggcgaaaagcctcacgtgtgttccatgtgtgggaaagcattcagccggaaatcccgcttaatggaccaccagcgaacacatacagagctgaagcactatgaatgcaccgaatgcgacaagacctttttaaagaagtcccaactcaatatccatcaaaaaactcatatgggcggaaaaccgtatacatgttcccagtgtggcaaggcgttcatcaaaaagtgtagactgatctaccatcagagaactcataccggggaaaaaccccatgggtgtagtgtctgtgggaaggccttcagcaccaagttcagcctaaccacacaccagaaaactcatacgggcgagaagccgtacatttgcagcgagtgcggaaagggctttatcgagaagaggcgactgaccgcacaccatcggacacacacaggggagaaacctttcatttgtaacaaatgtggaaaaggttttacacttaagaactcgctgatcactcaccagcagacgcacacaggagaaaagctctatacttgcagtgagtgtggtaaagggttctccatgaaacactgcctcatggtccatcagagaacccacaccggggagaaaccctataaatgcaatgagtgtggtaaaggtttcgccttgaaatcgcctctcatcaggcatcagaggacacacaccggtgaaaagccgtatgtttgcacagaatgccgcaagggatttacaatgaagtcagatctaattgtgcaccagcggacacacacagccgaaaaaccatacatctgcaacgactgtgggaagggttttacggtgaaatctcggcttatcgtgcatcaacggacccacactggcgagaaaccctatgtgtgcggcgagtgcggaaagggcttcccagccaaaattcgtcttatgggacaccagcggacccacaccggagagaagccatatatttgcaatgagtgtggcaagggcttcaccgagaaatcacacctgaatgtacatcgccggacacacactggggagaagccctacgtgtgtagtgaatgtgggaagggattgacagggaagtctatgcttattgctcaccagcgcacccacactggggaaaagccctacatctgcaacgagtgcgggaagggatttaccatgaaaagcacactctcgattcaccaacagactcataccggcgagaagccttataagtgtaatgaatgcgataagacatttcgcaagaagacctgtttaatccaacatcagaggtttcacactggaaaaacttccttcgcatgcactgagtgcggaaagttcagtctccgaaagaacgatttaatcacccaccagcgaatccataccggggagaagccatacaaatgctctgattgtggcaaggcatttactactaagagtgggctgaatgtgcatcagcgcaagcacaccggagaacgcccatatggttgttctgactgtggaaaagcctttgctcatctgtccatcctggtcaagcatcggaggatccaccgttag

SEQ ID NO: 319557 - DNA, 2226 bp, Artificial Sequence
  derived and/or modified sequence
atgaccgcacaggagagtttaaccctggaggacgtcgcggtggattttacatgggaagagtggcaattcttaagccctgcacagaaggatctttatcgcgatgtaatgcttgagaactacagcaacttagttgcagttggctaccaggcttctaagccggacgctctctctaagctagagcgaggagaggaaacatgtaccactgaagacgaaatttattccaggatttgctctgacagtgggggtgctagtggaggcgcatacgcagagataaggaaaattgatgatccgctccagcaccatttgcagaatcagtcaattcaaaagtcggtgaaacagtgtcacgaacagaatatgtttggcaacatcgtgaatcagaacaaaggccatttcctgctgaaacaggattgcgacacttttgacttgcacgagaaacctttgaagagcaacctgtcttttgaaaaccagaagcggtcctcgggacttaagaatagcgctgaatttaaccgggacggaaagtctcttttccatgccaaccacaagcaattttacacagaaatgaagttccccgcaatcgcaaagcctatcaacaagagtcagttcatcaaacagcaaagaacgcacaacattgagaacgctcatgtgtgcagtgaatgtggtaaggctttcctgaagctctcccagttcattgaccaccaacgcgttcataccggagagaaaccccacgtttgcagcatgtgtggcaaggcttttagcagaaaatctaggttaatggaccaccagcgcacacataccgaactgaagcattacgaatgcacggagtgtgataagacctttttgaaaaaaagtcagcttaacattcatcagaagacacacatgggaggtaagccctatacgtgttcgcagtgcggaaaagcctttattaaaaagtgtcggctgatctaccaccagagaacacacacaggcgaaaagcctcatggatgttctgtgtgtggaaaggccttctcaaccaaatttagtctcacaacacaccagaaaacacatacaggggaaaagccatacatatgtagcgaatgcgggaagggtttcatcgagaagcgacggctcacagcccaccatcggacgcacacgggggagaagccatttatctgtaacaaatgcggaaaaggctttaccttgaagaacagtctcatcacacatcagcagacacacaccggcgagaagctctatacttgcagcgagtgtgggaaggggttttcaatgaagcactgcctgatggttcatcaaaggactcatacgggggagaagccctataaatgcaacgagtgcgggaaaggcttcgctttgaaatcacctttgatacgacaccagaggacacacaccggtgaaaaaccatacgtgtgtaccgaatgtagaaaaggcttcaccatgaagtcagatctgatcgtgcatcaaagaacgcatacagcagagaagccttatatctgcaatgattgcgggaaaggcttcaccgtcaaatcgaggctgatcgtacaccaaaggacccacacaggggagaaaccctatgtgtgcggcgaatgcggaaaaggcttccccgctaaaattagattgatggggcaccaaaggacacatacaggagagaaaccctatatttgcaatgagtgcgggaagggctttactgaaaagtctcatctgaatgttcaccggagaactcatactggagagaaaccgtacgtgtgcagcgagtgtggcaaaggcctgacaggaaagagcatgttgatcgcccatcaacggacacatacgggggagaaaccgtatatttgcaacgagtgcggcaaaggcttcactatgaagtcaaccctgagtattcatcagcagacccacacgggcgaaaagccatacaagtgtaatgagtgcgacaagaccttccggaagaagacttgtctgatccagcatcagaggttccacaccgggaagacctcattcgcctgtacggaatgcggaaagtttagcttacggaagaacgaccttattacccatcaacggatccacactggtgagaagccctacaagtgcagcgactgcggcaaggctttcaccactaagtccggccttaatgtgcaccagcgaaagcatacgggtgagcggccatacggctgctctgactgcggaaaggcattcgcccatctgtccattctcgtaaagcataggagaatccaccggtag

SEQ ID NO: 319558 - DNA, 2058 bp, Artificial Sequence
  derived and/or modified sequence
atgacagcccaggaaagcctgaccctcgaagatgtcgccgttgattttacctgggaggagtggcaattcttgagtcctgcccagaaggatctgtatcgtgacgtgatgctggaaaattacagcaatctcgtcgccgtggggtatcaagcctcaaagccggacgcactgtctaaactggagcggggagaggaaacctgtacaactgaggacgagatttactcacggatctgcagtgactccgggggagcctctggaggggcatacgctgagatacgcaaaatcgacgatccccttcaacaccatctccaaaatcagtccatccagaagtctgttaaacagtgccacgaacagaatatgttcggtaacatcgttaaccagaataaggggcacttcctgctgaaacaggactgcgacacatttgatttgcacgagaagccattgaaaagtaatctctctttcgaaaaccagaagcggtcatctggtttgaaaaactccgccgagttcaatcgggatgggaaatcgctttttcatgccaatcacaagcaattctacactgaaatgaaatttccagccatcgccaaacccatcaataaatctcagttcattaagcagcaaagaactcacaatattgagaacgcccacgtgtgctctgaatgcggaaaggctttcctcaagctctcacagttcattgatcatcagagggttcacaccggagaaaaaccacacgtgtgttccatgtgtggcaaagccttctctcgcaagagcaggcttatggaccaccaaaggactcataccgagctgaaacactatgagtgcactgagtgcgataagacgtttttgaagaaatctcagcttaatattcaccagaagacccatatgggtggcaagccatacacctgcagtcagtgtggaaaggcttttatcaaaaagtgcaggttgatctatcatcagagaacacatactggagaaaagcctcatggctgcagcgtgtgcggcaaagccttttcaacaaagttcagccttactacacatcagaaaacccatacgggcgaaaagccgtacatctgtagcgaatgtggaaagggctttatcgagaaaaggcgcctgaccgcccatcatcgaactcatactggagagaagccatttatttgtaataaatgcggcaagggatttactcttaagaacagtctgattacgcatcagcagacgcacaccggcgagaaactgtacacctgcagcgagtgcggcaaggggttttctatgaagcattgcctgatggttcatcagaggacgcacaccggtgaaaaaccatataaatgtaacgagtgtggaaagggattcgctttaaagtcacccctgatccgccaccagcgtacacacactggagagaagccttacgtatgtaccgagtgtcgaaaaggatttaccatgaaatccgatctgattgttcaccagaggacccataccgccgaaaaaccctacatttgcaacgactgtgggaagggcttcacagtgaaatcacgcctgatcgtgcatcaacggactcacacaggcgaaaaaccttacgtgtgtggagagtgcgggaagggcttccctgctaaaattcgattgatgggccatcagagaacccacaccggggagaaaccatacatttgcaacgagtgcgggaagggcttcacaatgaagtccaccctgagcatccaccagcagacacacacgggggaaaagccctacaagtgcaatgaatgcgataaaacgttcagaaagaagacttgtcttatccagcatcagaggtttcataccgggaaaacatctttcgcctgtactgagtgcgggaagttctcgctgcgtaagaatgatctgatcacacatcagaggattcacactggtgagaaaccatacaaatgctcagattgcggtaaagcttttaccaccaagagcggcctcaacgtgcatcagcgcaagcatacgggcgaacgcccttacggatgtagtgactgcggcaaggcattcgctcacctcagtatcctggtaaaacacaggcggatccaccgctag

SEQ ID NO: 319559 - DNA, 2229 bp, Artificial Sequence
  derived and/or modified sequence
atgatgcaggcacaagagagcctgactctggaggacgtggcggtggacttcacatgggaggagtggcagtttctgagccccgcacagaaagatctgtatcgggacgtcatgctggaaaactactccaacttggtcgcagtcggctatcaggcctctaaaccagacgctctgagtaaacttgaacggggagaggagacatgtactacagaggatgaaatttatagcaggatttgttcagactccgggggagcttctggcggagcttatgcagagatccgaaagatcgacgatccattgcagcaccatcttcagaaccagagcatccaaaaatcagtgaaacaatgccacgagcagaacatgttcgggaacattgtcaatcaaaacaaaggacattttctgctgaaacaggactgtgacacttttgatcttcatgaaaagccactcaagagcaacctgagctttgagaatcagaaaaggagctcaggcctgaagaatagcgcagagtttaatagggacggcaaatctctttttcacgccaaccataagcagttttataccgagatgaaatttcccgcaatagcgaagccgattaacaagtctcagtttattaaacagcagcgcactcacaatattgagaacgcgcacgtttgtagtgaatgtggaaaagctttccttaaactgtcgcagtttattgaccatcagcgggttcacacaggggaaaagccacatgtttgcagcatgtgtggaaaagcctttagtcgaaagtcacggttgatggaccaccagcggacccacactgaacttaaacactatgaatgtactgagtgtgacaagactttcttgaagaagagccagttaaatattcatcagaagacacacatgggtggcaagccatacacctgttctcaatgcggtaaagctttcataaaaaaatgtcgcctcatctaccatcaacgcacccatactggagagaaaccccacggctgctcagtatgcggcaaggcattttcaacaaagttctcactgaccacccaccagaagacgcacaccggggaaaagccatacatttgcagcgagtgcgggaagggcttcatcgaaaaacgtagactcaccgcccaccatcgcacccacaccggcgagaagccctttatctgcaacaagtgtgggaagggctttaccctaaaaaattcactcattactcaccagcagacacacacaggcgaaaagctgtatacatgcagtgagtgcggcaagggttttagcatgaaacattgtctgatggtccatcagagaactcatacgggggagaagccatataagtgcaatgaatgtggaaagggatttgctctcaaatcccctttgattagacaccagaggacccacaccggagaaaaaccctacgtgtgcactgaatgccgcaagggattcaccatgaagtccgacttgatcgttcaccagcggacgcatactgcagagaagccctatatctgcaacgactgcggaaaagggttcacggtgaaatcccgattgattgttcaccagcggacccatactggtgaaaaaccctacgtgtgtggagagtgtggtaagggctttcccgctaagattaggttgatgggacaccagagaactcacacaggggaaaaaccgtacatctgcaacgaatgcggcaagggatttactgaaaagtcacacctcaacgttcatcgcaggacccacactggggaaaagccctatgtgtgcagcgagtgtgggaaaggcttgaccggtaagtccatgctcatcgcacaccagaggacccatacaggagagaaaccgtatatatgcaacgaatgcgggaaaggcttcaccatgaaatctaccctgtccatacaccagcagacacacaccggggaaaaaccctataagtgcaatgagtgtgacaagacattcaggaaaaaaacgtgccttatacaacaccagagattccatacaggtaagacgtccttcgcttgtaccgaatgtggcaaattttcgctccggaagaatgacctgatcacgcatcaacgtatccacacaggcgagaagccttataagtgtagtgattgtggtaaagcctttaccactaaaagtgggctgaacgtgcatcagcgtaagcacacaggtgagcgcccatacggttgctctgattgcggcaaggctttcgctcacctcagcattcttgtgaagcacaggagaatccaccggtag

SEQ ID NO: 319560 - DNA, 3611 bp, Artificial Sequence
  derived and/or modified sequence
atgaccgcacaggaatccctaacactggaggatgtggctgtggacttcacctgggaggagtggcagttcctgagccctgctcagaaggacctgtaccgggacgtgatgttggagaactacagcaacctggtggcagtggggtatcaagccagcaaaccagatgcactctccaaattggaacgaggagaagaaacttgcacaacagaagatgaaatctactctcgaatctgttctgattcaggaggtgcatcaggaggtgcatatgcagaaatcaggaaaattgatgatcctctgcagcatcacttgcaaaatcaaagtattcagaagagtgtgaaacagtgccatgaacagaatatgtttggaaatattgttaatcagaacaaaggtcatttcctgctgaagcaagattgtgatacgtttgacttacatgaaaaacctttaaaatcaaatttaagttttgaaaaccagaaaaggagctctggcctaaagaactctgctgagtttaatagagatgggaaatccctttttcatgctaaccataaacaattttatactgaaatgaagtttcctgcaattgcaaaacctattaataagtcccagttcattaagcaacagagaactcacaacatagagaatgcccatgtatgcagtgaatgtgggaaagccttcctcaagttgtctcagtttattgatcatcagagagttcacactggagaaaaacctcatgtatgcagtatgtgtgggaaagctttctccagaaaatccagactaatggaccatcagagaactcatacagaactgaaacattatgaatgcactgaatgtgacaaaaccttcctcaagaaatcacagctcaatatacatcagaaaactcatatgggagggaaaccttacacatgtagccaatgtgggaaagccttcatcaagaagtgtcggctcatttatcatcaacgaactcatacaggagagaaaccccatggatgcagtgtatgtgggaaggccttctctacaaagttcagtctcactacacatcagaaaactcatacaggagaaaaaccttatatatgtagtgaatgtggaaaaggcttcattgagaagaggcgtcttactgcacatcatcgaactcatactggtgagaaaccctttatatgcaataaatgtgggaaaggcttcaccttgaagaacagtcttatcacacatcagcaaactcatacaggagagaaattatatacatgtagtgaatgtggaaaaggcttttcaatgaagcactgtctcatggtacatcaacgaactcatactggagagaaaccttataaatgcaatgagtgtggaaagggcttcgctttgaagagcccactcatcagacatcagcgaacacatactggagagaaaccctatgtatgcaccgaatgtcgaaaaggtttcaccatgaagagtgacctcattgtacatcagcgaactcatactgcagagaagccatatatatgcaatgattgtggaaaaggcttcactgtgaagagccgccttattgtgcatcagcgaactcatactggagaaaaaccctatgtatgtggtgagtgtggaaaaggctttccagcaaagatccggctaatgggacatcaacgaactcatacaggagagaaaccttatatttgcaatgagtgtggaaaaggcttcactgagaagagtcatctcaatgtacatcggcgcactcatacaggagagaaaccctatgtatgcagtgaatgtggcaaaggcttaactgggaaaagcatgctcattgcacatcagcgaactcatactggggagaaaccttatatatgcaatgaatgtggaaagggcttcaccatgaagagtactctcagtatacatcagcaaactcatactggagagaagccatacaaatgcaatgaatgtgataaaaccttcaggaagaagacatgcctcatacaacatcagcgatttcacacaggaaagacttcctttgcatgtactgaatgtggaaaattctctttgcgcaaaaatgatcttattacacatcagagaattcacacaggagagaaaccgtacaaatgcagtgactgcgggaaagccttcactacaaaatcagggctcaatgttcatcaaagaaaacatacaggagagaggccctatggatgtagtgattgtgggaaagcttttgcgcacttgtctatccttgttaaacacaggagaattcacaggtagtcattttgggaaagcctcttgccagatgtaggcccttaagatatctgcaaagaagagtaatttcatgaatgcagactacatggttgtttatttagtgatcagttacttcatgttttgtgtcagagaaaacatgtacaaaacatttgagaaaatattttaggacattatgtctaaaaattgtatactgagaaaaatcctatgaatgtggcagactataaaagcctttggtgggaagataaaccccctcagaagtgatcatagatcatgaataaactactaattcgtggaaatgtaataattataggaacgtctttgcccaaaaataaaacttcaacagattgagagagttcacactggagaaatactttcctctggcaaacccctgtggcagggttttcagtaaaatgttttgcctcatcgtgtgctaggaaataatgcagaaaaaacttatgaaaacattcaatgtagaagacttttaggaaaatatcagagaatttaatgaaggaaagaagccttggcaaaatgatggatgagagctttctgtcacaattctaaccttaacagataatatgcctcatgtgcatttgggaacaggatagcttgagccatattcctagttgccttgtcactgattttatacattttaaattgtgacttcctctaatcacgaactaaaatttaatattgtatataataccggagtattttatgcctgcctcattttattatatgattagctcctgcatttctttggttctaagtttgtgttatttcagaataactaaagtacttcagaatgaaactggatacagtatattcagttcataagtgtaattgaccatacttgaatatgtttaagtttataagtaacatcaggtgttatgaaattaatataaataagatgtttttgtaagtttttattttgaaataagtttagattcacaaaatcttaccaaaatattccagagttcttgcccttaacccagcttcttccaaagataacaacttacataagcatagttcattaccaaatacaggaaagtgaaattgttacaatactgttaactacagaatttatttggaaatcaccagttttaacatgcatgcatttttgtttgttttttatatgtagctttaagaaatcttaacacatatattgattcatgtcaccaccaccgtaatcgagattcagaatgttgcatcaatgcaaactccctcatgctccttgtttatagtcacaacctctcctcagccctaacccttggcaatcagaaatcttttcatctttagttttgtcattagtagcatgttataaaaatggaatcatacagcatgtacccttttggtattggctatttcaactaaagcagattaacctgaaatcc

SEQ ID NO: 319561 - DNA, 2058 bp, Artificial Sequence
  derived and/or modified sequence
atgaccgcacaggaatccctaacactggaggatgtggctgtggacttcacctgggaggagtggcagttcctgagccctgctcagaaggacctgtaccgggacgtgatgttggagaactacagcaacctggtggcagtggggtatcaagccagcaaaccagatgcactctccaaattggaacgaggagaagaaacttgcacaacagaagatgaaatctactctcgaatctgttctgattcaggaggtgcatcaggaggtgcatatgcagaaatcaggaaaattgatgatcctctgcagcatcacttgcaaaatcaaagtattcagaagagtgtgaaacagtgccatgaacagaatatgtttggaaatattgttaatcagaacaaaggtcatttcctgctgaagcaagattgtgatacgtttgacttacatgaaaaacctttaaaatcaaatttaagttttgaaaaccagaaaaggagctctggcctaaagaactctgctgagtttaatagagatgggaaatccctttttcatgctaaccataaacaattttatactgaaatgaagtttcctgcaattgcaaaacctattaataagtcccagttcattaagcaacagagaactcacaacatagagaatgcccatgtatgcagtgaatgtgggaaagccttcctcaagttgtctcagtttattgatcatcagagagttcacactggagaaaaacctcatgtatgcagtatgtgtgggaaagctttctccagaaaatccagactaatggaccatcagagaactcatacagaactgaaacattatgaatgcactgaatgtgacaaaaccttcctcaagaaatcacagctcaatatacatcagaaaactcatatgggagggaaaccttacacatgtagccaatgtgggaaagccttcatcaagaagtgtcggctcatttatcatcaacgaactcatacaggagagaaaccccatggatgcagtgtatgtgggaaggccttctctacaaagttcagtctcactacacatcagaaaactcatacaggagaaaaaccttatatatgtagtgaatgtggaaaaggcttcattgagaagaggcgtcttactgcacatcatcgaactcatactggtgagaaaccctttatatgcaataaatgtgggaaaggcttcaccttgaagaacagtcttatcacacatcagcaaactcatacaggagagaaattatatacatgtagtgaatgtggaaaaggcttttcaatgaagcactgtctcatggtacatcaacgaactcatactggagagaaaccttataaatgcaatgagtgtggaaagggcttcgctttgaagagcccactcatcagacatcagcgaacacatactggagagaaaccctatgtatgcaccgaatgtcgaaaaggtttcaccatgaagagtgacctcattgtacatcagcgaactcatactgcagagaagccatatatatgcaatgattgtggaaaaggcttcactgtgaagagccgccttattgtgcatcagcgaactcatactggagaaaaaccctatgtatgtggtgagtgtggaaaaggctttccagcaaagatccggctaatgggacatcaacgaactcatactggggagaaaccttatatatgcaatgaatgtggaaagggcttcaccatgaagagtactctcagtatacatcagcaaactcatactggagagaagccatacaaatgcaatgaatgtgataaaaccttcaggaagaagacatgcctcatacaacatcagcgatttcacacaggaaagacttcctttgcatgtactgaatgtggaaaattctctttgcgcaaaaatgatcttattacacatcagagaattcacacaggagagaaaccgtacaaatgcagtgactgcgggaaagccttcactacaaaatcagggctcaatgttcatcaaagaaaacatacaggagagaggccctatggatgtagtgattgtgggaaagcttttgcgcacttgtctatccttgttaaacacaggagaattcacaggtag

SEQ ID NO: 319562 - DNA, 4020 bp, Artificial Sequence
  derived and/or modified sequence
ccgtcaggcactgaggaggccgagagatgaggccggagcccaccaagttctgggaacccacaggtgctgagaacaagagaaatcaagtgaaggaaggaggcggagtttccaagacttgggtgtcatcatttctggggacatccttgattggagattgaagtttttgaaccgaaatttagagctgattcagaagagacaaatacagaacgtccaagttagcagtcatttcccaaatttaggagacaatgatgcaggcccaggaatccctaacactggaggatgtggctgtggacttcacctgggaggagtggcagttcctgagccctgctcagaaggacctgtaccgggacgtgatgttggagaactacagcaacctggtggcagtggggtatcaagccagcaaaccagatgcactctccaaattggaacgaggagaagaaacttgcacaacagaagatgaaatctactctcgaatctgttctgattcaggaggtgcatcaggaggtgcatatgcagaaatcaggaaaattgatgatcctctgcagcatcacttgcaaaatcaaagtattcagaagagtgtgaaacagtgccatgaacagaatatgtttggaaatattgttaatcagaacaaaggtcatttcctgctgaagcaagattgtgatacgtttgacttacatgaaaaacctttaaaatcaaatttaagttttgaaaaccagaaaaggagctctggcctaaagaactctgctgagtttaatagagatgggaaatccctttttcatgctaaccataaacaattttatactgaaatgaagtttcctgcaattgcaaaacctattaataagtcccagttcattaagcaacagagaactcacaacatagagaatgcccatgtatgcagtgaatgtgggaaagccttcctcaagttgtctcagtttattgatcatcagagagttcacactggagaaaaacctcatgtatgcagtatgtgtgggaaagctttctccagaaaatccagactaatggaccatcagagaactcatacagaactgaaacattatgaatgcactgaatgtgacaaaaccttcctcaagaaatcacagctcaatatacatcagaaaactcatatgggagggaaaccttacacatgtagccaatgtgggaaagccttcatcaagaagtgtcggctcatttatcatcaacgaactcatacaggagagaaaccccatggatgcagtgtatgtgggaaggccttctctacaaagttcagtctcactacacatcagaaaactcatacaggagaaaaaccttatatatgtagtgaatgtggaaaaggcttcattgagaagaggcgtcttactgcacatcatcgaactcatactggtgagaaaccctttatatgcaataaatgtgggaaaggcttcaccttgaagaacagtcttatcacacatcagcaaactcatacaggagagaaattatatacatgtagtgaatgtggaaaaggcttttcaatgaagcactgtctcatggtacatcaacgaactcatactggagagaaaccttataaatgcaatgagtgtggaaagggcttcgctttgaagagcccactcatcagacatcagcgaacacatactggagagaaaccctatgtatgcaccgaatgtcgaaaaggtttcaccatgaagagtgacctcattgtacatcagcgaactcatactgcagagaagccatatatatgcaatgattgtggaaaaggcttcactgtgaagagccgccttattgtgcatcagcgaactcatactggagaaaaaccctatgtatgtggtgagtgtggaaaaggctttccagcaaagatccggctaatgggacatcaacgaactcatacaggagagaaaccttatatttgcaatgagtgtggaaaaggcttcactgagaagagtcatctcaatgtacatcggcgcactcatacaggagagaaaccctatgtatgcagtgaatgtggcaaaggcttaactgggaaaagcatgctcattgcacatcagcgaactcatactggggagaaaccttatatatgcaatgaatgtggaaagggcttcaccatgaagagtactctcagtatacatcagcaaactcatactggagagaagccatacaaatgcaatgaatgtgataaaaccttcaggaagaagacatgcctcatacaacatcagcgatttcacacaggaaagacttcctttgcatgtactgaatgtggaaaattctctttgcgcaaaaatgatcttattacacatcagagaattcacacaggagagaaaccgtacaaatgcagtgactgcgggaaagccttcactacaaaatcagggctcaatgttcatcaaagaaaacatacaggagagaggccctatggatgtagtgattgtgggaaagcttttgcgcacttgtctatccttgttaaacacaggagaattcacaggtagtcattttgggaaagcctcttgccagatgtaggcccttaagatatctgcaaagaagagtaatttcatgaatgcagactacatggttgtttatttagtgatcagttacttcatgttttgtgtcagagaaaacatgtacaaaacatttgagaaaatattttaggacattatgtctaaaaattgtatactgagaaaaatcctatgaatgtggcagactataaaagcctttggtgggaagataaaccccctcagaagtgatcatagatcatgaataaactactaattcgtggaaatgtaataattataggaacgtctttgcccaaaaataaaacttcaacagattgagagagttcacactggagaaatactttcctctggcaaacccctgtggcagggttttcagtaaaatgttttgcctcatcgtgtgctaggaaataatgcagaaaaaacttatgaaaacattcaatgtagaagacttttaggaaaatatcagagaatttaatgaaggaaagaagccttggcaaaatgatggatgagagctttctgtcacaattctaaccttaacagataatatgcctcatgtgcatttgggaacaggatagcttgagccatattcctagttgccttgtcactgattttatacattttaaattgtgacttcctctaatcacgaactaaaatttaatattgtatataataccggagtattttatgcctgcctcattttattatatgattagctcctgcatttctttggttctaagtttgtgttatttcagaataactaaagtacttcagaatgaaactggatacagtatattcagttcataagtgtaattgaccatacttgaatatgtttaagtttataagtaacatcaggtgttatgaaattaatataaataagatgtttttgtaagtttttattttgaaataagtttagattcacaaaatcttaccaaaatattccagagttcttgcccttaacccagcttcttccaaagataacaacttacataagcatagttcattaccaaatacaggaaagtgaaattgttacaatactgttaactacagaatttatttggaaatcaccagttttaacatgcatgcatttttgtttgttttttatatgtagctttaagaaatcttaacacatatattgattcatgtcaccaccaccgtaatcgagattcagaatgttgcatcaatgcaaactccctcatgctccttgtttatagtcacaacctctcctcagccctaacccttggcaatcagaaatcttttcatctttagttttgtcattagtagcatgttataaaaatggaatcatacagcatgtacccttttggtattggctatttcaactaaagcagattaacctgaaatccatccaagttgttctgcatatcattgttctgtttttattggccactaataatctatgatacgaatataccactatttgtttattcacccactgaaggacattagttttgttcccggtttttcttactgttacaaataaaaatcctatgaacatttgtacaca

SEQ ID NO: 319563 - protein, 736 aa, Artificial Sequence
  derived and/or modified sequence
MRPEPTKFWEESLTLEDVAVDFTWEEWQFLSPAQKDLYRDVMLENYSNLVAVGYQASKPDALSKLERGEETCTTEDEIYSRICSEIRKIDDPLQHHLQNQSIQKSVKQCHEQNMFGNIVNQNKGHFLLKQDCDTFDLHEKPLKSNLSFENQKRSSGLKNSAEFNRDGKSLFHANHKQFYTEMKFPAIAKPINKSQFIKQQRTHNIENAHVCSECGKAFLKLSQFIDHQRVHTGEKPHVCSMCGKAFSRKSRLMDHQRTHTELKHYECTECDKTFLKKSQLNIHQKTHMGGKPYTCSQCGKAFIKKCRLIYHQRTHTGEKPHGCSVCGKAFSTKFSLTTHQKTHTGEKPYICSECGKGFIEKRRLTAHHRTHTGEKPFICNKCGKGFTLKNSLITHQQTHTGEKLYTCSECGKGFSMKHCLMVHQRTHTGEKPYKCNECGKGFALKSPLIRHQRTHTGEKPYVCTECRKGFTMKSDLIVHQRTHTAEKPYICNDCGKGFTVKSRLIVHQRTHTGEKPYVCGECGKGFPAKIRLMGHQRTHTGEKPYICNECGKGFTEKSHLNVHRRTHTGEKPYVCSECGKGLTGKSMLIAHQRTHTGEKPYICNECGKGFTMKSTLSIHQQTHTGEKPYKCNECDKTFRKKTCLIQHQRFHTGKTSFACTECGKFSLRKNDLITHQRIHTGEKPYKCSDCGKAFTTKSGLNVHQRKHTGERPYGCSDCGKAFAHLSILVKHRRIHR

SEQ ID NO: 319564 - DNA, 2211 bp, Artificial Sequence
  derived and/or modified sequence
atgagacccgagcccaccaagttctgggaggagagcctgaccctggaggacgtggccgtggacttcacctgggaggagtggcagttcctgagccccgcccagaaggacctgtacagagacgtgatgctggagaactacagcaacctggtggccgtgggctaccaggccagcaagcccgacgccctgagcaagctggagagaggcgaggagacctgcaccaccgaggacgagatctacagcagaatctgcagcgagatcagaaagatcgacgaccccctgcagcaccacctgcagaaccagagcatccagaagagcgtgaagcagtgccacgagcagaacatgttcggcaacatcgtgaaccagaacaagggccacttcctgctgaagcaggactgcgacaccttcgacctgcacgagaagcccctgaagagcaacctgagcttcgagaaccagaagagaagcagcggcctgaagaacagcgccgagttcaacagagacggcaagagcctgttccacgccaaccacaagcagttctacaccgagatgaagttccccgccatcgccaagcccatcaacaagagccagttcatcaagcagcagagaacccacaacatcgagaacgcccacgtgtgcagcgagtgcggcaaggccttcctgaagctgagccagttcatcgaccaccagagagtgcacaccggcgagaagccccacgtgtgcagcatgtgcggcaaggccttcagcagaaagagcagactgatggaccaccagagaacccacaccgagctgaagcactacgagtgcaccgagtgcgacaagaccttcctgaagaagagccagctgaacatccaccagaagacccacatgggcggcaagccctacacctgcagccagtgcggcaaggccttcatcaagaagtgcagactgatctaccaccagagaacccacaccggcgagaagccccacggctgcagcgtgtgcggcaaggccttcagcaccaagttcagcctgaccacccaccagaagacccacaccggcgagaagccctacatctgcagcgagtgcggcaagggcttcatcgagaagagaagactgaccgcccaccacagaacccacaccggcgagaagcccttcatctgcaacaagtgcggcaagggcttcaccctgaagaacagcctgatcacccaccagcagacccacaccggcgagaagctgtacacctgcagcgagtgcggcaagggcttcagcatgaagcactgcctgatggtgcaccagagaacccacaccggcgagaagccctacaagtgcaacgagtgcggcaagggcttcgccctgaagagccccctgatcagacaccagagaacccacaccggcgagaagccctacgtgtgcaccgagtgcagaaagggcttcaccatgaagagcgacctgatcgtgcaccagagaacccacaccgccgagaagccctacatctgcaacgactgcggcaagggcttcaccgtgaagagcagactgatcgtgcaccagagaacccacaccggcgagaagccctacgtgtgcggcgagtgcggcaagggcttccccgccaagatcagactgatgggccaccagagaacccacaccggcgagaagccctacatctgcaacgagtgcggcaagggcttcaccgagaagagccacctgaacgtgcacagaagaacccacaccggcgagaagccctacgtgtgcagcgagtgcggcaagggcctgaccggcaagagcatgctgatcgcccaccagagaacccacaccggcgagaagccctacatctgcaacgagtgcggcaagggcttcaccatgaagagcaccctgagcatccaccagcagacccacaccggcgagaagccctacaagtgcaacgagtgcgacaagaccttcagaaagaagacctgcctgatccagcaccagagattccacaccggcaagaccagcttcgcctgcaccgagtgcggcaagttcagcctgagaaagaacgacctgatcacccaccagagaatccacaccggcgagaagccctacaagtgcagcgactgcggcaaggccttcaccaccaagagcggcctgaacgtgcaccagagaaagcacaccggcgagagaccctacggctgcagcgactgcggcaaggccttcgcccacctgagcatcctggtgaagcacagaagaatccacagatag

SEQ ID NO: 319565 - DNA, 2211 bp, Artificial Sequence
  derived and/or modified sequence
atgaggccagaacctaccaagttctgggaagagagcctgactttggaggatgtggccgtagactttacctgggaagagtggcagttcctcagtccagcccagaaggacctttatcgggatgtcatgctcgagaattattctaatctcgtggccgtcggatatcaagcatccaagccagacgcactttctaaacttgagcgtggcgaagaaacttgcaccactgaagatgaaatctactcccgtatttgttctgagatcagaaagattgacgaccccctgcagcatcacctgcaaaatcagtcaattcaaaagtccgtcaagcagtgtcatgaacagaacatgttcggcaacatagtaaatcaaaacaaggggcactttctcctgaagcaggattgcgatactttcgacttgcacgagaaacccctaaaatccaatctgtcctttgagaaccaaaagagatcatcagggctgaagaactcagcagagttcaatagggatgggaagagtctattccacgctaatcacaaacagttttacacggagatgaaattccccgcaatagcgaagcccattaacaagtcacagttcatcaagcagcagagaacccataacattgaaaatgctcacgtgtgtagcgaatgtggaaaagctttcctgaagctaagccagttcattgaccaccagagggtacacacaggcgagaagcctcacgtgtgctccatgtgcgggaaggctttctctcgaaaatctagattaatggatcatcaacggactcatacagagctcaagcactatgaatgtacggaatgtgacaagacattcctgaagaaatcccagcttaatatacaccagaagactcacatgggagggaagccatatacgtgttcccagtgtggtaaagcattcattaaaaagtgccgcctgatctatcaccaaaggacccataccggtgaaaaaccacatggctgttctgtgtgcggcaaggcattttccactaaattctctctcacgacgcaccagaagacacataccggggaaaaaccctatatttgcagcgaatgcggtaaaggcttcattgagaagcgcaggttaacagctcatcaccggacccatacaggcgagaagcccttcatttgcaacaaatgtggcaaggggttcacattgaaaaactcactaatcacccatcagcagacgcataccggtgagaagttgtacacctgcagcgaatgtggtaagggattttcgatgaagcattgcctcatggtgcatcagcgcacccataccggagagaagccttacaaatgcaatgaatgcggaaagggctttgccctcaaaagcccgctgatccgccaccagcgcactcacacaggggaaaaaccttatgtttgtactgaatgtcgcaagggatttacaatgaaaagtgacctgatagtgcaccagcggactcataccgccgaaaagccttacatctgcaatgactgtggtaagggctttaccgtcaagagtcgcctgatcgttcaccagcgaacgcataccggggaaaagccatatgtgtgtggggaatgcggaaagggcttccccgccaaaatccgcctgatgggtcatcagcgtacacacactggagaaaaaccttacatctgtaacgagtgtgggaaaggtttcacagagaaatcacacttaaacgttcatcggcgcacccacacaggagagaaaccctatgtttgttccgaatgcggaaaggggttgaccggaaagtccatgctgattgctcaccagagaacacatacaggggaaaagccctacatctgcaatgagtgcggtaaaggcttcacgatgaaaagcaccctttccatccatcagcagacccatacaggcgaaaaaccttacaagtgtaacgagtgtgataagacatttcgcaagaagacttgcctgatccagcaccagagatttcacacgggcaagaccagctttgcctgtacagagtgtgggaaatttagtctgcggaaaaacgacttgattacgcaccagagaattcatacgggtgaaaagccgtacaaatgctccgattgtggcaaggccttcaccactaaaagtggactgaatgtgcatcaaaggaagcacaccggagagcggccctacgggtgcagcgattgcggtaaggcattcgcgcaccttagtatcctggttaaacacaggcgcatccacaggtag

SEQ ID NO: 319566 - DNA, 2211 bp, Artificial Sequence
  derived and/or modified sequence
atgaggcctgagcccaccaagttctgggaggagagcctgaccctggaggatgtggccgtggacttcacctgggaggagtggcagttcctgagccctgcccagaaggacctgtacagagatgtgatgctggagaactacagcaacctggtggccgtgggctaccaggccagcaagccagatgccctgagcaagctggagcggggggaggagacctgcaccacagaagatgagatctacagccgcatctgcagcgagatcaggaagattgatgaccccctgcagcaccacctgcagaaccagagcatccagaagtctgtgaagcagtgccacgagcagaacatgtttggaaacatcgtgaaccagaacaagggccacttcctgctgaagcaggactgtgacacctttgacctgcacgagaagcccctgaagagcaacctgagctttgagaaccagaagaggagcagcggcctgaagaacagcgctgagttcaacagagatggcaagagcctcttccacgccaaccacaagcagttctacacagagatgaagtttcctgccatcgccaagcccatcaacaagagccagttcatcaagcagcagaggacccacaacattgaaaatgcccacgtgtgcagtgaatgtgggaaggccttcctgaagctgagccagttcatcgaccaccagagggtgcacactggagagaagccccacgtgtgcagcatgtgtgggaaggccttcagcaggaagagccggctgatggaccaccagaggacccacacagagctgaagcactatgagtgcacagaatgtgacaagaccttcctgaagaagagccagctgaacatccaccagaagacccacatgggcggcaagccctacacctgcagccagtgtgggaaggccttcatcaagaagtgccgcctcatctaccaccagaggacccacactggagagaagccccacggctgcagcgtgtgtgggaaggccttcagcaccaagttcagcctgaccacccaccagaagacccacactggagagaagccctacatctgcagtgaatgtgggaagggcttcatcgagaagaggcggctgacagcccaccacaggacccacactggagagaagcccttcatctgcaacaagtgtgggaagggcttcaccctgaagaacagcctcatcacccaccagcagacccacactggagagaagctgtacacctgcagtgaatgtgggaagggcttctccatgaagcactgcctgatggtgcaccagaggacccacactggagagaagccctacaagtgcaatgaatgtgggaagggctttgccctgaagagccccctcatccgccaccagaggacccacactggagagaagccctacgtgtgcacagaatgtaggaagggcttcaccatgaagagtgacctgattgtgcaccagaggacccacacagctgagaagccctacatctgcaatgactgtgggaagggcttcaccgtgaagagccggctgattgtgcaccagaggacccacactggagagaagccctacgtgtgtggagaatgtgggaagggcttccctgccaagatccggctgatgggccaccagaggacccacactggagagaagccctacatctgcaatgaatgtgggaagggcttcacagagaagagccacctgaatgtgcacaggaggacccacactggagagaagccctacgtgtgcagtgaatgtgggaagggcctgaccgggaagtccatgctgattgcccaccagaggacccacactggagagaagccctacatctgcaatgaatgtgggaagggcttcaccatgaagagcaccctgagcatccaccagcagacccacactggagagaagccctacaagtgcaatgaatgtgacaagaccttcaggaagaagacctgcctgatccagcaccagcgcttccacacaggcaagaccagctttgcctgcacagaatgtgggaagttcagcctgaggaagaatgacctgatcacccaccagaggatccacactggagagaagccctacaagtgcagcgactgtgggaaggccttcaccaccaagagcggcctgaatgtgcaccagaggaagcacactggagagcggccctacggctgcagcgactgtgggaaggcctttgcccacctgagcatcctggtgaagcaccggcgcatccacaggtag

SEQ ID NO: 319567 - DNA, 2211 bp, Artificial Sequence
  derived and/or modified sequence
atgcggcccgagcccaccaagttctgggaggagagcctgaccctggaggatgtggcagtggatttcacatgggaggagtggcaattcctgagcccagcgcagaaagatctatacagggacgtcatgcttgaaaactactccaatcttgtcgcagttgggtaccaggccagcaagccagatgctctgagtaaattagagcgaggcgaagagacatgcacaactgaagacgagatttacagtcggatatgctcagagatcaggaaaattgacgaccccctccagcatcacctgcagaaccagagcattcagaagagcgtcaagcaatgccatgagcaaaatatgttcgggaacattgtcaaccagaataagggtcactttcttctgaaacaagactgcgacacattcgatctacacgagaagcccttgaagtctaacttatcattcgagaatcaaaagaggtcatctggcctcaagaattcagctgagtttaacagggatggcaaaagcctcttccatgcaaaccacaagcagttctatacagagatgaagttccctgctatagctaagccaattaacaaatcccagtttatcaagcaacagagaacccataacatcgaaaatgcccatgtttgctcagaatgcggtaaagccttccttaagctttctcagttcatcgaccaccagcgcgttcacacaggagaaaaaccccacgtgtgctccatgtgtggaaaagctttctcgcggaagagtagattgatggaccaccagcggacccacacagagctgaaacattatgagtgcacagaatgcgacaagaccttcctgaaaaagtcgcaacttaacatccaccagaagacccatatgggcggtaagccctacacgtgcagtcagtgcggtaaagccttcattaagaaatgccgactgatctaccatcagcgaacccatacaggcgaaaagcctcatggatgtagtgtctgcggcaaagcttttagcactaagttttctctgacgacccaccagaaaactcacactggagagaagccgtatatttgtagtgagtgcggaaaaggattcatcgaaaaacgccggctgacggcgcaccaccggacacacactggcgaaaagccattcatttgcaataagtgcggcaaagggttcaccctgaagaactctctgataactcatcaacaaacccatacaggtgagaagttgtatacatgtagcgaatgtggcaagggattcagtatgaaacactgtcttatggtgcaccagcgcacccatactggggaaaaaccctataagtgtaatgagtgcgggaaagggttcgctttgaagagtcccctgatccgccaccaaagaacgcatactggggagaaaccttacgtctgcactgaatgccgaaaagggtttaccatgaaaagtgacctaatagtgcatcagaggacacataccgctgagaagccctacatttgcaatgactgcggcaaaggcttcaccgtgaagagcagattgattgtgcaccagcggacacacacaggggagaaaccttacgtttgtggggaatgcggaaaagggttccccgctaagatcagactgatgggccaccaacggacacacactggagagaaaccttatatctgcaacgagtgtggcaagggatttacagaaaagtctcaccttaacgtgcaccgtcggacacacacaggcgaaaaaccctacgtttgcagcgaatgtggtaaagggctgacggggaagtctatgcttatagcccaccagcgtacgcatactggagagaagccttacatttgtaatgagtgtggcaaaggatttactatgaaatccaccctatcgattcatcaacagactcacactggagagaagccctacaagtgcaacgaatgcgataagacctttcggaaaaagacatgcctgattcagcatcagaggtttcacaccggcaagacaagcttcgcttgtacggagtgcggtaagtttagcctgagaaaaaacgatttgatcacacatcaaagaatccacaccggagaaaaaccctataaatgctctgactgtggaaaagccttcacaacaaaatcaggcctcaatgtccaccagaggaaacacacaggcgagcggccatatggctgttctgattgtggtaaagcctttgcccacctgagcattttggtgaagcataggcgcatacaccggtag

SEQ ID NO: 319568 - DNA, 2211 bp, Artificial Sequence
  derived and/or modified sequence
atgcggcctgaaccaacaaaattttgggaggagtccctgactcttgaggatgtggctgttgactttacatgggaagagtggcagttcttgtcgcctgcacagaaagatctctatagggatgtgatgcttgaaaattactcaaatttggttgctgtgggctatcaggctagtaagcctgacgcattgtcaaagctggaacgcggagaggagacttgtaccaccgaggatgagatctactcccggatctgttcagaaatcaggaagatagatgatcctctccagcatcacttgcagaatcagagcatccaaaagagtgtgaagcagtgccacgagcagaacatgttcgggaatatcgtgaaccagaacaagggccattttctcctcaagcaggactgcgatacattcgacttgcatgagaaaccactgaagtcaaacctttcttttgagaaccagaaacgatccagcgggctcaagaactctgcggaattcaaccgtgacggcaagtctcttttccacgccaatcacaagcaattttataccgagatgaaatttcccgctatagcgaaaccaatcaacaaaagtcagtttatcaaacagcagcggactcataatatcgaaaatgctcatgtttgctccgagtgcggaaaagccttcctcaaactttctcagtttatagaccaccaacgcgtgcacactggcgaaaaaccacacgtgtgctctatgtgtgggaaagctttcagtcgcaaatcacgactcatggatcaccagaggacgcatacagaacttaaacattacgagtgtactgaatgcgataagacttttctcaagaagagccagctcaacatccatcagaaaactcacatggggggaaagccttacacctgctcacaatgtggaaaagcatttatcaaaaagtgcaggcttatctatcaccaacgaacccacaccggcgagaagcctcacggctgttctgtctgcgggaaggccttttctaccaagttttctttgactacccaccagaagacacacaccggggaaaagccatacatctgcagtgaatgtggaaagggttttatcgaaaaacgcagactgaccgcccatcataggacacacaccggcgaaaaacccttcatttgtaataagtgcggcaagggtttcacgctgaagaactccctgatcacccatcaacagactcatactggagagaaactctatacttgtagcgagtgcggcaaaggattttctatgaaacactgcctcatggtgcatcaacggactcatacaggcgagaagccctacaagtgcaatgagtgcggcaagggttttgcccttaagtcaccccttatccggcaccagcgcacgcatactggtgaaaagccatacgtgtgcaccgagtgccggaaaggcttcacaatgaagtctgatctgatcgtccatcagaggactcataccgcggagaaaccgtacatttgtaacgactgcggaaaaggctttacggtgaagtccagactcatagtgcatcaacggacccacactggagagaaaccatatgtgtgtggcgagtgtggtaaaggctttcctgctaagattcgtctgatgggacaccagagaacccacaccggtgagaaaccctatatctgcaatgaatgcgggaaaggttttactgagaagtcacacctgaatgtgcacaggcgcacccacacgggggagaaaccttatgtctgtagtgagtgcggaaagggactcaccggcaagtctatgttgatcgcccatcagagaacacatactggcgagaagccttacatctgcaacgaatgtggaaaggggttcacaatgaagagcaccctcagcattcaccagcagacgcacaccggcgagaaaccctataagtgtaatgagtgtgacaaaacttttaggaaaaagacttgcctgatccagcaccagcgttttcacaccgggaagacctcttttgcgtgcactgagtgtggaaaatttagcctgcgaaagaatgatctgatcactcaccagagaattcacaccggggagaaaccctacaagtgttctgactgcggaaaagccttcaccacaaagagcgggttgaacgttcaccagagaaaacacactggagagaggccatatgggtgtagtgactgtggcaaggcctttgctcatctgagcatattagtcaagcaccgcaggatccaccgatag

SEQ ID NO: 319569 - DNA, 2698 bp, Artificial Sequence
  derived and/or modified sequence
aaacgctgggaacgcctccgaccctggatagtcgccgtcaggcactgaggaggccgagagatgaggccggagcccaccaagttctgggaagaatccctaacactggaggatgtggctgtggacttcacctgggaggagtggcagttcctgagccctgctcagaaggacctgtaccgggacgtgatgttggagaactacagcaacctggtggcagtggggtatcaagccagcaaaccagatgcactctccaaattggaacgaggagaagaaacttgcacaacagaagatgaaatctactctcgaatctgttctgaaatcaggaaaattgatgatcctctgcagcatcacttgcaaaatcaaagtattcagaagagtgtgaaacagtgccatgaacagaatatgtttggaaatattgttaatcagaacaaaggtcatttcctgctgaagcaagattgtgatacgtttgacttacatgaaaaacctttaaaatcaaatttaagttttgaaaaccagaaaaggagctctggcctaaagaactctgctgagtttaatagagatgggaaatccctttttcatgctaaccataaacaattttatactgaaatgaagtttcctgcaattgcaaaacctattaataagtcccagttcattaagcaacagagaactcacaacatagagaatgcccatgtatgcagtgaatgtgggaaagccttcctcaagttgtctcagtttattgatcatcagagagttcacactggagaaaaacctcatgtatgcagtatgtgtgggaaagctttctccagaaaatccagactaatggaccatcagagaactcatacagaactgaaacattatgaatgcactgaatgtgacaaaaccttcctcaagaaatcacagctcaatatacatcagaaaactcatatgggagggaaaccttacacatgtagccaatgtgggaaagccttcatcaagaagtgtcggctcatttatcatcaacgaactcatacaggagagaaaccccatggatgcagtgtatgtgggaaggccttctctacaaagttcagtctcactacacatcagaaaactcatacaggagaaaaaccttatatatgtagtgaatgtggaaaaggcttcattgagaagaggcgtcttactgcacatcatcgaactcatactggtgagaaaccctttatatgcaataaatgtgggaaaggcttcaccttgaagaacagtcttatcacacatcagcaaactcatacaggagagaaattatatacatgtagtgaatgtggaaaaggcttttcaatgaagcactgtctcatggtacatcaacgaactcatactggagagaaaccttataaatgcaatgagtgtggaaagggcttcgctttgaagagcccactcatcagacatcagcgaacacatactggagagaaaccctatgtatgcaccgaatgtcgaaaaggtttcaccatgaagagtgacctcattgtacatcagcgaactcatactgcagagaagccatatatatgcaatgattgtggaaaaggcttcactgtgaagagccgccttattgtgcatcagcgaactcatactggagaaaaaccctatgtatgtggtgagtgtggaaaaggctttccagcaaagatccggctaatgggacatcaacgaactcatacaggagagaaaccttatatttgcaatgagtgtggaaaaggcttcactgagaagagtcatctcaatgtacatcggcgcactcatacaggagagaaaccctatgtatgcagtgaatgtggcaaaggcttaactgggaaaagcatgctcattgcacatcagcgaactcatactggggagaaaccttatatatgcaatgaatgtggaaagggcttcaccatgaagagtactctcagtatacatcagcaaactcatactggagagaagccatacaaatgcaatgaatgtgataaaaccttcaggaagaagacatgcctcatacaacatcagcgatttcacacaggaaagacttcctttgcatgtactgaatgtggaaaattctctttgcgcaaaaatgatcttattacacatcagagaattcacacaggagagaaaccgtacaaatgcagtgactgcgggaaagccttcactacaaaatcagggctcaatgttcatcaaagaaaacatacaggagagaggccctatggatgtagtgattgtgggaaagcttttgcgcacttgtctatccttgttaaacacaggagaattcacaggtagtcattttgggaaagcctcttgccagatgtaggcccttaagatatctgcaaagaagagtaatttcatgaatgcagactacatggttgtttatttagtgatcagttacttcatgttttgtgtcagagaaaacatgtacaaaacatttgagaaaatattttaggacattatgtctaaaaattgtatactgagaaaaatcctatgaatgtggcagactataaaagcctttggtgggaagataaaccccctcagaagtgatcatagatcatgaataaactactaattcgtggaaatgtaataattataggaacgtctttgcccaaaaataaaacttcaacagattgagagagttcacactggagaaatactttcctctggcaaacccctgtggcagggttttcagtaaaatgttttgcctcatcgtgtgcta

SEQ ID NO: 319570 - protein, 731 aa, Artificial Sequence
  derived and/or modified sequence
MMQAQESLTLEDVAVDFTWEEWQFLSPAQKDLYRDVMLENYSNLVAVGYQASKPDALSKLERGEETCTTEDEIYSRICSEIRKIDDPLQHHLQNQSIQKSVKQCHEQNMFGNIVNQNKGHFLLKQDCDTFDLHEKPLKSNLSFENQKRSSGLKNSAEFNRDGKSLFHANHKQFYTEMKFPAIAKPINKSQFIKQQRTHNIENAHVCSECGKAFLKLSQFIDHQRVHTGEKPHVCSMCGKAFSRKSRLMDHQRTHTELKHYECTECDKTFLKKSQLNIHQKTHMGGKPYTCSQCGKAFIKKCRLIYHQRTHTGEKPHGCSVCGKAFSTKFSLTTHQKTHTGEKPYICSECGKGFIEKRRLTAHHRTHTGEKPFICNKCGKGFTLKNSLITHQQTHTGEKLYTCSECGKGFSMKHCLMVHQRTHTGEKPYKCNECGKGFALKSPLIRHQRTHTGEKPYVCTECRKGFTMKSDLIVHQRTHTAEKPYICNDCGKGFTVKSRLIVHQRTHTGEKPYVCGECGKGFPAKIRLMGHQRTHTGEKPYICNECGKGFTEKSHLNVHRRTHTGEKPYVCSECGKGLTGKSMLIAHQRTHTGEKPYICNECGKGFTMKSTLSIHQQTHTGEKPYKCNECDKTFRKKTCLIQHQRFHTGKTSFACTECGKFSLRKNDLITHQRIHTGEKPYKCSDCGKAFTTKSGLNVHQRKHTGERPYGCSDCGKAFAHLSILVKHRRIHR

SEQ ID NO: 319571 - DNA, 2196 bp, Artificial Sequence
  derived and/or modified sequence
atgatgcaggcccaggagagcctgaccctggaggacgtggccgtggacttcacctgggaggagtggcagttcctgagccccgcccagaaggacctgtacagagacgtgatgctggagaactacagcaacctggtggccgtgggctaccaggccagcaagcccgacgccctgagcaagctggagagaggcgaggagacctgcaccaccgaggacgagatctacagcagaatctgcagcgagatcagaaagatcgacgaccccctgcagcaccacctgcagaaccagagcatccagaagagcgtgaagcagtgccacgagcagaacatgttcggcaacatcgtgaaccagaacaagggccacttcctgctgaagcaggactgcgacaccttcgacctgcacgagaagcccctgaagagcaacctgagcttcgagaaccagaagagaagcagcggcctgaagaacagcgccgagttcaacagagacggcaagagcctgttccacgccaaccacaagcagttctacaccgagatgaagttccccgccatcgccaagcccatcaacaagagccagttcatcaagcagcagagaacccacaacatcgagaacgcccacgtgtgcagcgagtgcggcaaggccttcctgaagctgagccagttcatcgaccaccagagagtgcacaccggcgagaagccccacgtgtgcagcatgtgcggcaaggccttcagcagaaagagcagactgatggaccaccagagaacccacaccgagctgaagcactacgagtgcaccgagtgcgacaagaccttcctgaagaagagccagctgaacatccaccagaagacccacatgggcggcaagccctacacctgcagccagtgcggcaaggccttcatcaagaagtgcagactgatctaccaccagagaacccacaccggcgagaagccccacggctgcagcgtgtgcggcaaggccttcagcaccaagttcagcctgaccacccaccagaagacccacaccggcgagaagccctacatctgcagcgagtgcggcaagggcttcatcgagaagagaagactgaccgcccaccacagaacccacaccggcgagaagcccttcatctgcaacaagtgcggcaagggcttcaccctgaagaacagcctgatcacccaccagcagacccacaccggcgagaagctgtacacctgcagcgagtgcggcaagggcttcagcatgaagcactgcctgatggtgcaccagagaacccacaccggcgagaagccctacaagtgcaacgagtgcggcaagggcttcgccctgaagagccccctgatcagacaccagagaacccacaccggcgagaagccctacgtgtgcaccgagtgcagaaagggcttcaccatgaagagcgacctgatcgtgcaccagagaacccacaccgccgagaagccctacatctgcaacgactgcggcaagggcttcaccgtgaagagcagactgatcgtgcaccagagaacccacaccggcgagaagccctacgtgtgcggcgagtgcggcaagggcttccccgccaagatcagactgatgggccaccagagaacccacaccggcgagaagccctacatctgcaacgagtgcggcaagggcttcaccgagaagagccacctgaacgtgcacagaagaacccacaccggcgagaagccctacgtgtgcagcgagtgcggcaagggcctgaccggcaagagcatgctgatcgcccaccagagaacccacaccggcgagaagccctacatctgcaacgagtgcggcaagggcttcaccatgaagagcaccctgagcatccaccagcagacccacaccggcgagaagccctacaagtgcaacgagtgcgacaagaccttcagaaagaagacctgcctgatccagcaccagagattccacaccggcaagaccagcttcgcctgcaccgagtgcggcaagttcagcctgagaaagaacgacctgatcacccaccagagaatccacaccggcgagaagccctacaagtgcagcgactgcggcaaggccttcaccaccaagagcggcctgaacgtgcaccagagaaagcacaccggcgagagaccctacggctgcagcgactgcggcaaggccttcgcccacctgagcatcctggtgaagcacagaagaatccacagatag

SEQ ID NO: 319572 - DNA, 2196 bp, Artificial Sequence
  derived and/or modified sequence
atgatgcaggcccaggaatctctgactctggaagatgtggcagtcgatttcacctgggaggagtggcagttcctgtctccagctcagaaagatctctatagagacgttatgctggaaaactactctaacctggtggccgttgggtaccaggcgtctaagcccgatgcgctgagcaaacttgagaggggcgaggaaacctgtactacagaagatgagatctatagtaggatctgtagcgaaatcaggaaaattgacgaccctctgcagcaccatctccagaaccagagtattcagaagagtgtgaagcagtgccacgaacagaacatgttcggcaatattgttaaccagaacaagggccacttcttgttgaagcaggactgtgataccttcgaccttcatgagaaaccgctaaaaagcaacctctcctttgagaaccaaaagcggagttcaggattgaaaaactctgctgaattcaaccgagacggcaaaagcctgttccacgccaaccataagcagttctataccgagatgaaattcccagctattgctaaacccatcaataaatctcagttcattaaacagcagcggacccacaacattgagaacgcccacgtgtgttcagaatgtggtaaagccttcctcaaattaagccaatttattgatcatcagcgggtgcatacaggcgagaagccacacgtgtgttccatgtgtggcaaggctttctccaggaaatccaggctgatggaccaccagagaacccatactgaattaaaacactacgagtgcactgaatgtgataagacgtttctcaaaaagtctcagctgaatattcaccagaagactcacatgggaggaaagccttatacctgttcccagtgtggcaaggcctttattaagaagtgtcgcctcatttaccaccagagaacccataccggagaaaagccccacggctgctccgtttgcggaaaagcgttcagtactaaattctctctcacaacacatcagaagacacataccggagaaaaaccttatatttgctccgagtgcggaaaaggatttatagagaaacgtcgcctgactgcacatcaccgcacgcacactggcgagaagcctttcatttgtaacaaatgcggaaagggcttcaccttaaaaaactcgctaatcacccatcagcagacacacaccggagaaaagctctacacatgctccgagtgcggaaaaggattctcgatgaagcattgcctcatggtgcatcagagaacccataccggggaaaaaccctacaaatgtaacgaatgtgggaagggattcgcattgaagtcacctctgatacggcatcagagaactcacactggggagaagccttatgtgtgtaccgagtgtaggaaaggattcacaatgaagtccgatctgatcgtgcatcagcgcacccacactgctgaaaagccttacatctgtaatgactgtggaaagggcttcacagtgaaatctaggttaatcgtccaccagcgcacccataccggggagaagccgtacgtctgcggcgagtgcggtaagggcttcccagccaagattagactgatggggcaccaaagaacccatacgggagagaaaccgtacatctgtaatgaatgtggaaagggctttactgagaagtcgcatcttaacgtgcatagacggactcatacaggcgaaaaaccctacgtttgttcagagtgtggaaaagggctgactggaaagagcatgctaattgcccatcagcggacccacacaggggaaaaaccctacatctgtaatgagtgtgggaagggcttcaccatgaaatctacattgagcatccatcaacagacccacacgggagagaagccttataaatgcaacgagtgtgataaaacgttccggaagaagacttgtctgatccagcaccaacgattccatacaggcaagacaagtttcgcctgtactgaatgtggaaagtttagccttaggaaaaacgatcttattactcaccagcggatccacacgggcgagaagccttacaagtgtagcgattgtggcaaagcttttacaacaaagtctggcctcaacgtccaccagcgaaagcataccggtgagcgtccctacggttgttccgattgtggaaaagcctttgcacacttatctatcctagtcaaacaccgccgaattcacagatag

SEQ ID NO: 319573 - DNA, 2196 bp, Artificial Sequence
  derived and/or modified sequence
atgatgcaggcccaggagagcctgaccctggaggatgtggccgtggacttcacctgggaggagtggcagttcctgagccctgcccagaaggacctgtacagagatgtgatgctggagaactacagcaacctggtggccgtgggctaccaggccagcaagccagatgccctgagcaagctggagcggggggaggagacctgcaccacagaagatgagatctacagccgcatctgcagcgagatcaggaagattgatgaccccctgcagcaccacctgcagaaccagagcatccagaagtctgtgaagcagtgccacgagcagaacatgtttggaaatattgtgaaccagaacaagggccacttcctgctgaagcaggactgtgacacctttgacctgcacgagaagcccctgaagagcaacctgagctttgagaaccagaagaggagcagcggcctgaagaacagcgctgagttcaacagagatggcaagagcctcttccacgccaaccacaagcagttctacacagagatgaagtttcctgccatcgccaagcccatcaacaagagccagttcatcaagcagcagaggacccacaacattgaaaatgcccacgtgtgcagtgaatgtgggaaggccttcctgaagctgagccagttcatcgaccaccagagggtgcacactggagagaagccccacgtgtgcagcatgtgtgggaaggccttcagcaggaagagccggctgatggaccaccagaggacccacacagagctgaagcactatgaatgtacagaatgtgacaagaccttcctgaagaagagccagctgaacatccaccagaagacccacatgggcggcaagccctacacctgcagccagtgtgggaaggccttcatcaagaagtgccgcctcatctaccaccagaggacccacactggagagaagccccacggctgcagcgtgtgtgggaaggccttcagcaccaagttcagcctgaccacccaccagaagacccacactggagagaagccctacatctgcagtgaatgtgggaagggcttcatcgagaagaggcggctgacagcccaccacaggacccacactggagagaagcccttcatctgcaacaagtgtgggaagggcttcaccctgaagaacagcctcatcacccaccagcagacccacactggagagaagctgtacacctgcagtgaatgtgggaagggcttctccatgaagcactgcctgatggtgcaccagaggacccacactggagagaagccctacaagtgcaatgaatgtgggaaaggatttgccctgaagagccccctcatccgccaccagaggacccacactggagagaagccctacgtgtgcacagagtgcaggaagggcttcaccatgaagagtgacctgattgtgcaccagaggacccacacagctgagaagccctacatctgcaatgactgtgggaagggcttcaccgtgaagagccgcctcatcgtgcaccagaggacccacactggagagaagccctacgtgtgtggggagtgtgggaagggcttccctgccaagatccggctgatgggccaccagaggacccacactggagagaagccctacatctgcaatgaatgtgggaagggcttcacagagaagagccacctgaatgtgcacaggaggacccacactggagagaagccctacgtgtgcagtgaatgtgggaagggcctgaccgggaagtccatgctgattgcccaccagaggacccacactggagagaagccctacatctgcaatgaatgtgggaagggcttcaccatgaagagcaccctgagcatccaccagcagacccacactggagagaagccctacaagtgcaatgaatgtgacaagaccttcaggaagaagacctgcctgatccagcaccagcgcttccacacaggcaagaccagctttgcctgcacagaatgtgggaagttcagcctgaggaagaatgacctgatcacccaccagaggatccacactggagagaagccctacaagtgcagcgactgtgggaaggccttcaccaccaagagcggcctgaatgtgcaccagaggaagcacactggagagcggccctacggctgcagcgactgtgggaaggcctttgcccacctgagcatcctggtgaagcaccggcgcatccacaggtag

SEQ ID NO: 319574 - DNA, 2196 bp, Artificial Sequence
  derived and/or modified sequence
atgatgcaggcccaggagagcctgaccctggaggacgtggccgtggattttacttgggaggaatggcaatttctcagtcccgctcagaaggacctatatagagatgtcatgcttgagaattattcgaacctggttgccgtgggataccaagcgtcaaagcctgatgcgctcagtaaactggagcggggcgaagagacctgtaccaccgaggacgaaatctactcacgaatatgttctgaaattcgtaagattgacgatcctttgcaacaccacctacagaatcagtccatccaaaagtccgtgaagcagtgtcacgaacagaatatgttcggtaacatcgtcaatcagaataaaggccatttcctgctgaaacaggattgtgataccttcgacctccacgagaagcctctcaagtccaatctgagtttcgagaaccagaagaggtcaagtggtctcaaaaactcagcagagtttaatagggatggaaaatcactgtttcatgcaaatcataagcaattctacactgagatgaaattccccgcaattgctaagcccatcaataagtcccagtttatcaaacaacaaaggacccacaacattgaaaacgcacacgtttgttccgagtgcggcaaggcctttctgaagctaagtcagtttattgaccaccagcgcgttcacacgggggagaagccccacgtctgctccatgtgtggtaaggccttttcccgcaagtctcggcttatggaccaccagcgcacacacaccgagttgaagcattacgagtgtaccgagtgcgacaaaacttttctcaagaaatcacagctgaatatacaccagaaaacacatatgggcggcaagccatatacatgttctcagtgcggaaaagctttcataaagaagtgcagactcatctaccatcagaggacacataccggagagaaaccccacggctgttcagtctgtggtaaagcctttagcaccaaattttcactgacgacacaccaaaaaacccatacgggtgaaaaaccatatatctgcagtgagtgtggcaaggggttcattgagaagcggagactgacagctcatcaccgcacacacaccggcgagaaaccttttatctgcaacaagtgtgggaaaggattcaccctcaaaaatagcctgatcacacaccagcagacacacacgggagagaaactatatacctgcagcgagtgcggtaaggggttttctatgaaacattgcctgatggtgcaccaacgaacacataccggggagaagccctataaatgcaacgaatgtggcaagggctttgcactgaagtccccactaattcgccaccaaaggacccacacaggagagaaaccctacgtctgcacagagtgtagaaagggttttaccatgaagtcggatctgatcgtgcaccagagaactcacacagcagagaagccctacatttgcaacgattgtggtaagggattcacagtaaagagtcgcctgattgtgcaccagcgtacgcacaccggagaaaagccctatgtatgcggtgagtgcggcaaagggttccctgcgaaaatccgcttaatgggacaccagaggacccatacaggtgaaaaaccctacatttgtaatgaatgtggcaaggggttcactgaaaagtctcacttgaacgtccacagacgaacgcacactggtgagaagccttatgtatgtagtgaatgtgggaaaggcctgaccggaaagagcatgctgattgcacatcagaggacccatacaggtgagaagccctatatttgtaacgagtgtggcaagggatttactatgaaatctaccctgagcatccaccagcagacacatactggggagaagccttataaatgcaacgagtgcgacaagacctttagaaaaaagacgtgcctcatccagcaccaacggttccatactggtaagacatctttcgcctgtacagaatgcggtaaattctccctcagaaaaaacgatctaattacgcatcagcgaattcacaccggtgagaaaccctataagtgttctgactgtgggaaggcctttaccactaaaagtggcctcaacgttcaccaaaggaagcacacaggagagcgaccatatggctgttccgattgcgggaaggcatttgcccatctgtccattttagtgaaacaccgccggatccacaggtag

SEQ ID NO: 319575 - DNA, 2196 bp, Artificial Sequence
  derived and/or modified sequence
atgatgcaagcgcaggagtccctcaccttggaggacgttgccgtggacttcacgtgggaggagtggcagtttctgtccccagctcaaaaagacttatatagggatgtaatgctggagaactactccaacctggtcgcagtgggatatcaggcttctaagccagacgctcttagcaaacttgaacggggagaagagacatgtactacggaagacgagatctatagtcggatctgctctgagatccgcaagatcgacgatcctctccagcatcacctccagaaccaatctatacaaaagtccgtgaaacagtgccacgagcaaaatatgtttgggaacattgtgaaccagaacaagggccactttctactcaagcaggactgtgacacttttgatctgcatgagaagcccctgaaaagcaacctgtccttcgaaaatcaaaaacgaagctcagggctgaagaacagcgcggagtttaatcgggacggaaaatctctgtttcacgccaaccataagcaattctatacagaaatgaaatttcccgcaatcgctaaacccatcaataagagccaattcataaaacagcaacggactcataacatcgagaacgcccatgtttgctccgaatgtgggaaagcctttctgaaactgagccagttcattgaccaccaacgggtacacacaggcgagaagcctcatgtgtgctccatgtgtggaaaggccttctcccggaaatccaggctgatggatcaccaaaggacacacactgagctgaagcattacgaatgcaccgaatgtgacaagacatttctgaagaaaagtcagctgaatattcaccagaaaactcacatgggcggtaagccttacacatgcagccagtgcggcaaggcctttattaaaaaatgtaggcttatctatcaccagaggacccacactggagagaaaccacatggatgttccgtgtgcggcaaagcattctcaacgaagttctcacttacgacacaccagaagacccatactggagagaagccatatatctgtagcgaatgtggaaagggctttatcgagaaacggaggttgaccgcccaccaccgcactcacactggcgagaaacctttcatctgcaataagtgcggaaaaggattcaccctgaagaacagcctaatcacccatcaacagacccatactggagagaaactgtatacctgctccgaatgtgggaagggattctctatgaaacactgtctgatggtgcatcagcggactcatacgggagaaaagccatacaagtgtaacgagtgtggcaaaggctttgcccttaaatctccactgattaggcatcagcggacgcacactggtgaaaaaccgtacgtgtgcaccgaatgccggaaggggtttaccatgaagtccgatctgatagttcatcagcggactcataccgctgagaaaccttacatctgcaacgattgcgggaaaggttttaccgttaagtctagacttattgtacaccagcgaacccacactggagagaagccctacgtctgcggcgagtgcggcaaggggtttcctgcgaagatacgactcatggggcaccagagaacccacacgggtgagaagccttacatctgtaatgaatgtgggaagggttttaccgagaagtctcatctgaacgttcaccggcgaacccacacaggggaaaagccgtatgtctgctctgaatgcgggaagggcctgaccggtaaaagtatgttgatcgctcaccagcgaacgcacacaggtgagaaaccttatatctgcaatgaatgcggtaaggggttcacaatgaaatctacactctcgatccatcagcagacacatacaggggaaaaaccctataagtgcaacgagtgtgataaaacttttcggaagaagacatgtctgattcaacatcagcgcttccacacgggtaagacttcttttgcatgtaccgagtgcgggaagttttctttgcggaagaacgatctgatcacccaccaacgtatccacacaggcgagaaaccgtataaatgttcagattgcggtaaggcgttcaccactaagtccgggctgaatgttcaccagcggaaacacactggcgaaagaccatacggatgctccgactgtggtaaggctttcgcacacctaagtatcttggttaaacatcgccgtattcataggtag

SEQ ID NO: 319576 - DNA, 4033 bp, Artificial Sequence
  derived and/or modified sequence
ggatagtcgccgtcaggcactgaggaggccgagagatgaggccggagcccaccaagttctgggaagttctttctgacacaagtaagataacatctctgccatgcccacaggtgctgagaacaagagaaatcaagtgaaggaaggaggcggagtttccaagacttgggtgtcatcatttctggggacatccttgattggagattgaagtttttgaaccgaaatttagagctgattcagaagagacaaatacagaacgtccaagttagcagtcatttcccaaatttaggagacaatgatgcaggcccaggaatccctaacactggaggatgtggctgtggacttcacctgggaggagtggcagttcctgagccctgctcagaaggacctgtaccgggacgtgatgttggagaactacagcaacctggtggcagtggggtatcaagccagcaaaccagatgcactctccaaattggaacgaggagaagaaacttgcacaacagaagatgaaatctactctcgaatctgttctgaaatcaggaaaattgatgatcctctgcagcatcacttgcaaaatcaaagtattcagaagagtgtgaaacagtgccatgaacagaatatgtttggaaatattgttaatcagaacaaaggtcatttcctgctgaagcaagattgtgatacgtttgacttacatgaaaaacctttaaaatcaaatttaagttttgaaaaccagaaaaggagctctggcctaaagaactctgctgagtttaatagagatgggaaatccctttttcatgctaaccataaacaattttatactgaaatgaagtttcctgcaattgcaaaacctattaataagtcccagttcattaagcaacagagaactcacaacatagagaatgcccatgtatgcagtgaatgtgggaaagccttcctcaagttgtctcagtttattgatcatcagagagttcacactggagaaaaacctcatgtatgcagtatgtgtgggaaagctttctccagaaaatccagactaatggaccatcagagaactcatacagaactgaaacattatgaatgcactgaatgtgacaaaaccttcctcaagaaatcacagctcaatatacatcagaaaactcatatgggagggaaaccttacacatgtagccaatgtgggaaagccttcatcaagaagtgtcggctcatttatcatcaacgaactcatacaggagagaaaccccatggatgcagtgtatgtgggaaggccttctctacaaagttcagtctcactacacatcagaaaactcatacaggagaaaaaccttatatatgtagtgaatgtggaaaaggcttcattgagaagaggcgtcttactgcacatcatcgaactcatactggtgagaaaccctttatatgcaataaatgtgggaaaggcttcaccttgaagaacagtcttatcacacatcagcaaactcatacaggagagaaattatatacatgtagtgaatgtggaaaaggcttttcaatgaagcactgtctcatggtacatcaacgaactcatactggagagaaaccttataaatgcaatgagtgtggaaagggcttcgctttgaagagcccactcatcagacatcagcgaacacatactggagagaaaccctatgtatgcaccgaatgtcgaaaaggtttcaccatgaagagtgacctcattgtacatcagcgaactcatactgcagagaagccatatatatgcaatgattgtggaaaaggcttcactgtgaagagccgccttattgtgcatcagcgaactcatactggagaaaaaccctatgtatgtggtgagtgtggaaaaggctttccagcaaagatccggctaatgggacatcaacgaactcatacaggagagaaaccttatatttgcaatgagtgtggaaaaggcttcactgagaagagtcatctcaatgtacatcggcgcactcatacaggagagaaaccctatgtatgcagtgaatgtggcaaaggcttaactgggaaaagcatgctcattgcacatcagcgaactcatactggggagaaaccttatatatgcaatgaatgtggaaagggcttcaccatgaagagtactctcagtatacatcagcaaactcatactggagagaagccatacaaatgcaatgaatgtgataaaaccttcaggaagaagacatgcctcatacaacatcagcgatttcacacaggaaagacttcctttgcatgtactgaatgtggaaaattctctttgcgcaaaaatgatcttattacacatcagagaattcacacaggagagaaaccgtacaaatgcagtgactgcgggaaagccttcactacaaaatcagggctcaatgttcatcaaagaaaacatacaggagagaggccctatggatgtagtgattgtgggaaagcttttgcgcacttgtctatccttgttaaacacaggagaattcacaggtagtcattttgggaaagcctcttgccagatgtaggcccttaagatatctgcaaagaagagtaatttcatgaatgcagactacatggttgtttatttagtgatcagttacttcatgttttgtgtcagagaaaacatgtacaaaacatttgagaaaatattttaggacattatgtctaaaaattgtatactgagaaaaatcctatgaatgtggcagactataaaagcctttggtgggaagataaaccccctcagaagtgatcatagatcatgaataaactactaattcgtggaaatgtaataattataggaacgtctttgcccaaaaataaaacttcaacagattgagagagttcacactggagaaatactttcctctggcaaacccctgtggcagggttttcagtaaaatgttttgcctcatcgtgtgctaggaaataatgcagaaaaaacttatgaaaacattcaatgtagaagacttttaggaaaatatcagagaatttaatgaaggaaagaagccttggcaaaatgatggatgagagctttctgtcacaattctaaccttaacagataatatgcctcatgtgcatttgggaacaggatagcttgagccatattcctagttgccttgtcactgattttatacattttaaattgtgacttcctctaatcacgaactaaaatttaatattgtatataataccggagtattttatgcctgcctcattttattatatgattagctcctgcatttctttggttctaagtttgtgttatttcagaataactaaagtacttcagaatgaaactggatacagtatattcagttcataagtgtaattgaccatacttgaatatgtttaagtttataagtaacatcaggtgttatgaaattaatataaataagatgtttttgtaagtttttattttgaaataagtttagattcacaaaatcttaccaaaatattccagagttcttgcccttaacccagcttcttccaaagataacaacttacataagcatagttcattaccaaatacaggaaagtgaaattgttacaatactgttaactacagaatttatttggaaatcaccagttttaacatgcatgcatttttgtttgttttttatatgtagctttaagaaatcttaacacatatattgattcatgtcaccaccaccgtaatcgagattcagaatgttgcatcaatgcaaactccctcatgctccttgtttatagtcacaacctctcctcagccctaacccttggcaatcagaaatcttttcatctttagttttgtcattagtagcatgttataaaaatggaatcatacagcatgtacccttttggtattggctatttcaactaaagcagattaacctgaaatccatccaagttgttctgcatatcattgttctgtttttattggccactaataatctatgatacgaatataccactatttgtttattcacccactgaaggacattagttttgttcccggtttttcttactgttacaaataaaaatcctatgaacatttgtacac

SEQ ID NO: 319577 - DNA, 2505 bp, Artificial Sequence
  derived and/or modified sequence
agccagaccaggaacccaccagaaggaaccaattccggacacataacaagcagcagtgaggacaccaaagacacagacccagatgcagaggcagaggcagccacacagcccctcccagccacaatcacaacctcatattcatataatcacagaccctccaccccacatagtgggtggaatcctgccagcgcattccactcacacacacacaaaatcccattctcacacacgtgcacccaagcctcgtcccgcacacacaacatgacaggccacagagccggctgagagtctcagcacgcatggacgcctgcactgcgcaggttgcagcccaggctgcaggaccacaggtggcagggacgacacagcaggtggccggccagggagtggcagtggcctccatcctccctgctcagccacagcccctgcttcagcgtctgccagtccaactgtcaactcatccactcaactttacaactggaatgtgggggcgttcagggccctgccactggtgacggccactctaagtcctacccaatgctgggtaggtcctttaagaggcccaagtcctgggcgctactatgaggttctgtacgtgcacagtgatggctcatgcctggccgaggtgagcccactcagtctgggtggcacagcctaatctaggaactgctctgcggttctacatggctctcagcagcccagtgagtgtcctctgcaccgggcgtgtccctcaggtgctcctagccagaccctcccttgacacagtagggcacaaaccgctattggagcggcactggcacccgagtgtacaagcgtcagcatccctgctgccttccccacccccagctgtccccacctgctgattctgcccctggggtcacacttacaatttagggtcctgtcaggagacaaaaatcacgtgagtgacatcagctccctcatatgtaggtgctgggaaaagggcttgtggggtgcctgtataaactggccataaaaatacgggaataagttgtggaaagccacaaaaggcctctgaggaggaaagcctcctaattgccatcatgttcccatgctcagagcaagacccgctgtcttctctgtaaacactgtgctcagggagaaagacacttctttgaaacactggaatgtggacagacgtgcaggctcccagtcaaggccgctcctactagctactctccaacaagttaaagttatgctgtttgagcacaaaggagactcatttaaactgctattgctatagattatgcctgtgatgcactgccaccctttcactgtttctccctgaacatctgcttcttagatcgaagggactgtactcaataaatagtgtggagaccagagctcggcaccttttgcagcctccacattttgcactggccccctggctccccacctttcactcttaacttgtcttttctcaatcctttgtcaccaccagacttcgggtaccctacgggtagtgttgaggctggtccccaacatgtaggatcccttcactgtgtcacatgtgtccctaacacacttgctacatctcatgtcctttaggttctgtgttttactccagataatgttctttgaatctaaattacagtttactgatttctcaaaagctgcacctaatgtgctatccattcagacagacatactcacttagcaaatgtttgttgagccagcactcagtggcagattctgtgctagggcgtgccaagtgcagacacacgtttgccaagacacagggtcacatgtgcatgcacactcagacttgcaggcttacaccagtgttcagcctgctcccaatcccagggagctccagggaggacagagagaatgtcacaacacccaacccctcccactgcatgctgagtccagttcccgatacgctgccaccccaacagcatggcccagggccgagggtctctctgcagacctgccctgaccacattcacacacacacacacacacacacacacacacacacacacacacacacacacgaagaggcatgtgccttgttcagatatacataaagctcacccatcgccaaattccctgcctgtgcctgctgggaccagactccgctgtcatgagggtgacatccgccacctgtgctcttctgctggctctgatctgcagcgtccagctgggggatgcctgcctggatatcgataaactgcttgcgaatgttgtgtttgatgtgtcccaagacctcctgaaggaggagcttgctcgttacaaccccagtcccctgacagaggagtccttcctcaatgtccagcaatgctttgccaatgtctccgtgacagaaagatttgctcattcagttgttattaagaagatccttcagagcaacgattgcatagaagcagccttctgatctgaggacccctgcagatcagatattggccctcctgccttccttggggctccccgcgttcctggcctggctctgttcatcactacagagaccccaatgaacacctgcagctc

SEQ ID NO: 319578 - DNA, 426 bp, Artificial Sequence
  derived and/or modified sequence
gctgggaccagactccgctgtcatgagggtgacatccgccacctgtgctcttctgctggctctgatctgcagcgtccagctgggggatgcctgcctggatatcgataaactgcttgcgaatgttgtgtttgatgtgtcccaagacctcctgaaggaggagcttgctcgttacaaccccagtcccctgacagaggagtccttcctcaatgtccagcaatgctttgccaatgtctccgtgacagaaagatttgctcattcagttgttattaagaagatccttcagagcaacgattgcatagaagcagccttctgatctgaggacccctgcagatcagatattggccctcctgccttccttggggctccccgcgttcctggcctggctctgttcatcactacagagaccccaatgaacacctgcagctc

SEQ ID NO: 319579 - DNA, 1245 bp, Artificial Sequence
  derived and/or modified sequence
atggccgccgtgggcagcggcggctacgccagaaacgacgccggcgagaagctgcccagcgtgatggccggcgtgcccgccagaagaggccagagcagccccccccccgccccccccatctgcctgagaagaagaaccagactgagcaccgccagcgaggagaccgtgcagaacagagtgagcctggagaaggtgctgggcatcaccgcccagaacagcagcggcctgacctgcgaccccggcaccggccacgtggcctacctggccggctgcgtggtggtgatcctggaccccaaggagaacaagcagcagcacatcttcaacaccgccagaaagagcctgagcgccctggccttcagccccgacggcaagtacatcgtgaccggcgagaacggccacagacccgccgtgagaatctgggacgtggaggagaagaaccaggtggccgagatgctgggccacaagtacggcgtggcctgcgtggccttcagccccaacatgaagcacatcgtgagcatgggctaccagcacgacatggtgctgaacgtgtgggactggaagaaggacatcgtggtggccagcaacaaggtgagctgcagagtgatcgccctgagcttcagcgaggacagcagctacttcgtgaccgtgggcaacagacacgtgagattctggttcctggaggtgagcaccgagaccaaggtgaccagcaccgtgcccctggtgggcagaagcggcatcctgggcgagctgcacaacaacatcttctgcggcgtggcctgcggcagaggcagaatggccggcagcaccttctgcgtgagctacagcggcctgctgtgccagttcaacgagaagagagtgctggagaagtggatcaacctgaaggtgagcctgagcagctgcctgtgcgtgagccaggagctgatcttctgcggctgcaccgacggcatcgtgagaatcttccaggcccacagcctgcactacctggccaacctgcccaagccccactacctgggcgtggacgtggcccagggcctggagcccagcttcctgttccacagaaaggccgaggccgtgtaccccgacaccgtggccctgaccttcgaccccatccaccagtggctgagctgcgtgtacaaggaccacagcatctacatctgggacgtgaaggacatcaacagagtgggcaaggtgtggagcgagctgttccacagcagctacgtgtggaacgtggaggccctgagctag

SEQ ID NO: 319580 - DNA, 1452 bp, Artificial Sequence
  derived and/or modified sequence
atggccgccgtgggcagcggcggctacgccagaaacgacgccggcgagaagctgcccagcgtgatggccggcgtgcccgccagaagaggccagagcagccccccccccgccccccccatctgcctgagaagaagaaccagactgagcaccgccagcgaggagaccgtgcagaacagagtgagcctggagaaggtgctgggcatcaccgcccagaacagcagcggcctgacctgcgaccccggcaccggccacgtggcctacctggccggctgcgtggtggtgatcctggaccccaaggagaacaagcagcagcacatcttcaacaccgccagaaagagcctgagcgccctggccttcagccccgacggcaagtacatcgtgaccggcgagaacggccacagacccgccgtgagaatctgggacgtggaggagaagaaccaggtggccgagatgctgggccacaagtacggcgtggcctgcgtggccttcagccccaacatgaagcacatcgtgagcatgggctaccagcacgacatggtgctgaacgtgtgggactggaagaaggacatcgtggtggccagcaacaaggtgagctgcagagtgatcgccctgagcttcagcgaggacagcagctacttcgtgaccgtgggcaacagacacgtgagattctggttcctggaggtgagcaccgagaccaaggtgaccagcaccgtgcccctggtgggcagaagcggcatcctgggcgagctgcacaacaacatcttctgcggcgtggcctgcggcagaggcagaatggccggcagcaccttctgcgtgagctacagcggcctgctgtgccagttcaacgagaagagagtgctggagaagtggatcaacctgaaggtgagcctgagcagctgcctgtgcgtgagccaggagctgatcttctgcggctgcaccgacggcatcgtgagaatcttccaggcccacagcctgcactacctggccaacctgcccaagccccactacctgggcgtggacgtggcccagggcctggagcccagcttcctgttccacagaaaggccgaggccgtgtaccccgacaccgtggccctgaccttcgaccccatccaccagtggctgagctgcgtgtacaaggaccacagcatctacatctgggacgtgaaggacatcaacagagtgggcaaggtgtggagcgagctgttccacagcagctacgtgtggaacgtggaggtgtaccccgagttcgaggaccagagagcctgcctgcccagcggcagcttcctgacctgcagcagcgacaacaccatcagattctggaacctggacagcagccccgacagccactggcagaagaacatcttcagcaacctggcccccgccctgcagatgtgcggcagaggccacagcagacagcccaacacccccagccccggcgagatcgccagctag

SEQ ID NO: 319581 - DNA, 1302 bp, Artificial Sequence
  derived and/or modified sequence
ggcggctacgccagaaacgacgccggcgagaagctgcccagcgtgatggccggcgtgcccgccagaagaggccagagcagccccccccccgccccccccatctgcctgagaagaagaaccagactgagcaccgccagcgaggagaccgtgcagaacagagtgagcctggagaaggtgctgggcatcaccgcccagaacagcagcggcctgacctgcgaccccggcaccggccacgtggcctacctggccggcatgtggagaatgggccccgccagcgagagctgcggcgaggacagcatcgcccccagcctgagcagaaccgtgcccggcatgtactgcgtggtggtgatcctggaccccaaggagaacaagcagcagcacatcttcaacaccgccagaaagagcctgagcgccctggccttcagccccgacggcaagtacatcgtgaccggcgagaacggccacagacccgccgtgagaatctgggacgtggaggagaagaaccaggtggccgagatgctgggccacaagtacggcgtggcctgcgtggccttcagccccaacatgaagcacatcgtgagcatgggctaccagcacgacatggtgctgaacgtgtgggactggaagaaggacatcgtggtggccagcaacaaggtgagctgcagagtgatcgccctgagcttcagcgaggacagcagctacttcgtgaccgtgggcaacagacacgtgagattctggttcctggaggtgagcaccgagaccaaggtgaccagcaccgtgcccctggtgggcagaagcggcatcctgggcgagctgcacaacaacatcttctgcggcgtggcctgcggcagaggcagaatggccggcagcaccttctgcgtgagctacagcggcctgctgtgccagttcaacgagaagagagtgctggagaagtggatcaacctgaaggtgagcctgagcagctgcctgtgcgtgagccaggagctgatcttctgcggctgcaccgacggcatcgtgagaatcttccaggcccacagcctgcactacctggccaacctgcccaagccccactacctgggcgtggacgtggcccagggcctggagcccagcttcctgttccacagaaaggccgaggccgtgtaccccgacaccgtggccctgaccttcgaccccatccaccagtggctgagctgcgtgtacaaggaccacagcatctacatctgggacgtgaaggacatcaacagagtgggcaaggtgtggagcgagctgttccacagcagctacgtgtggaacgtggagtag

SEQ ID NO: 319582 - DNA, 1245 bp, Artificial Sequence
  derived and/or modified sequence
atggcggccgtgggctcaggaggttatgcgcggaacgatgcaggggagaagctgccttcggtgatggccggcgtgcctgctcggagggggcagtcttcccccccacctgcaccaccaatttgcctcaggcgccgcaccaggctgagcactgcctctgaggaaacagtgcagaaccgggtctccctggagaaagttctggggatcactgcccagaatagctctggcctcacatgtgatccaggcactggccacgttgcctacctggcggggtgtgtcgtggtcatcctggaccctaaggaaaacaaacagcaacatatattcaacacagctcgcaagagcttgtcggccctcgcattctctccagacgggaagtacatagtaactggagagaacggacacaggccagccgttaggatttgggacgtcgaggagaaaaatcaagtagccgaaatgctcggtcacaagtatggtgtggcatgcgtggccttctcaccaaatatgaagcacattgtgtcaatgggctaccaacacgacatggtgctcaacgtgtgggattggaagaaagacatagtggtagcatccaataaagtcagctgcagagtaatcgccctgtccttcagtgaggactcctcctattttgtaactgtcggcaataggcatgttcgcttctggtttttggaagtgagtaccgagactaaagttacctcaactgtgcctctagtgggacgctctggcatcctgggggagctgcataataatattttttgtggagtagcctgtggccgtggtaggatggctggaagtaccttttgtgtttcctatagtgggctgctctgccagttcaatgaaaaaagggtactggaaaaatggattaacctgaaagtctccctctccagctgcctgtgcgtatctcaggaactgatcttttgcggatgcaccgacggaatcgtgaggatcttccaagcgcactcactccactacctggccaacctgcctaaaccccattatctgggtgtggacgttgctcagggtctggagccttcattcctgtttcatcgtaaagctgaggccgtgtacccggacaccgtcgccttgacattcgaccctattcatcagtggctgagctgcgtctataaagatcactctatttatatctgggatgtcaaggatattaaccgtgtcggcaaggtatggtctgagctcttccatagcagctatgtctggaacgtagaagccctttcttag

SEQ ID NO: 319583 - DNA, 1452 bp, Artificial Sequence
  derived and/or modified sequence
atggctgccgtggggtcaggcggatatgcacgaaatgacgccggagaaaagctgccgtccgtcatggcaggggtgccggccaggcgggggcagagttcacctcccccggccccgccaatttgccttcgcagacggactcgactgtccacagcaagcgaggagacagtgcaaaatagggttagcttagagaaggtcctcggtattaccgcacagaactcgtcaggcctcacctgcgaccccggaacgggccatgtcgcctatctagccggttgtgtagtagtcatactggatccaaaggagaacaaacagcagcacatattcaataccgctcggaagtccctttccgctcttgcatttagtcctgatggtaagtacatcgtaactggggagaacggtcaccggcctgcagttcgcatttgggatgtggaggagaagaaccaagtcgccgaaatgttgggacataagtacggagtggcatgtgtcgccttctctcccaacatgaagcacattgtctccatgggataccagcatgatatggtgctcaacgtgtgggactggaaaaaagacatcgtggtagcctctaataaggtgagctgtagagtgatagcattatccttttcagaggacagtagttactttgtcactgtcggtaaccgtcacgttagattttggttcttggaggtgtccaccgagaccaaggtcacctccacggtgccattggtgggccgctcagggatcctaggagagctgcacaacaatattttctgtggcgtggcatgcggccgcggccgcatggctggttccaccttctgcgtctcttactccggcctactctgtcaattcaacgagaagcgagtcctggaaaagtggattaatttaaaagtgtccctgtcaagctgcttgtgtgtatcacaggaactgatcttttgcggatgcacagacggcatcgtgaggattttccaagcacacagtttgcattaccttgccaacttacctaaaccccattatctgggggtggatgtggcccaagggctagagcccagttttctctttcacaggaaggcagaggcggtgtatccagatacggttgcattgacattcgacccaattcatcagtggctctcctgcgtgtacaaggaccatagtatctacatctgggatgtcaaggacataaaccgagtgggcaaggtttggtccgagctgttccacagcagctatgtctggaacgtggaagtgtaccccgagtttgaggaccaaagggcttgtctgcccagcggctccttcctcacttgcagctcggacaacactatcagattctggaatttagattcttcaccagactctcactggcagaaaaacatcttcagtaatctcgcccccgccctgcagatgtgtggccgaggccactctcgccagccgaatacacctagcccaggcgaaatcgcttcctag

SEQ ID NO: 319584 - DNA, 1302 bp, Artificial Sequence
  derived and/or modified sequence
ggcgggtacgccagaaatgacgccggagagaaacttcctagcgtcatggccggcgtcccggctaggagaggtcagagctccccccctccagccccccccatctgtctgagacgacgcaccagattaagcacggcgtccgaagaaactgtgcagaatcgcgtttccctggagaaggtgcttggaattacggctcagaacagcagcggcctaacctgcgacccaggaacgggccacgttgcctatctcgcagggatgtggagaatgggacctgcctcggagtcttgcggagaagactcgattgcacccagtctcagcagaactgttcccggaatgtattgtgtggttgtcattctggacccgaaagagaataagcaacaacacatctttaataccgctagaaagagcctcagtgccttggctttcagtcctgatggcaagtatatcgtcaccggtgagaacggccaccgcccagcagtgcgcatttgggatgtggaagagaaaaaccaggtagccgaaatgctcggccacaagtacggggtcgcttgcgtggccttttcacctaacatgaagcacatcgtctccatgggataccagcacgatatggtgctgaacgtgtgggattggaagaaggacattgtggtcgccagtaataaggtgtcctgcagggtgattgcactgtccttcagcgaagatagctcctatttcgtgacagttgggaaccggcatgtacggttttggtttctggaagtgtctactgaaaccaaggtgacctcaacagttccgcttgtgggccgaagcggaattttgggagaactgcataataacattttctgcggagtagcatgtggaagaggacgcatggcaggatcaaccttctgtgtgagctatagtggcctgctttgccagttcaatgagaagagagtgttggaaaaatggataaatctaaaagtctctctgagttcctgtttgtgcgtatcacaggaacttatattctgcggctgtaccgatggcatcgtgcggatctttcaggctcacagtctgcactatctggccaatcttccgaaaccacattacctaggagtcgatgtcgcgcaggggttggagcccagcttccttttccaccgcaaggcagaagccgtgtatccagacacagtggcccttacgtttgaccccattcaccaatggttgtcttgcgtgtataaggaccatagcatctacatatgggacgtgaaggatatcaatagggtgggtaaggtctggtcagaacttttccactcatcctacgtatggaacgtggagtag

SEQ ID NO: 319585 - DNA, 1245 bp, Artificial Sequence
  derived and/or modified sequence
atggctgctgtgggcagcggcggctacgccagaaatgatgctggggagaagctgcccagcgtgatggccggcgtgcctgcccggcggggccagagcagccccccaccagccccacccatctgcctgcggcggaggacccggctgagcacagccagcgaggagaccgtgcagaacagagtgtccctggagaaggtgctgggcatcacagcccagaacagcagcggcctgacctgtgaccccggcaccggccacgtggcctacctggccggctgtgtggtggtgatcctggaccccaaggagaacaagcagcagcacatcttcaacacagccaggaagagcctgagcgccctggccttctccccagatggcaagtacatcgtgactggagaaaatggccacaggcctgctgtgcgcatctgggatgtggaggagaagaaccaggtggccgagatgctgggccacaagtatggagtggcctgtgtggccttcagccccaacatgaagcacatcgtgtccatgggctaccagcacgacatggtgctgaatgtgtgggactggaagaaggacatcgtggtggccagcaacaaggtgtcctgcagggtcatcgccctgtccttcagcgaggacagcagctactttgtgacagtgggcaacagacatgtgcgcttctggttcctggaggtgtccacagagaccaaggtgaccagcacagtgcccctggtgggccgcagcggcatcctgggggagctgcacaacaacatcttctgtggggtggcctgtggccggggccgcatggccggcagcaccttctgtgtgtcctacagcggcctgctgtgccagttcaatgagaagagggtgctggagaagtggatcaacctgaaggtgtccctgagcagctgcctgtgtgtgtcccaggagctgatcttctgtggctgcacagatggcatcgtgcgcatcttccaggcccacagcctgcactacctggccaacctgcccaagccccactacctgggcgtggatgtggcccagggcctggagcccagcttcctgttccacaggaaggccgaggccgtgtacccagacacagtggccctgacctttgaccccatccaccagtggctgagctgtgtgtacaaggaccacagcatctacatctgggatgtgaaggacatcaacagagtgggcaaggtgtggagcgagctgttccacagcagctatgtgtggaatgtggaggccctgtcctag

SEQ ID NO: 319586 - DNA, 1452 bp, Artificial Sequence
  derived and/or modified sequence
atggctgctgtgggcagcggcggctacgccagaaatgatgctggggagaagctgcccagcgtgatggccggcgtgcctgcccggcggggccagagcagccccccaccagccccacccatctgcctgcggcggaggacccggctgagcacagccagcgaggagaccgtgcagaacagagtgtccctggagaaggtgctgggcatcacagcccagaacagcagcggcctgacctgtgaccccggcaccggccacgtggcctacctggccggctgtgtggtggtgatcctggaccccaaggagaacaagcagcagcacatcttcaacacagccaggaagagcctgagcgccctggccttctccccagatggcaagtacatcgtgactggagaaaatggccacaggcctgctgtgcgcatctgggatgtggaggagaagaaccaggtggccgagatgctgggccacaagtatggagtggcctgtgtggccttcagccccaacatgaagcacatcgtgtccatgggctaccagcacgacatggtgctgaatgtgtgggactggaagaaggacatcgtggtggccagcaacaaggtgtcctgcagggtcatcgccctgtccttcagcgaggacagcagctactttgtgacagtgggcaacagacatgtgcgcttctggttcctggaggtgtccacagagaccaaggtgaccagcacagtgcccctggtgggccgcagcggcatcctgggggagctgcacaacaacatcttctgtggggtggcctgtggccggggccgcatggccggcagcaccttctgtgtgtcctacagcggcctgctgtgccagttcaatgagaagagggtgctggagaagtggatcaacctgaaggtgtccctgagcagctgcctgtgtgtgtcccaggagctgatcttctgtggctgcacagatggcatcgtgcgcatcttccaggcccacagcctgcactacctggccaacctgcccaagccccactacctgggcgtggatgtggcccagggcctggagcccagcttcctgttccacaggaaggccgaggccgtgtacccagacacagtggccctgacctttgaccccatccaccagtggctgagctgtgtgtacaaggaccacagcatctacatctgggatgtgaaggacatcaacagagtgggcaaggtgtggagcgagctgttccacagcagctatgtgtggaatgtggaggtgtacccagagtttgaggaccagagggcctgcctgcccagcggcagcttcctgacctgcagcagtgacaacaccatccgcttctggaacctggacagcagcccagacagccactggcagaagaacatcttcagcaacctggccccagccctgcagatgtgtggccggggccacagccggcagcccaacacccccagccctggagaaattgccagctag

SEQ ID NO: 319587 - DNA, 1302 bp, Artificial Sequence
  derived and/or modified sequence
gggggctacgccagaaatgatgctggggagaagctgcccagcgtgatggccggcgtgcctgcccggcggggccagagcagccccccaccagccccacccatctgcctgcggcggaggacccggctgagcacagccagcgaggagaccgtgcagaacagagtgtccctggagaaggtgctgggcatcacagcccagaacagcagcggcctgacctgtgaccccggcaccggccacgtggcctacctggccggcatgtggaggatgggccctgccagcgagagctgtggagaagattccatcgcccccagcctgagcaggacagtgcccggcatgtactgtgtggtggtgatcctggaccccaaggagaacaagcagcagcacatcttcaacacagccaggaagagcctgagcgccctggccttctccccagatggcaagtacatcgtgactggagaaaatggccacaggcctgctgtgcgcatctgggatgtggaggagaagaaccaggtggccgagatgctgggccacaagtatggagtggcctgtgtggccttcagccccaacatgaagcacatcgtgtccatgggctaccagcacgacatggtgctgaatgtgtgggactggaagaaggacatcgtggtggccagcaacaaggtgtcctgcagggtcatcgccctgtccttcagcgaggacagcagctactttgtgacagtgggcaacagacatgtgcgcttctggttcctggaggtgtccacagagaccaaggtgaccagcacagtgcccctggtgggccgcagcggcatcctgggggagctgcacaacaacatcttctgtggggtggcctgtggccggggccgcatggccggcagcaccttctgtgtgtcctacagcggcctgctgtgccagttcaatgagaagagggtgctggagaagtggatcaacctgaaggtgtccctgagcagctgcctgtgtgtgtcccaggagctgatcttctgtggctgcacagatggcatcgtgcgcatcttccaggcccacagcctgcactacctggccaacctgcccaagccccactacctgggcgtggatgtggcccagggcctggagcccagcttcctgttccacaggaaggccgaggccgtgtacccagacacagtggccctgacctttgaccccatccaccagtggctgagctgtgtgtacaaggaccacagcatctacatctgggatgtgaaggacatcaacagagtgggcaaggtgtggagcgagctgttccacagcagctatgtgtggaatgtggagtag

SEQ ID NO: 319588 - DNA, 1245 bp, Artificial Sequence
  derived and/or modified sequence
atggccgccgtgggcagcggcggctacgcccggaacgacgccggcgagaaactgcccagcgtgatggccggtgtgccggcccggcggggacagtcttctcctcccccagcacctcccatctgtctcagacgtcgaacgagactgtccactgcttcggaggaaaccgtgcagaatagagtgtcgcttgagaaagtcttggggattaccgcccagaattcaagtgggctcacgtgcgaccctggaacaggacacgtcgcttatctcgccggctgtgtggtggtgattctcgaccccaaggaaaataagcaacagcatatctttaacacagcacgcaagtcactcagtgccctcgcattcagccccgatggcaagtatatcgtgacaggcgagaatggacatcggccagccgtgcggatctgggacgtggaggagaagaaccaggtggcagagatgctaggacacaaatatggcgtcgcatgtgttgcattctctcctaacatgaagcatatagtgagcatgggctatcagcatgacatggtgttgaatgtatgggactggaagaaagatatcgtggtcgcctccaataaggtgtcttgtagggtgatcgcattaagtttttccgaagatagctcatacttcgtgacagtgggtaaccgccacgtgcgcttctggttcctggaggtgagtaccgagactaaagtcaccagcactgtcccactggtggggagatcaggaatcctgggggaactccacaataacatattctgcggggtggcctgcggccgcggccgcatggccggatccacattctgcgtttcttactcaggattgctgtgtcagttcaatgaaaaacgtgtactagagaaatggattaatctcaaggtcagtctttcaagctgcctgtgtgtttctcaagaactgatcttttgtggatgcactgacggtatagtaagaatattccaggcccatagcttgcactatctagctaacttgccaaaacctcattacctgggggtcgatgtggctcaaggtttggagccctcttttctgttccaccgtaaagccgaggccgtctacccggacactgtggcgctcaccttcgaccctatccatcaatggctttcctgtgtgtataaggatcactcaatctatatatgggatgttaaggatattaaccgggtaggcaaggtttggtctgagctcttccacagtagctatgtttggaatgtggaggccttgagctag

SEQ ID NO: 319589 - DNA, 1452 bp, Artificial Sequence
  derived and/or modified sequence
atggccgccgtgggcagcggcggctacgcccggaacgacgccggcgagaaactccccagcgtgatggcgggggtgcctgcccggaggggacaatcctctcctccgcctgcaccccccatatgtctgcgaaggaggacaagacttagtactgcctccgaagagacagtgcagaaccgagtcagcctggaaaaagtgcttggcataactgcccaaaattcgagcggattaacttgtgatccgggcactggccacgttgcatacctggccggctgtgtggtggtgatactggacccaaaggagaataagcaacagcatatcttcaacaccgccaggaagagcctgtccgccctcgctttttctcctgatgggaaatacatagtgactggggagaatggtcatcgaccagccgtgcgcatctgggacgtggaggagaagaaccaagtagcagaaatgttgggccacaagtacggagtcgcgtgcgtagccttcagccccaatatgaagcatattgtgtcaatgggctatcagcacgatatggtgctgaatgtctgggactggaaaaaggatatagtggtggcctccaacaaggtttcatgcagggtcattgctctgtccttctctgaagacagttcttatttcgtgacagttggtaatcgacacgtgcgattttggttccttgaggtgtctactgaaactaaggtgaccagtacggtgcccttagtgggaagatccggaatcctgggggagctgcacaataatatattttgcggcgtagcctgtgggcgcggtagaatggccggttccactttttgcgttagctattctggtctcctgtgtcagtttaatgagaagagagtcctcgaaaagtggatcaatttgaaagtgtcgttgagctcatgcttatgtgtctcacaggagttaatcttctgcggctgtactgatggcatcgtaaggatttttcaggcccactccttacattacctagccaacctgcctaaaccccattatctgggagtcgacgtagcccaaggcctcgaaccaagctttctcttccacagaaaggctgaagcagtctaccctgacaccgtggcactgacctttgaccctatccatcagtggctgtcttgcgtgtataaggatcacagcatttatatttgggatgtgaaagacattaaccgggttggaaaagtttggagcgagctgtttcactcctcttacgtttggaatgtggaggtgtaccccgaatttgaggaccagagggcctgtctgccctccgggagttttctcacatgctcctctgataataccattcggttctggaatctcgatagtagccccgactctcactggcagaaaaatatttttagcaatctggcacccgcattacaaatgtgcggcagaggccattcaaggcaacctaataccccaagccccggcgagattgcatcgtag

SEQ ID NO: 319590 - DNA, 1302 bp, Artificial Sequence
  derived and/or modified sequence
ggcggctacgcccggaacgacgccggcgagaagctgcccagcgtgatggcaggggtcccagcaagaagggggcaatcatctccacccccggccccgccaatctgtctccgcaggcgcacgagacttagtaccgcatccgaagagacagtccaaaaccgggtctcactggagaaggttttgggaatcacagcccaaaacagctctgggctcacctgcgacccaggcacggggcacgtggcctatctggccggcatgtggcgcatggggccagcaagtgagtcctgtggcgaagatagtatcgctccctctcttagtcgaacagtccctggtatgtactgcgtcgtagtaatcctggatccaaaagagaataagcaacagcacattttcaacaccgcccgcaaatctctgtctgccctggcgttctcgcctgatggcaaatatatcgtgactggggagaatgggcacagacctgccgtgcgaatttgggatgtggaagaaaaaaatcaggtggccgaaatgcttggacataagtacggcgtcgcttgcgtcgcattctctcctaacatgaagcacatcgtgtccatgggctaccaacacgatatggtcttgaacgtatgggactggaagaaggacattgtagtggcaagtaacaaagtcagttgccgcgttatcgctctctcattctcagaggacagctcctactttgtaactgtcggtaacagacacgttcgattctggttcctagaggtttctaccgaaaccaaagtgacatcaaccgtgccactggtagggaggagtggaattttaggggagcttcacaataacatcttttgcggcgtggcatgcggcaggggacgaatggccggttccaccttctgtgtgtcatatagtgggctactttgccagttcaacgaaaaacgagtcctggaaaagtggattaacctcaaagtctcccttagctcctgcctgtgcgtaagccaggagcttattttctgcggttgcactgacggcattgtccggatcttccaggcacattcgttgcactacctagccaacttgcctaagccccactacctcggcgtcgacgtcgcacaggggttggagccctcttttctgttccataggaaggctgaggccgtctaccctgacaccgtcgcccttacttttgaccccatccaccagtggctcagctgcgtctacaaggaccattccatctatatctgggacgtgaaagacattaacagagtggggaaagtatggagtgagctgttccattcatcttatgtctggaatgtggaatag

SEQ ID NO: 319591 - DNA, 1245 bp, Artificial Sequence
  derived and/or modified sequence
atggctgccgtagggagcggcggatacgcgaggaacgacgctggggaaaagctgcctagtgtgatggcaggtgtgcctgcaagacgtgggcaatcatcgccaccaccagcccctccaatctgcttgaggaggaggactcggctcagcactgcgtctgaggagacagtccagaatcgcgtgtctctagagaaggtgcttggcattaccgcccagaatagttctggactgacgtgtgatcccggaaccgggcacgttgcgtatttggccggatgcgtagtggtgattcttgaccctaaagagaataaacagcaacatattttcaacacagccagaaaatcgctcagcgccctagccttctcaccagacgggaagtacattgtgaccggtgagaatggacatagacctgcagttcggatctgggatgtggaagaaaagaaccaggttgctgagatgttaggccacaagtacggtgtggcctgtgtcgcattctctcctaacatgaaacacattgtttcaatgggctaccaacacgatatggtcctgaacgtgtgggattggaaaaaggacattgtggtcgcaagcaataaggtgtcttgccgcgtgatcgcactgtcattttcagaagatagctcctactttgtgacagtgggcaaccgacatgtgagattttggttcctagaagtgagcacggagactaaagtgacttctactgttcctctggtgggcagatctggtatactgggcgaactccacaataacattttttgcggcgtggcctgtggaaggggcagaatggcagggtcaactttctgcgtttcttattctgggctcttgtgtcagtttaatgagaagagagtgttagaaaagtggatcaatttgaaggtcagcctgtcttcctgcttatgtgttagccaggagctgattttttgcggatgcacagacggaatagtgcggatcttccaggctcactcactgcattatctggcaaaccttccaaagccgcactacttgggggtcgatgttgctcagggactggaaccgtccttcttgttccaccgaaaggcggaagcggtctacccagatactgtggccttaacgtttgaccctattcatcagtggctctcttgcgtttacaaggaccactccatttacatatgggatgtcaaggacataaacagggtcggcaaggtgtggtcagagctgttccactcctcttacgtttggaatgtggaagctttgtcgtag

SEQ ID NO: 319592 - DNA, 1452 bp, Artificial Sequence
  derived and/or modified sequence
atggccgcagtgggctctggagggtatgcaagaaatgacgccggtgaaaaactgcctagtgtgatggcaggagtcccagcgagaaggggtcagtccagccctcctcccgctccgccaatctgcctgagacggcgaactcggctgagcacagcatcggaggagaccgtccagaaccgggtgtctcttgaaaaggtgctcggcatcacagctcagaattcctctggactcacttgtgatcctggcaccggtcacgtggcctacctcgctgggtgtgtggttgttattttagacccaaaagagaataaacagcaacatatttttaacaccgccagaaaatccctctcagccctggccttctcaccagacggtaaatatattgttaccggggagaacggtcacaggccggctgtaaggatttgggacgtggaggagaaaaaccaggtagccgagatgctgggtcataaatacggtgtggcttgcgtcgcttttagccctaatatgaaacacatcgtttccatgggataccagcacgacatggtgctgaatgtatgggactggaagaaggatattgtggtcgcatccaacaaggtgagttgccgtgtgatagccctctctttttcagaggactcaagctactttgtcaccgtcggaaatagacacgtgcgcttctggtttctggaagtctcaactgagaccaaggttacctccaccgtgccccttgttggtagatccggcatactcggagagctgcataacaatatcttctgtggagtcgcctgtggcagaggaaggatggccggtagtactttctgcgtgtcatatagcgggcttctgtgccagttcaatgagaagagggtgcttgaaaagtggatcaacctcaaggtctccctttccagctgtctgtgcgtctcccaagagctcattttctgtggctgtacagacggcatcgtccgcatcttccaggcccactcgttgcactacctggcaaacctgcctaagccccattatctgggcgtggatgtcgctcaagggctcgaacccagttttctgtttcatcggaaggctgaagctgtgtacccagacaccgtcgctctgactttcgaccccattcatcaatggcttagttgcgtctataaggaccatagcatttacatctgggacgtgaaggacatcaatagagttggcaaggtctggtcggagctttttcatagtagttatgtgtggaatgtcgaagtctaccccgagtttgaggatcaacgggcttgccttccctcgggctcgttcctgacttgctcgtctgacaacacaatcaggttttggaatctggattcatcacccgactcccactggcaaaaaaacattttttcaaatctagcccctgcactgcagatgtgcggcaggggccactctcgacaacctaacactccctcgcccggagaaatcgctagctag

SEQ ID NO: 319593 - DNA, 1302 bp, Artificial Sequence
  derived and/or modified sequence
ggcggatatgctagaaatgatgccggagaaaaactgccgtccgtgatggcaggcgtgccagcacggagaggccagtcctccccgcctcctgcaccgcctatctgcttgcggagaaggacacgtctgtctactgcctccgaagaaaccgtacagaatcgcgtgtcgctcgaaaaggtcctgggaatcaccgcccagaactcttctggtcttacttgtgatccgggaacaggccatgttgcctatcttgcaggcatgtggagaatgggcccagccagtgagagctgtggggaggatagtatcgcaccctcactgtcacgcactgtcccaggcatgtattgtgtcgtggttatcctagatcccaaggaaaacaagcagcagcacatctttaatactgcgagaaaatccctctccgctctggcctttagccctgacggaaaatatattgtgaccggggaaaacggccaccgccctgctgttcggatatgggatgtagaggaaaagaaccaggtcgctgaaatgctggggcataaatacggagttgcttgcgttgcttttagtccgaacatgaagcatatcgttagcatgggttaccagcacgatatggttttaaacgtgtgggattggaagaaagatattgtagtcgcctccaacaaagtttcttgccgggtgatcgcattatccttttcagaggattcctcttacttcgtgacggtgggaaatcggcacgtgcgtttttggtttttggaggtttccacagagactaaagttacctcaactgtaccactggtgggcagatcgggtatcctcggcgaacttcacaataacatcttctgcggggtggcctgtggaagaggaagaatggccggaagtactttctgtgtcagttacagtgggttgctgtgtcagtttaacgaaaaacgagtgcttgaaaagtggatcaatctgaaggtgtctttgtctagttgtttatgtgtgagtcaggagctcattttctgcgggtgtactgacgggatagttcgaatcttccaggcccactccttgcactacctagcaaacctgccaaagccccattacctgggcgtcgacgtcgcccagggtctggaaccaagctttcttttccatagaaaagcagaggcagtttatccagacacagtagccctgactttcgatccgatccatcagtggctctcctgcgtgtacaaggaccacagtatttacatctgggatgtcaaagacatcaatcgtgtgggaaaggtgtggagcgaacttttccattcgagttatgtgtggaatgtcgaatag

SEQ ID NO: 319594 - DNA, 1980 bp, Artificial Sequence
  derived and/or modified sequence
tttcccgcggctgttcgctgttccagtgggtcgtggcggtggcggcagcggcggttaggggatgtaacggtcgcccgcctccggcgtgacgatggcggccgtagggtccggaggctatgcgcggaacgatgcaggggagaagctgccctctgtcatggcgggagttccggcgcggaggggccagtcctccccgccccccgccccaccaatctgcctacggcggcggacgcgactctcgacggcctccgaggagacggtgcagaaccgggtgtcactcgagaaggtgcttggcatcacagcccagaacagcagtggcctaacctgtgaccccggcacaggccatgtggcctacctggcaggctgtgtggtggtgattttggaccccaaggagaacaagcagcagcacatctttaacaccgccaggaagtctctcagtgctctggccttctcccctgatgggaagtacatagtgacaggggagaatgggcataggcctgctgtgcgcatctgggatgtggaggagaagaatcaggtggcggagatgctaggccacaagtatggtgtggcgtgtgtggccttctcacccaatatgaagcacatcgtgtccatgggctaccaacatgacatggtgctcaacgtctgggactggaagaaagacatcgtagtggcctccaacaaggtatcttgtagagtcattgccctctccttctcagaggacagcagctattttgtcactgttgggaaccgccatgtgaggttctggttcttggaagtctccactgagacaaaggtgacgagcacagtgccccttgtagggcgctcgggcatcctgggcgagctgcacaacaacatcttctgtggtgtggcctgcggtcggggccggatggcgggcagtaccttctgtgtgtcctactcgggcctcctctgccagttcaatgagaagagggtgctggagaagtggatcaacctgaaggtctccctgtcttcctgcctctgtgtcagccaggagctcatcttctgtggctgcacagatgggatagtccgcatcttccaggcccatagcctgcactacctcgccaacctgcccaagccacactaccttggggtagacgtggcacagggcctggagcccagcttcctcttccacaggaaggcggaagcagtctacccagatacagtggcactgaccttcgaccccatccaccagtggctgtcctgcgtgtataaggaccacagcatctacatctgggatgtcaaggacatcaacagagtgggcaaggtgtggtcagagctcttccacagctcctacgtttggaacgtggaggccctgtcctaggtgctgaggacacagacacaaaatccctgcccttaacaagctcacatttggatgggaaaggaaacctggaaacatcatcagtgaataacacgccaagcagcagtaaccctctgaagaaaaatgaggcggggaaggggaaggggaatgcaggtggtattctagagaggagaggggtcagggaaggcctccctgaggacatatgagcagagacctgcaggaaatcggggagtgagacctgcaactgctggggagaaccacaagcacagaggccctgcggcaggaacatgcactccacagagagctttgctgtggaggtcgtttatgtatttcactgctttttttaaaaaggagttgaagacggggcatggtggctcacacctgtaatcccaacactttgggaatctgaggcgggaggatcacttgagtccaggagtttgagaccagcctgggcaacacaagaccctgtctctacaaataatttttaaaaattagccaggcatggtagcacacacgtgtggtcccagctactcaagaggtggaggcaggaagatcacttgagcctgggatgtcaaggctgcagtgagctgtgattgtgccaccacactcccacactccagcctgggtaacagtgagaccatgtctag

SEQ ID NO: 319595 - DNA, 1543 bp, Artificial Sequence
  derived and/or modified sequence
tttcccgcggctgttcgctgttccagtgggtcgtggcggtggcggcagcggcggttaggggatgtaacggtcgcccgcctccggcgtgacgatggcggccgtagggtccggaggctatgcgcggaacgatgcaggggagaagctgccctctgtcatggcgggagttccggcgcggaggggccagtcctccccgccccccgccccaccaatctgcctacggcggcggacgcgactctcgacggcctccgaggagacggtgcagaaccgggtgtcactcgagaaggtgcttggcatcacagcccagaacagcagtggcctaacctgtgaccccggcacaggccatgtggcctacctggcaggctgtgtggtggtgattttggaccccaaggagaacaagcagcagcacatctttaacaccgccaggaagtctctcagtgctctggccttctcccctgatgggaagtacatagtgacaggggagaatgggcataggcctgctgtgcgcatctgggatgtggaggagaagaatcaggtggcggagatgctaggccacaagtatggtgtggcgtgtgtggccttctcacccaatatgaagcacatcgtgtccatgggctaccaacatgacatggtgctcaacgtctgggactggaagaaagacatcgtagtggcctccaacaaggtatcttgtagagtcattgccctctccttctcagaggacagcagctattttgtcactgttgggaaccgccatgtgaggttctggttcttggaagtctccactgagacaaaggtgacgagcacagtgccccttgtagggcgctcgggcatcctgggcgagctgcacaacaacatcttctgtggtgtggcctgcggtcggggccggatggcgggcagtaccttctgtgtgtcctactcgggcctcctctgccagttcaatgagaagagggtgctggagaagtggatcaacctgaaggtctccctgtcttcctgcctctgtgtcagccaggagctcatcttctgtggctgcacagatgggatagtccgcatcttccaggcccatagcctgcactacctcgccaacctgcccaagccacactaccttggggtagacgtggcacagggcctggagcccagcttcctcttccacaggaaggcggaagcagtctacccagatacagtggcactgaccttcgaccccatccaccagtggctgtcctgcgtgtataaggaccacagcatctacatctgggatgtcaaggacatcaacagagtgggcaaggtgtggtcagagctcttccacagctcctacgtttggaacgtggaggtgtatcctgagtttgaagaccagagagcttgtttgccatcaggatcctttctgacttgttcttcagacaacaccattcgcttctggaacttggacagcagccctgattctcactggcagaaaaacatcttcagcaatttggctcctgctctgcagatgtgtggacgtggccactcccggcagcccaacacacccagcccaggtgaaattgcttcctaa

SEQ ID NO: 319596 - DNA, 1299 bp, Artificial Sequence
  derived and/or modified sequence
ggaggctatgcgcggaacgatgcaggggagaagctgccctctgtcatggcgggagttccggcgcggaggggccagtcctccccgccccccgccccaccaatctgcctacggcggcggacgcgactctcgacggcctccgaggagacggtgcagaaccgggtgtcactcgagaaggtgcttggcatcacagcccagaacagcagtggcctaacctgtgaccccggcacaggccatgtggcctacctggcaggaatgtggagaatggggcctgcctctgagagctgtggagaggattccatagccccctctctgtctagaacagttcctggcatgtactgtgtggtggtgattttggaccccaaggagaacaagcagcagcacatctttaacaccgccaggaagtctctcagtgctctggccttctcccctgatgggaagtacatagtgacaggggagaatgggcataggcctgctgtgcgcatctgggatgtggaggagaagaatcaggtggcggagatgctaggccacaagtatggtgtggcgtgtgtggccttctcacccaatatgaagcacatcgtgtccatgggctaccaacatgacatggtgctcaacgtctgggactggaagaaagacatcgtagtggcctccaacaaggtatcttgtagagtcattgccctctccttctcagaggacagcagctattttgtcactgttgggaaccgccatgtgaggttctggttcttggaagtctccactgagacaaaggtgacgagcacagtgccccttgtagggcgctcgggcatcctgggcgagctgcacaacaacatcttctgtggtgtggcctgcggtcggggccggatggcgggcagtaccttctgtgtgtcctactcgggcctcctctgccagttcaatgagaagagggtgctggagaagtggatcaacctgaaggtctccctgtcttcctgcctctgtgtcagccaggagctcatcttctgtggctgcacagatgggatagtccgcatcttccaggcccatagcctgcactacctcgccaacctgcccaagccacactaccttggggtagacgtggcacagggcctggagcccagcttcctcttccacaggaaggcggaagcagtctacccagatacagtggcactgaccttcgaccccatccaccagtggctgtcctgcgtgtataaggaccacagcatctacatctgggatgtcaaggacatcaacagagtgggcaaggtgtggtcagagctcttccacagctcctacgtttggaacgtggag

SEQ ID NO: 319597 - protein, 233 aa, Artificial Sequence
  derived and/or modified sequence
MWGYLSLMPVFLAVWAISGVWIVFAIAVTNRTVDLSKGFPYISICGSFPPQSCIFSQVLNMGAALAAWICIVRYHQLRDWGVRRWPNQLILWTGLLCALGTSVVGNFQEKNQRPTHLAGAFLAFILGNVYFWLQLLLWRLKRLPQPGAAWIGPLRLGLCSVCTILIVAMIVLHACSLRSVSAACEWVVAMLLFALFGLLAVDFSALESCTLCVQPWPSLSPPPASPISLPVQL

SEQ ID NO: 319598 - DNA, 702 bp, Artificial Sequence
  derived and/or modified sequence
atgtggggctacctgagcctgatgcccgtgttcctggccgtgtgggccatcagcggcgtgtggatcgtgttcgccatcgccgtgaccaacagaaccgtggacctgagcaagggcttcccctacatcagcatctgcggcagcttccccccccagagctgcatcttcagccaggtgctgaacatgggcgccgccctggccgcctggatctgcatcgtgagataccaccagctgagagactggggcgtgagaagatggcccaaccagctgatcctgtggaccggcctgctgtgcgccctgggcaccagcgtggtgggcaacttccaggagaagaaccagagacccacccacctggccggcgccttcctggccttcatcctgggcaacgtgtacttctggctgcagctgctgctgtggagactgaagagactgccccagcccggcgccgcctggatcggccccctgagactgggcctgtgcagcgtgtgcaccatcctgatcgtggccatgatcgtgctgcacgcctgcagcctgagaagcgtgagcgccgcctgcgagtgggtggtggccatgctgctgttcgccctgttcggcctgctggccgtggacttcagcgccctggagagctgcaccctgtgcgtgcagccctggcccagcctgagccccccccccgccagccccatcagcctgcccgtgcagctgtag

SEQ ID NO: 319599 - DNA, 702 bp, Artificial Sequence
  derived and/or modified sequence
atgtggggctacctgtccttaatgccggtgtttttggctgtttgggccatttccggtgtgtggattgttttcgcgatagcagtaactaacagaacagtcgatttgtccaagggtttcccctatataagcatttgcggttcattcccacctcagagttgtatcttctctcaagtcctgaacatgggcgccgcgttagctgcttggatatgtatcgttcggtatcatcagcttcgcgattggggtgtccgacggtggcccaaccagctcattctgtggaccggcctcttgtgcgccttggggactagtgttgtcggcaacttccaagaaaagaaccagagacccacccacctggccggggcgttcctagctttcatcctggggaacgtttatttctggctgcagctgttgctgtggaggctgaagcgcctcccacagcctggcgctgcatggatcggcccattacgactgggattatgcagcgtatgtaccattctgatcgtggctatgatcgtgctgcacgcatgtagcctacgatccgtgagcgctgcctgcgagtgggtggttgccatgctgctcttcgctctattcggcctcctcgccgtggatttctccgctctggagtcttgcactctgtgcgttcagccgtggccatcgctgagccccccacccgcaagtcctatcagtctccctgttcagttgtag

SEQ ID NO: 319600 - DNA, 702 bp, Artificial Sequence
  derived and/or modified sequence
atgtggggttatctgtcattgatgccagtgtttctggctgtgtgggccatttcgggagtgtggatcgttttcgcgatcgcagtgaccaatcgcacggtggatctcagcaaaggttttccatatatatctatctgcgggtccttcccccctcagagctgtatcttttcccaggtgttgaacatgggcgccgcgttggctgcatggatttgcattgtacgatatcaccagctgagggattggggagtacgtagatggcctaaccagctgatcttatggaccggtctgctttgcgccctcggcacgagcgtggtggggaattttcaggaaaagaatcaacgcccaacacacctcgccggagcgtttttagcattcatcctgggaaacgtgtatttttggctccagctgctcctgtggaggctgaaacgactcccacagcccggggccgcctggatcggacctctcaggctgggcttatgttccgtgtgtacgatactgatcgtggccatgattgtgctgcacgcgtgttcgctgcgcagtgttagcgctgcctgtgagtgggtcgtagcaatgttattgtttgcgctgttcggactcctggccgtggacttttcagcactcgaatcatgtaccctgtgtgtgcagccttggccgagcctctcaccaccccctgcctctccaatttcactaccagtgcaactgtag

SEQ ID NO: 319601 - DNA, 702 bp, Artificial Sequence
  derived and/or modified sequence
atgtggggctacctgagcctgatgcctgtgttcctggccgtgtgggccatcagcggcgtgtggatcgtgtttgccatcgctgtgaccaacagaacagtggacctgagcaagggcttcccctacatcagcatctgtggcagcttccccccccagagctgcatcttcagccaggtgctgaacatgggcgccgccctggccgcctggatctgcatcgtgcgctaccaccagctgcgggactggggcgtgcggcgctggcccaaccagctgatcctgtggacaggcctgctgtgtgccctgggcacctctgtggtgggcaacttccaggagaagaaccagaggcccacccacctggccggggccttcctggccttcatcctgggcaatgtgtacttctggctgcagctgctgctgtggaggctgaagaggctgccccagcccggggccgcctggattggccccctgcggctgggcctgtgcagcgtgtgcaccatcctgattgtggccatgattgtgctgcacgcctgcagcctgcggtctgtgtctgctgcctgtgagtgggtggtggccatgctgctgtttgccctgtttggcctgctggccgtggacttcagcgccctggagagctgcaccctgtgtgtgcagccctggcccagcctgagccccccaccagccagccccatcagcctgcctgtgcagctgtag

SEQ ID NO: 319602 - DNA, 702 bp, Artificial Sequence
  derived and/or modified sequence
atgtggggctacctgagcctgatgcccgtgttcctggccgtgtgggcaatctcgggcgtgtggattgtgttcgctatcgcagtcacaaaccgcaccgtggacttatcaaaaggcttcccgtatattagcatatgtggctccttccctccacagtcttgcatattttctcaggtcttgaatatgggtgcagccttggcggcatggatttgcattgtcaggtaccatcagttacgcgattggggggtcagaaggtggccaaaccaactcatcttgtggactggcctgctgtgcgcattggggacctcagtcgtgggaaattttcaagagaagaaccagcgcccaacccacctagcaggtgcttttctcgcttttatcctgggaaatgtttatttctggctgcagctgctattatggcggctgaagcgtttgcctcagcctggtgccgcttggatcggcccactgcgcctggggctgtgcagcgtctgtactatcctgatcgtcgccatgattgtcctacatgcctgtagtcttcggagcgttagcgccgcctgcgagtgggtggtggctatgcttctctttgctctgttcggactcctggccgttgacttctctgctctggaatcttgtacactttgcgtgcaaccgtggccaagcctgtcccctcccccagccagtcctatttcactacccgtacagctttag

SEQ ID NO: 319603 - DNA, 702 bp, Artificial Sequence
  derived and/or modified sequence
atgtggggctacctgagcctgatgcccgtgttcctggccgtgtgggctatatcaggagtgtggatagtgttcgccatcgcagttacaaatcgcacagttgacctgtctaagggattcccgtatatctctatttgtgggagcttccccccccagagttgcatattttcgcaggtgctcaatatgggcgccgccctcgctgcgtggatttgcatcgtgcgttaccaccagctgcgcgattggggcgttcggcgctggcccaatcagctgatcctgtggacagggctcctctgtgccctgggtacaagcgtagtcgggaacttccaggagaagaatcaaagacctactcacctggccggcgccttcttggcgtttattctgggaaacgtctatttctggctccaactgcttctgtggcgtctgaagcggctcccacagccaggtgccgcctggattggtcctttgaggttagggctgtgcagcgtgtgtactatcctcattgtggccatgattgtcctccatgcatgtagtctgcgcagcgtctcggccgcctgcgagtgggtggtggctatgctgctcttcgcactgtttggtctgctcgcagtggacttttcagcattggaaagttgcacgctgtgtgtacagccctggccttccctcagtcctcctcctgccagtcctatcagtctcccagtgcaattatag

SEQ ID NO: 319604 - DNA, 702 bp, Artificial Sequence
  derived and/or modified sequence
atgtggggctatctgtcactgatgcccgtgttcctggcagtctgggccatcagcggggtgtggatagtctttgccatagccgtgacgaatcgcactgtggatctgtccaaggggtttccatacatttccatttgtggctctttcccacctcagtcatgcatcttttcccaggtcctgaacatgggcgctgctctagcagcctggatctgcattgtgcggtatcaccagcttagagattggggggtgcgccgttggccaaaccagctcatcctgtggaccggactgctgtgtgcactcggtacctcagttgtaggcaacttccaagagaagaaccagaggcctacccacttagcaggagctttcctcgcctttatcctgggcaacgtgtacttttggctacagctgttgctctggcggttaaagaggctgccacagccgggtgcagcctggattgggccacttaggttgggcctctgttccgtttgtaccattcttattgtggctatgattgttttgcatgcttgcagcttacggagcgtgagtgctgcctgcgagtgggtggtagcaatgttactcttcgccctgttcggccttctcgccgtggacttttccgctctcgaaagttgtaccctctgtgttcagccttggccaagtctctctccaccgcctgcctcaccaatatctctgccagtgcagctatag

SEQ ID NO: 319605 - DNA, 702 bp, Artificial Sequence
  derived and/or modified sequence
atgtggggctatctatccctgatgccggtattcttagccgtgtgggccatctccggggtctggatcgttttcgcaatcgcagtcacaaaccgaacagtcgatctatcgaaaggttttccctacatctcgatttgcggatcattcccgcctcagagttgcatcttttcccaggtactgaatatgggcgcagctctggccgcatggatctgtatcgttcgataccatcaactgagggactggggggttagaaggtggccgaaccaactaatcctatggacgggtctgttatgcgccctaggcaccagcgtggtgggtaacttccaggagaagaaccaacgacctacgcatttggccggtgcttttctagcttttatcctcggtaatgtttacttctggctgcaactgttgctctggagactaaaaaggttgcctcagcctggcgcagcctggatagggccactgcgcctaggactctgctctgtctgtactatcctgattgtggcaatgatcgtgttgcacgcatgttccctccggtccgtcagcgctgcgtgtgagtgggttgtagccatgctgctcttcgcactcttcgggctgctggctgttgatttctcagcccttgaaagctgtaccctatgtgtgcaaccgtggcccagcttaagccccccacctgcatcgcctataagcctgcctgtgcagctctag

SEQ ID NO: 319606 - DNA, 943 bp, Artificial Sequence
  derived and/or modified sequence
ggctccagacacccaacctacccgtggccggatgtctgcctgagccccaccccgaatgccagcccttcttccctgagctcacccagccccagctccaggactgagagccccaggaagcttggagaggtgtgagagagacaggtgtccagcctcagccccgatccttcacctgcagagcccggcatgtggggctacctgtcgctgatgcctgtcttcctagctgtctgggctatctctggcgtctggatcgtttttgccattgcagtgaccaacaggactgtggacctcagtaaaggctttccctacatcagcatctgcggatccttcccccctcagagctgcatcttcagccaggtgctcaatatgggagctgctctggccgcgtggatctgcattgtccgttaccaccagctccgggactggggcgtcagaaggtggcctaaccagctgatcctatggacgggtcttctgtgtgccctgggcacctccgtggtaggcaatttccaggaaaagaaccagcggcctacgcacttggcaggggccttccttgccttcatcttgggtaacgtctacttctggctgcagctcctcctgtggaggctgaagaggctgccccagcccggggctgcctggattgggcccctccgcctgggcctctgcagcgtctgcaccatcctcattgtggccatgatcgtcctccacgcctgctcgctgcgtagcgtctctgcggcctgcgagtgggtcgtggccatgctgctgttcgcgctcttcggtctcttagccgttgacttctccgccctggagagctgcaccctgtgtgttcagccgtggcccagcctcagccccccgccggcctcccccatctccctgccggtccagctgtagcaggcaccctgacccgggccttgccctcaccagtgaagcaggaaagatggggccaatc

SEQ ID NO: 319607 - DNA, 875 bp, Artificial Sequence
  derived and/or modified sequence
agccaggccagcagccctagcttctggaaggatccttcaggctccagacacccaacctacccgtggccggatgtctgcctgagccccaccccgaatgccagcccttcttccctgagctcacccagccccagctccaggactgagagccccaggaagcttggagagagcccggcatgtggggctacctgtcgctgatgcctgtcttcctagctgtctgggctatctctggcgtctggatcgtttttgccattgcagtgaccaacaggactgtggacctcagtaaaggctttccctacatcagcatctgcggatccttcccccctcagagctgcatcttcagccaggtgctcaatatgggagctgctctggccgcgtggatctgcattgtccgttaccaccagctccgggactggggcgtcagaaggtggcctaaccagctgatcctatggacgggtcttctgtgtgccctgggcacctccgtggtaggcaatttccaggaaaagaaccagcggcctacgcacttggcaggggccttccttgccttcatcttgggtaacgtctacttctggctgcagctcctcctgtggaggctgaagaggctgccccagcccggggctgcctggattgggcccctccgcctgggcctctgcagcgtctgcaccatcctcattgtggccatgatcgtcctccacgcctgctcgctgcgtagcgtctctgcggcctgcgagtgggtcgtggccatgctgctgttcgcgctcttcggtctcttagccgttgacttctccgccctggagagctgcaccctgtgtgttcagccgtggcccagcctcagccccccgccggcctcccccatctccctgccggtccagctgtag

SEQ ID NO: 319608 - protein, 346 aa, Artificial Sequence
  derived and/or modified sequence
MDTGPDQSYFSGNHWFVFSVYLLTFLVGLPLNLLALVVFVGKLQRRPVAVDVLLLNLTASDLLLLLFLPFRMVEAANGMHWPLPFILCPLSGFIFFTTIYLTALFLAAVSIERFLSVAHPLWYKTRPRLGQAGLVSVACWLLASAHCSVVYVIEFSGDISHSQGTNGTCYLEFRKDQLAILLPVRLEMAVVLFVVPLIITSYCYSRLVWILGRGGSHRRQRRVAGLLAATLLNFLVCFGPYNVSHVVGYICGESPAWRIYVTLLSTLNSCVDPFVYYFSSSGFQADFHELLRRLCGLWGQWQQESSMELKEQKGGEEQRADRPAERKTSEHSQGCGTGGQVACAES

SEQ ID NO: 319609 - protein, 346 aa, Artificial Sequence
  derived and/or modified sequence
MDTGPDQSYFSGNHWFVFSVYLLTFLVGLPLNLLALVVFVGKLRCRPVAVDVLLLNLTASDLLLLLFLPFRMVEAANGMHWPLPFILCPLSGFIFFTTIYLTALFLAAVSIERFLSVAHPLWYKTRPRLGQAGLVSVACWLLASAHCSVVYVIEFSGDISHSQGTNGTCYLEFWKDQLAILLPVRLEMAVVLFVVPLIITSYCYSRLVWILGRGGSHRRQRRVAGLVAATLLNFLVCFGPYNVSHVVGYICGESPVWRIYVTLLSTLNSCVDPFVYYFSSSGFQADFHELLRRLCGLWGQWQQESSMELKEQKGGEEQRADRPAERKTSEHSQGCGTGGQVACAEN

SEQ ID NO: 319610 - DNA, 1656 bp, Artificial Sequence
  derived and/or modified sequence
gagacagcaaggtgctgtgcggcagagcatttggggtctcaaagaagcagtggccaccaccatggatacaggccccgaccagtcctacttctccggcaatcactggttcgtcttctcggtgtaccttctcactttcctggtggggctccccctcaacctgctggccctggtggtcttcgtgggcaagctgcagcgccgcccggtggccgtggacgtgctcctgctcaacctgaccgcctcggacctgctcctgctgctgttcctgcctttccgcatggtggaggcagccaatggcatgcactggcccctgcccttcatcctctgcccactctctggattcatcttcttcaccaccatctatctcaccgccctcttcctggcagctgtgagcattgaacgcttcctgagtgtggcccacccactgtggtacaagacccggccgaggctggggcaggcaggtctggtgagtgtggcctgctggctgttggcctctgctcactgcagcgtggtctacgtcatagaattctcaggggacatctcccacagccagggcaccaatgggacctgctacctggagttccggaaggaccagctagccatcctcctgcccgtgcggctggagatggctgtggtcctctttgtggtcccgctgatcatcaccagctactgctacagccgcctggtgtggatcctcggcagagggggcagccaccgccggcagaggagggtggcggggctgttggcggccacgctgctcaacttccttgtctgctttgggccctacaacgtgtcccatgtcgtgggctatatctgcggtgaaagcccggcgtggaggatctacgtgacgcttctcagcaccctgaactcctgtgtcgacccctttgtctactacttctcctcctccgggttccaagccgactttcatgagctgctgaggaggttgtgtgggctctggggccagtggcagcaggagagcagcatggagctgaaggagcagaagggaggggaggagcagagagcggaccgaccagctgaaagaaagaccagtgaacactcacagggctgtggaactggtggccaggtggcctgtgctgaaagctaggtcctccgggggaggagggtgtagctggcatgtcatcctcagggcgcttcctcgctcacgccaggagggacttggagtggcgagctggggcccgatggggcttgggggcagagtagacatctagcctccctaagggtatgcgcgctaaagcccagctctcgatctcacctccatccccatccacccacacactatggattgggctctgggaaggggtcagggtgagaggctgctctggagaacaatgaggtcctcatagcagcaggcagctcctgtgttttcttgagggtggcagaggagctaagagcagtgcccagggtctgagggggctgcccagtgagtggcaggggcaggagaggggagaaccccatcctcagagctgctcccagccagcgagtcaggagcgggggagacagggctccagggatgaggccgcattctgctcccacagcgccttttccagaaagttcccattgctcaataaatgtggatcatcagagacatttatgaacaatgacagaagaaaaattacccaaataaatgtggaagcaagc

SEQ ID NO: 319611 - DNA, 1795 bp, Artificial Sequence
  derived and/or modified sequence
cccctttttgcatactgaccagccctggcaacggagctcaaggcatctttgtgccactgctcaacagtgagtgatgtcatgggcacggccaggtctttatcagttctgccggataaatagccaactgcactaggtctggagagacagcaaggtgctgtgcggcagagcatttggggtctcaaagaagcagtggccaccaccatggatacaggccccgaccagtcctacttctccggcaatcactggttcgtcttctcggtgtaccttctcactttcctggtggggctccccctcaacctgctggccctggtggtcttcgtgggcaagctgcggtgccgcccggtggccgtggacgtgctcctgctcaacctgaccgcctcggacctgctcctgctgctgttcctgcctttccgcatggtggaggcagccaatggcatgcactggcccctgcccttcatcctctgcccactctctggattcatcttcttcaccaccatctatctcaccgccctcttcctggcagctgtgagcattgaacgcttcctgagtgtggcccacccactgtggtacaagacccggccgaggctggggcaggcaggtctggtgagtgtggcctgctggctgttggcctctgctcactgcagcgtggtctacgtcatagaattctcaggggacatctcccacagccagggcaccaatgggacctgctacctggagttctggaaggaccagctagccatcctcctgcccgtgcggctggagatggctgtggtcctctttgtggtcccgctgatcatcaccagctactgctacagccgcctggtgtggatcctcggcagagggggcagccaccgccggcagaggagggtggcggggctggtggcggccacgctgctcaacttccttgtctgctttgggccctacaacgtgtcccatgtcgtgggctatatctgcggtgaaagcccggtgtggaggatctacgtgacgcttctcagcaccctgaactcctgtgtcgacccctttgtctactacttctcctcctccgggttccaagccgactttcatgagctgctgaggaggttgtgtgggctctggggccagtggcagcaggagagcagcatggagctgaaggagcagaagggaggggaggagcagagagcggaccgaccagctgaaagaaagaccagtgaacactcacagggctgtggaactggtggccaggtggcctgtgctgaaaactaggtcctccgggggaggagggtgtagctggcgtgtcatcctcagggcgcttcctcgctcacgccaggagggacttggagtggcgagctggggcccgatggggcttgggggcagagtagacatctagcctccctaagggtatgcgcgctaaagcccagctctcgatctcacctccatccccatccacccacacactatggattgggctctgggaaggggtcagggtgagaggctgctctggagaacaatgaggtcctcatagcagcaggcagctcctgtgttttcttgagggtggcagaggagctaagagcagtgcccaggtctgagggggctgcccagtgagtggcaggggcaggagaggggagaaccccatcctcagagctgctcccagccagcgagtcaggagcgggggagacagggctccagggatgaggccgcattctgctcccacagtgccttttccagaaagttcccattgctcaataaatgtggatcatcagagacatttatgaacaatgacagaagaaaaattacccaaataaatgtggaagcaagc

SEQ ID NO: 319612 - DNA, 342 bp, Artificial Sequence
  derived and/or modified sequence
gaagagcgagctgaatatactgcagacatcatctcaaccactgtcgcagagccttacagaacatgttttactgcaggcggaagcaagactagcccagttgaacagcaaccagaacagcagcagcctcaagacatcgtgtccctgcctctccctccactaccgcacgccactccagatcccttcaccctgtattcccacaggaccgagagcgcgggtggacacctgttcctgcctcaggatctgcgctggaaatcccccggtttgggagtatttgctgtacagtctgtatacgagttggctcgaagacataatgttagtcctttctactcgggtcccccttag

SEQ ID NO: 319613 - DNA, 1077 bp, Artificial Sequence
  derived and/or modified sequence
taatgggcatttaccttgataatcatatctagctacacagcgaacctggccgctttccttacggtgcagagaatggaggtgcctgtggagtctgcagacgaccttgctgaccaaaccaacatcgagtatgggacaatccatgcggggtccacgatgacattttttcagaattcccgctatcagacatatcagcgaatgtggaattatatgcaatcaaaacaacccagtgtgtttgtcaaatccaccgaggaaggaattgcaagagttctcaatagtcgatatgcctttctactagagagcaccatgaacgaatatcacaggagactgaactgtaacctgacacagatagggggcctcctggacactaaaggctatggaattggcatgccactcggaagccccttccgagacgaaatcactctggcaatactgcaactgcaagagaataaccgtctggagatacttaagaggaaatggtgggaaggaggaagatgtccgaaggaggaagaccacagggctaaaggactcgggatggaaaatatcggcggcatcttcattgtgctcatttgcggtctgataattgccgtgtttgttgcggtgatggaatttatctggtcaactcgcaggtcggcggaaagcgaggaaaccccagcgctgcaccccgctgcatgccagtgttctgcattagggcctcgcacaccacttaaggagccttccatgttgcttgtcaaggttccatctactcgggtccaagtcgccttttctcgaaccagcctgcggcaggtgtgccctttcttgcttcagcaccaactgagttccctctactggatccaagcgaccaatgtacagatatgctgccacttttcttcgctgaaaccatctccagatctcaccttccctccttcacatcgtccactgtcatcccttcttttcaccgcactggccgccgttggtgggctgcccgacgctagcagcttcttcttccctcccatatcttcttgtccgcctctgcagagtggcatcgggccctgccattctacagaggctacactagtgacgtctaacttccatgtatag

SEQ ID NO: 319614 - DNA, 1404 bp, Artificial Sequence
  derived and/or modified sequence
gtgggccttcaccttgatcatcatctcctcctacacggccaacctggccgccttcctcaccgtgcagcgcatggaggtgcctgtggagtcggccgatgacctggcagatcagaccaacatcgagtatggcaccatccacgccggctccaccatgaccttcttccagaattcacggtaccaaacgtaccagcgcatgtggaactacatgcagtcgaagcagcccagcgtgttcgtcaagagcacagaagagggcattgcccgcgtcctcaactcccgctacgccttcctgctcgagtccaccatgaacgaataccaccggcgcctcaactgcaacctcacccagatcgggggactcctcgacaccaagggctacggcattggcatgccgctgggctccccgttccgggatgagatcacactggccatcctgcagcttcaggagaacaaccggctggagatcctgaagcgcaagtggtgggaggggggccggtgccccaaggaggaggaccatcgagctaaaggtttgggcatggagaacattggtggcatttttatcgtgctcatctgtggcctcatcattgctgtcttcgtggcggtcatggaattcatatggtccacacggaggtcagctgagtccgaggagaccccagctctgcatccagctgcctgccagtgttctgcacttggcccaaggactcctctgaaggagccgtccatgctgctagtaaaggtgccctccacccgtgtccaggttgccttctcaaggacatccctccggcaagtctgtcctttcctcctgcagcatcagttgtcctctctttattggattcaggccaccaacgtacaaatatgctgtcatttctccagtcttaaaccctctcctgacctcactttccctcccagccaccgcccactttcttcccttctctttacagccttggcagcagtggggggtctccctgatgcttccagtttcttctttcctcccatttcctcttgccccccactccagtctggcatcggtccctgccactccactgaagccactcttgtcaccagcaacttccatgtctgaaattcccggtctcaggcctcatgtatatgaggtagcagtgggcttcggcacagccagtcactctcaatcctcaaagccccttcttccccttctcccacttctccggtcactccttcccaggctccctcgttgggtttctctttctccccaggctctgtttgttgtggggctccagggctcagtccttagactgcttctcttctcggtctttctccactacttgaatgatcccaccagccaaatggctcttaagacccactatgtgctggtgattcttgtgttagttatctattgctatcataacaaatgaccttaacagcttttaaaaa

SEQ ID NO: 319615 - DNA, 1077 bp, Artificial Sequence
  derived and/or modified sequence
tgatgggccttcaccctcatcatcatcagcagctacacagccaacctggccgccttcctgactgtgcagaggatggaggtgcctgtggagagcgcagatgacctggccgaccagaccaacattgaatatggcaccatccacgccggcagcaccatgaccttcttccagaacagccgctaccagacctaccagaggatgtggaactacatgcagagcaagcagcccagcgtgtttgtgaagagcacagaggagggcatcgcccgggtgctgaacagccgctatgccttcctgctggagagcaccatgaatgagtaccaccggcggctgaactgcaacctgacccagatcggcggcctgctggacaccaagggctatggaattggcatgcccctgggcagccccttcagagatgagatcaccctggccatcctgcagctgcaggagaacaaccggctggagatcctgaagaggaagtggtgggagggcggccgctgccccaaggaggaggaccaccgggccaagggcctgggcatggagaacattggaggcatcttcatcgtgctgatctgtggcctcatcatcgctgtgtttgtggccgtgatggagttcatctggagcacccggcgctctgctgagagcgaggagaccccagccctgcaccctgctgcctgccagtgcagcgccctgggccccaggacccccctgaaggagcccagcatgctgctggtgaaggtgcccagcaccagggtgcaggtggccttcagcaggaccagcctgcggcaggtgtgccccttcctgctgcagcaccagctgagcagcctgtactggatccaggccaccaacgtgcagatctgctgccacttcagcagcctgaagcccagcccagacctgaccttcccccccagccaccggcccctgagcagcctgctcttcaccgccctggccgctgtgggcggcctgcctgatgccagcagcttcttcttcccccccatcagcagctgcccccccctgcagagcggcatcggcccctgccacagcacagaggccaccctggtgaccagcaacttccacgtgtag

SEQ ID NO: 319616 - DNA, 1077 bp, Artificial Sequence
  derived and/or modified sequence
tgatgggccttcaccctgatcatcatcagcagctacaccgccaacttagccgcctttctcaccgtccagagaatggaagtgcctgtggagagtgccgacgatctggcagatcaaactaatattgagtatgggacaatccacgctggaagcacaatgacattctttcaaaattctagataccagacctaccaacggatgtggaattacatgcaatctaagcagccaagcgtgttcgtgaagagtactgaagagggcattgccagggttctgaattctagatacgccttcctcctggaaagcaccatgaatgagtaccatcgccgcctcaattgcaacctgacccaaattggcggtctgctcgacacaaagggatacggtattgggatgcccctcggatctcccttccgggatgaaatcaccctagccatcttgcagctgcaagagaataaccggttggagatcctgaagagaaagtggtgggagggcggtcgctgtccaaaggaggaggaccatcgggccaagggcctgggtatggaaaacatcggagggattttcattgtcctgatttgtggtctgatcatagccgtgttcgttgcagtgatggaatttatctggtctaccagaaggtctgcagagtcagaggagaccccagctcttcaccctgccgcgtgccagtgctcagctttaggtccgcgaactccgctcaaggaaccgtcaatgctcctggtcaaagtgcccagcactagggtgcaggtcgcattttcgcgtacctcgctgcgccaggtgtgtccattcctcctgcaacaccaactgtccagcttgtactggattcaggcaactaatgtgcagatatgctgtcacttctcaagcctgaagcctagccccgacctcacatttcccccatcccaccggcctctgtcctcattgctgttcaccgctctggccgcagttgggggactgcctgatgcttcctccttcttctttccgcctatatcctcctgccctccgctgcaatccggtattgggccctgtcacagcaccgaagccacactcgttacttcaaactttcacgtatag

SEQ ID NO: 319617 - DNA, 1077 bp, Artificial Sequence
  derived and/or modified sequence
tgatgggccttcaccttgataatcattagctcctacaccgccaacctcgccgctttcttaaccgtccagaggatggaagtgcccgtagagtccgctgatgaccttgcagaccagacgaacattgaatatggtactattcatgccggatctactatgacattctttcagaactcgcgctaccagacctatcaaagaatgtggaattacatgcagagcaagcaacctagcgtgttcgtgaagagcacagaagaggggattgcacgggtcttgaatagcaggtatgccttcctgctggaatcaactatgaacgagtaccatcgaaggctcaactgcaatttaacacagatcggtggactgctggacacaaagggttatggcattggaatgccactggggagccccttcagggacgagattaccctggctatcctgcaactgcaggaaaataatcgtctcgaaatcttaaaacgcaaatggtgggaggggggaagatgcccgaaggaagaagaccatcgggctaaaggtttgggaatggaaaacatcggcggtatcttcatcgtgttgatatgcgggctgatcatcgctgtatttgtggctgttatggaatttatttggtccactagacgctccgctgaaagtgaagagacacctgccctccaccctgccgcatgccagtgctccgcactggggcctagaacacccctgaaagagccaagtatgttattggtgaaggtgccctccacgcgggtgcaggtggccttctcacgcacatctcttcgccaggtgtgccccttcctgctgcagcaccagctgtcttcattgtactggatacaggccactaacgtgcagatttgttgccatttcagtagcctgaaacccagccccgacctcacctttcctccaagccaccgacctctgtcttccctactgttcactgcgctggcggctgtggggggactgcccgatgcgagtagtttttttttcccgccaatctcctcgtgcccgcctctccagagtggaattgggccttgccatagtaccgaagctactctggtgactagcaactttcatgtttag

SEQ ID NO: 319618 - DNA, 1077 bp, Artificial Sequence
  derived and/or modified sequence
tgatgggccttcaccctgatcatcatcagcagctacaccgccaacctggccgccttcctgaccgtgcagagaatggaggtgcccgtggagagcgccgacgacctggccgaccagaccaacatcgagtacggcaccatccacgccggcagcaccatgaccttcttccagaacagcagataccagacctaccagagaatgtggaactacatgcagagcaagcagcccagcgtgttcgtgaagagcaccgaggagggcatcgccagagtgctgaacagcagatacgccttcctgctggagagcaccatgaacgagtaccacagaagactgaactgcaacctgacccagatcggcggcctgctggacaccaagggctacggcatcggcatgcccctgggcagccccttcagagacgagatcaccctggccatcctgcagctgcaggagaacaacagactggagatcctgaagagaaagtggtgggagggcggcagatgccccaaggaggaggaccacagagccaagggcctgggcatggagaacatcggcggcatcttcatcgtgctgatctgcggcctgatcatcgccgtgttcgtggccgtgatggagttcatctggagcaccagaagaagcgccgagagcgaggagacccccgccctgcaccccgccgcctgccagtgcagcgccctgggccccagaacccccctgaaggagcccagcatgctgctggtgaaggtgcccagcaccagagtgcaggtggccttcagcagaaccagcctgagacaggtgtgccccttcctgctgcagcaccagctgagcagcctgtactggatccaggccaccaacgtgcagatctgctgccacttcagcagcctgaagcccagccccgacctgaccttcccccccagccacagacccctgagcagcctgctgttcaccgccctggccgccgtgggcggcctgcccgacgccagcagcttcttcttcccccccatcagcagctgcccccccctgcagagcggcatcggcccctgccacagcaccgaggccaccctggtgaccagcaacttccacgtgtag

SEQ ID NO: 319619 - DNA, 2250 bp, Artificial Sequence
  derived and/or modified sequence
atgatgatggccagaaagcaggacgtgagaatccccacctacaacatcagcgtggtgggcctgagcggcaccgagaaggagaagggccagtgcggcatcggcaagagctgcctgtgcaacagattcgtgagacccagcgccgacgagttccacctggaccacaccagcgtgctgagcaccagcgacttcggcggcagagtggtgaacaacgaccacttcctgtactggggcgaggtgagcagaagcctggaggactgcgtggagtgcaagatgcacatcgtggagcagaccgagttcatcgacgaccagaccttccagccccacagaagcaccgccctgcagccctacatcaagagagccgccgccaccaagctggccagcgccgagaagctgatgtacttctgcaccgaccagctgggcctggagcaggacttcgagcagaagcagatgcccgacggcaagctgctggtggacggcttcctgctgggcatcgacgtgagcagaggcatgaacagaaacttcgacgaccagctgaagttcgtgagcaacctgtacaaccagctggccaagaccaagaagcccatcgtggtggtgctgaccaagtgcgacgagggcgtggagagatacatcagagacgcccacaccttcgccctgagcaagaagaacctgcaggtggtggagaccagcgccagaagcaacgtgaacgtggacctggccttcagcaccctggtgcagctgatcgacaagagcagaggcaagaccaagatcatcccctacttcgaggccctgaagcagcagagccagcagatcgccaccgccaaggacaagtacgagtggctggtgagcagaatcgtgaagaaccacaacgagaactggctgagcgtgagcagaaagatgcaggccagccccgagtaccaggactacgtgtacctggagggcacccagaaggccaagaagctgttcctgcagcacatccacagactgaagcacgagcacatcgagagaagaagaaagctgtacctggccgccctgcccctggccttcgaggccctgatccccaacctggacgagatcgaccacctgagctgcatcaaggccaagaagctgctggagaccaagcccgagttcctgaagtggttcgtggtgctggaggagaccccctgggacgccaccagccacatcgacaacatggagaacgagagaatccccttcgacctgatggacaccgtgcccgccgagcagctgtacgaggcccacctggagaagctgagaaacgagagaaagagagtggagatgagaagagccttcaaggagaacctggagaccagccccttcatcacccccggcaagccctgggaggaggccagaagcttcatcatgaacgaggacttctaccagtggctggaggagagcgtgtacatggacatctacggcaagcaccagaagcagatcatcgacaaggccaaggaggagttccaggagctgctgctggagtacagcgagctgttctacgagctggagctggacgccaagcccagcaaggagaagatgggcgtgatccaggacgtgctgggcgaggagcagagattcaaggccctgcagaagctgcaggccgagagagacgccctgatcctgaagcacatccacttcgtgtaccaccccaccaaggagacctgccccagctgccccgcctgcgtggacgccaagatcgagcacctgatcagcagcagattcatcagacccagcgacagaaaccagaagaacagcctgagcgaccccaacatcgacagaatcaacctggtgatcctgggcaaggacggcctggccagagagctggccaacgagatcagagccctgtgcaccaacgacgacaagtacgtgatcgacggcaagatgtacgagctgagcctgagacccatcgagggcaacgtgagactgcccgtgaacagcttccagacccccaccttccagccccacggctgcctgtgcctgtacaacagcaaggagagcctgagctacgtggtggagagcatcgagaagagcagagagagcaccctgggcagaagagacaaccacctggtgcacctgcccctgaccctgatcctggtgaacaagagaggcgacaccagcggcgagaccctgcacagcctgatccagcagggccagcagatcgccagcaagctgcagtgcgtgttcctggaccccgccagcgccggcgccgccgacctgagctggctgggccccatctag

SEQ ID NO: 319620 - DNA, 2250 bp, Artificial Sequence
  derived and/or modified sequence
atgatgatggccagaaagcaggacgtgagaattcctacctacaatatttccgtagtcggtttgtcaggtacagagaaagagaaagggcagtgcggtattgggaaatcttgtctgtgtaacagatttgtgcgcccatccgctgatgagttccacctcgaccacacatccgttcttagtacatctgacttcgggggtagagtagtgaacaacgaccacttcctgtattggggcgaagttagcagatctcttgaagactgcgtggagtgcaagatgcacattgtcgaacagactgaattcatcgatgatcagacgttccaacctcatcgctccaccgccctgcagccgtatataaaacgtgctgctgccacaaagctggcctctgcggagaagctcatgtacttctgtaccgaccagcttggattggaacaggactttgagcaaaagcaaatgcctgacggcaagctgttagtcgacgggttcctgctgggaattgacgttagcaggggcatgaatcgcaattttgatgaccagctgaagtttgtctccaacctatataaccagttagccaagacgaaaaagcctatcgttgtggtgttaaccaaatgtgacgaaggggtcgaacgctacatccgcgacgctcacaccttcgccctcagcaaaaaaaaccttcaggtggtcgagacctctgctcggtctaacgtcaatgttgacctagctttctcgactctggttcaactgatcgataagtcacgtgggaaaactaagatcatcccatatttcgaggccttgaaacaacagtctcagcagattgcaaccgccaaggacaagtatgaatggttggtgagccggatagtaaagaaccataacgagaattggctgtccgttagtcgtaagatgcaggctagccccgagtatcaggattacgtgtatttggaaggcacacaaaaggcgaaaaagctcttcctgcagcacatacaccggctcaaacatgagcacatcgaacgccggcggaagttgtacttagcggcactgccccttgcctttgaagcgttgatccctaacctagatgagattgatcacctctcttgcataaaagcgaagaagctcctggaaacgaaacccgagttccttaagtggttcgtcgtactggaggaaaccccatgggacgctacatcgcacattgataatatggagaatgaaaggataccttttgatctgatggacaccgttccagccgaacagctgtatgaggcacacctggagaagcttcgcaacgaaagaaaacgcgtcgaaatgcgtagagcattcaaagagaatttggagacgtccccttttatcactccgggcaaaccttgggaggaagctcggtcctttataatgaacgaggacttctaccagtggctggaggaatccgtctacatggatatttacggcaagcaccagaaacagataatcgacaaggccaaggaggagtttcaggagttgctcctcgaatactctgagttgttctacgaactggaactcgacgctaagccatccaaagagaaaatgggcgtgattcaggacgtgctgggcgaagagcaacgtttcaaggctcttcagaaactgcaggccgaacgagatgcactgatccttaagcatatccacttcgtgtaccacccaaccaaagaaacttgtccatcatgtcctgcttgtgttgatgcgaagattgaacacttgatcagttctcgattcatacgtccatcagaccgaaatcagaagaactcgttgtccgatccaaacattgaccgtatcaacctggtaatcctgggtaaagacgggttagcgagagaactggcgaacgaaattagggccctctgtaccaacgatgacaagtatgtcattgatggcaagatgtatgaactaagcttgcggcctatcgaggggaatgtgcggttgccagtgaatagtttccagaccccaaccttccagcctcacggatgcctatgcctatacaatagtaaggagtcactgtcttacgtcgtggaaagtatcgaaaagtcaagggaatctaccctgggaaggcgggacaatcatctggttcacctcccgcttactctgattctggtaaataagaggggagatactagcggagagacgctgcactcactaattcaacaggggcagcagattgcgagcaaactgcagtgtgtgtttctggatccggcctccgccggcgctgcagacctgtcctggctaggacctatctag

SEQ ID NO: 319621 - DNA, 2250 bp, Artificial Sequence
  derived and/or modified sequence
atgatgatggccaggaagcaggatgtgcgcatccccacctacaacatctctgtggtgggcctgagcggcacagagaaggagaagggccagtgtggcatcggcaagagctgcctgtgcaacagatttgtgcggcccagcgcagatgagttccacctggaccacacctctgtgctgagcaccagtgactttggaggccgggtggtgaacaatgaccacttcctgtactggggcgaggtgagccgcagcctggaggactgtgtggagtgcaagatgcacatcgtggagcagacagagttcattgatgaccagaccttccagccccacaggagcacagccctgcagccctacatcaagagagctgctgccaccaagctggccagcgctgagaagctgatgtacttctgcacagaccagctgggcctggagcaggactttgagcagaagcagatgccagatggcaagctgctggtggatggcttcctgctgggcattgatgtgtcccggggcatgaacagaaactttgatgaccagctgaagtttgtgagcaacctgtacaaccagctggccaagaccaagaagcccatcgtggtggtgctgaccaagtgtgatgaaggagtggagcgctacatcagagatgcccacacctttgccctgagcaagaagaacctgcaggtggtggagaccagcgcccggagcaatgtgaatgtggacctggccttcagcaccctggtgcagctgattgacaagagccggggcaagaccaagatcatcccctactttgaggccctgaagcagcagagccagcagatcgccacagccaaggacaagtatgagtggctggtgagccgcatcgtgaagaaccacaatgaaaactggctgtctgtgtccaggaagatgcaggccagccctgagtaccaggactatgtgtacctggagggcacccagaaggccaagaagctgttcctgcagcacatccaccggctgaagcatgagcacattgaaagaagaaggaagctgtacctggccgccctgcccctggcctttgaggccctgatccccaacctggatgaaattgaccacctgagctgcatcaaggccaagaagctgctggagaccaagccagagttcctgaagtggtttgtggtgctggaggagaccccctgggatgccaccagccacatcgacaacatggagaatgaaagaatcccctttgacctgatggacacagtgcctgctgagcagctgtatgaggcccacctggagaagctgagaaatgaaaggaagagggtggagatgagaagagccttcaaggagaacctggagaccagccccttcatcacccctgggaagccctgggaggaggcccgctccttcatcatgaatgaagacttctaccagtggctggaggagagcgtgtacatggacatctacggcaagcaccagaagcagatcatcgacaaggccaaggaggagttccaggagctgctgctggagtacagcgagctgttctatgagctggagctggatgccaagcccagcaaggagaagatgggcgtcatccaggatgtgctgggggaggagcagcgcttcaaggccctgcagaagctgcaggccgagagagatgccctgatcctgaagcacatccactttgtgtaccaccccaccaaggagacctgccccagctgcccagcctgtgtggatgccaagattgagcacctgatcagcagccgcttcatccggcccagcgacaggaaccagaagaacagcctgagtgaccccaacatcgaccgcatcaacctggtgatcctgggcaaggatggcctggcccgggagctggccaatgagatccgggccctgtgcaccaatgatgacaagtatgtgattgatggcaagatgtatgagctgagcctgcggcccatcgagggcaatgtgcggctgcctgtgaacagcttccagacccccaccttccagccccacggctgcctgtgcctgtacaacagcaaggagagcctgtcctatgtggtggagagcattgagaagagccgggagagcaccctgggccggcgggacaaccacctggtgcacctgcccctgaccctcatcctggtgaacaagagaggagacaccagcggggagaccctgcacagcctcatccagcagggccagcagatcgccagcaagctgcagtgtgtgttcctggaccctgccagcgctggagctgctgacctgtcctggctgggccccatctag

SEQ ID NO: 319622 - DNA, 2250 bp, Artificial Sequence
  derived and/or modified sequence
atgatgatggcccggaagcaggacgtgcggatccccacctacaacatcagcgtggtgggactgagtgggaccgagaaggagaagggtcagtgtggcatcgggaaaagctgcctgtgcaacagattcgtgaggccttcggccgatgagtttcatctcgatcacacctcagtcctcagtacctccgattttggtgggagagtggtcaataacgatcatttcctctattggggcgaggtctctcgctccttggaggactgtgtggagtgtaagatgcatatagtcgagcagacggaattcatcgacgatcagaccttccaaccccataggagcaccgcacttcagccttatatcaagagagccgcggcaacaaagctcgcctcggccgagaagctgatgtatttctgtacggaccaactaggactggagcaagacttcgaacaaaagcaaatgcctgacgggaagctgctcgtcgacggattcctactcggcattgacgtctctcggggaatgaaccgaaacttcgatgaccagctcaaatttgtgtctaacttgtacaatcaattagccaaaaccaagaaaccaatcgttgttgtgctgaccaagtgtgatgagggcgtggagcggtacatcagggacgcccacacatttgccctgagcaagaagaacctccaggttgtagagacctccgccaggtctaacgtgaacgttgacctggcttttagcactttagtgcagctaatcgataagagccggggcaagaccaagataatcccttacttcgaagctctgaaacagcaaagccagcagatagcgacggccaaggataaatatgagtggttggtcagcagaatcgtaaaaaaccataatgaaaactggctgagcgtgagccgcaaaatgcaggccagtcccgagtaccaagattacgtctatcttgaaggaactcaaaaagcaaaaaagctgtttctgcaacacattcacagattgaagcacgagcatattgaaaggagacgaaagctctatttagctgctttgccgttggcctttgaggctctgattccgaacctggacgagatcgatcacctatcgtgcatcaaggcgaagaagttactggagactaagccagagtttctaaagtggttcgtggttctcgaagagaccccgtgggacgcaacgtcccatattgacaacatggaaaatgagcgtattcccttcgaccttatggacactgtgccagctgagcagctatatgaggcccacttggaaaaattgaggaatgaacggaaaagagtggagatgcggcgagcatttaaagaaaacctggagaccagccctttcatcactccgggaaagccatgggaggaagcacgcagttttatcatgaacgaggatttctatcagtggcttgaggaatcagtgtatatggacatctatggtaaacaccagaagcagattatcgacaaagcgaaagaggaattccaggaactgctgcttgaatattcagagctattctacgaacttgaacttgatgctaaaccgagtaaagagaaaatgggcgtaatccaggatgtgctgggggaagaacagcgctttaaggctctgcagaagctccaagcagaacgtgatgctttgatcctcaagcacatacacttcgtttatcaccccacaaaggagacctgcccttcatgtcctgcctgcgtagatgcaaagatagagcacctaatctcatcaagattcataagaccctcagaccgcaaccaaaagaattcgctgtcagatccgaatatcgatcgcattaaccttgtgatcttgggcaaggatggcctcgccagagagctggcgaacgagattcgggctctctgtaccaacgatgacaaatacgtcatcgacgggaagatgtatgagctcagcttgcgtccaatcgaagggaatgttaggctgcctgtgaattcattccagacacccacttttcagccccacggatgcctctgcctgtataatagtaaggaaagtctgtcttatgttgtggaatccatcgaaaaatcccgagagtctacattgggaaggagggataaccatctcgtgcatctgccactgacactcatactggtgaataaacgcggcgacacttctggcgagactctccactccttgattcagcaggggcagcagatcgccagtaagctgcagtgtgtcttcctggatccagcctcagcgggcgcagccgacttgtcctggctggggcccatctag

SEQ ID NO: 319623 - DNA, 2250 bp, Artificial Sequence
  derived and/or modified sequence
atgatgatggcccgtaagcaagacgtgcggattccaacttacaacatttccgtggtcggcctctccggcaccgagaaagaaaaagggcaatgcggcattggcaaaagttgcctgtgcaacagatttgttcggccatcagccgatgagttccacctagaccatacctctgtgctctcgacttcagattttggagggcgtgttgtgaataacgaccatttcctttactggggagaggtgagccgaagcctggaggattgtgttgagtgtaaaatgcacattgtcgagcagacagagtttattgacgatcagacgttccagccacatagatctacagcccttcagccgtacataaaaagagcagcggctaccaagctggcctccgctgaaaagctaatgtacttttgcaccgaccagttaggactcgagcaggactttgaacagaaacagatgcccgatgggaagctgctggttgacgggtttcttcttggaatcgatgtgtcaaggggaatgaacagaaattttgatgatcagctcaaatttgtatccaatctttataaccagctggccaagactaagaaaccaatcgtggtcgtgttgaccaagtgcgacgagggagtggaaagatatattagagatgcccacaccttcgccttgagcaagaagaacttacaggtagtggaaacatccgccaggagcaacgtaaacgtggacctggcctttagcactttggttcagctgattgacaagtccagaggaaagacgaaaattatcccctacttcgaagccctgaaacagcagtctcaacagatagcgacggccaaagataagtacgagtggctggtctcccggatagtgaaaaatcataacgaaaactggctgagtgtgagtagaaaaatgcaggcgtcacccgagtaccaagactatgtgtatctggaaggaactcagaaggcaaaaaaactcttcctgcagcacattcataggctcaagcacgagcacatagagcgcaggcggaaactctacctggctgcactcccacttgcttttgaggccctgatccccaacttggatgagattgaccacctgagttgtatcaaagctaaaaagcttctggagacgaaacccgagtttctcaaatggtttgtggttctggaagagaccccctgggatgccacctcccatatcgacaacatggagaacgaacgcatcccctttgacctcatggatacagttccggctgagcagctttacgaagctcacctcgagaaacttagaaacgagcgcaagcgggtagagatgcggagagctttcaaagagaacctagaaacgtcccccttcatcacaccgggtaagccatgggaggaggcacgaagctttataatgaacgaggatttctatcagtggttagaggagagcgtgtatatggatatttatgggaaacatcagaagcagatcatcgataaagcaaaagaggaatttcaggaattgctgctggaatactccgaactattttacgaattagaactggacgccaagccttcaaaggagaaaatgggagtgatccaggacgtgttgggcgaagagcagagattcaaggccctgcaaaaactgcaggcagagagggacgcactcattttgaagcacattcactttgtgtaccatccaacgaaggaaacatgcccatcctgtcccgcatgcgtagatgctaaaatcgagcaccttatttcaagccgcttcataaggccctccgatcggaatcagaagaacagtctaagcgacccaaacattgacaggatcaacctcgttatcctgggaaaggatggactggctcgggaactcgccaatgagatcagagccttatgtacaaacgacgataagtacgtgattgacggaaagatgtacgagctctctctccggccaatagaaggcaatgttcgccttcctgtaaattcatttcagaccccgacttttcagccacacggttgtctatgtctctataattctaaggagagtttgtcatatgtagtggaatcaatcgagaagagccgcgagtctaccctgggcaggcgcgacaaccatctggtgcatttacctctgaccctgatcctcgttaataagcggggtgacactagcggcgagacccttcattctctgatccagcagggacagcagattgcttcaaaactccagtgcgtctttcttgaccccgcaagcgctggagctgcagacctctcttggttgggtccaatttag

SEQ ID NO: 319624 - DNA, 2713 bp, Artificial Sequence
  derived and/or modified sequence
atgatgatggcaagaaagcaagatgtccgaattcccacctacaacatcagtgtggtgggattatctgggaccgagaaggaaaagggccagtgtgggattggaaagtcttgtttgtgcaaccgcttcgtgcgcccgagtgctgacgagtttcacttggaccatacctccgtcctcagcaccagtgactttggagggcgagtggtcaataatgaccactttctctactggggagaagttagccgctccctggaggattgtgtggaatgtaagatgcacattgtggagcagactgaatttattgatgatcagacttttcaacctcatcgaagcacggccctgcagccctatatcaagagagctgctgcgaccaagcttgcatcagctgaaaaactcatgtacttttgcactgaccagctggggctggagcaggactttgagcagaaacaaatgccagacggaaagctgctggttgatggttttcttcttggtattgatgttagcaggggcatgaataggaactttgatgaccagctcaagtttgtctccaatctctacaatcagcttgcaaaaacaaaaaagcccatagtggtggtcctgactaagtgtgacgaaggtgttgagcggtacattagagatgcacatacttttgccttaagcaaaaagaacctccaggttgtggagacctcagcgagatccaatgtaaacgtggacttggctttcagcaccttagtgcaactcattgataaaagtcggggaaagacaaaaatcattccttattttgaagctctcaagcagcagagtcagcagatagctacagcaaaagacaagtatgagtggctggtgagtcgcattgtgaaaaaccacaatgagaactggctgagtgtcagccgaaagatgcaggcctctccagaataccaggactatgtctacctggaagggactcagaaagccaagaagctgtttctacagcacatccaccgcctcaagcatgagcatatcgagcgtaggagaaagctgtacctggcagccctgccattagcttttgaagctcttatacctaatctagatgaaatagaccacctaagctgcataaaagccaaaaagctcttagaaaccaagccagaattcttgaagtggtttgttgtgcttgaagagaccccatgggatgccaccagtcacattgacaacatggaaaacgaacggattccctttgatttaatggataccgtccctgcagagcagctatacgaggcccacttagagaagctgaggaacgaaaggaaaagagttgagatgcgaagggcgtttaaagaaaacctggagacttctcctttcataactcccggaaagccttgggaagaggcccgtagttttattatgaatgaggatttctaccagtggctggaggaatctgtatacatggatatttatggcaaacaccaaaagcaaattatagataaagcaaaggaagaatttcaggagttgcttttggaatattcagaattgttttatgaactggagctggatgctaagcccagcaaggagaagatgggtgttattcaggatgttctgggagaggaacagcgatttaaagcattacaaaagctccaagcagagcgtgatgcccttattctgaaacacattcattttgtgtaccacccaacaaaggagacatgccccagctgcccagcttgtgtggacgctaagattgagcacttgattagttctcggtttatccggccgtctgaccggaatcagaaaaattcactctctgaccctaacattgatagaatcaacttggttatattgggcaaagacggccttgcccgagagttggccaatgagattcgagctctttgtacaaatgatgacaagtatgtgatagatggtaaaatgtatgagctttccctgaggccaatagaggggaatgtcaggcttcctgtgaactctttccagacgccaacatttcagccccacggctgtctctgcctttacaattcaaaggaatcgctatcctatgtagtggaaagtatagagaagagtagagagtccacgctgggccggcgggataatcatttagtccatctcccccttacattaattttggttaacaagagaggagacaccagtggagagactctgcatagcttaatacagcaaggtcaacaaattgctagcaaacttcagtgtgtctttctcgaccctgcttctgctggcgctgcagacctgagctggcttggacccatttgaggactgaactaggcaggcaatggctccagtgccctccctctgttccctggaccaccaccccacgtagctgctcacaccagcctccgggtgcctccctctgcttgtacagagcccatggtcgggacagtgccctggcctttgccggggaggaggatgctctgagattcagggtggggctggcaacccctgaagagaacacttcctgttggtctgtctcttcccaccttccatctgcacacacccccaaggtaagggtacagcccggctggcggcctccttgggaacgtgtaggccacggctctgccaccactaggtacctgctgagggcgctggctctgcagatcagaacaacggaggatagctttgtgcctggacccagagagtgtgggactccccgcttcatccccaccgtcccactccacagccttcccgaaacattccctggcaaacaaaggaacactag

SEQ ID NO: 319625 - protein, 257 aa, Artificial Sequence
  derived and/or modified sequence
MLEYALKQERAKYHKLKFGTDLNQGEKKADVSEQVSNGPVESVTLENSPLVWKEGRQLLRQYLEEVGYTDTILDMRSKRVRSLLGRSLELNGAVEPSEGAPRAPPGPAGLSGGESLLVKQIEEQIKRNAAGKDGKERLGGSVLGQIPFLQNCEDEDSDEDDELDSVQHKKQRVKLPSKALVPEMEDEDEEDDSEDAINEFDFLGSGEDGEGAPDPRRCTVDGSPHELGPELHSPTEWQGALSVGKASPMPDWVGTAG

SEQ ID NO: 319626 - DNA, 375 bp, Artificial Sequence
  derived and/or modified sequence
atgaccctgaacgagcacgccgccttcaagcacctgttcaacaaggcccacctggccccccccctgatccacctgaccctgagcggccacagcacctgcttcagagagcacagagtgggcggcaaggtgaccgaccagcaggaccccaaggccgaggagttcttcctggtgcagaacaagatgaagagcctgccctgcctgctgctgagcacccagaccggccagcccagcgacttcagcatcttcagcccccccttcccccccttctacagcaccaagccccccctgagcagctggcccatccccaacgagcccctgggcaccccccccagaagaggcagaggcagagccgagggcctgctgaccagccagtag

SEQ ID NO: 319627 - DNA, 264 bp, Artificial Sequence
  derived and/or modified sequence
atgaggagccaggggcagggtgggcctggggcctggcggaggatggagagctggagtgcagagcctgctggaccagggcagggccgccttgggtccccctgtgaggcagccgagcaagcgagctttgagaagacagtgataggagtggggcaagcacgggcagccctttctgaagaggagcacagagtctgggaggctgcagcgggagttggaggactagagcagtggggctgctgggaagcaggggtcacgagtggctggggc

SEQ ID NO: 319628 - DNA, 702 bp, Artificial Sequence
  derived and/or modified sequence
atgatcagcttccccagcctgcagagaaccgagctggaggagatggacctgatcctgcagcaggagggctggcagctggacctgaagagaaacagcctgggctggaaggacctgcagagaagcagccaccccagcccctgcctgcaggccggcagacccctgccccagcccacctgcacccacagaggcctgcccaagctgagactgagcgaggagggcgactaccccgccagcgccagcacccccgagcccagaggcctgatcccccccagcggcaccttcctgagattcaacctggaccccctgtgctgcggcccccagcccgtggccagcgtgagcagaggctgggtgagcagccaccactgcagccccgagaactgctggctgacctggctgggcgagctgcccgcccccttcagcggcacccccccccccaccgccgtgccccccggccagggcagcagaagcagaagccccagaaagcccatcgacagcctgagagacagcagaagcctgagctacagccccgtggagagaagaagacccagcccccagcccagccccagagaccagcagagcagcagcagcgagagaggcagcagaagaggccagagaggcgacagcagaagccccagccacaagagaagaagagagacccccagccccagacccatgagacacagaagcagcagaagcccctag

SEQ ID NO: 319629 - protein, 185 aa, Artificial Sequence
  derived and/or modified sequence
MFREVFADEDPATYVWDGNYHQPWEPAAAGAVGAGAYREVEAEDPGRLAVEALVRTRRCVCVAQRWGGKREVMYTAFKALGDSVDYVQFCRVCDSDTRLDPMALLELVRVLDEDPRVGAVGGDVRILNPLDSWVSFLSSLRYWVAFNVERACQSYFHCVSCISGPLGTPPGPAATQRRPRPSCGG

SEQ ID NO: 319630 - protein, 214 aa, Artificial Sequence
  derived and/or modified sequence
MFREVFADEDPATYVWDGNYHQPWEPAAAGAVGAGAYREVEAEDPGRLAVEALVRTRRCVCVAQRWGGKREVMYTAFKALGDSVDYVQVCDSDTRLDPMALLELVRVLDEDPRVGAVGGDVRILNPLDSWVSFLSSLRYWVAFNVERACQSYFHCVSCISGPLESCPGPREHAMMPSFLAPVQVHLQVPLLLRDALVLPAVAEPADTLVQVVLP

SEQ ID NO: 319631 - DNA, 558 bp, Artificial Sequence
  derived and/or modified sequence
atgttcagggaagtgttcgcagacgaagacccagccacgtatgtttgggatggcaattatcaccagccatgggaacccgctgctgctggtgcggtgggggcaggcgcctatagagaggtagaagccgaggaccctgggcgcttggccgttgaggcgttggtaagaactagacggtgtgtctgcgtagctcaacgctgggggggcaaaagagaggttatgtatactgcttttaaggcgctcggggatagcgtcgactatgtgcagttttgccgagtgtgtgactccgatactcggttggatcctatggcactgctcgagcttgtccgtgtgctggacgaagaccctagagtcggcgcggtgggcggtgatgtccggattctcaatcctctagactcgtgggtctcctttctgagctcactcaggtattgggtggccttcaacgtagagagagcttgccagagctactttcattgcgtgagctgcatatcaggaccattggggaccccccccggtcctgcagccacacagcggaggcccagaccaagctgcggcgggtag

SEQ ID NO: 319632 - DNA, 645 bp, Artificial Sequence
  derived and/or modified sequence
atgtttcgtgaagtgttcgcagacgaggaccccgccacttatgtctgggatggcaattatcaccaaccttgggagcctgcagctgctggcgccgtgggggccggtgcctacagggaagtggaagccgaggacccaggcaggttagccgtcgaagccctggtccgtactagacggtgtgtctgtgtggcacagagatggggcgggaagcgcgaggttatgtacacggccttcaaagctctgggcgactcagtggattatgtccaggtgtgtgacagcgatacaagactggatcccatggctctgctcgaactcgtccgggtattggatgaagatcccagagtaggcgcggtaggaggcgatgtgaggattctgaacccacttgactcatgggtgagctttcttagttccttgcggtattgggttgctttcaacgtggagcgggcttgccagagttattttcattgcgtgtcatgcatatccggcccactcgaatcctgcccgggcccccgggaacacgccatgatgccttcctttctggcccccgtacaggtgcatcttcaggtcccactgctgctgcgcgacgcattagtgttacctgcagtggccgagcctgccgacactctggtgcaagtagtacttccctag

SEQ ID NO: 319633 - DNA, 1948 bp, Artificial Sequence
  derived and/or modified sequence
ggctgggagagcaagccggagagaagagagagcccggccagacccactgcgatgagacaggacgcgcccaagcccactcctgcagcctgccgctgctccggcctggcccggagggtgctgaccatcgccttcgccctgctcatcctgggcctcatgacctgggcctacgccgccggggtgccgctggcctccgatcgctacggcctcctggccttcggcctctacggggccttcctttcagcgcacctggtggcgcagagcctcttcgcgtacctggagcaccggcgggtggcggcggcggcgcgggggccgctggatgcagccaccgcgcgcagtgtggcgctgaccatctccgcctaccaggaggaccccgcgtacctgcgccagtgcctggcgtccgcccgcgccctgctgtacccgcgcgcgcggctgcgcgtcctcatggtggtggatggcaaccgcgccgaggacctctacatggtcgacatgttccgcgaggtcttcgctgacgaggaccccgccacgtacgtgtgggacggcaactaccaccagccctgggaacccgcggcggcgggcgcggtgggcgccggagcctatcgggaggtggaggcggaggatcctgggcggctggcagtggaggcgctggtgaggactcgcaggtgcgtgtgcgtggcgcagcgctggggcggcaagcgcgaggtcatgtacacagccttcaaggcgctcggagattcggtggactacgtgcagttttgcagggtctgtgactcggacacaaggttggaccccatggcactgctggagctcgtgcgggtactggacgaggacccccgggtaggggctgttggtggggacgtgcggatccttaaccctctggactcctgggtcagcttcctaagcagcctgcgatactgggtagccttcaatgtggagcgggcttgtcagagctacttccactgtgtatcctgcatcagcggtcctctaggtacacctccaggtcccgctgctactcagagacgccctcgtccttcctgcggtggctgagccagcagacacgctggtccaagtcgtacttccgtgagtggctgtacaacgcgctctggtggcaccggcaccatgcgtggatgacctacgaggcggtggtctccggcctgttccccttcttcgtggcggccactgtgctgcgtctgttctacgcgggccgcccttgggcgctgctgtgggtgctgctgtgcgtgcagggcgtggcactggccaaggcggccttcgcggcctggctgcggggctgcctgcgcatggtgcttctgtcgctctacgcgcccctctacatgtgtggcctcctgcctgccaagttcctggcgctagtcaccatgaaccagagtggctggggcacctcgggccggcggaagctggccgctaactacgtccctctgctgcccctggcgctctgggcgctgctgctgcttgggggcctggtccgcagcgtagcacacgaggccagggccgactggagcggcccttcccgcgcagccgaggcctaccacttggccgcgggggccggcgcctacgtgggctactgggtggccatgttgacgctgtactgggtgggcgtgcggaggctttgccggcggcggaccgggggctaccgcgtccaggtgtgagtccagccacgcggatgccgcctcaagggtcttcaggggaggccagaggagagctgctgggccccgagccacgaacttgctgggtggttctctgggcctcagtttccctcctctgcaaaacgagggggtcagcccaagattcttcagtctggactatattgggactgggacttctgggtctccagggagggtatttattggtcagggtgtgggatctgaggagtggagggaaagggtcctgctttctcctcgttcttatttaatctccatttctactgtgtgatcag

SEQ ID NO: 319634 - DNA, 1131 bp, Artificial Sequence
  derived and/or modified sequence
ggctgggagagcaagccggagagaagagagagcccggccagacccactgcgatgagacaggacgcgcccaagcccactcctgcagcctgccgctgctccggcctggcccggagggtgctgaccatcgccttcgccctgctcatcctgggcctcatgacctgggcctacgccgccggggtgccgctggcctccgatcgctacggcctcctggccttcggcctctacggggccttcctttcagcgcacctggtggcgcagagcctcttcgcgtacctggagcaccggcgggtggcggcggcggcgcgggggccgctggatgcagccaccgcgcgcagtgtggcgctgaccatctccgcctaccaggaggaccccgcgtacctgcgccagtgcctggcgtccgcccgcgccctgctgtacccgcgcgcgcggctgcgcgtcctcatggtggtggatggcaaccgcgccgaggacctctacatggtcgacatgttccgcgaggtcttcgctgacgaggaccccgccacgtacgtgtgggacggcaactaccaccagccctgggaacccgcggcggcgggcgcggtgggcgccggagcctatcgggaggtggaggcggaggatcctgggcggctggcagtggaggcgctggtgaggactcgcaggtgcgtgtgcgtggcgcagcgctggggcggcaagcgcgaggtcatgtacacagccttcaaggcgctcggagattcggtggactacgtgcaggtctgtgactcggacacaaggttggaccccatggcactgctggagctcgtgcgggtactggacgaggacccccgggtaggggctgttggtggggacgtgcggatccttaaccctctggactcctgggtcagcttcctaagcagcctgcgatactgggtagccttcaatgtggagcgggcttgtcagagctacttccactgtgtatcctgcatcagcggtcctctagaatcctgcccaggccccagggagcacgcgatgatgccctcattcctcgcccccgtgcaggtacacctccaggtcccgctgctactcagagacgccctcgtccttcctgcggtggctgagccagcagacacgctggtccaagtcgtacttccgtga

SEQ ID NO: 319635 - DNA, 558 bp, Artificial Sequence
  derived and/or modified sequence
atgttccgggaggtgtttgctgatgaagatcctgccacctacgtgtgggatggcaactaccaccagccctgggagcctgctgctgctggagctgtgggcgctggggcctaccgggaggtggaggctgaagatcctggccgcctggccgtggaggccctggtgaggacccggcgctgtgtgtgtgtggcccagcgctggggcggcaagcgggaggtgatgtacacagccttcaaggccctgggggacagcgtggactatgtgcagttctgccgggtgtgtgacagcgacacccggctggaccccatggccctgctggagctggtgcgggtgctggatgaggacccccgggtgggcgctgtgggcggagatgtgcgcatcctgaaccccctggacagctgggtgtccttcctgagcagcctgcgctactgggtggccttcaacgtggagcgggcctgccagagctacttccactgtgtgtcctgcatcagcggccccctgggcaccccacctggccctgctgccacccagaggcggccccggcccagctgtggcggctag

SEQ ID NO: 319636 - DNA, 645 bp, Artificial Sequence
  derived and/or modified sequence
atgttccgggaggtgtttgctgatgaagatcctgccacctacgtgtgggatggcaactaccaccagccctgggagcctgctgctgctggagctgtgggcgctggggcctaccgggaggtggaggctgaagatcctggccgcctggccgtggaggccctggtgaggacccggcgctgtgtgtgtgtggcccagcgctggggcggcaagcgggaggtgatgtacacagccttcaaggccctgggggacagcgtggactatgtgcaggtgtgtgacagcgacacccggctggaccccatggccctgctggagctggtgcgggtgctggatgaggacccccgggtgggcgctgtgggcggagatgtgcgcatcctgaaccccctggacagctgggtgtccttcctgagcagcctgcgctactgggtggccttcaacgtggagcgggcctgccagagctacttccactgtgtgtcctgcatcagcggccccctggagagctgccccggcccccgggagcacgccatgatgcccagcttcctggcccctgtgcaggtgcacctgcaggtgcccctgctgctgagagatgccctggtgctgcctgctgtggccgagcctgctgacaccctggtgcaggtggtgctgccctag

SEQ ID NO: 319637 - DNA, 558 bp, Artificial Sequence
  derived and/or modified sequence
atgttccgggaggtgttcgccgacgaggaccccgccacctacgtgtgggatggaaactaccatcagccgtgggagcccgccgccgccggtgccgttggggccggcgcatatagagaggtcgaggcagaagacccgggtaggttggccgtggaagcactggtgcgtacgcggcgctgcgtgtgcgtggcccagaggtggggaggaaaacgggaagtgatgtatactgcctttaaagccctgggagactctgtggactacgtgcaattttgcagagtctgcgattccgataccaggctggaccccatggcactcttagagttggtccgggtgcttgatgaggaccccagagtaggggccgtggggggagatgtaagaattttgaaccccctcgactcatgggtttccttcctatcatctctacggtactgggtcgcattcaacgtcgaacgggcttgccagagctactttcattgcgtaagctgcatctccggtccccttggtacacccccagggccagcggccacccagcgccgtccacgacctagctgcggcggctag

SEQ ID NO: 319638 - DNA, 645 bp, Artificial Sequence
  derived and/or modified sequence
atgttccgggaggtgttcgccgacgaggaccccgccacctacgtgtgggacgggaattatcatcaaccttgggaacctgccgccgctggggcagttggcgcaggggcataccgcgaagtggaagctgaggaccctggtcgtttggctgtcgaagcgcttgtgaggactcgccgttgtgtgtgcgttgcacagaggtgggggggtaagagagaggttatgtacaccgccttcaaagccctgggggacagtgttgactacgtccaggtgtgtgattctgacactagactggacccaatggctctgttagagctagtgcgggtactggacgaggacccccgtgtgggcgccgttggtggcgatgtgcggattctcaacccactggatagctgggtcagcttcctcagcagcctgcgctactgggtggctttcaatgtggagagggcctgtcagtcttactttcactgcgtgtcctgtatctccggacccctggagtcctgtccaggcccacgcgagcatgccatgatgccgtcctttctggctcctgtgcaggtgcacttacaggtgcctctcctgttgcgcgacgcactcgtgctgccggccgtggctgagcccgccgacaccctggtgcaggtggtgctcccatag

SEQ ID NO: 319639 - DNA, 558 bp, Artificial Sequence
  derived and/or modified sequence
atgttcagggaggtgtttgctgacgaggaccctgccacatatgtgtgggatggcaattatcatcaaccctgggagcctgctgctgcgggagcagtgggagccggagcttatagggaagtcgaggctgaagaccccggaagactggcggtggaagctcttgtccggactcgacgctgcgtctgcgtcgcccagcggtggggagggaaacgcgaggtcatgtacactgctttcaaagcccttggagatagcgttgattatgtgcagttttgtagagtgtgcgactctgatacaaggttagacccgatggcactattggaactggtgagggtgctcgatgaggacccgagggtgggcgctgtgggcggtgacgtgcgaatccttaatcctctcgattcctgggtctccttcctgtctagtttacggtattgggtcgcctttaacgtggagagagcatgtcaatcctatttccactgcgtgtcctgcatctccggtcctctgggcaccccaccaggacctgccgctacacagaggcgaccaagaccatcctgtggaggatag

SEQ ID NO: 319640 - DNA, 645 bp, Artificial Sequence
  derived and/or modified sequence
atgtttcgtgaggttttcgctgacgaggaccccgctacctatgtctgggacggtaactatcaccaaccatgggaacccgctgcagctggagctgtgggcgctggtgcttacagggaggtggaagctgaggatcctggcaggctggccgtcgaggctctggttcgcacacggagatgtgtttgcgtggcccagcggtggggaggcaagagagaggtcatgtacaccgcctttaaagccctgggagacagcgtagactacgtccaggtatgcgacagcgataccagactggatcccatggcgttgttagagctcgttcgggtcttggatgaggaccccagagtcggtgccgtagggggtgacgttcgcatcttgaaccctttagactcttgggtaagtttcctgagttccttgcggtattgggtcgcgtttaacgttgagcgcgcatgtcaaagttactttcattgtgtgtcatgtatcagcggaccactggagtcctgccccggtcctcgggagcacgccatgatgcccagtttcttagcccctgtccaggtgcacttgcaagtcccgcttctgctgagagatgccctggtgctgcccgcagtcgcggaaccagcagatactctggtgcaggtcgtcctaccatag

SEQ ID NO: 319641 - DNA, 558 bp, Artificial Sequence
  derived and/or modified sequence
atgttcagagaggtgttcgccgacgaggaccccgccacctacgtgtgggacggcaactaccaccagccctgggagcccgccgccgccggcgccgtgggcgccggcgcctacagagaggtggaggccgaggaccccggcagactggccgtggaggccctggtgagaaccagaagatgcgtgtgcgtggcccagagatggggcggcaagagagaggtgatgtacaccgccttcaaggccctgggcgacagcgtggactacgtgcagttctgcagagtgtgcgacagcgacaccagactggaccccatggccctgctggagctggtgagagtgctggacgaggaccccagagtgggcgccgtgggcggcgacgtgagaatcctgaaccccctggacagctgggtgagcttcctgagcagcctgagatactgggtggccttcaacgtggagagagcctgccagagctacttccactgcgtgagctgcatcagcggccccctgggcaccccccccggccccgccgccacccagagaagacccagacccagctgcggcggctag

SEQ ID NO: 319642 - DNA, 645 bp, Artificial Sequence
  derived and/or modified sequence
atgttcagagaggtgttcgccgacgaggaccccgccacctacgtgtgggacggcaactaccaccagccctgggagcccgccgccgccggcgccgtgggcgccggcgcctacagagaggtggaggccgaggaccccggcagactggccgtggaggccctggtgagaaccagaagatgcgtgtgcgtggcccagagatggggcggcaagagagaggtgatgtacaccgccttcaaggccctgggcgacagcgtggactacgtgcaggtgtgcgacagcgacaccagactggaccccatggccctgctggagctggtgagagtgctggacgaggaccccagagtgggcgccgtgggcggcgacgtgagaatcctgaaccccctggacagctgggtgagcttcctgagcagcctgagatactgggtggccttcaacgtggagagagcctgccagagctacttccactgcgtgagctgcatcagcggccccctggagagctgccccggccccagagagcacgccatgatgcccagcttcctggcccccgtgcaggtgcacctgcaggtgcccctgctgctgagagacgccctggtgctgcccgccgtggccgagcccgccgacaccctggtgcaggtggtgctgccctag

SEQ ID NO: 319643 - DNA, 1880 bp, Artificial Sequence
  derived and/or modified sequence
ctcttttcgatccgggacggccggtcaggctcgccgccgagctggagaactacgatgacccgcacaaaacccctgcctccccagttgtccacatcaggggcctgattgacggtgtggtggaagcagaccttgtggaggccttgcaggagtttggacccatcagctatgtggtggtaatgcctaaaaagagacaagcactggtggagtttgaagatgtgttgggggcttgcaacgcagtgaactacgcagccgacaaccaaatatacattgctggtcacccagcttttgtcaactactctaccagccagaagatctcccgccctggggactcggatgactcccggagcgtgaacagtgtgcttctctttaccatcctgaaccccatttattcgatcaccacggatgttctttacactatctgtaatccttgtggccctgtccagagaattgtcattttcaggaagaatggagttcaggcgatggtggaatttgactcagttcaaagtgcccagcgggccaaggcctctctcaatggggctgatatctattctggctgttgcactctgaagatcgaatacgcaaagcctacacgcttgaatgtgttcaagaatgatcaggatacttgggactacacaaaccccaatctcagtggacaaggtgaccctggcagcaaccccaacaaacgccagaggcagccccctctcctgggagatcaccccgcagaatatggagggccccacggtgggtaccacagccattaccatgatgagggctacgggccccccccacctcactacgaagggagaaggatgggtccaccagtggggggtcaccgtcggggcccaagtcgctacggcccccagtatgggcaccccccaccccctcccccaccacccgagtatggccctcacgccgacagccctgtgctcatggtctatggcttggatcaatctaagatgaactgtgaccgagtcttcaatgtcttctgcttatatggcaatgtggagaaggtgaaattcatgaaaagcaagccgggggccgccatggtggagatggctgatggctacgctgtagaccgggccattacccacctcaacaacaacttcatgtttgggcagaagctgaatgtctgtgtctccaagcagccagccatcatgcctggtcagtcatacgggttggaagacgggtcttgcagttacaaagacttcagtgaatcccggaacaatcggttctccaccccagagcaggcagccaagaaccgcatccagcaccccagcaacgtgctgcacttcttcaacgccccgctggaggtgaccgaggagaacttctttgagatctgcgatgagctgggagtgaagcggccatcttctgtgaaagtattctcaggcaaaagtgagcgcagctcctctggactgctggagtgggaatccaagagcgatgccctggagactctgggcttcctgaaccattaccagatgaaaaacccaaatggtccatacccttacactctgaagttgtgtttctccactgctcagcacgcctcctaattaggtgcctaggaagagtcccatctgagcaggaagacatttctctttcctttatgccattttttgtttttgttatttgcaaaagatcttgtattccttttttttttttttttttttttttttaaatgctaggtttgtagaggcttacttaaccttaatggaaacgctggaaatctgcagggggagggagaggggaactgttatctcccaagattaaccttcacttttaaaaaattattgtacatgtgatttttttttttcctgttcatacatttgtgctgcccatgtactcttggcacatttcaataaaattgtttggaaaataaacacagc

SEQ ID NO: 319644 - DNA, 1749 bp, Artificial Sequence
  derived and/or modified sequence
tcttttcgatccgggacggccggtcaggctcgccgccgagctggagaactacgatgacccgcacaaaacccctgcctccccagttgtccacatcaggggcctgattgacggtgtggtggaagcagaccttgtggaggccttgcaggagtttggacccatcagctatgtggtggtaatgcctaaaaagagacaagcactggtggagtttgaagatgtgttgggggcttgcaacgcagtgaactacgcagccgacaaccaaatatacattgctggtcacccagcttttgtcaactactctaccagccagaagatctcccgccctggggactcggatgactcccggagcgtgaacagtgtgcttctctttaccatcctgaaccccatttattcgatcaccacggatgttctttacactatctgtaatccttgtggccctgtccagagaattgtcattttcaggaagaatggagttcaggcgatggtggaatttgactcagttcaaagtgcccagcgggccaaggcctctctcaatggggctgatatctattctggctgttgcactctgaagatcgaatacgcaaagcctacacgcttgaatgtgttcaagaatgatcaggatacttgggactacacaaaccccaatctcagtggacaaggtgaccctggcagcaaccccaacaaacgccagaggcagccccctctcctgggagatcaccccgcagaatatggagggccccacggtgggtaccacagccattaccatgatgagggctacgggccccccccacctcactacgaagggagaaggatgggtccaccagtggggggtcaccgtcggggcccaagtcgctacggcccccagtatgggcaccccccaccccctcccccaccacccgagtatggccctcacgccgacagccctgtgctcatggtctatggcttggatcaatctaagatgaactgtgaccgagtcttcaatgtcttctgcttatatggcaatgtggagaaggtgaaattcatgaaaagcaagccgggggccgccatggtggagatggctgatggctacgctgtagaccgggccattacccacctcaacaacaacttcatgtttgggcagaagctgaatgtctgtgtctccaagcagccagccatcatgcctggtcagtcatacgggttggaagacgggtcttgcagttacaaagacttcagtgaatcccggaacaatcggttctccaccccagagcaggcagccaagaaccgcatccagcaccccagcaacgtgctgcacttcttcaacgccccgctggaggtgaccgaggagaacttctttgagatctgcgatgagctgggagtgaagcggccatcttctgtgaaagtattctcaggcaaaagtgagcgcagctcctctggactgctggagtgggaatccaagagcgatgccctggagactctgggcttcctgaaccattaccagatgaaaaacccaaatggtccatacccttacactctgaagttgtgtttctccactgctcagcacgcctcctaattaggtgcctaggaagagtcccatctgagcaggaagacatttctctttcctttatgccattttttgtttttgttatttgcaaaagattaaccttcacttttaaaaaattattgtacatgtgatttttttttttcctgttcatacatttgtgctgcccatgtactcttggcacatttcaataaaattgtttggaaaataaacac

SEQ ID NO: 319645 - DNA, 1371 bp, Artificial Sequence
  derived and/or modified sequence
atgcccaagaagcgtcaggcactcgtggaatttgaagatgtgctcggcgcttgtaacgcagtgaattacgcagccgacaaccagatatatatcgcaggacatcctgcttttgtaaactattctacctcccagaagatttcgaggccaggcgatagtgacgactctaggagtgtaaatagcgttttattatttacaattctcaaccccatttacagcatcaccacagacgtactgtataccatttgtaacccctgcggcccagttcaacggattgtgattttccgtaaaaacggcgtgcaggctatggtcgagttcgattctgttcaaagtgcgcaacgggccaaggccagtctgaatggcgcagacatctacagtggttgctgcactctcaaaatcgaatatgccaagccaacccggctaaatgtatttaagaacgaccaggacacatgggactacaccaacccaaacctgagcgggcaaggagatccaggaagcaatcccaacaaacgccaacgtcagccccctctgctgggcgaccacccggccgagtacggggggccccacggcgggtatcattcgcactatcacgatgagggctacggcccacctccacctcactacgagggccggagaatggggcctccagtaggaggtcatagaaggggaccctcccggtatgggcctcaatacggacatcctcctcccccaccccccccgcccgaatacgggccccatgcggacagtccagttctcatggtatatggcttagatcagagcaagatgaattgtgaccgggtattcaatgttttttgtctgtacgggaacgtggagaaagtgaaatttatgaagtcaaagcccggggctgcgatggtggaaatggctgacgggtacgctgtggacagagccattactcacttaaacaataacttcatgttcggacagaagctgaatgtctgtgtgtccaaacagcctgccatcatgccggggcaatcatatgggctggaagacggaagttgctcctataaggacttctctgagagtaggaataatagattttccacaccggagcaggccgccaagaaccggatccagcacccctccaatgttctgcacttcttcaatgcaccactggaggtgacagaggagaacttcttcgagatttgtgatgagctgggagtaaaaaggccctcaagtgtcaaggtgttttccggaaaaagcgaacgttccagttcaggcctgttggaatgggaatccaagtcagacgcgctcgagactttgggattcctgaaccactaccaaatgaagaatcctaatggcccctatccttacactctgaagttgtgtttttcaacggcccagcacgcctcctag

SEQ ID NO: 319646 - DNA, 1371 bp, Artificial Sequence
  derived and/or modified sequence
atgcccaagaaacggcaagcattagttgaattcgaggatgtcttgggcgcttgcaacgctgttaattatgccgccgataaccagatctacatcgctggacacccggcttttgtaaactatagtacctcacagaagattagtcggcctggtgactccgacgatagccgctcggttaatagcgtgctactattcacaattctcaatcccatctactcaattactaccgacgtgctgtacactatttgcaatccttgcggacctgtacagcggattgtcatctttcgcaagaacggagtgcaggctatggtcgagtttgatagcgtccagtctgcccagcgggccaaggcatctctgaatggggccgacatctatagcggctgctgcacgctgaagatcgagtatgcaaagccaacgcgccttaacgtttttaagaacgatcaggatacatgggattatacaaatccaaacttgtcagggcagggggatcctggatcaaatccaaataaaagacaacgccagccgccactgttaggggatcaccccgccgaatatgggggcccccacggaggataccactcacattatcacgacgaaggctatgggcctcctcctccacactatgaggggcgccgtatgggacccccagtaggaggacatcgtagaggaccaagccggtatggcccgcaatacggccacccacctcctcctccaccccccccggaatacggtccccacgccgacagcccagtgcttatggtgtacgggctggaccagagcaagatgaactgcgatagagtgtttaacgtattttgcctttacggaaatgttgagaaagtgaagtttatgaaaagcaagcccggggccgcaatggtggaaatggcagacgggtacgcagttgaccgggcgatcacacacctcaacaacaacttcatgtttggacagaagcttaatgtctgcgtgagcaaacagccagccattatgcccggccagagctacgggctggaagatgggtcctgctcctacaaggacttctccgaatcacggaataataggttctctactcctgaacaggctgcgaagaatcggattcagcatccttcaaatgtcctgcattttttcaatgcaccactcgaagtgacggaggagaatttcttcgagatctgcgatgaactgggggtgaaaagaccctcctcagtcaaagtgttttcaggcaaatcagagagatcctcgagcggtctgttagaatgggaaagtaagtctgatgcactggagacactgggcttccttaatcattaccagatgaagaatcctaatgggccttatccgtatactttgaaactgtgcttcagtacagcacagcatgcttcctag

SEQ ID NO: 319647 - DNA, 1371 bp, Artificial Sequence
  derived and/or modified sequence
atgcccaagaagaggcaggccctggtggagtttgaagatgtgctgggcgcctgcaatgctgtgaactatgctgctgacaaccagatctacatcgccggccacccagcctttgtgaactacagcaccagccagaagatcagcaggcctggggacagtgatgacagccgctctgtgaacagcgtgctgctcttcaccatcctgaaccccatctacagcatcaccacagatgtgctgtacaccatctgcaacccctgtggccctgtgcagagaattgtcatcttcaggaagaatggagtgcaggccatggtggagtttgattctgtgcagagcgcccagagggccaaggccagcctgaatggagctgacatctacagcggctgctgcaccctgaagattgaatatgccaagcccacccggctgaatgtgttcaagaatgaccaggacacctgggactacaccaaccccaacctgagcggccagggcgaccccggcagcaaccccaacaagaggcagaggcagccccccctgctgggggaccacccagcagaatatggaggcccccacggcggctaccacagccactaccatgatgagggctacggccccccaccaccccactatgagggccgcaggatgggcccccctgtgggcggccaccggcggggccccagccgctatggcccccagtatggccaccccccacctcctcctcctcctccagaatatggcccccacgccgacagccctgtgctgatggtgtatggcctggaccagagcaagatgaactgtgacagagtcttcaacgtgttctgcctgtatggaaatgtggagaaggtgaagttcatgaagagcaagccaggggccgccatggtggagatggctgatggctatgctgtggaccgggccatcacccacctgaacaacaacttcatgtttggccagaagctgaatgtgtgtgtgtccaagcagcctgccatcatgcctggccagagctatggcctggaggatggcagctgcagctacaaggacttcagcgagagcaggaacaaccgcttcagcaccccagagcaggccgccaagaaccgcatccagcaccccagcaatgtgctgcacttcttcaatgcccccctggaggtgacagaggagaacttctttgagatctgtgatgagctgggcgtgaagaggcccagctctgtgaaggtgttttctgggaagtctgagaggagcagcagcggcctgctggagtgggagagcaagagtgatgccctggagaccctgggcttcctgaaccactaccagatgaagaaccccaacggcccctacccctacaccctgaagctgtgcttcagcacagcccagcacgccagctag

SEQ ID NO: 319648 - DNA, 1371 bp, Artificial Sequence
  derived and/or modified sequence
atgcccaagaagcggcaggccctggtggagttcgaggacgtgctgggggcgtgcaacgctgtgaactatgccgccgataaccagatttatatagccggtcacccagctttcgttaattattctacctcccagaaaattagcagacccggggatagcgatgactcccggtcagttaacagcgtgctcctgttcaccattctaaaccccatctactccataacaacagacgtgctgtacaccatctgtaacccgtgcggaccggtgcaaaggatcgtgattttccgtaagaacggggttcaggcaatggtggaatttgacagtgtgcaaagcgcacagagagctaaggcctctctaaacggtgctgacatatactccggatgctgtactctgaagatagagtatgccaaaccaaccaggctgaatgtgttcaaaaacgatcaggatacttgggattacaccaatcccaacctctccggtcagggcgatcctggaagtaaccctaacaagagacagcgccaaccacctctcttgggtgatcacccggcggaatacgggggaccacacggggggtaccacagccactatcatgacgagggctacggccccccacctccacactacgaaggccgcagaatgggaccccccgtaggtggacaccgcaggggaccatcacggtacggaccccaatatgggcacccgccacctcccccgcccccaccagaatacggtccacacgccgattcccccgtcctgatggtgtacggcttagaccaatctaaaatgaactgcgaccgggtgtttaatgttttctgtctgtacggcaatgttgaaaaggtcaaatttatgaagtcaaagcctggcgctgccatggtggaaatggcggatgggtatgctgtggatagagcaattactcacctgaataataattttatgttcggtcagaaactaaacgtgtgtgtctccaagcagcctgcgattatgcccggacagtcctacgggctcgaggacggatcatgtagttataaagacttctccgagtcacggaataataggttttcgactccggaacaagccgcaaaaaaccggatccagcatccatcaaacgtactgcacttcttcaacgcacctctcgaagtcactgaggaaaactttttcgaaatctgtgacgagctgggtgtcaagcgaccgagtagcgttaaggtgttcagcggcaagtccgagaggtcttcttccgggctactggaatgggagtctaagtctgacgccctcgagactttgggctttctgaatcattatcagatgaagaacccaaatgggccctacccctacactcttaaactgtgttttagcacagcgcagcacgcatcctag

SEQ ID NO: 319649 - DNA, 1371 bp, Artificial Sequence
  derived and/or modified sequence
atgcccaagaagcggcaggccctggtggagttcgaggacgtgctgggggcttgtaatgccgtgaactatgccgccgataaccagatctatatcgcaggacaccctgctttcgtgaactactccacaagccagaaaatatctaggccaggtgacagtgacgactctagatctgtgaatagtgtgctgttatttaccatattaaatcctatatattccatcaccaccgatgtcctctatactatctgcaatccctgtggaccagtgcagagaattgttattttccgaaaaaacggagtgcaggctatggtcgagtttgatagcgtccagagcgcacagagggctaaggcttcactgaatggcgcagacatctacagtgggtgctgtactctcaagatcgagtatgccaaaccgacccggcttaacgtgtttaaaaatgatcaggacacttgggattacactaaccctaatctgagtgggcagggggatcctggttcaaatccgaacaagaggcagcgccaacccccgttgctgggagaccaccctgcggaatacgggggaccgcatggaggctaccattcccactatcatgatgaagggtacggaccccctccacctcactacgaaggcaggaggatggggcctccggtgggcggacatcggaggggaccttccaggtacggccctcagtacggacatcctccccctccgccccctcccccagaatacggcccccacgctgactcgcccgttctgatggtttacggattagaccagagcaagatgaactgcgaccgagtcttcaacgtgttctgtctgtacggaaacgtggagaaggtcaagttcatgaagtcaaaaccaggggctgcaatggtcgagatggcagatgggtatgccgtggaccgagcaataacacatctgaacaacaactttatgtttggccagaagttgaacgtgtgcgtctcgaaacagcctgctatcatgccggggcaatcctatgggttagaagacggatcctgcagctataaagacttttctgaaagcagaaacaacagatttagcaccccagaacaggccgcaaaaaaccgcatccaacacccttccaatgtgctccatttttttaacgctccattagaagtgaccgaggagaacttcttcgaaatttgcgatgaacttggtgtgaagagacccagcagcgttaaagtcttttccggcaagtcggagcgcagcagtagcgggctgctcgagtgggaatcaaaaagcgacgccctggagactttaggctttctgaaccattaccaaatgaaaaaccctaacggaccctacccatataccctaaaattatgcttttctaccgcccagcatgctagttag

SEQ ID NO: 319650 - DNA, 1371 bp, Artificial Sequence
  derived and/or modified sequence
atgcctaagaagcggcaggcccttgtcgagttcgaagacgtactaggggcttgtaacgcagtgaattacgctgctgataatcagatatacatcgctggccacccagccttcgtgaactactctacttcgcagaaaataagtagacctggagacagcgacgattctagaagcgttaacagcgtgttattgtttactatccttaatcccatctattctataactaccgacgttctgtataccatatgcaatccatgcggccctgtccagaggattgttatctttcgaaagaatggagtacaagctatggtcgagttcgatagcgtgcagtccgcccaaagagccaaagcgtcactgaatggcgctgacatttactcaggctgctgtaccctaaaaatcgaatacgccaagcccactcgcctcaacgtctttaagaatgaccaggacacctgggattataccaatcctaacctaagcggacaaggggatcctggatcgaatccaaataaaagacagcggcagccaccgttgctgggagatcatcccgctgagtacggaggaccccacggcggttaccacagtcactaccatgatgaaggctatgggcctcccccaccccattacgagggacgtcgcatgggtccgccagtcggcggacataggaggggacctagtaggtacggaccccagtatggccatccacccccaccccctccacccccagaatacggccctcacgccgacagcccagtgctgatggtctacggcttagatcagtccaagatgaactgtgatagggtcttcaatgtattctgtctgtatggcaatgtggaaaaggttaaatttatgaaaagcaagccaggcgcagccatggttgaaatggccgacggctatgccgtggatagggcaataactcatttgaataataattttatgttcgggcagaagctgaacgtctgcgtctcaaagcagccagctataatgccgggacagtcatatggcctggaagacggatcctgcagttacaaagacttttctgagagcaggaataatcggttctcgaccccagaacaagcagctaagaaccgcatccagcatcccagtaatgttctgcacttctttaatgcccctttagaggtaaccgaagagaatttctttgagatttgcgacgaacttggggtcaagcggccttcaagtgttaaggtcttttccggtaagtcggaaagaagctcatcaggactgcttgagtgggaatccaagagtgatgctctggagacactgggatttttgaatcattatcagatgaaaaatccgaatggtccatatccctacaccttaaaactgtgcttctccactgcacagcatgcctcttag

SEQ ID NO: 319651 - DNA, 1371 bp, Artificial Sequence
  derived and/or modified sequence
atgcccaaaaaacggcaggcactagtcgagtttgaggacgttttgggcgcttgtaatgctgtgaattacgctgccgataatcagatatatatcgcaggacacccagcttttgtgaattactccacttctcagaaaatatcaagacccggagattccgacgattcccgaagcgtgaattcggttctcttgtttaccattctgaatccgatttactctatcacaactgatgtgttatatactatttgtaacccctgcgggccagtgcagaggatcgtgatatttaggaagaacggggtgcaggcgatggttgagtttgactcagtccaaagcgcacaaagagccaaggcatctctgaacggtgccgacatttactccggctgctgtactttgaagattgagtacgcgaagccaacacgcctcaacgtcttcaaaaacgaccaggatacatgggactacacaaatcctaacttgtcgggccaaggagatccagggagtaatcccaataagagacagaggcaacccccactcctaggcgaccacccagctgagtacggtggtccacacggcggttatcactcacattaccacgacgagggttatgggccacctcctcctcactatgaaggccgacggatgggccctcccgtgggcggacaccgcagaggacctagcagatatggcccacaatacggacatccccctccccctcccccaccgcctgagtacggacctcacgcagattcacccgtgctaatggtatatggcttggaccagagtaaaatgaactgcgatagagtgtttaacgttttttgcctatatggaaatgttgaaaaggtgaaattcatgaaatcgaaacctggcgctgccatggtcgagatggcggatgggtacgcagtggatcgcgctataacacacctcaataataacttcatgtttggccaaaaactgaacgtctgtgttagcaagcagcccgctatcatgcctggtcaaagttacggactcgaagacggctcatgcagttataaggatttttcggagagtcgcaataacaggttttcaacaccagagcaagcagccaaaaaccgcatacagcatccgagtaacgttctacatttttttaatgcccctctggaggtcaccgaagagaacttctttgaaatatgtgatgagttaggtgtcaagaggccatccagcgtcaaagttttttccgggaaatctgagcggtcgtcatctggtctccttgaatgggagagcaaatctgacgctctcgaaactctaggatttctgaaccattaccagatgaagaaccccaatggaccatacccttacactcttaagctgtgcttttccactgcccaacacgcaagctag

SEQ ID NO: 319652 - DNA, 1371 bp, Artificial Sequence
  derived and/or modified sequence
atgcccaagaagagacaggccctggtggagttcgaggacgtgctgggcgcctgcaacgccgtgaactacgccgccgacaaccagatctacatcgccggccaccccgccttcgtgaactacagcaccagccagaagatcagcagacccggcgacagcgacgacagcagaagcgtgaacagcgtgctgctgttcaccatcctgaaccccatctacagcatcaccaccgacgtgctgtacaccatctgcaacccctgcggccccgtgcagagaatcgtgatcttcagaaagaacggcgtgcaggccatggtggagttcgacagcgtgcagagcgcccagagagccaaggccagcctgaacggcgccgacatctacagcggctgctgcaccctgaagatcgagtacgccaagcccaccagactgaacgtgttcaagaacgaccaggacacctgggactacaccaaccccaacctgagcggccagggcgaccccggcagcaaccccaacaagagacagagacagccccccctgctgggcgaccaccccgccgagtacggcggcccccacggcggctaccacagccactaccacgacgagggctacggccccccccccccccactacgagggcagaagaatgggcccccccgtgggcggccacagaagaggccccagcagatacggcccccagtacggccacccccccccccccccccccccccccgagtacggcccccacgccgacagccccgtgctgatggtgtacggcctggaccagagcaagatgaactgcgacagagtgttcaacgtgttctgcctgtacggcaacgtggagaaggtgaagttcatgaagagcaagcccggcgccgccatggtggagatggccgacggctacgccgtggacagagccatcacccacctgaacaacaacttcatgttcggccagaagctgaacgtgtgcgtgagcaagcagcccgccatcatgcccggccagagctacggcctggaggacggcagctgcagctacaaggacttcagcgagagcagaaacaacagattcagcacccccgagcaggccgccaagaacagaatccagcaccccagcaacgtgctgcacttcttcaacgcccccctggaggtgaccgaggagaacttcttcgagatctgcgacgagctgggcgtgaagagacccagcagcgtgaaggtgttcagcggcaagagcgagagaagcagcagcggcctgctggagtgggagagcaagagcgacgccctggagaccctgggcttcctgaaccactaccagatgaagaaccccaacggcccctacccctacaccctgaagctgtgcttcagcaccgcccagcacgccagctag

SEQ ID NO: 319653 - DNA, 357 bp, Artificial Sequence
  derived and/or modified sequence
atgagctgccaacaatcccagcaacagtgccagcctccgcctaagtgcacaccaaagtgtccaccaaagtgccccactccaaaatgcccgccgaagtgccctccaaagtgcccacctgtgtcttcatgctgctccgtctcctcaggtggatgctgtggcagctcatccggcggatcttgcggatcctccagcgggggctgctgctcgagcggaggcggaggctgttgcctgtctcatcaccgccaccataggtcacacagacacagacctcagtctagcgattgctgtagtcagccttctggcggttcctcttgttgtggaggcggatccggacagcatagcggcggctgctgttag

SEQ ID NO: 319654 - protein, 179 aa, Artificial Sequence
  derived and/or modified sequence
MPKKRQALVEFEDVLGACNAVNYAADNQIYIAGHPAFVNYSTSQKISRPGDSDDSRSVNSVLLFTILNPIYSITTDVLYTICNPCGPVQRIVIFRKNGVQAMVEFDSVQSAQRAKASLNGADIYSGCCTLKIEYAKPTRLNVFKNDQDTWDYTNPNLSGQGSQCMFDGTPSFRTVLTHC

SEQ ID NO: 319655 - protein, 240 aa, Artificial Sequence
  derived and/or modified sequence
MVKMAAAGGGGGGGRYYGGGSEGGRAPASPVVHIRGLIDGVVEADLVEALQEFGPISYVVVMPKKRQALVEFEDVLGACNAVNYAADNQIYIAGHPAFVNYSTSQKISRPGDSDDSRSVNSVLLFTILNPIYSITTDVLYTICNPCGPVQRIVIFRKNGVQAMVEFDSVQSAQRAKASLNGADIYSGCCTLKIEYAKPTRLNVFKNDQDTWDYTNPNLSGQGSQCMFDGTPSFRTVLTHC

SEQ ID NO: 319656 - DNA, 540 bp, Artificial Sequence
  derived and/or modified sequence
atgccgaaaaagcgccaggccctagtcgagtttgaggatgtcctgggggcttgtaacgccgtcaattacgccgcagataatcagatttacatcgcaggtcaccctgccttcgtgaactattcaactagccaaaagatatctcggccaggggacagtgacgacagtcgcagcgtcaactccgttctactttttaccattttgaaccctatttacagtatcaccactgatgtcctgtatacaatttgcaacccttgcggaccggtacagaggatagttatttttagaaagaacggcgtgcaggctatggttgagtttgacagtgtccagagcgcccagcgggctaaggccagtctaaacggcgctgatatctacagcggttgttgcacactgaaaatagagtacgcgaaaccaacccgcctcaacgtcttcaagaacgatcaagacacttgggactacacgaacccaaacctgtccggtcaaggttcccagtgcatgtttgacggaaccccctcgttcaggacggtgttgacgcactgctag

SEQ ID NO: 319657 - DNA, 723 bp, Artificial Sequence
  derived and/or modified sequence
atggtaaagatggctgctgccggcgggggcggtggcggtgggaggtattatggtgggggtagtgaaggagggagggcccccgcgtcacctgtggtacatatccgcggactaatagatggagtggtcgaagccgacctcgtggaagccttacaggaattcgggcctattagctatgtcgtcgtgatgcccaagaaaagacaggcgctcgtggagttcgaggatgtgttaggagcctgtaacgccgtcaattacgcagcagacaatcagatatatatcgctggacatccggcgttcgtgaattactctaccagccagaagatatcaaggcccggagattcagatgactctcggtcagtgaactctgtgcttctgttcactattctaaacccaatatactccataacaacagacgttttgtacactatctgtaacccttgcgggccagttcagcggatcgtgatctttcgcaaaaacggcgtgcaagctatggtcgagttcgactccgtgcaatcggctcagcgggcaaaggcgagcttgaatggtgcggacatttatagcgggtgctgtacccttaaaattgagtacgccaagccaacccggttgaatgtgttcaagaatgaccaggatacctgggattacaccaaccctaacctcagcggccagggtagccaatgcatgtttgacggaacaccaagcttcaggactgtgctgacacattgttag

SEQ ID NO: 319658 - DNA, 540 bp, Artificial Sequence
  derived and/or modified sequence
atgcccaagaagaggcaggccctggtggagtttgaagatgtgctgggcgcctgcaatgctgtgaactatgctgctgacaaccagatctacatcgccggccacccagcctttgtgaactacagcaccagccagaagatcagcaggcctggggacagtgatgacagccgctctgtgaacagcgtgctgctcttcaccatcctgaaccccatctacagcatcaccacagatgtgctgtacaccatctgcaacccctgtggccctgtgcagagaattgtcatcttcaggaagaatggagtgcaggccatggtggagtttgattctgtgcagagcgcccagagggccaaggccagcctgaatggagctgacatctacagcggctgctgcaccctgaagattgaatatgccaagcccacccggctgaatgtgttcaagaatgaccaggacacctgggactacaccaaccccaacctgagcggccagggcagccagtgcatgtttgatggcacccccagcttcagaacagtgctgacccactgctag

SEQ ID NO: 319659 - DNA, 723 bp, Artificial Sequence
  derived and/or modified sequence
atggtgaagatggctgctgctgggggcggcggcggcggcggccgctactatggaggcggcagcgagggcggccgggccccagccagccctgtggtgcacatccggggcctgattgatggagtggtggaggccgacctggtggaggccctgcaggagtttggccccatctcctatgtggtggtgatgcccaagaagaggcaggccctggtggagtttgaagatgtgctgggcgcctgcaatgctgtgaactatgctgctgacaaccagatctacatcgccggccacccagcctttgtgaactacagcaccagccagaagatcagcaggcctggggacagtgatgacagccgctctgtgaacagcgtgctgctcttcaccatcctgaaccccatctacagcatcaccacagatgtgctgtacaccatctgcaacccctgtggccctgtgcagagaattgtcatcttcaggaagaatggagtgcaggccatggtggagtttgacagcgtgcagagcgcccagagggccaaggccagcctgaatggagctgacatctacagcggctgctgcaccctgaagattgaatatgccaagcccacccggctgaatgtgttcaagaatgaccaggacacctgggactacaccaaccccaacctgagcggccagggcagccagtgcatgtttgatggcacccccagcttcagaacagtgctgacccactgctag

SEQ ID NO: 319660 - DNA, 540 bp, Artificial Sequence
  derived and/or modified sequence
atgcccaagaagcggcaggccctggtggagttcgaggacgtgctgggcgcctgcaacgccgtcaattacgccgctgataaccaaatctacatagccgggcatcctgctttcgtgaactatagcaccagtcagaaaattagccgcccaggcgattctgatgatagccggtccgtcaattcagtgcttcttttcacaattctcaatcctatatattcaattactactgacgttctctacaccatatgcaacccatgtgggccggtgcagcggatcgttatttttaggaagaatggggtgcaggccatggtggagttcgattctgtgcaatcagctcaaagagcgaaggccagcctcaacggtgccgatatatacagcggttgctgtaccctgaagatcgagtatgccaagcccacaagattaaatgtatttaaaaatgaccaggacacatgggattacaccaacccaaatctgtccgggcaaggtagtcagtgcatgttcgacggcactccaagcttccggactgtcctgactcactgctag

SEQ ID NO: 319661 - DNA, 723 bp, Artificial Sequence
  derived and/or modified sequence
atggtgaagatggccgccgccggcggcggcggcggcggcggccggtattatggcggagggtctgaggggggtagggccccagcatctcccgtggtgcacatccggggtctgatcgatggcgtagtcgaggccgatctagtagaggccctgcaggagtttggaccgatatcttatgttgtcgtgatgccaaagaagcgtcaagccctagtcgagtttgaagacgtgctgggcgcctgcaatgcagtgaattatgcggccgacaaccaaatctacattgcaggccaccctgctttcgtcaattatagcacatcacagaaaattagtaggccaggcgatagtgacgactctcggtccgtgaactccgtgttgctttttacaattctgaatccaatatatagcatcactacagatgttctctatacaatctgtaacccttgcggtcccgttcagcggatagtgattttccgcaagaatggtgttcaagcaatggtggaattcgacagtgtgcagtcagcgcagagagccaaggcttctttgaacggtgcagatatatattctggttgttgcaccttaaagatagaatatgccaaaccgacgcgcctcaatgtttttaagaacgatcaggacacttgggactacactaatccgaacctgtcaggccaggggagtcagtgtatgttcgatggcaccccctcttttcgcaccgtgctaacccactgttag

SEQ ID NO: 319662 - DNA, 540 bp, Artificial Sequence
  derived and/or modified sequence
atgcccaaaaaacggcaggctctcgtggaattcgaagacgtactgggcgcatgcaacgctgtcaattatgcagctgacaatcagatctacatagcaggtcatcccgcattcgttaattattcaacaagtcaaaagatttcaaggcccggtgatagcgacgacagccgcagtgtgaactccgttctactctttacgattctgaacccgatttactccattacaactgacgtcctgtatacaatctgcaatccctgtggccctgtacagaggattgtaatttttagaaagaacggcgttcaggcaatggtggagtttgattcagtccaaagcgcccagcgggcaaaggccagcttgaacggggcagacatttattccggttgctgcacccttaaaatagagtatgcaaagcctacacgcctgaatgtgtttaagaatgatcaagatacctgggactacacaaacccaaatctaagcggacagggttcgcagtgcatgtttgatggcacaccttcctttcgcactgtgctgacacactgctag

SEQ ID NO: 319663 - DNA, 723 bp, Artificial Sequence
  derived and/or modified sequence
atggtcaaaatggctgctgcgggtgggggaggcggaggcggacggtactacggtggcggtagcgaaggcggacgggctccggcttcccccgtggtacacattagggggctcattgacggtgtcgtggaggccgacttggtggaggccctacaagaattcggaccgatttcgtacgtggtggtgatgccaaaaaagcgacaagcgctggtagaatttgaagatgtgttgggcgcttgtaacgctgttaattatgcggcagacaatcagatttacattgctggacaccccgcatttgtgaactacagcacatctcagaagattagccgacccggtgactccgatgacagcagatccgtaaactctgtgcttctctttaccatactgaaccctatttattcaatcaccacagacgtgctctacactatatgcaacccctgcggtcctgtgcagaggattgttatcttccgaaaaaacggcgtgcaggccatggtggagttcgattccgtgcaaagtgcccagagagccaaagcatccttgaatggcgcagacatatactctggctgttgtacattaaaaatagaatacgctaaacctacacggcttaacgtgtttaagaatgatcaggacacctgggattacacaaatcctaatctatccggacagggctctcaatgtatgtttgatgggactccatccttccgcaccgtcctgactcactgttag

SEQ ID NO: 319664 - DNA, 540 bp, Artificial Sequence
  derived and/or modified sequence
atgcccaagaagagacaggccctggtggagttcgaggacgtgctgggcgcctgcaacgccgtgaactacgccgccgacaaccagatctacatcgccggccaccccgccttcgtgaactacagcaccagccagaagatcagcagacccggcgacagcgacgacagcagaagcgtgaacagcgtgctgctgttcaccatcctgaaccccatctacagcatcaccaccgacgtgctgtacaccatctgcaacccctgcggccccgtgcagagaatcgtgatcttcagaaagaacggcgtgcaggccatggtggagttcgacagcgtgcagagcgcccagagagccaaggccagcctgaacggcgccgacatctacagcggctgctgcaccctgaagatcgagtacgccaagcccaccagactgaacgtgttcaagaacgaccaggacacctgggactacaccaaccccaacctgagcggccagggcagccagtgcatgttcgacggcacccccagcttcagaaccgtgctgacccactgctag

SEQ ID NO: 319665 - DNA, 723 bp, Artificial Sequence
  derived and/or modified sequence
atggtgaagatggccgccgccggcggcggcggcggcggcggcagatactacggcggcggcagcgagggcggcagagcccccgccagccccgtggtgcacatcagaggcctgatcgacggcgtggtggaggccgacctggtggaggccctgcaggagttcggccccatcagctacgtggtggtgatgcccaagaagagacaggccctggtggagttcgaggacgtgctgggcgcctgcaacgccgtgaactacgccgccgacaaccagatctacatcgccggccaccccgccttcgtgaactacagcaccagccagaagatcagcagacccggcgacagcgacgacagcagaagcgtgaacagcgtgctgctgttcaccatcctgaaccccatctacagcatcaccaccgacgtgctgtacaccatctgcaacccctgcggccccgtgcagagaatcgtgatcttcagaaagaacggcgtgcaggccatggtggagttcgacagcgtgcagagcgcccagagagccaaggccagcctgaacggcgccgacatctacagcggctgctgcaccctgaagatcgagtacgccaagcccaccagactgaacgtgttcaagaacgaccaggacacctgggactacaccaaccccaacctgagcggccagggcagccagtgcatgttcgacggcacccccagcttcagaaccgtgctgacccactgctag

SEQ ID NO: 319666 - DNA, 995 bp, Artificial Sequence
  derived and/or modified sequence
agtgtctgctcttttcgatccgggacggccggtcaggctcgccgccgagctggagaactacgatgacccgcacaaaacccctgcctccccagttgtccacatcaggggcctgattgacggtgtggtggaagcagaccttgtggaggccttgcaggagtttggacccatcagctatgtggtggtaatgcctaaaaagagacaagcactggtggagtttgaagatgtgttgggggcttgcaacgcagtgaactacgcagccgacaaccaaatatacattgctggtcacccagcttttgtcaactactctaccagccagaagatctcccgccctggggactcggatgactcccggagcgtgaacagtgtgcttctctttaccatcctgaaccccatttattcgatcaccacggatgttctttacactatctgtaatccttgtggccctgtccagagaattgtcattttcaggaagaatggagttcaggcgatggtggaatttgactcagttcaaagtgcccagcgggccaaggcctctctcaatggggctgatatctattctggctgttgcactctgaagatcgaatacgcaaagcctacacgcttgaatgtgttcaagaatgatcaggatacttgggactacacaaaccccaatctcagtggacaagggtcgcagtgtatgtttgatgggacgccatctttcagaactgtgctaactcactgttgaagcgtccaatggtgaccctggcagcaaccccaacaaacgccagaggcagccccctctcctgggagatcaccccgcagaatatggagggccccacggtgggtaccacagccattaccatgatgagggctacgggccccccccacccccaccacccgagtatggccctcacgccgacagccctgtgctcatggtctatggcttggatcaatctaagatgaactgtgaccgagtcttcaatgtcttctgcttatatggcaatgtggagaaggtg

SEQ ID NO: 319667 - DNA, 1000 bp, Artificial Sequence
  derived and/or modified sequence
aagcggcgtcggcggctggagcagaggcagcagccggacgagcagcggaggcggtcgggagcgatggtgaagatggcggcggcgggcggcggaggcggcggtggccgctactacggcggcggcagtgagggcggccgggcccctgcctccccagttgtccacatcaggggcctgattgacggtgtggtggaagcagaccttgtggaggccttgcaggagtttggacccatcagctatgtggtggtaatgcctaaaaagagacaagcactggtggagtttgaagatgtgttgggggcttgcaacgcagtgaactacgcagccgacaaccaaatatacattgctggtcacccagcttttgtcaactactctaccagccagaagatctcccgccctggggactcggatgactcccggagcgtgaacagtgtgcttctctttaccatcctgaaccccatttattcgatcaccacggatgttctttacactatctgtaatccttgtggccctgtccagagaattgtcattttcaggaagaatggagttcaggcgatggtggaatttgactcagttcaaagtgcccagcgggccaaggcctctctcaatggggctgatatctattctggctgttgcactctgaagatcgaatacgcaaagcctacacgcttgaatgtgttcaagaatgatcaggatacttgggactacacaaaccccaatctcagtggacaagggtcgcagtgtatgtttgatgggacgccatctttcagaactgtgctaactcactgttgaagcgtccaatggtgaccctggcagcaaccccaacaaacgccagaggcagccccctctcctgggagatcaccccgcagaatatggagggccccacggtgggtaccacagccattaccatgatgagggctacgggccccccccacctcactacgaagggagaaggatgggtccaccagtggggggtcaccgtcggggcccaagtcgctacggcccc

SEQ ID NO: 319668 - protein, 393 aa, Artificial Sequence
  derived and/or modified sequence
MCKMRTREDMQLGNEGPGTALRLIHLQVSSADARLMVFDKTEGTWRLLCSSRSNARVAGLSCEEMGFLRALTHSELDVRTAGANGTSGFFCVDEGRLPHTQRLLEVISVCDCPRGRFLAAICQDCGRRKLPVDRIVGGRDTSLGRWPWQVSLRYDGAHLCGGSLLSGDWVLTAAHCFPERNRVLSRWRVFAGAVAQASPHGLQLGVQAVVYHGGYLPFRDPNSEENSNDIALVHLSSPLPLTEYIQPVCLPAAGQALVDGKICTVTGWGNTQYYGQQAGVLQEARVPIISNDVCNGADFYGNQIKPKMFCAGYPEGGIDACQGDSGGPFVCEDSISRTPRWRLCGIVSWGTGCALAQKPGVYTKVSDFREWIFQAIKVKVGSRWEPGWGRLGV

SEQ ID NO: 319669 - DNA, 1182 bp, Artificial Sequence
  derived and/or modified sequence
atgtgtaaaatgaggacacgcgaggacatgcagctaggtaatgagggccccgggaccgctctaaggctaattcacctgcaggtgagcagcgctgacgcaagattaatggtattcgacaagactgaagggacctggcgcctactgtgctcatccagaagtaacgctagagtggcaggacttagctgcgaggaaatgggctttttgcgagctctaacccactcagagctagatgtgagaaccgccggcgcaaacggaaccagcggtttcttctgcgtagatgaaggcagactcccgcatacccagcgtctcctggaagtcatctccgtatgcgactgccctcgtggtcggttcctggctgcaatctgtcaggattgcggcagaaggaagctgcctgtagatcggattgtcggcggccgcgacacctcgctaggccgttggccctggcaagtctccttgcggtatgatggggctcacctatgtggtggcagcctcctcagtggcgactgggtgttaacggcagcccactgctttcctgaacggaacagagtcctgagtagatggcgtgttttcgctggtgcagtcgcccaggcgagtccccatgggctccagctcggggtccaggcagtggtctaccacggcggctacctcccgttccgtgacccaaattccgaggagaacagcaacgacatcgccttggtgcacctgtcgtctccactgcctctcaccgagtacattcagcccgtctgtttgccagccgcagggcaggccctggtggacgggaaaatatgcactgtgaccgggtgggggaatacacagtactacggccaacaggctggtgtgcttcaggaagctcgggtccccatcatctcaaatgacgtgtgcaatggggcagatttttatgggaaccaaatcaagccaaagatgttctgtgcaggctaccctgaaggcgggatcgacgcctgtcagggggactctggagggcctttcgtatgcgaggactcaattagtagaacaccccggtggcgtctgtgtggaatcgtctcctggggtaccggttgcgccctagcccagaagccaggggtctacactaaggtttccgattttagagagtggatcttccaggctatcaaagtgaaagtcggatccaggtgggaacctggttggggccggctcggggtgtag

SEQ ID NO: 319670 - DNA, 1480 bp, Artificial Sequence
  derived and/or modified sequence
agcatggtgtctgttgcaggtggccggactgtgccatgctgctccagacccaaggtggcagctctcactgcggggaccctgctacttctgacagccatcggggcggcatcctgggccattgtggctgttctcctcaggagtgaccaggagccgctgtacccagatgtgcaaaatgaggaccagagaggacatgcagctggggaacgaggggccaggaacagctcttagacttatccacttgcaggtcagctctgcggacgctcggctcatggtctttgacaagacggaagggacgtggcggctgctgtgctcctcgcgctccaacgccagggtagccggactcagctgcgaggagatgggcttcctcagggcactgacccactccgagctggacgtgcgaacggcgggcgccaatggcacgtcgggcttcttctgtgtggacgaggggaggctgccccacacccagaggctgctggaggtcatctccgtgtgtgattgccccagaggccgtttcttggccgccatctgccaagactgtggccgcaggaagctgcccgtggaccgcatcgtgggaggccgggacaccagcttgggccggtggccgtggcaagtcagccttcgctatgatggagcacacctctgtgggggatccctgctctccggggactgggtgctgacagccgcccactgcttcccggagcggaaccgggtcctgtcccgatggcgagtgtttgccggtgccgtggcccaggcctctccccacggtctgcagctgggggtgcaggctgtggtctaccacgggggctatcttccctttcgggaccccaacagcgaggagaacagcaacgatattgccctggtccacctctccagtcccctgcccctcacagaatacatccagcctgtgtgcctcccagctgccggccaggccctggtggatggcaagatctgtaccgtgacgggctggggcaacacgcagtactatggccaacaggccggggtactccaggaggctcgagtccccataatcagcaatgatgtctgcaatggcgctgacttctatggaaaccagatcaagcccaagatgttctgtgctggctaccccgagggtggcattgatgcctgccagggcgacagcggtggtccctttgtgtgtgaggacagcatctctcggacgccacgttggcggctgtgtggcattgtgagttggggcactggctgtgccctggcccagaagccaggcgtctacaccaaagtcagtgacttccgggagtggatcttccaggccataaaggtgaaagttgggtccagatgggagccagggtggggacgtttgggtgtctaatgggggaagggaggcagagatttgttttaggaaacctacgctcaggcctagaagagggccccccttgggaacagatggactttgaagggttcctggggaagggaagccagtggtgggacgtggaagcctctcaga

SEQ ID NO: 319671 - DNA, 1182 bp, Artificial Sequence
  derived and/or modified sequence
atgtgcaagatgaggacccgggaggacatgcagctgggcaatgaaggacctggaacagccctgcggctcatccacctgcaggtgagcagcgcagatgcccggctgatggtgtttgacaagacagagggcacctggaggctgctgtgcagcagccgcagcaatgcccgggtggccggcctgagctgtgaggagatgggcttcctgcgggccctgacccacagcgagctggatgtgaggacagctggggccaacggcaccagcggcttcttctgtgtggatgagggccgcctgccccacacccagaggctgctggaggtgatctctgtgtgtgactgcccccggggccgcttcctggccgccatctgccaggactgtggccgcaggaagctgcctgtggacagaattgtgggcggccgggacaccagcctgggccgctggccctggcaggtgtccctgcgctatgatggagcccacctgtgtggcggcagcctgctgagcggggactgggtgctgacagctgcccactgcttccctgagaggaacagagtgctgagccgctggagggtgtttgctggagctgtggcccaggccagcccccacggcctgcagctgggcgtgcaggccgtggtgtaccacggcggctacctgcccttccgggaccccaacagcgaggagaacagcaatgacatcgccctggtgcacctgagcagccccctgcccctgacagagtacatccagcctgtgtgcctgcctgctgctggccaggccctggtggatggcaagatctgcaccgtgacaggctggggcaacacccagtactacggccagcaggccggcgtgctgcaggaggcccgggtgcccatcatcagcaatgatgtgtgcaatggagctgacttctacggcaaccagatcaagcccaagatgttctgtgccggctacccagagggcggcattgatgcctgccagggcgacagcggcggcccctttgtgtgtgaggacagcatcagcaggaccccccgctggaggctgtgtggcatcgtgtcctggggcaccggctgtgccctggcccagaagccaggagtgtacaccaaggtgtctgacttccgggagtggatcttccaggccatcaaggtgaaggtgggcagccgctgggagcccggctggggccgcctgggcgtgtag

SEQ ID NO: 319672 - DNA, 1182 bp, Artificial Sequence
  derived and/or modified sequence
atgtgcaagatgcggacccgggaggacatgcagctgggcaacgagggtccaggcactgctttacggctgatacatctccaggttagttcagccgatgcccgactcatggtcttcgataaaacagagggcacctggagactgctgtgttcctcacgttcaaatgcccgcgttgcaggcttgtcttgcgaagagatgggattcctgcgcgccttgacccactccgaactggacgtccgaactgcaggcgctaatggcacctccggctttttctgcgttgatgaaggtcgacttccacacacgcaaaggcttctggaggtcattagcgtgtgtgactgtcctcgggggagattcctggctgcgatatgccaggactgcggacgccgcaagctccctgtggataggattgttggcgggcgggacacgtccctcggccgttggccctggcaggtaagcttaaggtatgatggggcccacctttgtgggggaagcctgctttctggagactgggtgctgaccgcagcccactgttttcctgagcggaaccgtgttcttagtcgctggcgcgttttcgcgggtgccgttgcccaggcctcgcctcacggcctccagctgggcgtgcaggctgtggtgtatcatggaggttaccttccatttagggatcccaactccgaagagaacagcaacgacatcgctctggtgcacctatcatcccctctgccacttacagagtatattcaacccgtgtgtctgccagctgctgggcaagccttggtcgatggtaaaatctgtacagtcacgggctggggaaacacacagtactatggccagcaggctggagtgctgcaggaggcaagagtgcctatcatatcgaacgacgtgtgcaacggagctgacttctacggcaatcagattaaaccgaagatgttctgtgctgggtaccccgaaggtgggatcgatgcctgtcaaggtgattctggcggcccgttcgtatgtgaggacagcatatctaggactccgcggtggagactctgtgggatcgtgagttgggggacaggatgcgccctcgctcagaagcccggtgtctataccaaagtttccgatttccgcgaatggatcttccaggctatcaaggttaaagtgggatctcggtgggagcctggatggggtagactgggtgtttag

SEQ ID NO: 319673 - DNA, 1182 bp, Artificial Sequence
  derived and/or modified sequence
atgtgtaaaatgcgaactagggaggatatgcaactcgggaatgaaggtccaggtaccgcgcttaggctgatacatctgcaagtgagcagtgcagatgcgcgtctaatggtgtttgacaaaacggaagggacatggcgcctcctgtgttcttcccgcagtaacgcacgagtggccggtctatcatgcgaggaaatggggttcctacgcgcactcacgcattcagaactcgatgtccgcacagccggtgctaacggcacgtcggggttcttctgtgttgacgagggtaggttgccccatacgcagcgcctgttagaagtgatatccgtgtgcgactgtccgcgtggccgtttcctggccgctatctgtcaggattgtggtagaagaaaactgcctgtagatcgaattgtcggtgggcgtgataccagtctgggcagatggccatggcaagtgagcctgagatatgacggcgctcatctctgcggtggctcattgctgagcggagactgggtgttaactgctgcccactgtttccctgagcggaatagggtcctcagtagatggagagtattcgctggtgccgtcgcacaggcctcccctcacggcttgcaacttggcgtgcaggcagttgtctatcatgggggatacctcccatttagggaccctaactctgaggagaattccaatgacatagccctcgtgcatttgtccagccctctcccgctgaccgagtacatacagcccgtttgtcttcccgcagccggtcaagcattggtggatggtaagatctgtaccgtgaccggatgggggaacacgcagtactatggacaacaagcaggcgtcctgcaagaggcgagagtacccatcatatcaaacgacgtatgcaatggcgcagacttttacggaaatcagataaaacccaagatgttttgtgccggatatccagaagggggaatcgatgcttgccagggcgattctggagggccattcgtgtgcgaggatagcattagtcgcacacccagatggaggctttgtggtatcgttagctggggcaccggatgtgcccttgcacagaaacccggtgtgtacactaaagtgtcagatttccgggagtggatttttcaggctattaaagttaaggtcgggtctcgatgggaacccggttggggtcggctgggagtttag

SEQ ID NO: 319674 - DNA, 1182 bp, Artificial Sequence
  derived and/or modified sequence
atgtgcaagatgagaaccagagaggacatgcagctgggcaacgagggccccggcaccgccctgagactgatccacctgcaggtgagcagcgccgacgccagactgatggtgttcgacaagaccgagggcacctggagactgctgtgcagcagcagaagcaacgccagagtggccggcctgagctgcgaggagatgggcttcctgagagccctgacccacagcgagctggacgtgagaaccgccggcgccaacggcaccagcggcttcttctgcgtggacgagggcagactgccccacacccagagactgctggaggtgatcagcgtgtgcgactgccccagaggcagattcctggccgccatctgccaggactgcggcagaagaaagctgcccgtggacagaatcgtgggcggcagagacaccagcctgggcagatggccctggcaggtgagcctgagatacgacggcgcccacctgtgcggcggcagcctgctgagcggcgactgggtgctgaccgccgcccactgcttccccgagagaaacagagtgctgagcagatggagagtgttcgccggcgccgtggcccaggccagcccccacggcctgcagctgggcgtgcaggccgtggtgtaccacggcggctacctgcccttcagagaccccaacagcgaggagaacagcaacgacatcgccctggtgcacctgagcagccccctgcccctgaccgagtacatccagcccgtgtgcctgcccgccgccggccaggccctggtggacggcaagatctgcaccgtgaccggctggggcaacacccagtactacggccagcaggccggcgtgctgcaggaggccagagtgcccatcatcagcaacgacgtgtgcaacggcgccgacttctacggcaaccagatcaagcccaagatgttctgcgccggctaccccgagggcggcatcgacgcctgccagggcgacagcggcggccccttcgtgtgcgaggacagcatcagcagaacccccagatggagactgtgcggcatcgtgagctggggcaccggctgcgccctggcccagaagcccggcgtgtacaccaaggtgagcgacttcagagagtggatcttccaggccatcaaggtgaaggtgggcagcagatgggagcccggctggggcagactgggcgtgtag

SEQ ID NO: 319675 - protein, 991 aa, Artificial Sequence
  derived and/or modified sequence
MAESFFSDFGLLWYLKELRKEEFWKFKELLKQPLEKFELKPIPWAELKKASKEDVAKLLDKHYPGKQAWEVTLNLFLQINRKDLWTKAQEEMRNKLNPYRKHMKETFQLIWEKETCLHVPEHFYKETMKNEYKELNDAYTAAARRHTVVLEGPDGIGKTTLLRKVMLDWAEGNLWKDRFTFVFFLNVCEMNGIAETSLLELLSRDWPESSEKIEDIFSQPERILFIMDGFEQLKFNLQLKADLSDDWRQRQPMPIILSSLLQKKMLPESSLLIALGKLAMQKHYFMLRHPKLIKLLGFSESEKKSYFSYFFGEKSKALKVFNFVRDNGPLFILCHNPFTCWLVCTCVKQRLERGEDLEINSQNTTYLYASFLTTVFKAGSQSFPPKVNRARLKSLCALAAEGIWTYTFVFSHGDLRRNGLSESEGVMWVGMRLLQRRGDCFAFMHLCIQEFCAAMFYLLKRPKDDPNPAIGSITQLVRASVVQPQTLLTQVGIFMFGISTEEIVSMLETSFGFPLSKDLKQEITQCLESLSQCEADREAIAFQELFIGLFETQEKEFVTKVMNFFEEVFIYIGNIEHLVIASFCLKHCQHLTTLRMCVENIFPDDSGCISDYNEKLVYWRELCSMFITNKNFQILDMENTSLDDPSLAILCKALAQPVCKLRKLIFTSVYFGHDSELFKAVLHNPHLKLLSLYGTSLSQSDIRHLCETLKHPMCKIEELILGKCDISSEVCEDIASVLACNSKLKHLSLVENPLRDEGMTLLCEALKHSHCALERLMLMYCCLTSVSCDSISEVLLCSKSLSLLDLGSNALEDNGVASLCAALKHPGCSIRELWLMGCFLTSDSCKDIAAVLICNGKLKTLKLGHNEIGDTGVRQLCAALQHPHCKLECLGLQTCPITRACCDDIAAALIACKTLRSLNLDWIALDADAVVVLCEALSHPDCALQMLGLHKSGFDEETQKILMSVEEKIPHLTISHGPWIDEEYKIRGVLL

SEQ ID NO: 319676 - protein, 986 aa, Artificial Sequence
  derived and/or modified sequence
MAESFFSDFGLLWYLKELRKEEFWKFKELLKQPLEKFELKPIPWAELKKASKEDVAKLLDKHYPGKQAWEVTLNLFLQINRKDLWTKAQEEMRNKLNPYRKHMKETFQLIWEKETCLHVPEHFYKETMKNEYKELNDAYTAAARRHTVVLEGPDGIGKTTLLRKVMLDWAEGNLWKDRFTFVFFLNVCEMNGIAETSLLELLSRDWPESSEKIEDIFSQPERILFIMDGFEQLKFNLQLKADLSDDWRQRQPMPIILSSLLQKKMLPESSLLIALGKLAMQKHYFMLRHPKLIKLLGFSESEKKSYFSYFFGEKSKALKVFNFVRDNGPLFILCHNPFTCWLVCTCVKQRLERGEDLEINSQNTTYLYASFLTTVFKAGSQSFPPKVNRARLKSLCALAAEGIWTYTFVFSHGDLRRNGLSESEGVMWVGMRLLQRRGDCFAFMHLCIQEFCAAMFYLLKRPKDDPNPAIGSITQLVRASVVQPQTLLTQVGIFMFGISTEEIVSMLETSFGFPLSKDLKQEITQCLESLSQCEADREAIAFQELFIGLFETQEKEFVTKVMNFFEEVFIYIGNIEHLVIASFCLKHCQHLTTLRMCVENIFPDDSGCISDYNEKLVYWRELCSMFITNKNFQILDMENTSLDDPSLAILCKALAQPVCKLRKLIFTSVYFGHDSELFKAVLHNPHLKLLSLYGTSLSQSDIRHLCETLKHPMCKIEELILGKCDISSEVCEDIASVLACNSKLKHLSLVENPLRDEGMTLLCEALKHSHCALERLMLMYCCLTSVSCDSISEVLLCSKSLSLLDLGSNALEDNGVASLCAALKHPGCSIRELWLMGCFLTSDSCKDIAAVLICNGKLKTLKLGHNEIGDTGVRQLCAALQHPHCKLECLGLQTCPITRACCDDIAAALIACKTLRSLNLDWIALDADAVVVLCEALSHPDCALQMLGNCQKSLGDTVAPGENHCSIKHLLLTLPINMQRQLRLQK

SEQ ID NO: 319677 - DNA, 2976 bp, Artificial Sequence
  derived and/or modified sequence
atggccgagagcttcttcagcgacttcggcctgctgtggtacctgaaggagctgagaaaggaggagttctggaagttcaaggagctgctgaagcagcccctggagaagttcgagctgaagcccatcccctgggccgagctgaagaaggccagcaaggaggacgtggccaagctgctggacaagcactaccccggcaagcaggcctgggaggtgaccctgaacctgttcctgcagatcaacagaaaggacctgtggaccaaggcccaggaggagatgagaaacaagctgaacccctacagaaagcacatgaaggagaccttccagctgatctgggagaaggagacctgcctgcacgtgcccgagcacttctacaaggagaccatgaagaacgagtacaaggagctgaacgacgcctacaccgccgccgccagaagacacaccgtggtgctggagggccccgacggcatcggcaagaccaccctgctgagaaaggtgatgctggactgggccgagggcaacctgtggaaggacagattcaccttcgtgttcttcctgaacgtgtgcgagatgaacggcatcgccgagaccagcctgctggagctgctgagcagagactggcccgagagcagcgagaagatcgaggacatcttcagccagcccgagagaatcctgttcatcatggacggcttcgagcagctgaagttcaacctgcagctgaaggccgacctgagcgacgactggagacagagacagcccatgcccatcatcctgagcagcctgctgcagaagaagatgctgcccgagagcagcctgctgatcgccctgggcaagctggccatgcagaagcactacttcatgctgagacaccccaagctgatcaagctgctgggcttcagcgagagcgagaagaagagctacttcagctacttcttcggcgagaagagcaaggccctgaaggtgttcaacttcgtgagagacaacggccccctgttcatcctgtgccacaaccccttcacctgctggctggtgtgcacctgcgtgaagcagagactggagagaggcgaggacctggagatcaacagccagaacaccacctacctgtacgccagcttcctgaccaccgtgttcaaggccggcagccagagcttcccccccaaggtgaacagagccagactgaagagcctgtgcgccctggccgccgagggcatctggacctacaccttcgtgttcagccacggcgacctgagaagaaacggcctgagcgagagcgagggcgtgatgtgggtgggcatgagactgctgcagagaagaggcgactgcttcgccttcatgcacctgtgcatccaggagttctgcgccgccatgttctacctgctgaagagacccaaggacgaccccaaccccgccatcggcagcatcacccagctggtgagagccagcgtggtgcagccccagaccctgctgacccaggtgggcatcttcatgttcggcatcagcaccgaggagatcgtgagcatgctggagaccagcttcggcttccccctgagcaaggacctgaagcaggagatcacccagtgcctggagagcctgagccagtgcgaggccgacagagaggccatcgccttccaggagctgttcatcggcctgttcgagacccaggagaaggagttcgtgaccaaggtgatgaacttcttcgaggaggtgttcatctacatcggcaacatcgagcacctggtgatcgccagcttctgcctgaagcactgccagcacctgaccaccctgagaatgtgcgtggagaacatcttccccgacgacagcggctgcatcagcgactacaacgagaagctggtgtactggagagagctgtgcagcatgttcatcaccaacaagaacttccagatcctggacatggagaacaccagcctggacgaccccagcctggccatcctgtgcaaggccctggcccagcccgtgtgcaagctgagaaagctgatcttcaccagcgtgtacttcggccacgacagcgagctgttcaaggccgtgctgcacaacccccacctgaagctgctgagcctgtacggcaccagcctgagccagagcgacatcagacacctgtgcgagaccctgaagcaccccatgtgcaagatcgaggagctgatcctgggcaagtgcgacatcagcagcgaggtgtgcgaggacatcgccagcgtgctggcctgcaacagcaagctgaagcacctgagcctggtggagaaccccctgagagacgagggcatgaccctgctgtgcgaggccctgaagcacagccactgcgccctggagagactgatgctgatgtactgctgcctgaccagcgtgagctgcgacagcatcagcgaggtgctgctgtgcagcaagagcctgagcctgctggacctgggcagcaacgccctggaggacaacggcgtggccagcctgtgcgccgccctgaagcaccccggctgcagcatcagagagctgtggctgatgggctgcttcctgaccagcgacagctgcaaggacatcgccgccgtgctgatctgcaacggcaagctgaagaccctgaagctgggccacaacgagatcggcgacaccggcgtgagacagctgtgcgccgccctgcagcacccccactgcaagctggagtgcctgggcctgcagacctgccccatcaccagagcctgctgcgacgacatcgccgccgccctgatcgcctgcaagaccctgagaagcctgaacctggactggatcgccctggacgccgacgccgtggtggtgctgtgcgaggccctgagccaccccgactgcgccctgcagatgctgggcctgcacaagagcggcttcgacgaggagacccagaagatcctgatgagcgtggaggagaagatcccccacctgaccatcagccacggcccctggatcgacgaggagtacaagatcagaggcgtgctgctgtag

SEQ ID NO: 319678 - DNA, 2961 bp, Artificial Sequence
  derived and/or modified sequence
atggccgagagcttcttcagcgacttcggcctgctgtggtacctgaaggagctgagaaaggaggagttctggaagttcaaggagctgctgaagcagcccctggagaagttcgagctgaagcccatcccctgggccgagctgaagaaggccagcaaggaggacgtggccaagctgctggacaagcactaccccggcaagcaggcctgggaggtgaccctgaacctgttcctgcagatcaacagaaaggacctgtggaccaaggcccaggaggagatgagaaacaagctgaacccctacagaaagcacatgaaggagaccttccagctgatctgggagaaggagacctgcctgcacgtgcccgagcacttctacaaggagaccatgaagaacgagtacaaggagctgaacgacgcctacaccgccgccgccagaagacacaccgtggtgctggagggccccgacggcatcggcaagaccaccctgctgagaaaggtgatgctggactgggccgagggcaacctgtggaaggacagattcaccttcgtgttcttcctgaacgtgtgcgagatgaacggcatcgccgagaccagcctgctggagctgctgagcagagactggcccgagagcagcgagaagatcgaggacatcttcagccagcccgagagaatcctgttcatcatggacggcttcgagcagctgaagttcaacctgcagctgaaggccgacctgagcgacgactggagacagagacagcccatgcccatcatcctgagcagcctgctgcagaagaagatgctgcccgagagcagcctgctgatcgccctgggcaagctggccatgcagaagcactacttcatgctgagacaccccaagctgatcaagctgctgggcttcagcgagagcgagaagaagagctacttcagctacttcttcggcgagaagagcaaggccctgaaggtgttcaacttcgtgagagacaacggccccctgttcatcctgtgccacaaccccttcacctgctggctggtgtgcacctgcgtgaagcagagactggagagaggcgaggacctggagatcaacagccagaacaccacctacctgtacgccagcttcctgaccaccgtgttcaaggccggcagccagagcttcccccccaaggtgaacagagccagactgaagagcctgtgcgccctggccgccgagggcatctggacctacaccttcgtgttcagccacggcgacctgagaagaaacggcctgagcgagagcgagggcgtgatgtgggtgggcatgagactgctgcagagaagaggcgactgcttcgccttcatgcacctgtgcatccaggagttctgcgccgccatgttctacctgctgaagagacccaaggacgaccccaaccccgccatcggcagcatcacccagctggtgagagccagcgtggtgcagccccagaccctgctgacccaggtgggcatcttcatgttcggcatcagcaccgaggagatcgtgagcatgctggagaccagcttcggcttccccctgagcaaggacctgaagcaggagatcacccagtgcctggagagcctgagccagtgcgaggccgacagagaggccatcgccttccaggagctgttcatcggcctgttcgagacccaggagaaggagttcgtgaccaaggtgatgaacttcttcgaggaggtgttcatctacatcggcaacatcgagcacctggtgatcgccagcttctgcctgaagcactgccagcacctgaccaccctgagaatgtgcgtggagaacatcttccccgacgacagcggctgcatcagcgactacaacgagaagctggtgtactggagagagctgtgcagcatgttcatcaccaacaagaacttccagatcctggacatggagaacaccagcctggacgaccccagcctggccatcctgtgcaaggccctggcccagcccgtgtgcaagctgagaaagctgatcttcaccagcgtgtacttcggccacgacagcgagctgttcaaggccgtgctgcacaacccccacctgaagctgctgagcctgtacggcaccagcctgagccagagcgacatcagacacctgtgcgagaccctgaagcaccccatgtgcaagatcgaggagctgatcctgggcaagtgcgacatcagcagcgaggtgtgcgaggacatcgccagcgtgctggcctgcaacagcaagctgaagcacctgagcctggtggagaaccccctgagagacgagggcatgaccctgctgtgcgaggccctgaagcacagccactgcgccctggagagactgatgctgatgtactgctgcctgaccagcgtgagctgcgacagcatcagcgaggtgctgctgtgcagcaagagcctgagcctgctggacctgggcagcaacgccctggaggacaacggcgtggccagcctgtgcgccgccctgaagcaccccggctgcagcatcagagagctgtggctgatgggctgcttcctgaccagcgacagctgcaaggacatcgccgccgtgctgatctgcaacggcaagctgaagaccctgaagctgggccacaacgagatcggcgacaccggcgtgagacagctgtgcgccgccctgcagcacccccactgcaagctggagtgcctgggcctgcagacctgccccatcaccagagcctgctgcgacgacatcgccgccgccctgatcgcctgcaagaccctgagaagcctgaacctggactggatcgccctggacgccgacgccgtggtggtgctgtgcgaggccctgagccaccccgactgcgccctgcagatgctgggcaactgccagaagagcctgggcgacaccgtggcccccggcgagaaccactgcagcatcaagcacctgctgctgaccctgcccatcaacatgcagagacagctgagactgcagaagtag

SEQ ID NO: 319679 - DNA, 3484 bp, Artificial Sequence
  derived and/or modified sequence
acacctcagttcacaatcctggggcgatatggcagaatcttttttttcggattttggcttgttgtggtatctgaaggagctcagaaaggaagagttttggaaatttaaggagctcctcaaacaacctttggagaaatttgaactcaagccaatcccctgggctgagctgaagaaggcctccaaagaagatgtagcaaagctgctggacaaacattacccaggaaagcaggcatgggaggtaacactgaacctgtttctacagatcaataggaaagatctctggacaaaggctcaggaagagatgagaaataagctaaacccatacagaaagcatatgaaggaaacatttcaactcatatgggagaaggaaacctgtcttcacgtccctgagcatttctacaaagaaaccatgaaaaatgagtataaagaattgaatgacgcatatactgctgcggctagacgacacactgtggtcctggaaggtcctgatggaattggaaaaacaacccttttaagaaaagtgatgttggactgggcagagggaaacttatggaaggacaggttcacatttgtgtttttcctcaatgtctgtgaaatgaacggtatcgcagagaccagcttactggagctcctctctagggactggccggagtcttcagagaagatcgaagacattttttcccagccagagagaattctgttcatcatggatggctttgagcaactgaagtttaacttacaacttaaggctgacttgagcgatgattggaggcagcggcagccaatgccaattatcctgagcagtttgttgcaaaaaaagatgcttccagaatcctctctccttattgcattaggaaaactggctatgcaaaaacactattttatgttgcggcatccaaaactcataaagctcttaggattcagtgaatctgaaaagaagtcgtatttctcctacttctttggtgagaagagcaaagccctgaaagtcttcaattttgtgagagataatgggccgctgtttatcttgtgccataatccctttacgtgctggttggtctgtacttgtgtgaaacagaggctagagaggggagaagaccttgaaataaactcccaaaacaccacctatttatatgcatcctttttaacaactgtattcaaagcaggaagtcagagttttccacctaaggtgaacagagcccgactaaaaagcctgtgtgctttggctgcagagggaatttggacatatacatttgtattttcccatggggatctccggaggaatgggttatctgagtctgagggcgtgatgtgggtgggtatgagactcctccaaaggagaggggactgttttgccttcatgcatctgtgtatccaagagttttgtgccgccatgttttatttgctcaaacgacccaaagacgatcctaacccggccattggaagcataacccagcttgtaagagcaagtgtggttcagcctcaaaccctcttgacccaggtggggatattcatgtttggaatttcaacagaagaaatcgtcagcatgctggagacctcctttggttttccactgtcaaaagacctaaagcaggaaataacccaatgccttgaaagtttaagtcaatgtgaagctgatagggaagccatagctttccaggaactattcattggtttgtttgaaactcaggaaaaagaatttgtaaccaaagtgatgaatttctttgaagaagttttcatttatattggtaacatagaacatttggtaatagcttcattctgcctgaagcattgtcaacatttaacgacacttcgcatgtgtgtggagaatatctttccagatgactcaggatgcatctcagattacaatgagaagctcgtctactggcgggagctttgctcaatgttcattaccaacaagaacttccagattttagacatggaaaataccagccttgatgatccctccctggcgattctttgcaaagcgctggctcagcctgtttgtaaactccgaaaactcatatttacttctgtgtactttggacatgattcagaattatttaaggcagttcttcacaaccctcatctgaaacttctgagcctgtacggcactagcctctcccagtctgacatcagacacctgtgtgagacgctgaaacatccaatgtgcaagatagaagagctgatactgggaaagtgtgacatctccagtgaagtttgtgaagacatcgcctccgtcctggcctgcaacagcaagctgaaacacctctccttggtagaaaatcccttgagggacgaaggaatgacgttgctgtgtgaagccctgaagcactcacactgtgccctggagaggctgatgttgatgtactgctgtctcacctctgtctcctgtgactccatttccgaagtcctcttgtgcagtaagtccctgtccctcctcgatctgggctcaaatgccctggaagataatggagtggcatctctgtgtgcagcgctgaagcacccaggctgcagcatacgggagctgtggttgatgggctgtttccttacttccgattcctgtaaggacattgctgctgttcttatttgcaatgggaaactgaagaccctgaaacttgggcataatgaaataggagacactggtgtcagacagttatgtgcagctttgcagcatcctcactgtaaattagagtgtctcgggctgcaaacgtgtccgatcacccgtgcctgctgcgacgacatcgccgcagcactcatcgcctgcaaaacactgaggagcctgaacctcgactggattgccttggatgctgatgcagtggtggtgctgtgtgaggcattgagccacccggactgtgccctgcagatgctggggctgcacaaatctggctttgatgaagaaactcagaagatcctgatgtctgtggaagaaaaaattccccatctgaccatttcacatggaccttggattgacgaggaatacaagatcaggggtgtgctcctctgatggggaacaccctgaagtagtcgtctcacaaaggctttccttggccacagtgggaccttcacctggcacctctatcctgtaattgcacatcatggcagcagggctgtgatttcagaggtactccctaagtgttctagcaatatgattatggagtgtgattcagtgtacatgctgattgtctttgcctcggtcctatatccccttgtctttagaaatcccatcctgccttgtgatatttagaagcacaagtacgttaaacaagtgctaaacgctctggaaagcatggctttattttcttaatggatgtcttggtgtgtaggagcatgcatttgtaggcaccacaatccggatacttctgacacagaagtgatgctagaatgtgtctatagattgtattgctagcatccagactttctagtttgtccagatttcgatttgatcaattttcttgtccaataaaaaagcatttccaaatctcta

SEQ ID NO: 319680 - DNA, 2986 bp, Artificial Sequence
  derived and/or modified sequence
acacctcagttcacaatcctggggcgatatggcagaatcttttttttcggattttggcttgttgtggtatctgaaggagctcagaaaggaagagttttggaaatttaaggagctcctcaaacaacctttggagaaatttgaactcaagccaatcccctgggctgagctgaagaaggcctccaaagaagatgtagcaaagctgctggacaaacattacccaggaaagcaggcatgggaggtaacactgaacctgtttctacagatcaataggaaagatctctggacaaaggctcaggaagagatgagaaataagctaaacccatacagaaagcatatgaaggaaacatttcaactcatatgggagaaggaaacctgtcttcacgtccctgagcatttctacaaagaaaccatgaaaaatgagtataaagaattgaatgacgcatatactgctgcggctagacgacacactgtggtcctggaaggtcctgatggaattggaaaaacaacccttttaagaaaagtgatgttggactgggcagagggaaacttatggaaggacaggttcacatttgtgtttttcctcaatgtctgtgaaatgaacggtatcgcagagaccagcttactggagctcctctctagggactggccggagtcttcagagaagatcgaagacattttttcccagccagagagaattctgttcatcatggatggctttgagcaactgaagtttaacttacaacttaaggctgacttgagcgatgattggaggcagcggcagccaatgccaattatcctgagcagtttgttgcaaaaaaagatgcttccagaatcctctctccttattgcattaggaaaactggctatgcaaaaacactattttatgttgcggcatccaaaactcataaagctcttaggattcagtgaatctgaaaagaagtcgtatttctcctacttctttggtgagaagagcaaagccctgaaagtcttcaattttgtgagagataatgggccgctgtttatcttgtgccataatccctttacgtgctggttggtctgtacttgtgtgaaacagaggctagagaggggagaagaccttgaaataaactcccaaaacaccacctatttatatgcatcctttttaacaactgtattcaaagcaggaagtcagagttttccacctaaggtgaacagagcccgactaaaaagcctgtgtgctttggctgcagagggaatttggacatatacatttgtattttcccatggggatctccggaggaatgggttatctgagtctgagggcgtgatgtgggtgggtatgagactcctccaaaggagaggggactgttttgccttcatgcatctgtgtatccaagagttttgtgccgccatgttttatttgctcaaacgacccaaagacgatcctaacccggccattggaagcataacccagcttgtaagagcaagtgtggttcagcctcaaaccctcttgacccaggtggggatattcatgtttggaatttcaacagaagaaatcgtcagcatgctggagacctcctttggttttccactgtcaaaagacctaaagcaggaaataacccaatgccttgaaagtttaagtcaatgtgaagctgatagggaagccatagctttccaggaactattcattggtttgtttgaaactcaggaaaaagaatttgtaaccaaagtgatgaatttctttgaagaagttttcatttatattggtaacatagaacatttggtaatagcttcattctgcctgaagcattgtcaacatttaacgacacttcgcatgtgtgtggagaatatctttccagatgactcaggatgcatctcagattacaatgagaagctcgtctactggcgggagctttgctcaatgttcattaccaacaagaacttccagattttagacatggaaaataccagccttgatgatccctccctggcgattctttgcaaagcgctggctcagcctgtttgtaaactccgaaaactcatatttacttctgtgtactttggacatgattcagaattatttaaggcagttcttcacaaccctcatctgaaacttctgagcctgtacggcactagcctctcccagtctgacatcagacacctgtgtgagacgctgaaacatccaatgtgcaagatagaagagctgatactgggaaagtgtgacatctccagtgaagtttgtgaagacatcgcctccgtcctggcctgcaacagcaagctgaaacacctctccttggtagaaaatcccttgagggacgaaggaatgacgttgctgtgtgaagccctgaagcactcacactgtgccctggagaggctgatgttgatgtactgctgtctcacctctgtctcctgtgactccatttccgaagtcctcttgtgcagtaagtccctgtccctcctcgatctgggctcaaatgccctggaagataatggagtggcatctctgtgtgcagcgctgaagcacccaggctgcagcatacgggagctgtggttgatgggctgtttccttacttccgattcctgtaaggacattgctgctgttcttatttgcaatgggaaactgaagaccctgaaacttgggcataatgaaataggagacactggtgtcagacagttatgtgcagctttgcagcatcctcactgtaaattagagtgtctcgggctgcaaacgtgtccgatcacccgtgcctgctgcgacgacatcgccgcagcactcatcgcctgcaaaacactgaggagcctgaacctcgactggattgccttggatgctgatgcagtggtggtgctgtgtgaggcattgagccacccggactgtgccctgcagatgctgggaaattgtcagaagtccctcggagacacagttgcaccaggtgagaaccactgctctataaaacatcttctacttacgttgcccataaatatgcaacgccagctcagacttcagaag

SEQ ID NO: 319681 - DNA, 2976 bp, Artificial Sequence
  derived and/or modified sequence
atggccgagtctttcttctcagatttcggcttgctttggtacctgaaggagttacggaaagaagagttctggaagtttaaagagttattaaaacaacccctcgagaagttcgaactgaagcctatcccatgggcagagttgaagaaggcctctaaggaagatgtagcgaaattactcgacaagcactaccctgggaagcaggcttgggaggtgaccctgaatctcttcctgcaaatcaaccgaaaggatctgtggaccaaagctcaggaagagatgaggaataagctgaatccttaccgaaagcatatgaaggaaacatttcagctcatctgggaaaaagagacctgcctccacgtgccggagcatttttacaaggagacgatgaaaaacgagtacaaggaactgaatgatgcctacaccgctgccgcgagacgacacacagttgttttagagggacctgatgggatcgggaagacaactctccttcgcaaggtcatgctggactgggctgagggcaatttgtggaaagataggttcacattcgtcttcttcctcaatgtgtgcgaaatgaacggcatcgccgagacctcccttctcgagctgctttccagggattggccagaatcaagtgaaaagatcgaggatatcttctcccaaccagagcggatcctgtttatcatggacgggttcgaacagctgaaatttaatctgcagctgaaggccgatctgtctgatgactggcgccagagacaaccaatgcctatcattctctcctcccttctgcagaagaagatgctgcctgagtcctccctgctgatcgcactaggtaaactcgcaatgcagaagcactactttatgcttagacatccgaagttgattaagctgttgggattttctgaatccgaaaagaagtcctacttttcttatttcttcggggagaagtccaaagcattaaaagtgttcaattttgtgagggataatggcccgctgtttatcctgtgtcataacccttttacgtgttggctggtatgtacatgcgtgaagcaacgattagagaggggcgaggacctggaaatcaacagtcaaaatacaacctatttgtacgcgagctttctcactacggtatttaaggcaggatcacagagctttccaccaaaggtgaacagagctcggttaaaatcactctgtgctctggctgctgaaggtatctggacctataccttcgtattcagtcatggtgatcttcgacgcaacggcctgtccgagtccgaaggagtgatgtgggttggaatgcggctgttgcagcgccgtggcgactgctttgcttttatgcacctttgtattcaggagttttgtgcagccatgttttatctattgaaaagacctaaagacgatcctaaccccgcaatcggttctatcactcaacttgtgagagcttctgttgtgcagccccagaccctcctcacacaggtagggatatttatgttcgggatctccacagaggaaattgtatccatgctggagacctccttcggcttccctctgtcaaaagacctcaagcaggaaattacgcagtgtctcgaaagtttatctcagtgtgaggccgatcgcgaagcaatcgccttccaggagctgtttatcggcctgtttgaaacccaagaaaaagaattcgttacgaaggtcatgaatttcttcgaggaggtatttatttacatcggcaacatcgagcatcttgtgattgcctcattctgcctgaaacactgccagcatctgaccactctccgtatgtgtgtggaaaatatcttccccgacgacagtgggtgcattagtgattacaacgaaaagttagtgtactggagagagctgtgctccatgttcataaccaataaaaatttccagatcttggacatggagaacactagtttagacgatccctccctggccattctgtgcaaggcactggctcagcctgtctgcaagctgaggaagcttatcttcacctccgtgtattttggccacgattctgagctctttaaggctgtgctgcataaccctcacttaaagttgttgagtctctacggcactagccttagtcaaagtgacatccgccacttgtgcgaaactttgaaacacccaatgtgtaagatcgaagagctgattctgggcaaatgcgatataagcagcgaagtgtgtgaagacatcgcgagcgtgttggcttgtaattcaaaacttaaacatttatctcttgtcgaaaacccccttagagacgagggtatgacactgttgtgtgaggccctcaaacattctcattgtgcactggaacggttaatgctgatgtattgttgcctaacatccgtctcctgcgacagtatttcagaggtcctgctgtgcagtaagtccctctccctgctggatttaggcagcaacgctctggaagacaacggcgttgcctcactgtgcgcggctctgaaacacccgggctgttctattcgcgagctttggctcatgggatgcttcctcacttccgattcttgtaaagatatcgcggccgtgctgatctgtaacgggaaacttaaaacactcaagctgggtcacaatgaaattggtgacaccggggtgagacagctttgtgcagcactgcagcatccgcactgcaaactcgaatgtcttggcctccagacttgtccaatcacacgggcgtgttgtgacgatatagccgccgcgctcattgcctgtaagaccctgcgttcactgaatcttgactggatagcgctagatgccgacgcggttgtggtactgtgtgaggccctgtctcaccctgattgtgcgctacagatgctcgggcttcacaagagcggcttcgatgaagagacacagaaaatccttatgtcagtcgaggagaaaattccccaccttaccatatctcacgggccatggatcgatgaggaatataagatacggggagtgctgctttag

SEQ ID NO: 319682 - DNA, 2961 bp, Artificial Sequence
  derived and/or modified sequence
atggctgaatcctttttttccgacttcggccttctgtggtacctcaaagaactgcgcaaggaggagttctggaagttcaaggagctgctgaaacagccactagagaagttcgagttgaagccaatcccctgggccgagctgaaaaaagcctcaaaagaggatgtggccaagctgttggacaagcactatcccgggaaacaggcctgggaagtcacccttaacctatttctgcagataaaccggaaggacctgtggacaaaagcacaggaagaaatgcggaacaagctaaacccttacagaaaacacatgaaggagacattccagctgatctgggagaaggagacatgcttacatgttcccgagcatttttacaaagagaccatgaagaacgagtataaagaactgaacgacgcttacacagcggcagcaagaagacacacagtcgtattggaagggcccgatggaataggaaagactaccctgctgaggaaggtcatgctggactgggcagagggcaacttgtggaaagatagattcaccttcgtgttctttcttaacgtctgtgaaatgaatggtattgccgagactagccttttggaactgttgtcccgagattggccagaaagcagcgaaaagatcgaagatattttcagccagcccgaaagaatcctgttcatcatggatggtttcgagcagttaaaattcaaccttcagctgaaggccgacctttcggatgactggcgacaacgccagccaatgccaattattctgagtagtctcctgcaaaaaaaaatgcttcctgagtctagtctgctgatcgctctcggtaagctggccatgcagaagcactactttatgctgcgccacccaaagctaataaagctactgggctttagcgagagcgagaaaaagtcctatttctcatacttttttggggagaagagtaaggctctgaaggttttcaattttgtccgcgataatggtcccctgttcatactgtgccataacccctttacatgttggctcgtttgtacttgcgtcaagcagcgcttggagagaggcgaggatctggaaataaactctcagaacactacatatctttacgccagctttttaaccacggtgttcaaggccggttcacagagcttcccacccaaggtgaatcgcgctcggctcaagtccctgtgcgctctcgctgcagagggtatctggacgtacacctttgtcttctcacacggcgatcttagacgaaatgggctcagcgaaagcgaaggagtcatgtgggtggggatgagacttctacagcggcgcggcgactgtttcgcattcatgcatctctgtatacaggagttctgtgctgccatgttttatcttctgaaacggccgaaggatgatcctaatccagctatcggcagcataactcagctggttcgtgcatccgtagtacagccccagacactgctcactcaagtcggtatcttcatgttcggaatctcaacagaggagattgtgagcatgctggagacaagcttcgggtttcccttgtctaaggatctcaagcaagagataacacagtgtctggaatccctgtctcagtgcgaggcagacagggaggctatcgccttccaggagctttttattgggctgtttgaaacccaggaaaaggagtttgtcactaaagtgatgaactttttcgaggaagttttcatttacatcggtaatatcgaacaccttgttattgcctctttctgcctgaaacattgtcaacatctcaccactctccggatgtgcgtagaaaatatcttcccagacgacagcgggtgcatatccgactataacgagaaactggtgtactggcgcgagctttgctccatgtttatcactaacaagaacttccagatattggacatggaaaacacaagtctggatgacccgtctttggctatcctgtgcaaagccctcgctcagcctgtgtgcaagctgcggaaattgatattcacttcagtgtattttggccacgactcagaactgtttaaagcggtgctgcacaaccctcacctgaaactgttaagtctgtacggcacaagcctgagccagagcgacatcagacacctctgtgagaccttaaagcatcccatgtgcaagatcgaagagctaatcttggggaagtgtgacataagttcagaggtgtgcgaagatatcgcctctgtattggcctgtaactcgaagctgaagcacctgtctctagttgaaaatcctctacgtgacgaggggatgaccctgctctgtgaggctctcaagcatagccattgcgccctagagcgcttgatgctgatgtattgctgtctgacgtcagtttcctgcgattccatttccgaagtactgctgtgctctaagagcctgagcctcttggacttgggttctaacgccctcgaagataacggcgtggcctccctatgtgccgccctgaagcatcccggctgctctatacgcgaattgtggctgatgggttgtttccttacaagcgatagctgtaaagacatcgccgcggtgttgatatgcaacggtaaactgaaaactctgaagttgggtcacaatgaaatcggtgatactggcgtcagacagctttgcgctgcgcttcaacacccacactgcaagctggagtgcctgggcctgcagacttgccctataactcgggcctgttgtgacgatatcgcagcggcgttaattgcctgtaagacactaagatctctcaacttggattggattgctctcgatgccgatgccgtggtagtactatgtgaggctttgagtcaccccgattgcgcattgcagatgttgggtaattgccagaaatctctgggcgataccgtcgccccaggtgagaatcattgctcaataaagcatctgcttcttaccctccctatcaacatgcagcggcaactccggctgcaaaagtag

SEQ ID NO: 319683 - DNA, 2976 bp, Artificial Sequence
  derived and/or modified sequence
atggccgagagcttcttcagtgactttggcctgctgtggtacctgaaggagctgaggaaggaggagttctggaagttcaaggagctgctgaagcagcccctggagaagtttgagctgaagcccatcccctgggccgagctgaagaaggccagcaaagaagatgtggccaagctgctggacaagcactacccaggcaagcaggcctgggaggtgaccctgaacctcttcctgcagatcaacaggaaggacctgtggaccaaggcccaggaggagatgaggaacaagctgaacccctacaggaagcacatgaaggagaccttccagctgatctgggagaaggagacctgcctgcacgtgcctgagcacttctacaaggagaccatgaagaatgagtacaaggagctgaatgatgcctacacagctgctgcccggcggcacacagtggtgctggagggcccagatggcatcggcaagaccaccctgctgaggaaggtgatgctggactgggccgagggcaacctgtggaaggaccgcttcacctttgtgttcttcctgaatgtgtgtgagatgaatggaattgctgagaccagcctgctggagctgctgagccgggactggccagagagcagcgagaagattgaggacatcttcagccagcctgagcgcatcctcttcatcatggatggctttgagcagctgaagttcaacctgcagctgaaggctgacctgagtgatgactggaggcagaggcagcccatgcccatcatcctgagcagcctgctgcagaagaagatgctgcctgagagcagcctgctgattgccctgggcaagctggccatgcagaagcactacttcatgctgcggcaccccaagctgatcaagctgctgggcttcagcgagagcgagaagaagagctacttctcctacttctttggagagaagagcaaggccctgaaggtgttcaactttgtgcgggacaatggccccctcttcatcctgtgccacaaccccttcacctgctggctggtgtgcacctgtgtgaagcagaggctggagagaggagaggacctggagatcaacagccagaacaccacctacctgtatgccagcttcctgaccaccgtcttcaaggccggcagccagagcttcccccccaaggtgaacagagcccggctgaagagcctgtgtgccctggccgctgagggcatctggacctacacctttgtgttcagccacggggacctgcggagaaatggcctgtctgagagcgagggcgtgatgtgggtgggcatgaggctgctgcagaggagaggagactgctttgccttcatgcacctgtgcatccaggagttctgtgccgccatgttctacctgctgaagaggcccaaggatgaccccaacccagccatcggcagcatcacccagctggtgcgggcctctgtggtgcagccccagaccctgctgacccaggtgggcatcttcatgtttggcatcagcacagaggagatcgtgtccatgctggagaccagctttggcttccccctgagcaaggacctgaagcaggagatcacccagtgcctggagagcctgagccagtgtgaggccgaccgggaggccatcgccttccaggagctgttcatcggcctgtttgagacccaggagaaggagtttgtgaccaaggtgatgaacttctttgaggaggtgttcatctacatcggcaacatcgagcacctggtgattgccagcttctgcctgaagcactgccagcacctgaccaccctgaggatgtgtgtggagaacatcttcccagatgacagcggctgcatcagtgactacaatgagaagctggtgtactggagggagctgtgcagcatgttcatcaccaacaagaacttccagatcctggacatggagaacaccagcctggatgaccccagcctggccatcctgtgcaaggccctggcccagcctgtgtgcaagctgaggaagctgatcttcacctctgtgtactttggacatgattctgagctgttcaaggctgtgctgcacaacccccacctgaagctgctgagcctgtatggcaccagcctgagccagagcgacatccgccacctgtgtgagaccctgaagcaccccatgtgcaagattgaggagctgatcctgggcaaatgtgacatcagcagcgaggtgtgtgaggacatcgcctctgtgctggcctgcaacagcaagctgaagcacctgagcctggtggagaaccccctgagagatgagggcatgaccctgctgtgtgaggccctgaagcacagccactgtgccctggagcggctgatgctgatgtactgctgcctgacctctgtgtcctgtgacagcatcagcgaggtgctgctgtgcagcaagagcctgagcctgctggacctgggcagcaatgccctggaggacaacggggtggccagcctgtgtgccgccctgaagcaccctggctgcagcatccgggagctgtggctgatgggctgcttcctgaccagtgacagctgcaaggacattgctgctgtgctgatctgcaatggcaagctgaagaccctgaagctgggccacaatgagatcggggacacaggagtgcggcagctgtgtgccgccctgcagcacccccactgcaagctggagtgcctgggcctgcagacctgccccatcacccgggcctgctgtgatgacattgctgctgccctgattgcctgcaagaccctgcggagcctgaacctggactggatcgccctggatgctgatgctgtggtggtgctgtgtgaggccctgagccacccagactgtgccctgcagatgctgggcctgcacaagagcggctttgatgaggagacccagaagatcctgatgtctgtggaggagaagatcccccacctgaccatcagccacggcccctggattgatgaggagtacaagatccggggcgtgctgctgtag

SEQ ID NO: 319684 - DNA, 2961 bp, Artificial Sequence
  derived and/or modified sequence
atggccgagagcttcttcagtgactttggcctgctgtggtacctgaaggagctgaggaaggaggagttctggaagttcaaggagctgctgaagcagcccctggagaagtttgagctgaagcccatcccctgggccgagctgaagaaggccagcaaagaagatgtggccaagctgctggacaagcactacccaggcaagcaggcctgggaggtgaccctgaacctcttcctgcagatcaacaggaaggacctgtggaccaaggcccaggaggagatgaggaacaagctgaacccctacaggaagcacatgaaggagaccttccagctgatctgggagaaggagacctgcctgcacgtgcctgagcacttctacaaggagaccatgaagaatgagtacaaggagctgaatgatgcctacacagctgctgcccggcggcacacagtggtgctggagggcccagatggcatcggcaagaccaccctgctgaggaaggtgatgctggactgggccgagggcaacctgtggaaggaccgcttcacctttgtgttcttcctgaatgtgtgtgagatgaatggaattgctgagaccagcctgctggagctgctgagccgggactggccagagagcagcgagaagattgaggacatcttcagccagcctgagcgcatcctcttcatcatggatggctttgagcagctgaagttcaacctgcagctgaaggctgacctgagtgatgactggaggcagaggcagcccatgcccatcatcctgagcagcctgctgcagaagaagatgctgcctgagagcagcctgctgattgccctgggcaagctggccatgcagaagcactacttcatgctgcggcaccccaagctgatcaagctgctgggcttcagcgagagcgagaagaagagctacttctcctacttctttggagagaagagcaaggccctgaaggtgttcaactttgtgcgggacaatggccccctcttcatcctgtgccacaaccccttcacctgctggctggtgtgcacctgtgtgaagcagaggctggagagaggagaggacctggagatcaacagccagaacaccacctacctgtatgccagcttcctgaccaccgtcttcaaggccggcagccagagcttcccccccaaggtgaacagagcccggctgaagagcctgtgtgccctggccgctgagggcatctggacctacacctttgtgttcagccacggggacctgcggagaaatggcctgtctgagagcgagggcgtgatgtgggtgggcatgaggctgctgcagaggagaggagactgctttgccttcatgcacctgtgcatccaggagttctgtgccgccatgttctacctgctgaagaggcccaaggatgaccccaacccagccatcggcagcatcacccagctggtgcgggcctctgtggtgcagccccagaccctgctgacccaggtgggcatcttcatgtttggcatcagcacagaggagatcgtgtccatgctggagaccagctttggcttccccctgagcaaggacctgaagcaggagatcacccagtgcctggagagcctgagccagtgtgaggccgaccgggaggccatcgccttccaggagctgttcatcggcctgtttgagacccaggagaaggagtttgtgaccaaggtgatgaacttctttgaggaggtgttcatctacatcggcaacatcgagcacctggtgattgccagcttctgcctgaagcactgccagcacctgaccaccctgaggatgtgtgtggagaacatcttcccagatgacagcggctgcatcagtgactacaatgagaagctggtgtactggagggagctgtgcagcatgttcatcaccaacaagaacttccagatcctggacatggagaacaccagcctggatgaccccagcctggccatcctgtgcaaggccctggcccagcctgtgtgcaagctgaggaagctgatcttcacctctgtgtactttggacatgattctgagctgttcaaggctgtgctgcacaacccccacctgaagctgctgagcctgtatggcaccagcctgagccagagcgacatccgccacctgtgtgagaccctgaagcaccccatgtgcaagattgaggagctgatcctgggcaaatgtgacatcagcagcgaggtgtgtgaggacatcgcctctgtgctggcctgcaacagcaagctgaagcacctgagcctggtggagaaccccctgagagatgagggcatgaccctgctgtgtgaggccctgaagcacagccactgtgccctggagcggctgatgctgatgtactgctgcctgacctctgtgtcctgtgacagcatcagcgaggtgctgctgtgcagcaagagcctgagcctgctggacctgggcagcaatgccctggaggacaacggggtggccagcctgtgtgccgccctgaagcaccctggctgcagcatccgggagctgtggctgatgggctgcttcctgaccagtgacagctgcaaggacattgctgctgtgctgatctgcaatggcaagctgaagaccctgaagctgggccacaatgagatcggggacacaggagtgcggcagctgtgtgccgccctgcagcacccccactgcaagctggagtgcctgggcctgcagacctgccccatcacccgggcctgctgtgatgacattgctgctgccctgattgcctgcaagaccctgcggagcctgaacctggactggatcgccctggatgctgatgctgtggtggtgctgtgtgaggccctgagccacccagactgtgccctgcagatgctgggcaactgccagaagagcctgggggacacagtggcccctggagagaaccactgcagcatcaagcacctgctgctgaccctgcccatcaacatgcagaggcagctgcggctgcagaagtag

SEQ ID NO: 319685 - DNA, 2976 bp, Artificial Sequence
  derived and/or modified sequence
atggccgagagcttcttcagcgacttcggcctgctgtggtacctgaaggagctgagaaaggaggaattctggaagttcaaggaattgttaaaacaaccactcgagaaattcgaattgaaacccattccttgggctgagcttaaaaaggcttcaaaggaagatgtagctaagctcctggataaacactatccaggaaaacaggcctgggaggtgacccttaatctgttcctgcagatcaatcggaaagacctgtggactaaggcgcaggaggaaatgcgaaacaaacttaacccgtatcgcaagcatatgaaagaaacgttccagctaatctgggaaaaagaaacatgtctccacgtgccagaacacttctacaaagagactatgaagaatgagtataaagaattaaacgacgcttatacagctgccgcccgcaggcacacagtcgttcttgagggtcccgatggaattggtaagacaacactgctccgtaaggtcatgctggattgggccgagggcaacctgtggaaggacagattcacctttgttttctttcttaacgtgtgcgaaatgaacggtattgctgagacgtcgctgcttgagctgctgtcccgcgattggcccgaatccagcgagaaaatcgaagacatcttctctcagcccgaaaggatcttatttatcatggacggcttcgaacagcttaagtttaacctgcagcttaaggccgatctgagtgatgattggcgacaaaggcagcccatgcctattatcctttcctctctgttacaaaagaagatgctgccagaaagctctctgcttattgcattggggaagctcgccatgcagaaacattacttcatgctgaggcacccgaaattaataaagttgctcgggtttagtgagagtgaaaagaagagctacttctcatacttttttggggaaaagtcaaaagcattgaaggtattcaacttcgtaagagacaacgggccactgttcattctgtgccataaccccttcacttgttggctagtgtgtacttgtgtcaaacagaggctggagaggggcgaagacctcgaaatcaattcccaaaacactacttatctatacgccagcttcctgaccacagttttcaaagcgggcagccagagcttccctccaaaagtaaatcgcgcccggcttaagtcactttgtgctctcgcggccgaggggatctggacttatactttcgttttttcccacggtgatctgaggaggaatggactatcggaaagcgagggggtgatgtgggtgggaatgcggcttcttcagcggcggggtgactgctttgcttttatgcatctgtgtatccaggagttctgcgccgccatgttctacttactgaaacgccccaaagatgaccccaatcctgctatcggttccattactcaactcgtgagggcatcagtcgtccaaccccaaacgcttcttactcaggtcggtatcttcatgttcggcatttcgacagaagaaattgtatcaatgctagagacctccttcggatttcctctgagcaaagatctgaagcaagagatcacacagtgcctggagtctctcagccagtgtgaagccgacagagaggccatcgcctttcaggagctgtttattggactgttcgaaacccaggagaaggagtttgtcaccaaagtgatgaatttctttgaggaggtcttcatctacatcgggaatattgaacatctggtgattgcttccttttgtctgaagcactgccagcacctgaccacactgagaatgtgtgtcgaaaacatctttccagacgatagcggttgcatcagtgactacaatgagaagttggtctattggagagagctgtgcagcatgtttattactaacaaaaacttccagattctcgatatggagaacacatctcttgatgatccatctctggctattttgtgcaaggccctggctcagccagtatgtaaactgcgtaaactgatatttacatcggtttattttggccacgactctgagctttttaaggctgtgctgcataacccccacctgaagctgctgtccctgtacggcacatcactttcacaaagtgacatcaggcatctctgcgaaaccctcaagcatcctatgtgtaaaatagaagagctgattctcgggaagtgcgacatctccagcgaagtctgcgaagacatagcctcagtgctggcctgcaacagcaaactgaagcatctgtctttggtcgaaaacccgcttagagatgaaggcatgactcttttgtgcgaagcactgaagcactcccattgtgctctggaacggctcatgctgatgtattgctgtctcacctcagtgtcctgtgatagtatcagcgaagttttactgtgctctaaaagtttgtcactgctggacctgggctctaacgctctggaagacaacggagttgcctccctatgtgccgcactgaaacacccgggttgctcaatccgggagctgtggctgatgggatgtttcctaacttcggattcctgcaaggacatcgcggctgtgcttatctgtaacgggaaactcaagaccctgaaactcggacataacgagattggggatacaggagtgcggcaactctgcgctgctctgcagcatcctcattgtaaactagaatgtctgggtctgcagacatgtccaatcacccgggcatgctgcgatgatatcgctgcagcgctgattgcttgcaagacactgcggtctctcaacctggactggatagcgttggacgcagacgccgttgtagtcctctgtgaggctctcagccaccctgattgcgctcttcagatgcttggacttcataagtctggatttgacgaggagacccaaaaaattctgatgtctgttgaagagaaaatccctcatttgacgataagccatggcccttggattgacgaggagtataagattcgtggcgtgcttctctag

SEQ ID NO: 319686 - DNA, 2961 bp, Artificial Sequence
  derived and/or modified sequence
atggccgagagcttcttcagcgacttcggcctgctgtggtacctgaaagagttgagaaaagaagaattctggaagtttaaggagctgctaaagcagcctcttgagaagttcgaactgaagccaatcccctgggctgagctgaagaaggccagtaaagaagacgttgccaaactgctcgataaacattacccagggaagcaggcgtgggaagtgactctgaacctctttctgcagattaaccgaaaagatttatggacaaaggcccaggaggagatgcgcaataagttgaacccataccgaaagcatatgaaggagactttccagttaatttgggaaaaggagacctgcttgcacgtgcccgagcatttttataaggaaacaatgaagaacgagtacaaggagctgaatgacgcctacaccgccgccgctaggcgacacaccgtggttctggagggacccgatgggatcggcaagacaacccttctgcgaaaggttatgttagactgggccgaagggaatctgtggaaagacagatttacttttgttttcttcctgaacgtgtgtgagatgaatggcattgcggaaacctctcttctcgaacttctgtctagggactggcccgagtctagcgagaaaatcgaagatatctttagtcaacccgaacggattctctttatcatggatgggtttgagcaacttaaatttaacctccagcttaaagcggacctttctgatgattggaggcagcgacagccaatgcctataattctgtcttccctgctccaaaagaaaatgctcccggaatcttctcttctgatcgccttgggaaagcttgccatgcagaaacactacttcatgctgaggcaccccaagcttatcaaacttctcggcttttctgaatcagaaaagaagtcttactttagttacttttttggcgaaaaatccaaggccctgaaggtttttaactttgtacgcgataacgggccccttttcattctgtgccacaatccgttcacctgctggctcgtgtgcacgtgtgtgaagcagaggcttgaacggggcgaggatttggaaatcaacagtcagaataccacatacctctatgcttcattcctcactactgtattcaaggcgggatcacaaagctttccccccaaagtgaatagagcccggctgaagtctctgtgtgctctggcggctgaaggcatttggacatatactttcgtgtttagtcatggggatttacgacgaaacggcctgtccgagtctgaaggagtcatgtgggttggcatgcgactgctgcaaaggcgtggcgattgttttgccttcatgcacctgtgtatccaggaattttgtgccgcgatgttttacctgctcaagagaccaaaagacgatcctaaccccgctatcggctctattacacagctggtgcgcgcgtctgtcgtacagccccagactctcctaactcaagtggggatctttatgttcggaatatccacggaggagattgtctccatgcttgagacctccttcggcttcccactgtcaaaagatctcaagcaggaaatcactcagtgcctggaatcactgtctcagtgtgaggcagatcgagaagcaattgcattccaagaactttttattggactgttcgaaacacaagaaaaggagtttgtgactaaggttatgaacttctttgaagaagttttcatttacattggcaacatcgagcatctggtgattgccagtttttgcctgaagcattgccagcacttgaccacgctgagaatgtgtgttgaaaatatctttcccgacgacagcggctgcatatctgattacaatgaaaagcttgtatactggagagagctgtgttcgatgtttattactaacaaaaactttcagatattagatatggagaatacctcgttggacgacccaagtctggctatcctgtgcaaggcgctggctcagcctgtgtgcaaactgcgcaaactcatcttcacctcggtgtatttcggtcatgattcagaattgttcaaggcggtgctgcataatcctcatttgaagttactgtcattatatggaaccagcttatcgcagagtgatattcggcacctgtgtgaaacgctcaagcatcccatgtgtaagatcgaggaattgatactgggcaagtgcgacatctcaagcgaagtgtgtgaagatatagctagcgtacttgcttgtaacagcaagctcaaacatctgtctctggttgaaaaccccctgcgcgacgaaggcatgacacttctgtgcgaagcactgaaacatagccactgtgccctggagcgacttatgctcatgtactgttgtctgaccagcgtgtcttgcgactctatctctgaggtgctgctgtgtagtaagagtcttagcctgctggatctgggatctaatgctcttgaggataacggggtggcgtctctgtgtgcagcgttaaaacatcccggatgtagcatacgggaattgtggctcatggggtgttttttgacgtcagactcatgtaaggatatcgctgccgtactcatctgcaatggcaagttaaagaccctgaaactggggcacaacgaaatcggagatactggcgtgaggcagctgtgtgctgcgctacagcacccccactgtaagcttgaatgcctggggctccaaacctgcccaatcacccgggcctgttgcgacgacatcgcggctgcactgattgcatgtaaaaccctacgatctctcaatctcgactggattgccctggatgccgatgctgtagtagtgctgtgcgaagctctgtcccaccccgactgcgccttacaaatgctcggtaattgccaaaaaagtttgggcgacaccgttgcaccaggtgagaatcattgttctattaaacatctcctgctgacacttcccattaatatgcaaaggcagctaagattacaaaaatag

SEQ ID NO: 319687 - DNA, 2976 bp, Artificial Sequence
  derived and/or modified sequence
atggccgaatccttcttttctgactttgggttgctgtggtatctcaaggagttaagaaaggaggagttctggaaattcaaagagctgttgaaacagcccctggaaaaatttgagctaaagccgattccttgggcggaactgaaaaaagcttccaaagaggacgttgctaaattgctggataaacactacccagggaagcaagcctgggaagtcaccctaaatctgtttctgcagattaacaggaaagacttgtggacgaaggcccaggaagaaatgcgtaacaagctcaacccatatcgtaaacatatgaaggagactttccaactgatttgggagaaagagacatgtttacacgtgccagaacacttttataaagagacgatgaaaaacgagtacaaggaactgaacgacgcctacactgctgccgctcgtaggcatacagtggttctagagggtcccgacggaatcggtaaaacaacgctcttgcgcaaggttatgctagattgggctgagggcaatctctggaaggaccgattcacattcgtgtttttccttaatgtctgtgagatgaatggcatagctgagacctccctgttggagctcctgtcacgagactggcccgaaagttccgaaaagatcgaagatatcttctcacagcccgaacgtatcctctttatcatggatggctttgagcagttgaaattcaaccttcagttgaaagctgacctgtctgatgactggcggcagaggcaaccgatgcccattatcctcagttcactgcttcagaagaagatgttgcctgaatccagcttactcatcgctctcggaaagctggcaatgcagaagcattatttcatgctccgccatcccaaactgattaagctgctcggattttcagagtccgagaaaaagtcctatttctcctacttcttcggggagaagtccaaggccctcaaggtcttcaactttgtaagagacaacgggcctctgttcattctctgtcataacccctttacttgttggctggtatgtacatgcgttaaacaacgcttagaacgcggtgaagacctggagattaacagccagaataccacctatctctacgctagcttcctgacaacggtatttaaggcaggcagccagagttttccacctaaagtcaatcgtgcaaggctgaagagcctgtgtgctctggcagccgaagggatatggacctatacattcgtcttctcacatggtgatttgaggcggaacggcctctcggagagtgaaggggtaatgtgggtgggaatgcgactcctccagaggaggggtgattgcttcgccttcatgcatctgtgcattcaagaattctgtgctgcgatgttttatctcctgaagcggcctaaggatgacccaaatccggctatcgggtcaatcacgcaactggtgagggcttccgtggtccagccccagactctattgactcaggtcgggattttcatgttcggcattagcaccgaggaaatcgtcagcatgctcgagacttctttcggttttcccctgtctaaggatctgaaacaggagattacacaatgcttagagtcgctgtctcagtgcgaagctgaccgcgaggcgatagcattccaagagctgtttatcggccttttcgagacccaggaaaaagagttcgttacgaaggtgatgaattttttcgaggaggtgttcatctacattggaaatatcgagcacctggtgatcgcctctttttgcttaaaacattgccagcatttaacaaccctccgcatgtgcgtggagaatattttccctgacgactcaggctgtatctccgactataacgaaaaacttgtttactggcgagagctgtgctccatgttcatcaccaacaaaaactttcagattcttgatatggaaaacacctcactcgatgacccatcactcgccattctgtgtaaggctctcgcccagcctgtttgtaagcttagaaaacttattttcacctccgtgtatttcgggcatgattccgagttgttcaaggctgtgttacacaaccctcaccttaagctgctgtctctctacggcacatcgctgagtcaaagtgacattcgtcatctttgtgaaactttgaaacaccctatgtgcaagatagaagagctaattctgggtaagtgcgacattagctccgaagtgtgtgaggacatcgcaagcgtactggcctgtaattccaagctgaaacatctgagtctcgtcgagaacccactccgggacgagggcatgacactgctctgtgaggctctaaagcactcacactgcgccctggagagactgatgcttatgtattgctgtctgacatccgtgtcttgtgattctatttcagaggtgttactatgctccaagtctctgtcactgcttgatctcggttctaatgccctggaggacaatggcgtcgcatccctctgcgccgctctgaagcatcccggatgcagtatccgggaactttggctgatgggctgcttcctcacatctgactcctgtaaggatatcgccgcagtgctgatctgcaacggcaagctgaaaacgctcaagctgggccacaatgagatcggagatacaggggtgaggcagctgtgtgctgctctgcaacaccctcactgtaagctagagtgtctaggtctgcaaacatgcccgattactagagcttgttgtgatgatattgcagcagccctgatcgcatgcaaaacccttcggtcactgaatctagactggatagctctggatgccgatgcagtggtggtgctgtgtgaggcactctcccatccggattgcgcattgcagatgctcgggttacataagtcagggtttgacgaagaaacacagaaaatactgatgtcagtggaggaaaagatcccgcaccttacaataagtcacggtccttggatagacgaagagtataagatccggggtgtccttctgtag

SEQ ID NO: 319688 - DNA, 2961 bp, Artificial Sequence
  derived and/or modified sequence
atggccgagagtttcttttcggattttggccttctgtggtatctgaaagagttacggaaggaggagttctggaaattcaaggagctgctgaaacagcctttggaaaaattcgagttgaaacctatcccctgggcagagttgaagaaagccagtaaggaggatgtcgctaagctgttggataagcattacccgggtaagcaggcttgggaagtgaccctcaacctcttcctccagattaacagaaaggacctgtggacaaaagcacaagaggaaatgaggaataaattaaatccataccgcaaacacatgaaagagacgttccagcttatttgggaaaaggaaacctgcctccatgtgcccgagcatttttacaaagagaccatgaaaaacgaatataaagagctcaacgacgcatacactgcagccgctcggaggcataccgtggtgctggaggggccagatggcatcgggaaaactacccttcttagaaaagtgatgctggactgggctgaagggaatctttggaaggatagattcacttttgtgtttttccttaatgtctgcgagatgaacggaatagcagaaacaagcctgttggagcttctgagtcgagactggccagagagttctgaaaaaatcgaggatattttctcgcagccagaacgaatcttgttcattatggacggattcgaacagctgaagttcaacctgcagctgaaggctgatctgagcgacgattggcgacagcgccaacctatgcctatcatcctgagcagccttctacagaagaagatgttgccagagtcctccctgctgatagccctgggaaaactggccatgcagaagcattacttcatgttacggcaccccaagttgatcaagctgctgggattttcggaatctgaaaagaagagctatttctcttatttcttcggggagaaatctaaagcattaaaagtctttaacttcgttagggataacggccctctgtttatcctctgtcataaccctttcacatgttggctagtgtgtacttgcgttaagcagcgactagaaaggggggaagaccttgagattaacagccagaatactacctatttgtatgcgagcttcttaacgaccgtgtttaaggccggaagtcagtcgttcccacctaaagttaaccgggcacggcttaagagtctctgcgccctggctgcagaggggatttggacttatacctttgtgtttagccacggcgatcttaggcggaatggtctttccgaaagcgaaggcgtcatgtgggtgggcatgcgacttcttcagcgaaggggagactgctttgcctttatgcacctgtgcattcaggaattttgcgcggctatgttttacctgctcaagaggcccaaggacgaccccaatcccgcaatcggctctatcacccagttggtgcgcgctagcgttgtacagccacagactctgctgactcaggtagggatttttatgtttggcatatcaacggaagagatcgtgtccatgctcgagacaagttttggattccccttgtctaaagacctcaagcaagagattactcaatgcctggaaagtttgagccagtgcgaagctgaccgagaggcaattgcgttccaggaactgttcatcgggctgtttgagacccaagaaaaggagttcgttaccaaagtaatgaacttcttcgaagaggtgttcatctacatcggcaacatcgagcacctcgtgatcgcaagcttctgtcttaaacactgccagcacctcaccacgttgagaatgtgcgtggagaacatcttcccagacgatagcggttgcatctcggattacaatgagaaacttgtctactggcgggagttgtgttctatgtttatcacgaacaagaatttccaaatattggacatggagaacacctctcttgatgacccctctctggccatcctgtgcaaagctctggcacaacctgtatgcaagctgcgaaagctgatatttacctcagtttactttgggcatgactctgaactcttcaaagcggtactacacaatcctcacctgaagctgctgtctctgtatggcacgagcctatctcagtctgatatcaggcacctctgcgaaacgctcaaacacccaatgtgcaagattgaagagctgatactgggtaagtgcgacatctcttccgaagtttgtgaggatatcgcaagcgtgctggcatgcaattccaaactgaaacacctttcactggtggaaaaccccctgagggacgaaggaatgacactcctgtgcgaggcccttaaacattcccactgtgctcttgagagattgatgctaatgtattgctgcctgacttctgtgtcgtgcgacagcatctcagaagtactgctctgctcaaaatcactgagtcttttggatctgggatccaatgctttagaagataacggtgttgcgtcgctgtgtgctgccctgaagcatccaggatgcagtataagggagctctggttgatgggatgcttcctgactagcgattcatgcaaggacattgccgctgtgctgatttgtaacggaaagctgaagacccttaaactgggacacaacgaaataggtgacacaggagtgcggcagttgtgcgctgcattgcagcaccctcattgcaagttagaatgcctcggcctccagacttgccccatcacaagggcctgctgtgacgacatcgccgcagccctgattgcctgtaaaacgctcagaagcttgaacctagactggattgctctggacgccgacgcagttgtagttctgtgtgaagctctgtctcaccctgactgtgcccttcaaatgctgggaaactgtcaaaagtcactgggggataccgttgcccctggggaaaaccattgcagcatcaagcacctcctacttaccctgcctatcaacatgcagagacagctgaggctacagaagtag

SEQ ID NO: 319689 - DNA, 3347 bp, Artificial Sequence
  derived and/or modified sequence
aggtcgcgacggcagccacaggtggcagtcgggggtggctgtaattgatcctcgccccaatggggatccggcagcagctgcgcttgcccacgaggactgcccagccattgaccagcctgccatgtccccggaagacaagagccccatcacgcctggaagccgtggccgctatagccgggaccgagcctgcttcctcctcaccgactatgccccttcccctgatggctccatccgaaaagctcttgtcaccgcctgagacctcgcgagactttcggtcccccccgccccttccccccaggttacgagaaatcccgcagcctcagcagcatcgcgggcctgagcggggtgtccctgcgcctcgcgccccttgccaccccccctggctctccccgggccgcccgccgcgctcccccgaccctgccctccatcctttagcgctcccctcccccctgtggggggactcgggggtgaccgggaagaaggtcaaaggagctgggggtggggggtggggaaaagggtttttttaaaaaaaatcaaaaagtcattaataatatgcaaccgagatgacgatgccagcagacacccccgggcccctcacccccaacctgggcccccaggatggagagaggggccacagcccgtccccccaactcttccctccccaaaaaaagccttctcaggtctccacgagccataggacatccccctgccatcaacttgtgtaaataagtccaaattatgccagttacatcttggggcacctccccccacacactgcatgccttccctaacctggagcccccactccaagtccacctcagcaataagccgccaggggccgcatgcgcgggtttgaggggcaggcactctgggaagggggtggcacctcccgggggtcgggctggcctttaaggtctccagccttcccatccttcaccccaggaggacaaccaaccctgtgcgttgattaggagaaaacaaaccagaaactagaaacagtgtaggggaaggaggaacagttacccaagccccagatcggagttgagctcaggtggcgggagggcggggccgagttgagctcaggtggtgggagggcggggcgggctttggacctgctccctcagcctttaggagaattcctctggtgaatttcaccctctcatccgccccttcccccagggacctgctcgcctctattcttgctgcatggactcagacctcctatcccagaattcctgggatgatctggccctagcacacgaaattccccgactatctccctccattcccaggacatgagacctgcacccagaattctgagactgaccctggcacgccacatctcccaatccccacacactcctgcgacttaacctctgcacacagaggctccctgaaccaccctccctccccactcctgccaccccaaacacccccaccaaattccctgaactgcgtcccagcacttctcaaacctccaagacttgacccagctcttttcagctcaaattcagcctttgggatgctccaaatccttcccacaactgacatttcttggacacccccaaagcctcaggcctgttccgcacccatatccccaaagccctaacagacttgtccagcccaggttcccttgatgctagaacttccaagataggcgcaacctgtctgcaattccagggaaccagaccctccccaagcaccctctttgtcttacgcctaaccctgagtctcttccctgagatggtgccccaaaggtaccctcttcacagacaccagtgtttcccagagggttgtatttgtacctttggtggtgtgctaaggtttgaggcagtatgaggacaaacacttgttttaaaagttttgtctctaatacgcattttgtacagaagccgataagtgcaggcatcgctgcttggctaggacacggtttatttaggttaagagtgtttccatttaaagtagtccacagatgatcacagaggctgttcccgaagggaggaacactggagtatcagaagattgggaaccgacaacacccagctcggctgggatcccagccccccttccccagcggtcctcaccgcgtcacgctcgcgggtggaaaatcatttcccacctcctatcctggctcaaggatgcgctacctcccccaagcccagagaccacaccggtcccagactctttagcggaccccccttttggagccggggtcccacggaattagccacctccctccctctgctcccacggcctcaggaaccccccacccgagggtggatggggggcgtcactgagcacgattctcgatgcaacgattcctatgcaaggggcattttgagtcccccccatccttccctcggaccctaaaccctggtgaagcaggggtgaggggtggggcgggttttggtgggggcggggcaaagggctaggggctccagacaccagggtacggggtggggactgattatattgccaaagggttcaacttctttaacaagcccccccgtttcccctgaccttcacgaaagccgaaggaggcggggaaagggggtgagggtcttttccaaagggtactgacctcttcccaacgtctccccctgctcgccagtccgccacacgtacccagcttttgagttcagcttttcaaaataaccacaatcatgataaacttctacaaaacgtgattctcctcccctcccaccccatcccccaagtcaatagtgtgggattcggggagggagagagcgagctaaagggactctttccaagtccggctcccccttttccccccggccgccagggtgcctgcacctacacgcatgcgctgcatgacgcgccccccacacgcatgtcgcacccctcctgcgctccgggaacgcacggacacgggccagggggcggggcgattggggaggaatgaatggcggggggtcttcctgagctccgcggctcaccctccccaacacacacacacacacacacagagcaataagtttctctcactcaaatgtgggcggggcgggcctagcctgtcgctggtggggggagtggtgagggggcgctctcagggatgggggcggggttcggagacagtgtggggaggggaggtctgcaaatcgtccaactctggtgctaatggcgggtcttctcagcccacccgcagggcagggagggaggggtcggcgtggccccttccccaagcctcccccacgcccaccctgggtgcatgaaccgcccaatgcagaagctgccgcatgtcacccccctctccccaaagaaaaagtgtcatgcccccttcccacccaccctcactccccaccaaaataaacgtttccttttcattt

SEQ ID NO: 319690 - protein, 728 aa, Artificial Sequence
  derived and/or modified sequence
MLSSVCVSSFRGRQGASKQQPAPPPQPPESPPPPPLPPQQQQPAQPGPAASPAGPPAPRGPGDRRAEPCPGLPAAAMGRHGGGGGDSGKIVINVGGVRHETYRSTLRTLPGTRLAGLTEPEAAARFDYDPGADEFFFDRHPGVFAYVLNYYRTGKLHCPADVCGPLFEEELGFWGIDETDVEACCWMTYRQHRDAEEALDSFEAPDPAGAANAANAAGAHDGGLDDEAGAGGGGLDGAGGELKRLCFQDAGGGAGGPPGGAGGAGGTWWRRWQPRVWALFEDPYSSRAARYVAFASLFFILISITTFCLETHEGFIHISNKTVTQASPIPGAPPENITNVEVETEPFLTYVEGVCVVWFTFEFLMRITFCPDKVEFLKSSLNIIDCVAILPFYLEVGLSGLSSKAAKDVLGFLRVVRFVRILRIFKLTRHFVGLRVLGHTLRASTNEFLLLIIFLALGVLIFATMIYYAERIGADPDDILGSNHTYFKNIPIGFWWAVVTMTTLGYGDMYPKTWSGMLVGALCALAGVLTIAMPVPVIVNNFGMYYSLAMAKQKLPKKKNKHIPRPPQPGSPNYCKPDPPPPPPPHPHHGSGGISPPPPITPPSMGVTVAGAYPAGPHTHPGLLRGGAGGLGIMGLPPLPAPGEPCPLAQEEVIEINRADPRPNGDPAAAALAHEDCPAIDQPAMSPEDKSPITPGSRGRYSRDRACFLLTDYAPSPDGSIRKALVTA

SEQ ID NO: 319691 - protein, 542 aa, Artificial Sequence
  derived and/or modified sequence
MTYRQHRDAEEALDSFEAPDPAGAANAANAAGAHDGGLDDEAGAGGGGLDGAGGELKRLCFQDAGGGAGGPPGGAGGAGGTWWRRWQPRVWALFEDPYSSRAARYVAFASLFFILISITTFCLETHEGFIHISNKTVTQASPIPGAPPENITNVEVETEPFLTYVEGVCVVWFTFEFLMRITFCPDKVEFLKSSLNIIDCVAILPFYLEVGLSGLSSKAAKDVLGFLRVVRFVRILRIFKLTRHFVGLRVLGHTLRASTNEFLLLIIFLALGVLIFATMIYYAERIGADPDDILGSNHTYFKNIPIGFWWAVVTMTTLGYGDMYPKTWSGMLVGALCALAGVLTIAMPVPVIVNNFGMYYSLAMAKQKLPKKKNKHIPRPPQPGSPNYCKPDPPPPPPPHPHHGSGGISPPPPITPPSMGVTVAGAYPAGPHTHPGLLRGGAGGLGIMGLPPLPAPGEPCPLAQEEVIEINRADPRPNGDPAAAALAHEDCPAIDQPAMSPEDKSPITPGSRGRYSRDRACFLLTDYAPSPDGSIRKALVTA

SEQ ID NO: 319692 - DNA, 2187 bp, Artificial Sequence
  derived and/or modified sequence
atgttgtcatcagtgtgcgtgtccagttttaggggtcggcagggcgcttctaaacaacagcctgctcccccaccacagccaccagaatctccacctccccctcccttaccaccccaacagcagcagccagctcagcccggccctgccgcgtcgcctgccggccctcccgcaccgagggggccgggggacagaagggccgaaccttgtcctggactcccagccgccgccatgggtcgccacggcggaggcggaggcgacagtggaaagatcgttatcaatgtcggaggcgttaggcacgaaacctataggtccactcttcgcaccttaccaggcacaaggctcgccgggctaaccgagcccgaggctgctgccagatttgattacgaccctggcgccgacgaattctttttcgatcggcaccccggcgtctttgcttacgtactgaattattaccggacaggcaaattgcactgtccagccgacgtgtgtggccccctcttcgaagaggaactgggcttctggggtatcgacgagaccgacgtggaagcctgttgttggatgacttaccgtcagcaccgggatgccgaagaagccttggattcatttgaggcccccgacccagccggggcagcgaacgccgccaacgctgccggcgcacatgacggagggctagacgatgaggccggggccgggggcggggggctggatggagctggaggtgaactgaaacggctgtgcttccaggacgctggtgggggagcagggggccccccaggtggagccggtggtgcagggggcacctggtggagaaggtggcagccacgcgtgtgggcccttttcgaggatccatactcttctagagctgcacgctatgttgcttttgcaagtctcttttttattctcatctctatcacgacattctgtctcgaaacgcatgaggggttcattcacatctccaataaaacagtgacccaggcctcacctatccctggagctccccccgagaatattaccaacgtggaagttgagaccgagccatttctcacctacgtagagggagtgtgcgtggtatggtttaccttcgaatttttaatgcgcatcacattctgccctgacaaggtcgagttcctgaagtcgtctcttaacattatcgattgcgtggcaattctgccgttttaccttgaagtggggctttcgggtctgtctagcaaagcggccaaggatgtgttgggctttttgcgggtggtacggttcgtgagaatcttacgcattttcaagctcacacgccactttgtgggcctccgagtgcttggacacaccctgcgcgcgtcaacaaacgaatttctgctccttattatcttcctagccctcggggttttaattttcgctacgatgatctactacgcggagcggattggcgctgacccggatgacatcttgggctcaaaccacacatattttaaaaacatccctattgggttctggtgggctgtggttaccatgactacgctggggtacggagacatgtatcccaagacgtggtcaggcatgctagtgggggctctgtgtgccttggccggggtcctgacgatcgccatgcctgttcccgttatcgtgaataattttggcatgtactactccctggctatggcaaaacagaagctccccaagaaaaagaacaagcacatcccgcggccaccgcaaccaggctcccccaattactgcaaaccggatccccccccacctcctcctcctcaccctcatcacgggtccggaggtatttcccctccacccccgatcacaccaccttctatgggagtgactgtggccggagcctatcctgctggccctcacacccaccccggtttgctgcgcggcggcgccggaggcctggggatcatgggtcttccccctttacccgctcctggtgaaccctgccctctcgcccaagaggaggtcattgagataaacagagccgacccacggcctaatggcgacccagccgctgccgccctggctcatgaagattgtccggccatcgaccaacctgctatgtcgccggaggacaaatcacccataactccagggtctaggggccggtacagcagagatagggcttgttttttgctgactgattatgccccttctccggatggcagtatacggaaggccctggttacagcctag

SEQ ID NO: 319693 - DNA, 1629 bp, Artificial Sequence
  derived and/or modified sequence
atgacatacaggcagcatcgtgacgctgaggaggctcttgactccttcgaggccccagatcccgccggcgctgccaatgcagccaatgccgcgggggcccacgacgggggactcgacgatgaggctggtgccggaggcgggggactcgatggcgccggaggagagctgaaaagactctgttttcaggacgccggaggtggtgccggcgggccgccaggcggggccggaggggccggaggcacctggtggagacgatggcagcccagggtctgggccctgtttgaggatccatactcaagccgcgccgctcggtatgtggcattcgcctctctgttttttatcctgatctcgatcaccaccttttgtttggagacacacgagggttttattcacatttctaataagacagtgactcaagcttcacccatcccgggcgcccctcccgagaacataacgaatgtcgaggtagaaacagaaccatttctgacgtatgtggaaggagtctgtgtggtgtggtttacctttgaatttctgatgcggattacattttgtccagataaagtggagttcctcaaatcctctctcaacatcattgactgcgttgctatcctaccgttttatctggaggtggggctaagtggtctgtcctcgaaggcagcaaaggacgtgctcgggtttctacgggtggtgaggttcgtgcgtatcctgagaatcttcaagttgacccgccacttcgtggggctaagggttctagggcacactctcagggcttcaacaaatgagttcctgcttcttataatatttctggccctgggggtgctaatcttcgctactatgatctactatgcagagcggataggcgccgacccggatgatatccttgggtctaaccatacgtactttaaaaacatcccgatcggtttttggtgggctgtagtcactatgacaacgttgggctacggcgatatgtatcctaaaacttggtccggtatgctcgtgggggcattatgcgcgcttgcgggagttctgacgattgcaatgcctgtgccagttatcgtgaataactttggcatgtactattccttggcaatggcaaaacaaaagctccccaaaaaaaagaacaaacacatacctcggccgcctcagcccgggtcccctaactactgtaaaccggatccgcccccacctcctcctccgcacccccaccacggatccggcggaattagccctcctccacctatcaccccaccaagcatgggagtgaccgtggccggcgcctatcccgccggtcctcacactcacccaggccttcttaggggcggcgctggagggttaggtattatgggactgccacccctccctgccccaggtgaaccctgcccgctggcgcaggaggaagtcatcgagatcaaccgagccgacccccgcccgaatggtgatcctgcagccgccgcacttgcacatgaagactgcccggccatcgatcagcctgctatgagcccagaggataagtcgccgatcacacccggcagtcggggcagatacagtagggaccgcgcctgtttccttctgaccgattacgccccatcacccgacgggagcattcgtaaggccctcgtgactgcatag

SEQ ID NO: 319694 - DNA, 2187 bp, Artificial Sequence
  derived and/or modified sequence
atgctgagctctgtgtgtgtgtcctccttccggggccggcagggcgccagcaagcagcagcctgcccccccaccccagcccccagagagccccccacctccacccctgcccccccagcagcagcagcctgcccagcccggccctgctgccagccctgctggccccccagccccccggggccctggggaccggcgggcagagccctgccccggcctgcctgctgctgccatgggccgccacggcggcggcggcggggacagcggcaagatcgtcatcaacgtgggcggcgtgagacatgagacctaccgcagcaccctgcggaccctgcccggcacccggctggccggcctgacagagcctgaggccgccgccaggtttgattatgaccccggggctgatgagttcttctttgacagacaccctggggtgtttgcctacgtgctgaactactacagaacaggcaagctgcactgcccagcagatgtgtgtggccccctgtttgaggaggagctgggcttctggggcattgatgaaacagatgtggaggcctgctgctggatgacctaccggcagcacagagatgctgaggaggccctggacagctttgaggccccagaccctgctggggccgccaatgctgccaatgctgctggggcccatgatggcggcctggatgatgaggccggggccggcggcggcggcctggatggagctggaggagagctgaagaggctgtgcttccaggatgctgggggcggggccggcggccccccaggaggagctggaggagctgggggcacctggtggaggcgctggcagccccgggtgtgggccctgtttgaggacccctacagcagccgggccgcccgctacgtggcctttgccagcctcttcttcatcctgatcagcatcaccaccttctgcctggagacccatgagggcttcatccacatcagcaacaagacagtgacccaggccagccccatccctggggcccccccagagaacatcaccaacgtggaggtggagacagagcccttcctgacctacgtggagggcgtgtgtgtggtgtggttcacctttgagttcctgatgaggatcaccttctgcccagacaaggtggagttcctgaagagcagcctgaacatcatcgactgtgtggccatcctgcccttctacctggaggtgggcctgagcggcctgagcagcaaggccgccaaggatgtgctgggcttcctgcgggtggtgcgctttgtgcgcatcctgcgcatcttcaagctgaccaggcactttgtgggcctgcgggtgctgggccacaccctgcgggccagcaccaatgagttcctgctgctgatcatcttcctggccctgggcgtgctgatctttgccaccatgatctactatgcagagcgcatcggggctgaccctgatgacatcctgggcagcaaccacacctacttcaagaacatccccatcggcttctggtgggccgtggtgaccatgaccaccctgggctacggggacatgtaccccaagacctggagcggcatgctggtgggcgccctgtgtgccctggccggcgtgctgaccatcgccatgcctgtgcctgtgattgtgaacaactttggcatgtactacagcctggccatggccaagcagaagctgcccaagaagaagaacaagcacatcccccggcccccccagcccggcagccccaactactgcaagccagaccccccacctcctcctccaccccacccccaccacggcagcggcggcatcagccccccaccacccatcaccccacccagcatgggcgtgacagtggccggggcctacccagctggcccccacacccaccctggcctgctgcggggcggggccggcggcctgggcatcatgggcctgccccccctgcctgcccctggagagccctgccccctggcccaggaggaggtgattgagatcaacagagctgacccccggcccaacggggaccctgctgctgctgccctggcccacgaggactgcccagccatcgaccagcctgccatgagccctgaggacaagagccccatcaccccaggcagccggggccgctacagccgggaccgggcctgcttcctgctgacagattatgcccccagcccagatggcagcatcaggaaggccctggtgacagcctag

SEQ ID NO: 319695 - DNA, 1629 bp, Artificial Sequence
  derived and/or modified sequence
atgacctaccggcagcacagagatgctgaggaggccctggacagctttgaggccccagaccctgctggggccgccaatgctgccaatgctgctggggcccatgatggcggcctggatgatgaggccggggccggcggcggcggcctggatggagctggaggagagctgaagaggctgtgcttccaggatgctgggggcggggccggcggccccccaggaggagctggaggagctgggggcacctggtggaggcgctggcagccccgggtgtgggccctgtttgaggacccctacagcagccgggccgcccgctacgtggcctttgccagcctcttcttcatcctgatcagcatcaccaccttctgcctggagacccatgagggcttcatccacatcagcaacaagacagtgacccaggccagccccatccctggggcccccccagagaacatcaccaacgtggaggtggagacagagcccttcctgacctacgtggagggcgtgtgtgtggtgtggttcacctttgagttcctgatgaggatcaccttctgcccagacaaggtggagttcctgaagagcagcctgaacatcatcgactgtgtggccatcctgcccttctacctggaggtgggcctgagcggcctgagcagcaaggccgccaaggatgtgctgggcttcctgcgggtggtgcgctttgtgcgcatcctgcgcatcttcaagctgaccaggcactttgtgggcctgcgggtgctgggccacaccctgcgggccagcaccaatgagttcctgctgctgatcatcttcctggccctgggcgtgctgatctttgccaccatgatctactatgcagagcgcatcggggctgaccctgatgacatcctgggcagcaaccacacctacttcaagaacatccccatcggcttctggtgggccgtggtgaccatgaccaccctgggctacggggacatgtaccccaagacctggagcggcatgctggtgggcgccctgtgtgccctggccggcgtgctgaccatcgccatgcctgtgcctgtgattgtgaacaactttggcatgtactacagcctggccatggccaagcagaagctgcccaagaagaagaacaagcacatcccccggcccccccagcccggcagccccaactactgcaagccagaccccccacctcctcctccaccccacccccaccacggcagcggcggcatcagccccccaccacccatcaccccacccagcatgggcgtgacagtggccggggcctacccagctggcccccacacccaccctggcctgctgcggggcggggccggcggcctgggcatcatgggcctgccccccctgcctgcccctggagagccctgccccctggcccaggaggaggtgattgagatcaacagagctgacccccggcccaacggggaccctgctgctgctgccctggcccacgaggactgcccagccatcgaccagcctgccatgagccctgaggacaagagccccatcaccccaggcagccggggccgctacagccgggaccgggcctgcttcctgctgacagattatgcccccagcccagatggcagcatcaggaaggccctggtgacagcctag

SEQ ID NO: 319696 - DNA, 2187 bp, Artificial Sequence
  derived and/or modified sequence
atgctgagcagcgtgtgcgtgagcagcttccggggccggcagggcgccagcaaacagcagcctgcacctcccccccaaccccctgagagtcccccccctcccccactgccccctcagcagcagcagcccgcgcagcccggtccagcagcctccccggcaggcccacccgcccctcgcggacctggggatcggagagccgagccttgtccaggtcttcctgccgctgccatgggacggcacggagggggaggcggcgattcaggtaagattgtcattaacgtaggtggggtcaggcacgaaacttaccgatccacgctgaggactctgccaggcactagactcgccggactcactgaaccggaggcagcagctcggttcgactacgatcctggtgcggatgagtttttctttgacaggcatccaggcgttttcgcctatgtgctgaactactatcgtaccggcaagctgcattgccctgcggatgtgtgcggccccttatttgaggaggagctggggttctggggaatcgatgagacagatgtggaggcctgttgttggatgacctatcgtcagcacagagacgccgaggaagctctggatagctttgaagcaccagacccagccggtgccgcaaacgctgctaacgccgcaggggctcatgatggcgggttggacgacgaggcaggggcagggggtgggggtctggacggcgctgggggggagctcaagaggctttgctttcaggatgcgggagggggcgcaggcggacccccgggaggagctggaggcgcaggggggacatggtggcgccggtggcagccacgagtgtgggccctgttcgaagatccttacagttctcgcgccgctcgttatgtagccttcgcatctttattttttattctgatcagcataactacattctgccttgagacacacgaggggttcatccatatttcgaacaaaacagtgacacaagccagtcccattccaggggcacctccggagaatatcacaaacgtggaggtggagacggagcccttcctgacatacgtcgagggcgtttgcgtggtctggttcacatttgagttcctgatgagaatcacattctgtcccgacaaagtggaattcctaaagtcaagcctaaacatcatagactgtgttgctattctccccttctatttggaggtagggttgtccgggctaagctcaaaagctgctaaggacgtccttggcttcctgcgagttgtcaggttcgtgcggatcttaagaattttcaagctgactaggcatttcgttgggctgcgagtactgggacatacactgagggcgtcgacaaatgagttcctgttgctgattattttcttagcactaggcgttctaatctttgccaccatgatctattatgccgagaggatcggcgctgatcccgacgatattctgggctcgaaccatacatatttcaagaatattcccatagggttttggtgggcggttgtaaccatgactacactcggctatggcgacatgtatcctaagacttggtcaggtatgctggttggcgcactgtgtgcgctggctggtgtgctcaccattgctatgccagtacccgtgatcgtgaataactttggcatgtactattctcttgctatggccaagcagaagcttcccaaaaagaaaaataagcatattccccggccgccccagccaggaagcccaaactactgcaagcctgatcctcccccccctcctcctccccatccccaccatgggagtgggggcatctccccccctcccccgataacaccaccatcaatgggcgttacggtagcaggtgcctatccagcaggcccgcatacccacccagggttgttaagagggggagcgggaggtctaggcatcatggggctgccccctctgcctgccccaggcgagccatgcccactggcacaggaggaggtcattgaaatcaacagagctgacccacgacctaatggtgatccggccgcagcggcgttagcacatgaggattgtccagcgatcgatcagcccgctatgagccccgaagacaagagtccaatcacccccgggagtagaggcagatatagccgtgaccgcgcctgctttctgctgaccgattacgcccccagccctgacggctccattaggaaagcattggttacagcctag

SEQ ID NO: 319697 - DNA, 1629 bp, Artificial Sequence
  derived and/or modified sequence
atgacctaccggcagcaccgggacgccgaggaggccctggacagcttcgaggctccagatcccgccggagccgctaacgccgcaaacgctgccggagcacatgacggtgggctggacgacgaagccggagctgggggaggcggtctggacggggcaggcggggagctcaaaagactttgctttcaggacgctgggggaggagcaggaggcccccccgggggcgccggaggtgcgggaggtacctggtggaggaggtggcagccacgcgtttgggccctgtttgaggatccgtatagctcccgcgccgcaaggtatgttgcttttgccagtcttttcttcatccttatcagcataaccacgttctgtttggaaacgcatgaaggatttatacacattagtaataagacagtaactcaggcttcccctatccccggggcccccccagaaaacataaccaatgtggaggtagagactgagccatttctcacctacgtcgaaggagtgtgtgttgtgtggtttaccttcgaattcttgatgaggattacgttttgcccagacaaggttgaattcctgaagagttccctgaacatcatcgactgtgtcgcaatcctgcctttctacctggaagtcggactgtccggactgtcttctaaggccgctaaggacgtgctgggttttcttagagtggtacggtttgtccgaatcctgaggattttcaagctcacacgccacttcgtaggcctacgggtgctgggtcacaccctgcgcgcatcaacgaacgagtttctgcttctgattattttcctggcacttggagtcctgatatttgcaactatgatttactatgcggaacgcattggtgccgatcctgacgatatcctgggatctaatcatacctacttcaaaaatatccctatcggcttttggtgggcggtggtgacaatgaccacactgggatacggggacatgtatcctaagacgtggtctggcatgctcgtaggcgccctctgtgcccttgccggtgtgctgaccatcgcaatgcctgtcccagtgattgtgaacaactttgggatgtattattctctcgctatggcaaagcaaaagctgcctaagaaaaaaaacaagcacatccctcgaccaccccagccaggaagccccaactattgcaaaccagaccccccaccaccgccgccgcctcatccccatcacggaagcggagggatttccccgccaccgccaattacacctcctagcatgggtgtaactgttgccggggcataccccgcaggcccacacactcaccctgggttgctgagaggaggggccggggggctggggattatggggctccccccactgcctgcacccggcgaaccttgccctttggcccaggaagaggttatagagattaaccgggctgacccgaggccgaatggcgatcctgctgccgctgcactggcacacgaagactgcccagccatcgatcaacccgcgatgagcccggaagacaagtcccctatcactccgggctcaaggggccgctactctcgagatagagcctgctttttgcttacagactatgcaccctcaccagacgggtcaatacggaaggcgctggttactgcctag

SEQ ID NO: 319698 - DNA, 5447 bp, Artificial Sequence
  derived and/or modified sequence
cccagccacagccccgccccacctcccccaggccaatcagtttggttcctctcccctaagccacgcccccgctacctcgctcctcctcccacccaatcccgtcggtctctccccccgtgtccccgcccctgcgtccccgcccctcccgccccgccccccgtccaatgctgagctcagtctgcgtctcgtccttccgcgggcgccagggggccagcaagcagcagccggcgccaccgccgcagccgcccgagtccccgccgccgccaccgctgccgccgcagcagcagcagcctgcgcagcccggccccgccgcgtccccggcgggccccccggcaccccgcgggcccggggaccggcgcgccgagccatgccccgggctgccggcggcggccatggggcggcacggcggcggcggtggcgacagcggcaagatcgtgatcaacgtgggcggcgtgcgccatgagacgtaccgctcgacgctgcgcaccctgccggggacgcggctggccggcctgacggagcccgaggcggcggcacgcttcgactacgacccgggcgccgacgagttcttctttgaccggcacccgggagtcttcgcgtacgtgctcaactactaccgcaccggcaagctgcactgcccagccgacgtgtgcgggcccctgtttgaggaggagctcggcttctggggcatcgacgagaccgacgtggaggcctgctgctggatgacctaccggcagcatcgcgacgctgaggaggcgctcgactccttcgaggcgcccgaccccgcgggcgccgccaacgccgccaacgccgcaggcgcccacgacggaggcctggacgacgaggcgggcgcgggcggcggcggcctggacggagcgggcggcgagctcaagcgcctctgcttccaggacgcgggcggcggcgccggggggccgccagggggcgcgggcggcgcgggcggcacatggtggcgccgctggcagccccgcgtgtgggcgctcttcgaggacccctactcgtcgcgggctgccaggtatgtggccttcgcctccctcttcttcatcctcatctccatcaccaccttctgcctggaaacccatgagggcttcatccatattagcaacaagacggtgacccaggcctccccgatccccggggcacctccggagaacatcaccaacgtggaggtggagacggagcccttcctgacctacgtggagggggtgtgcgtggtctggttcaccttcgagttcctcatgcgcatcaccttctgcccagacaaggtggagtttcttaaaagcagcctcaacatcatcgactgtgtggccatcctgcccttctatctcgaggtgggcctctcgggcctcagctccaaggccgccaaagacgtgctgggcttcctgcgggtggtccgcttcgtccgcatcctgcgcatcttcaagctgacccggcacttcgtggggctgcgcgtgctgggacacacgctccgcgccagcaccaacgagttcctgctgctcatcatcttcctggccctgggggtgctcatcttcgccaccatgatttactacgctgagcgcattggcgccgaccccgatgacatcctgggctccaaccacacctacttcaagaacatccccattggcttctggtgggctgtggtcaccatgacgaccctgggctatggagacatgtaccccaagacgtggtcggggatgctggtcggggcgctgtgtgccctggcgggggtgctgaccatcgccatgcctgtgcccgtcattgtcaacaactttggcatgtactattcgctggccatggccaagcagaagctgcccaagaagaagaacaaacacatcccccggcccccgcaaccgggctcgcccaactactgcaagcctgacccacccccgccacccccgccccacccgcaccacggcagcgggggcatcagcccgccgccacccatcaccccaccctccatgggggtgactgtggccggggcctacccagcggggccccacacgcaccccgggctgctcagggggggagcgggtgggctggggatcatggggctgcctcctctgccagcccccggcgagccttgcccgttggctcaggaggaggtgattgagatcaaccgggcagatcctcgccccaatggggatccggcagcagctgcgcttgcccacgaggactgcccagccattgaccagcctgccatgtccccggaagacaagagccccatcacgcctggaagccgtggccgctatagccgggaccgagcctgcttcctcctcaccgactatgccccttcccctgatggctccatccgaaaagctcttgtcaccgcctgagacctcgcgagactttcggtcccccccgccccttccccccaggttacgagaaatcccgcagcctcagcagcatcgcgggcctgagcggggtgtccctgcgcctcgcgccccttgccaccccccctggctctccccgggccgcccgccgcgctcccccgaccctgccctccatcctttagcgctcccctcccccctgtggggggactcgggggtgaccgggaagaaggtcaaaggagctgggggtggggggtggggaaaagggtttttttaaaaaaaatcaaaaagtcattaataatatgcaaccgagatgacgatgccagcagacacccccgggcccctcacccccaacctgggcccccaggatggagagaggggccacagcccgtccccccaactcttccctccccaaaaaaagccttctcaggtctccacgagccataggacatccccctgccatcaacttgtgtaaataagtccaaattatgccagttacatcttggggcacctccccccacacactgcatgccttccctaacctggagcccccactccaagtccacctcagcaataagccgccaggggccgcatgcgcgggtttgaggggcaggcactctgggaagggggtggcacctcccgggggtcgggctggcctttaaggtctccagccttcccatccttcaccccaggaggacaaccaaccctgtgcgttgattaggagaaaacaaaccagaaactagaaacagtgtaggggaaggaggaacagttacccaagccccagatcggagttgagctcaggtggcgggagggcggggccgagttgagctcaggtggtgggagggcggggcgggctttggacctgctccctcagcctttaggagaattcctctggtgaatttcaccctctcatccgccccttcccccagggacctgctcgcctctattcttgctgcatggactcagacctcctatcccagaattcctgggatgatctggccctagcacacgaaattccccgactatctccctccattcccaggacatgagacctgcacccagaattctgagactgaccctggcacgccacatctcccaatccccacacactcctgcgacttaacctctgcacacagaggctccctgaaccaccctccctccccactcctgccaccccaaacacccccaccaaattccctgaactgcgtcccagcacttctcaaacctccaagacttgacccagctcttttcagctcaaattcagcctttgggatgctccaaatccttcccacaactgacatttcttggacacccccaaagcctcaggcctgttccgcacccatatccccaaagccctaacagacttgtccagcccaggttcccttgatgctagaacttccaagataggcgcaacctgtctgcaattccagggaaccagaccctccccaagcaccctctttgtcttacgcctaaccctgagtctcttccctgagatggtgccccaaaggtaccctcttcacagacaccagtgtttcccagagggttgtatttgtacctttggtggtgtgctaaggtttgaggcagtatgaggacaaacacttgttttaaaagttttgtctctaatacgcattttgtacagaagccgataagtgcaggcatcgctgcttggctaggacacggtttatttaggttaagagtgtttccatttaaagtagtccacagatgatcacagaggctgttcccgaagggaggaacactggagtatcagaagattgggaaccgacaacacccagctcggctgggatcccagccccccttccccagcggtcctcaccgcgtcacgctcgcgggtggaaaatcatttcccacctcctatcctggctcaaggatgcgctacctcccccaagcccagagaccacaccggtcccagactctttagcggaccccccttttggagccggggtcccacggaattagccacctccctccctctgctcccacggcctcaggaaccccccacccgagggtggatggggggcgtcactgagcacgattctcgatgcaacgattcctatgcaaggggcattttgagtcccccccatccttccctcggaccctaaaccctggtgaagcaggggtgaggggtggggcgggttttggtgggggcggggcaaagggctaggggctccagacaccagggtacggggtggggactgattatattgccaaagggttcaacttctttaacaagcccccccgtttcccctgaccttcacgaaagccgaaggaggcggggaaagggggtgagggtcttttccaaagggtactgacctcttcccaacgtctccccctgctcgccagtccgccacacgtacccagcttttgagttcagcttttcaaaataaccacaatcatgataaacttctacaaaacgtgattctcctcccctcccaccccatcccccaagtcaatagtgtgggattcggggagggagagagcgagctaaagggactctttccaagtccggctcccccttttccccccggccgccagggtgcctgcacctacacgcatgcgctgcatgacgcgccccccacacgcatgtcgcacccctcctgcgctccgggaacgcacggacacgggccagggggcggggcgattggggaggaatgaatggcggggggtcttcctgagctccgcggctcaccctccccaacacacacacacacacacacagagcaataagtttctctcactcaaatgtgggcggggcgggcctagcctgtcgctggtggggggagtggtgagggggcgctctcagggatgggggcggggttcggagacagtgtggggaggggaggtctgcaaatcgtccaactctggtgctaatggcgggtcttctcagcccacccgcagggcagggagggaggggtcggcgtggccccttccccaagcctcccccacgcccaccctgggtgcatgaaccgcccaatgcagaagctgccgcatgtcacccccctctccccaaagaaaaagtgtcatgcccccttcccacccaccctcactccccaccaaaataaacgtttccttttcatttaaaaa

SEQ ID NO: 319699 - DNA, 3049 bp, Artificial Sequence
  derived and/or modified sequence
accggtcccgcctcccttgacgccccgccccgcccctcctccctgctctcttagaaagagccaatcgctccgtctcattggcggccccgactcgtccagctgggtcgcgttagagtgcccgccccactcctcccagccacagccccgccccacctcccccaggccaatcagtttggttcctctcccctaagccacgcccccgctacctcgctcctcctcccacccaatcccgtcggtctctccccccgtgtccccgcccctgcgtccccgcccctcccgccccgccccccgtccaatgctgagctcagtctgcgtctcgtccttccgcgggcgccagggggccagcaagcagcagccggcgccaccgccgcagccgcccgagtccccgccgccgccaccgctgccgccgcagcagcagcagcctgcgcagcccggccccgccgcgtccccggcgggccccccggcaccccgcgggcccggggaccggcgcgccgagccatgccccgggctgccggcggcggccatggggcggcacggcggcggcggtggcgacagcggcaagatcgtgatcaacgtgggcggcgtgcgccatgagacgtaccgctcgacgctgcgcaccctgccggggacgcggctggccggcctgacggagcccgaggcggcggcacgcttcgactacgacccgggcgccgacgagttcttctttgaccggcacccgggagtcttcgcgtacgtgctcaactactaccgcaccggcaagctgcactgcccagccgacgtgtgcgggcccctgtttgaggaggagctcggcttctggggcatcgacgagaccgacgtggaggcctgctgctggatgacctaccggcagcatcgcgacgctgaggaggcgctcgactccttcgaggcgcccgaccccgcgggcgccgccaacgccgccaacgccgcaggcgcccacgacggaggcctggacgacgaggcgggcgcgggcggcggcggcctggacggagcgggcggcgagctcaagcgcctctgcttccaggacgcgggcggcggcgccggggggccgccagggggcgcgggcggcgcgggcggcacatggtggcgccgctggcagccccgcgtgtgggcgctcttcgaggacccctactcgtcgcgggctgccaggtatgtggccttcgcctccctcttcttcatcctcatctccatcaccaccttctgcctggaaacccatgagggcttcatccatattagcaacaagacggtgacccaggcctccccgatccccggggcacctccggagaacatcaccaacgtggaggtggagacggagcccttcctgacctacgtggagggggtgtgcgtggtctggttcaccttcgagttcctcatgcgcatcaccttctgcccagacaaggtggagtttcttaaaagcagcctcaacatcatcgactgtgtggccatcctgcccttctatctcgaggtgggcctctcgggcctcagctccaaggccgccaaagacgtgctgggcttcctgcgggtggtccgcttcgtccgcatcctgcgcatcttcaagctgacccggcacttcgtggggctgcgcgtgctgggacacacgctccgcgccagcaccaacgagttcctgctgctcatcatcttcctggccctgggggtgctcatcttcgccaccatgatttactacgctgagcgcattggcgccgaccccgatgacatcctgggctccaaccacacctacttcaagaacatccccattggcttctggtgggctgtggtcaccatgacgaccctgggctatggagacatgtaccccaagacgtggtcggggatgctggtcggggcgctgtgtgccctggcgggggtgctgaccatcgccatgcctgtgcccgtcattgtcaacaactttggcatgtactattcgctggccatggccaagcagaagctgcccaagaagaagaacaaacacatcccccggcccccgcaaccgggctcgcccaactactgcaagcctgacccacccccgccacccccgccccacccgcaccacggcagcgggggcatcagcccgccgccacccatcaccccaccctccatgggggtgactgtggccggggcctacccagcggggccccacacgcaccccgggctgctcagggggggagcgggtgggctggggatcatggggctgcctcctctgccagcccccggcgagccttgcccgttggctcaggaggaggtgattgagatcaaccgggcagatcctcgccccaatggggatccggcagcagctgcgcttgcccacgaggactgcccagccattgaccagcctgccatgtccccggaagacaagagccccatcacgcctggaagccgtggccgctatagccgggaccgagcctgcttcctcctcaccgactatgccccttcccctgatggctccatccgaaaagctcttgtcaccgcctgagacctcgcgagactttcggtcccccccgccccttccccccaggttagcaattgggaatggctgggagggggtgtccccaagacactgggcttcaaatctccccccaagccctccctcctacgatcaagacaccttttgtccagacagctcccttagcgttgcctggaaaagccacagagctccctgcgggggtgcagaaccctgcaggcagccccaggctttgcagaaaccacacacactgttgctggatcttgagtcccattagctgtgagatgcctgtgagagccttcccgcacccgtcagaagctcagagccttcttggaccctttaaagatgtccctctccccagccctccgcctcaccgccccccacccccgaccccgtccttagaatcttctggaggagcctccctccccccccacccccccccactgctcctggagttctcatcggattccccaagggcactgccagcttcgctccactcagcccccttgcagaccccaccccctgcctgctctctttccctacaactaggtcagcccccagccccgctacggcggccgc

SEQ ID NO: 319700 - DNA, 2187 bp, Artificial Sequence
  derived and/or modified sequence
atgctcagcagtgtgtgcgtctccagctttcgagggcgtcagggggctagcaaacaacagcctgcgcctcctccacagcctcccgaaagccctccaccacctccccttccccctcaacagcaacagccggcacaaccaggccctgcagcctcaccggctggaccccctgcacccaggggtccaggagacaggcgggcagagccgtgtcccggactgcccgctgctgccatgggcagacacggcggaggaggaggtgatagtgggaagatcgtcatcaacgtgggcggtgtccgccatgagacctataggtccactctcagaaccctccccggtacaaggttggccggtctgacggagcctgaggcagcagccaggttcgattacgatccaggggcagatgagttcttttttgatcgccatcctggtgtgtttgcctacgtgctgaactactatcgcaccgggaagctacactgtcctgccgacgtctgtggcccactcttcgaagaggagctgggcttttgggggattgatgagacggatgtcgaagcctgctgctggatgacctatcgccaacacagagacgcagaagaggcgttggacagctttgaggcccctgatcctgccggagccgctaacgccgctaacgcggctggcgctcacgatggaggactcgatgacgaggctggagctggagggggagggcttgatggtgctgggggagaattaaagagactgtgtttccaggatgccggtggcggtgcagggggacctcctggtggagccggtggggcaggtggcacatggtggaggcgttggcagccacgagtctgggcactgttcgaagacccatactcctcacgtgcggcacgctacgtggcctttgccagcctgttcttcatcctaatctccatcaccaccttctgtcttgaaacccatgaggggttcatccacatctctaacaaaacagttacccaagcgtcgcccatccccggagctccccctgagaatataactaacgtggaggttgagaccgagcccttcctcacctacgtggagggcgtgtgcgtggtgtggttcactttcgagttcctcatgagaattactttttgtccagataaggtggagttcctgaagagcagtttaaacatcatcgactgcgtagcaatcctccccttctacctcgaggtggggctatctggactttcaagcaaggcggcaaaagatgtcctgggttttttaagggtcgtgagatttgtcaggattctgcgaatttttaagttgaccagacacttcgtgggcctgagggtccttggccatacgctccgagcctcaaccaacgagttcttgctgctcattatcttcctcgctctgggggttttgatcttcgctacaatgatctactatgcagaacgaataggagcagatcccgatgatattctgggctccaaccacacgtactttaagaacattccaatcggattctggtgggccgtggtcactatgaccactctcgggtacggggacatgtacccaaaaacatggtctggcatgctcgtgggcgctctgtgcgctctggctggtgtcctgacaatcgcaatgcccgttcccgtaatcgtcaacaacttcggcatgtactacagtcttgcaatggctaaacagaaactgcctaagaaaaagaataaacacattcctagaccgcctcaacccggatcccccaattattgtaagcctgacccaccgccacccccaccacctcaccctcaccacggatctgggggaatctccccgccaccaccaatcacgcctccatccatgggagttacggtcgctggcgcttaccccgcaggcccacatacgcacccgggtctgctgaggggcggtgccggtggtctcgggattatgggtctgccccctctgccggctccaggagagccctgcccgctcgcccaagaagaagtcatcgagatcaatcgagctgatcctaggcccaacggcgaccccgctgctgccgctttggcacatgaagattgtcccgctatcgaccagccagccatgtcccctgaagataagagccccatcactcctggaagcagaggcagatatagccgggacagagcatgctttctgttgaccgactacgccccaagcccagacggttctatacgtaaagcccttgtgacggcctag

SEQ ID NO: 319701 - DNA, 1629 bp, Artificial Sequence
  derived and/or modified sequence
atgacctacagacagcacagagacgcagaggaggccttagatagcttcgaagccccagatcctgctggcgcagccaacgctgctaacgccgctggagcacacgacgggggtctggacgacgaggcgggagccggtgggggagggcttgatggtgccggtggagaactgaagaggttatgcttccaggatgccggtggcggagcagggggaccaccaggcggagccggtggcgctggaggtacctggtggcggagatggcagccacgagtctgggcgttgtttgaagacccctatagtagcagagccgctcgatacgtggccttcgcgtctttattttttattctgatttcgattacgaccttctgcctggagactcacgagggatttatccacatcagcaacaaaaccgtcacccaggctagccctatacccggtgccccacctgagaacattactaacgtagaggtggagacagagcctttccttacatatgtagagggagtctgtgttgtctggtttaccttcgagtttttgatgagaatcaccttttgtcctgacaaggttgagttcctcaagtcctcactgaacatcattgactgcgtagccattctgccattctacctggaagtgggactctcgggattgagctcaaaggcagccaaggacgtgctgggatttcttcgtgtggtgcgattcgttcggatcctgcggattttcaaactaacgcgtcactttgtgggcttgcgggtgttgggacacactttaagggcaagcaccaacgaatttctgctgctcattattttccttgccttaggcgtgcttatatttgccactatgatctattacgctgaaagaattggggctgacccagacgacattctcggctcaaatcacacgtactttaaaaatatccctattggcttctggtgggccgttgtcactatgacaacattgggctatggtgacatgtaccctaagacttggagcgggatgttggtgggtgcactgtgcgctttagcaggcgttcttactatagcgatgcccgtacctgtgatcgttaacaacttcgggatgtactactcactggctatggcaaaacagaaattgccaaaaaagaaaaataagcacatcccaaggccaccgcaacctggatcccctaattactgcaagcccgacccaccccctcctccaccaccccatccacatcacggcagtgggggaatttccccaccacctcctattacccccccatctatgggcgttactgtggcaggtgcgtatcccgcagggcctcacacccacccgggactcttaagaggaggtgctggtggactggggatcatgggcttaccgcctctgccagctccaggtgagccttgcccactagcacaggaagaagtgatcgagatcaacagggctgaccctcggcctaacggtgatcccgctgcggcagctttggcccacgaggactgtccagccattgatcagcctgccatgagccctgaagacaagtcacccattaccccgggaagcaggggacgctatagcagagacagagcgtgcttcctcttgacagattacgcccctagcccagacggctcaatcagaaaggcgctcgtgactgcttag
